United States Patent Application Publication US 2010/0291551 A1 - sequence listing, part 2

SEQ ID NO: 1439 - DNA, 3071 bp, Homo sapiens
gatctcggctcactgtaacctccacctcccgggctcaagcctcagcctcccgagtagctgggattacagggtttcatcctgtcaccccggctggagtgcagtggagcctccacctcctcggctcaagcaaccatcccacctcagcctcccgagcagctgggactacagatgcgcaccaccactcccggctccccacactataatcagacgccccgcccgccgcttcgacctggcgcatgcgtggtgcgcacgcgtcccgtctcctcggccgacaagctctcgcgagacgagccgtgcaggctgaaaaaatggcgccacccagtacccgggagcccagggtcctgtcggcgaccagcgcaaccaaatccgacggagagatggtgctgccaggcttcccggacgccgacagctttgtgaagtttgctcttgggtccgtggtggcagtcaccaaggcatctgggggcctaccacagtttggcgatgagtatgatttttaccgaagttttcctggcttccaagcattttgcgaaacacagggagacaggttgcttcagtgcatgagcagagtaatgcagtaccatgggtgtcgcagcaacattaaggatcgaagtaaagtgactgagctggaagacaagtttgatttactagttgatgccaatgatgtaattctggagagagtgggtattttactggatgaagcctcaggtgtaaacaagaatcaacagcctgtcctccctgccggcttgcaggtccccaaaacggtagtgtccagctggaaccgtaaggcagcagaatatggcaaaaaagcaaaatctgaaactttccggctgcttcatgcaaaaaatatcatccgacctcagctcaagtttcgagagaagattgacaattccaacacaccatttcttcctaaaatcttcatcaaacccaatgctcagaaacctctccctcaagctctctctaaggaaaggcgggaacgcccacaggatcgtcctgaggacttggacgtcccccctgcactggctgatttcatccatcagcagagaacccagcaggttgagcaagacatgtttgcacatccttatcaatatgaactaaatcactttaccccagcagatgcagtgcttcaaaagccacaaccccagttatacagacctatagaagagacaccatgccatttcatatcctccctggatgaactcgtggaactcaacgaaaagctcttgaattgtcaggaatttgcagttgacttggagcaccactcttacaggagcttcctgggactgacctgcctgatgcaaatttctactcggacggaagacttcatcattgacaccctcgagcttcgaagtgacatgtacattctcaatgagagcctcacagacccagccatcgttaaggtctttcatggtgctgattcagacatagaatggctacagaaagactttgggttgtatgtagtaaacatgtttgatactcatcaggcagcacgccttcttaacctgggcaggcactcactcgatcatctcctgaaactctactgcaacgtggactcaaacaagcaatatcagctggctgattggagaatacgccctctgcccgaggagatgctcagctacgcccgggatgacacccattacctgctatatatctatgacaaaatgaggctggagatgtgggagcgcggcaacgggcagccggtgcagctgcaggtggtgtggcaacggagcagggacatctgcctcaagaaattcatcaaacctatcttcacggatgagtcctaccttgaactctataggaagcagaagaagcaccttaacacacagcagttgacagcctttcagctgctgtttgcctggagggataaaacagctcgcagggaagatgaaagttacggatatgtactgccaaaccacatgatgctgaaaatagctgaagaactgcctaaggaacctcagggcatcatagcttgctgcaacccagtaccgccccttgtgcggcagcagatcaacgaaatgcaccttttaatccagcaggcccgagagatgcccctgctcaagtctgaagttgcagccggagtgaagaagagcggaccgctgcccagtgctgagagattggagaatgttctctttggacctcacgactgctcccatgcccctccggatggctatccaatcatcccaaccagtggatctgtgccagttcagaagcaggcgagcctcttccctgatgaaaaagaagataacttgctgggtaccacatgcctgattgccacagctgtcatcacgttatttaatgaacctagtgctgaagacagtaaaaagggtccattgacagttgcacagaaaaaagcccagaacatcatggagtcctttgaaaatccatttaggatgtttctgccctcactgggacaccgtgctcccgtctctcaggcagcgaagttcgatccatcaaccaaaatctatgaaatcagcaaccgctggaagctggcccaggtacaagtacaaaaagactctaaagaagctgtcaagaagaaggcagctgagcaaacagctgcccgggaacaggcaaaggaggcgtgcaaagctgcagcagaacaggccatctccgtccgacagcaggtcgtgctagaaaatgctgcaaagaagagagagcgagcaacaagcgacccaaggaccacagaacagaaacaagagaagaaacgactcaaaatttccaagaagccaaaggacccagagccaccagaaaaagagtttacgccttacgactacagccagtcagacttcaaggcttttgctggaaacagcaaatccaaagtttcttctcagtttgatccaaataaacagaccccgtctggcaagaaatgcattgcagccaaaaaaattaaacagtcggtgggaaacaaaagcatgtcctttccaactggaaagtcagacagaggcttcaggtacaactggccacagagatagtcctggaagacacgtggcgcctgtggaccggaagcaccaaatgctggtgctgcttttgtacatacatatttttaaaccattaaaattcttcctgaagaaagctga

SEQ ID NO: 1440 - protein, 909 aa, Homo sapiens
MRGAHASRLLGRQALARRAVQAEKMAPPSTREPRVLSATSATKSDGEMVLPGFPDADSFVKFALGSVVAVTKASGGLPQFGDEYDFYRSFPGFQAFCETQGDRLLQCMSRVMQYHGCRSNIKDRSKVTELEDKFDLLVDANDVILERVGILLDEASGVNKNQQPVLPAGLQVPKTVVSSWNRKAAEYGKKAKSETFRLLHAKNIIRPQLKFREKIDNSNTPFLPKIFIKPNAQKPLPQALSKERRERPQDRPEDLDVPPALADFIHQQRTQQVEQDMFAHPYQYELNHFTPADAVLQKPQPQLYRPIEETPCHFISSLDELVELNEKLLNCQEFAVDLEHHSYRSFLGLTCLMQISTRTEDFIIDTLELRSDMYILNESLTDPAIVKVFHGADSDIEWLQKDFGLYVVNMFDTHQAARLLNLGRHSLDHLLKLYCNVDSNKQYQLADWRIRPLPEEMLSYARDDTHYLLYIYDKMRLEMWERGNGQPVQLQVVWQRSRDICLKKFIKPIFTDESYLELYRKQKKHLNTQQLTAFQLLFAWRDKTARREDESYGYVLPNHMMLKIAEELPKEPQGIIACCNPVPPLVRQQINEMHLLIQQAREMPLLKSEVAAGVKKSGPLPSAERLENVLFGPHDCSHAPPDGYPIIPTSGSVPVQKQASLFPDEKEDNLLGTTCLIATAVITLFNEPSAEDSKKGPLTVAQKKAQNIMESFENPFRMFLPSLGHRAPVSQAAKFDPSTKIYEISNRWKLAQVQVQKDSKEAVKKKAAEQTAAREQAKEACKAAAEQAISVRQQVVLENAAKKRERATSDPRTTEQKQEKKRLKISKKPKDPEPPEKEFTPYDYSQSDFKAFAGNSKSKVSSQFDPNKQTPSGKKCIAAKKIKQSVGNKSMSFPTGKSDRGFRYNWPQR

SEQ ID NO: 1441 - DNA, 532 bp, Homo sapiens
tgaggaagtaatggggccccatacagggacatctgtgcgcagctgagagaaatgggcctggttttcagactgcccacagggaccaggatcgctatgtattcatttatgtgagccatgagccctagcccctcatcgtgacaggggtgctctcacagccaaggcttccctgagtgtcatggtcccggcctcgctgtgagcctgtgatgtgtggtaactcattgacctgaccgcaggtctctctcatctcttacctttcaggaaacagcaaatccaaagtttcttctcagtttgatccaaataaacagaccccgtctggcaagaaatgcattgcagccaaaaaaattaaacagtcggtgggaaacaaaagcatgtcctttccaactggaaagtcagacagaggcttcaggtacaactggccacagagatagtcctggaagacacgtggcgcctgtggaccggaagcaccaaatgctggtgctgcttttgtacatacatatttttaaaccattaaaattcttcctgaagaaagctg

SEQ ID NO: 1442 - protein, 54 aa, Homo sapiens
TVGGKQKHVLSNWKVRQRLQVQLATEIVLEDTWRLWTGSTKCWCCFCTYIFLNH

SEQ ID NO: 1443 - DNA, 2682 bp, Homo sapiens
gttttatgagttgctggggtagctgatcagtactgtctgcccttgggaagaaatgaggtgaggaaaaagatatgcaaaggaatggactcctggatgggcctgtcttctcagcagaggaggaggtcagaaacaggcgccaccagcgtgctaaaatcctccaggagcagttcttaccttgccagacggggtctgtttatttggatcaaactgagaagaaactttggatttgctgtttcctgaaagttgagtggtctggcatatttaccataaacacagtggaagaaggttaagaggaattacaatatcaatcttgtggaggtttcggaaatgaggtagacactaatagccaagctaaggtgaaccggaaagaagtcaggacttaatataaagcacagggcaagccccctaagatatccaaggaagatcctgaccacaagcaggggcatcgtttttcaaaggaaaaaggagaaaagctggcacataccacgacctgctgtcggacggagatggcctgttctgctgcagctttgcacgcctcctttgcctgttcccgggcagctgcaagggagagaacttgtctctggagttggtgaatccagcaaccaccctcccctccatctccatccccctccgacttggcctagccacaggggttgtcacggctgattcctcctccctctcaggtccccggtcccccatctctgcaggacaggctgcctcagagctcaggctcaggtgctctgcccaccttcagctacacgtgagctgatcctccccagccctgcctgctcctcttctgtgaacctaaatgctcagtggcctgtggacctgagggcgtttaacaggatcgtcaccatcaccatcgtggacaaacctgctcaaaccagctactttggctgccagcaactccagctttccagctgctcaggacaaaaccttcatccaaggttcccttcccttttctcacatgccacatccacctcatcatcaaatgctgtcagctttgctatgggacagatcaaggctctgacagcttctcaccacctcctctgctcccacgctggtctcaaagccaccatcccctctcgcctgagccactgccatgtctcctatcccttcctggactcccatcctgtcctctatagtctactgttgacacagcagccagagtgccacatgtcagtcacttccccccgtctgctcagcaccctcctggcttctgaactcagagtaaaaggcagcgtcatcccgtgggcctctgctggctccttccccatctcctgctcttctctacccgctctgctcatgcaggcccacttgctgctgctcagcatgcccagtgaactagccccagggcctctgggctcgctgtgctgtggctccagaactcttctctaggtcactgcaggtctcgtcaatgtcgcattcattagactgccttctccaaccaccaacgagacagctacagcacctccagcactccccaccaatctctctgcacagcacctgctgccatctgccaggatagatactgattgcccaccatccctcagcagaagggaagccccacaggggcttcattcatcgccgtatctggcacttggctgaaacagcgggtgtgcaacagccattctttaacagccgactgagttgcaaggaagtgagtgttacctgtttgctcagctgccttcttcttgacagcttctttagagtctttttgtacttgtacctgggccagcttccagcggttgctgatctataatgaaagcaaatataacaaaaaaaaccctccaaagtcagccacctaagtctgtcttacttttcatgaggtgacgaagggcaggttaacctaagaagtacacacattctaagtcataaattttcaaatctaagggcatgaaaaataaatttcatgctggctttattgctaaaatccctattaaggacaaagtgctactgtcctccaggcactgggccatccatcatctcattcaatccctctgtaaccctgggaaaaaggtactgtcatcaccctctctttagagatgagcaaacagactccgggagagtaaataacttgtccaagggacatggtcagtaaatgacagaagcagactcaaggctgggcttccgcaagtctgctgtgtttctttatgacaccccacggacctatggcgttacaacacatggaggtgacactgggcataacacacaggacgtgcagttgttcagtgtgacataacccgtggggggaaaagaggagagaaggcagaagccccacctgattccccatttccaaaaatagcaagctaactcagggacaggaacggggctgggggacctctcggttttgcctaacaaaagagctctgctgccacacagaggaagccagtcgcccatgtcatcagagcagacgcttcctaaagggaggaaggaggctgcgaacaacagttcacgttctggctctggggaacatctcaagagggtctaggggaggtgtgctctcattcttactcataatgctggtaaaaacaagccagataagtaagatagagtgttttaaaattaaagctgtcacctttaagagccttaaagtaacagacatctataaaaatgcatcaagctgtatatttaatatttgtgtactttactacatatagattaaacctcaatttaaaaacc

SEQ ID NO: 1444 - protein, 72 aa, Homo sapiens
MQRNGLLDGPVFSAEEEVRNRRHQRAKILQEQFLPCQTGSVYLDQTEKKLWICCFLKVEWSGIFTINTVEEG

SEQ ID NO: 1445 - DNA, 1018 bp, Homo sapiens
atccaagatagatcaactctccctaaaggctgacagtgaactcttggggccgttttattctctgaggttagcaaggagtcatctactagccattcaggaggccagctgggaagacaaaataggcaccccaaactcagcaacttcataacaccttcctctccccgcctgaagccttaaactgcatcaagtcaaagaaacctggggcaaatccttaacatgtttttgactgcagtaaatccacagccactctctactccgagctggcagattgagaccaagtattcaacgaaagtgctcactggaaattggatggaagagaggagaaagttcaccagagacactgacaagacaccccaatccatttacagaaaagaatacatccccttcccagaccacagaccagaccagatctccaggtggtatgggaagaggaaagttgaggggctaccttacaaacacctgatcacccaccaccaggagcccccacatcgctacctgatcagcacctatgacgaccattacaaccggcatggttacaacccggggctgcctccactccgcacttggaatggacagaagttgctgtggctgccagagaagtctgactttccccttcttgctccccctacaaactatggactctatgagcagctcaagcagagacagctcacacccaaggctggcctgaagcagagcacttatacttcatcctaccccagaccaccgttgtgcgctatgtcctggagggagcatgcggtcccggtccctccccatcgcctgcatcctttcccacacttctgagagctgccaccccaggagcagctcagatagaatcagctggagaccacagcatcactggacttgccagacaacaagtggcgcagataaactcagagtacgagatctggcccgtcaaaggtgctctcagaatcatcatctgcatttggcggtacctgtcccccctcaaaacccacaggttcctttcttttccatccaacaattaaagatctttgacact

SEQ ID NO: 1446 - protein, 194 aa, Homo sapiens
MFLTAVNPQPLSTPSWQIETKYSTKVLTGNWMEERRKFTRDTDKTPQSIYRKEYIPFPDHRPDQISRWYGKRKVEGLPYKHLITHHQEPPHRYLISTYDDHYNRHGYNPGLPPLRTWNGQKLLWLPEKSDFPLLAPPTNYGLYEQLKQRQLTPKAGLKQSTYTSSYPRPPLCAMSWREHAVPVPPHRLHPFPHF

SEQ ID NO: 1447 - DNA, 1522 bp, Homo sapiens
atccaagatagatcaactctccctaaaggctgacagtgaactcttggggccgttttattctctgaggttagcaaggagtcatctactagccattcaggaggccagctgggaagacaaaataggcaccccaaactcagcaacttcataacaccttcctctccccgcctgaagccttaaactgcatcaagtcaaagaaacctggggcaaatccttaacatgtttttgactgcagtaaatccacagccactctctactccgagctggcagattgagaccaagtattcaacgaaagtgctcactggaaattggatggaagagaggagaaagttcaccagagacactgacaagacaccccaatccatttacagaaaagaatacatccccttcccagaccacagaccagaccagatctccaggtggtatgggaagaggaaagttgaggggctaccttacaaacacctgatcacccaccaccaggagcccccacatcgctacctgatcagcacctatgacgaccattacaaccggcatggttacaacccggggctgcctccactccgcacttggaatggacagaagttgctgtggctgccagagaagtctgactttccccttcttgctccccctacaaactatggactctatgagcagctcaagcagagacagctcacacccaaggctggcctgaagcagagcacttatacttcatcctaccccagaccaccgttgtgcgctatgtcctggagggagcatgcggtcccggtccctccccatcgcctgcatcctttcccacacttctgagagctgccaccccaggagcagctcagatagaatcagctggagaccacagcatcactggacttgccagacaacaagtggcgcagataaactcagagtacgagatctggcccgtcaaaggtgctctcagaatcatcatctgcatttggcggtacctgtcccccctcaaaacccacaggttcctttcttttccatccaacaattaaagatctttgacactattgcagggctatgtacgtgcacaagagtctactcccatggaggaaatgaatctgatgatgaaacccatcatgaaaactccacagaatgactgaatgtggttcccaggagggcagtgctgcagagctggcaatggggaaggaccccagcttgtctgtcattgccaaggcagaggaaggcgtgctctggccccacggggctcagaagaaggggaaaacacatggcatttcctttgtctctgagctcgcaaatctttgtgtgcgaaagtaaaggatgtcatgagagcaacgggcaggggttgacggatgatgaatgaagacctggcctgcctaggtagggccagggagaatcaggtaggtcaaggccagaaagctgagggagattacccagctgaagggacaggttgggagggaagagagggtggcttgggccatgggggcagcacgtttgaagtctctgacttgggaagaagctgagcaaattccttaaaagtccagaaagacca

SEQ ID NO: 1448 - protein, 194 aa, Homo sapiens; identical to SEQ ID NO: 1446

SEQ ID NO: 1449 - DNA, 1418 bp, Homo sapiens
ccaagatagatcaactctccctaaaggctgacagtgaactcttggggccgttttattctctgaggttagcaaggagtcatctactagccattcaggaggccagctgggaagacaaaataggcaccccaaactcagcaacttcataacaccttcctctccccgcctgaagccttaaactgcatcaagtcaaagaaacctggggcaaatccttaacatgtttttgactgcagtaaatccacagccactctctactccgagctggcagattgagaccaagtattcaacgaaagtgctcactggaaattggatggaagagaggagaaagttcaccagagacactgacaagacaccccaatccatttacagaaaagaatacatccccttcccagaccacagaccagaccagatctccaggtggtatgggaagaggaaagttgaggggctaccttacaaacacctgatcacccaccaccaggagcccccacatcgctacctgatcagcacctatgacgaccattacaaccggcatggttacaacccggggctgcctccactccgcacttggaatggacagaagttgctgtggctgccagagaagtctgactttccccttcttggtacctttataattcagggtattcctctgcgttggtctgtaaagttgcacagaccaacggagctgtacctgcctcatgcagaaggagccacacaggtgaccctggctccaggagagcagcggatgacatagtaggggctgagttctattgtaccctcagggctgcctcctgtcctttccctttgacctggggtaatcttggctgtgtaatgaagccatcacctgtgccccatggtggcgggcttagagcacaggtggcagggagcaacatccacgcatccttcctcccagtcttatttactacatgaataatgacaatatttcccaggtagtgctccctgctgcaatgataacaaacactgaggaatttctggactcggggagttgacattccaggggggaaacagataagacaccattaaaaagtaagaacacttaagatcacatagataattttagacaggagtgtgcgctataaagaaaacaggtaatggagagaaagtgaggtggtgaatttgtgaacctcctttggttcacaaattcctccttggaaaagtgaggggtggtctttgttgaggagatagagttgaattgggaagaagggagccatacagggattgagggggaggacattccagaggaaggaacagtaaatgaaaaagttctaaggcaggaatggaggaggatcatgtaggggttcatagggcacagtgaagggaatgaaatttgtcctatccacaatcccaagacttggaatgcacttttgtaggagagtgccttgatgtgatttacatttcaagcc

SEQ ID NO: 1450 - protein, 177 aa, Homo sapiens
MFLTAVNPQPLSTPSWQIETKYSTKVLTGNWMEERRKFTRDTDKTPQSIYRKEYIPFPDHRPDQISRWYGKRKVEGLPYKHLITHHQEPPHRYLISTYDDHYNRHGYNPGLPPLRTWNGQKLLWLPEKSDFPLLGTFIIQGIPLRWSVKLHRPTELYLPHAEGATQVTLAPGEQRMT

SEQ ID NO: 1451 - DNA, 402 bp, Homo sapiens
ctctgaggttagcaaggagtcatctactagccattcaggaggccagctgggaagacaaaataggcaccccaaactcagcaacttcataacaccttcctctccccgcctgaagccttaaactgcatcaagtcaaagaaacctggggcaaatccttaacatgtttttgactgcagtaaatccacagccactctctactccgagctggcagattgagaccaagtattcaacgaaagtgctcatggacttgccagacaacaagtggcgcagataaactcagagtacgagatctggcccgtcaaaggtgctctcagaatcatcatctgcatttggcggtacctgtcccccctcaaaacccacaggttcctttcttttccatccaacaattaaagatctttgacacta

SEQ ID NO: 1452 - protein, 37 aa, Homo sapiens
MFLTAVNPQPLSTPSWQIETKYSTKVLMDLPDNKWRR

SEQ ID NO: 1453 - DNA, 785 bp, Homo sapiens
taggcaccccaaactcagcaacttcataacaccttcctctccccgcctgaagccttaaactgcatcaagtcaaagaaacctggggcaaatccttaacatgtttttgactgcagtaaatccacagccactctctactccgagctggcagattgagaccaagtattcaacgaaagtgctcactggaaattggatggaagagaggagaaaggggctaccttacaaacacctgatcacccaccaccaggagcccccacatcgctacctgatcagcacctatgacgaccattacaaccggcatggttacaacccggggctgcctccactccgcacttggaatggacagaagttgctgtggctgccagagaagtctgactttccccttcttgctccccctacaaactatggactctatgagcagctcaagcagagacagctcacacccaaggctggcctgaagcagagcacttatacttcatcctaccccagaccaccgttgtgcgctatgtcctggagggagcatgcggtcccggtccctccccatcgcctgcatcctttcccacacttctgagagctgccaccccaggagcagctcagatagaatcagctggagaccacagcatcactggacttgccagacaacaagtggcgcagataaactcagagtacgagatctggcccgtcaaaggtgctctcagaatcatcatctgcatttggcggtacctgtcccccctcaaaacccacaggttcctttcttttccatccaacaattaaagatctttgacact

SEQ ID NO: 1454 - protein, 156 aa, Homo sapiens
MFLTAVNPQPLSTPSWQIETKYSTKVLTGNWMEERRKGLPYKHLITHHQEPPHRYLISTYDDHYNRHGYNPGLPPLRTWNGQKLLWLPEKSDFPLLAPPTNYGLYEQLKQRQLTPKAGLKQSTYTSSYPRPPLCAMSWREHAVPVPPHRLHPFPHF

SEQ ID NO: 1455 - DNA, 1867 bp, Homo sapiens
atgaatgaagacctggcctgcctaggtagggccagggagaatcaggcagctgggatggtcaagggacaggggcagggggaatccgatgagggccacagactattcatcaggatgagcctccaggccccacctagactcctggagctggctgagcagagtctgctgagagaccgggccttggccatccccaccctggaggagctgcccagggagctctttcccccactgttcatggaggcctttaccaggagatgctgcgagaccctgacaactatggtgcaggcctggcccttcacctgccttcctctagggtccctgatgaagtcatgtaatctagagatctttcgagctgtgctggaggggcttgatgcactgcttgcccagaaggttcgccccaggcggtggaaacttcaagtgttggacttgcggaatgtggatgagaacttctggggcatatggtctggagcttctgcactctccccagaggccctgagtaagagacgaacagcagggaactgtccaaggccgggtgggcagcagcccttgatggtgatcctagacctttgcttcaagaatgggatgctggatgaatgcctcacccacttcttagagtggggcaagcagagaaaaggcttactgcacgtgtgttgcaaggagctgcagatttttggaatagccatccacaggatcatagaggtcctgaacacggtggagctagactgtatccaggaggtggaagtgtgctgcccgtgggagctgtccattcttataaggttcgccccttacctgggccagatgaggaatctccgcaaacttgttctcttcaacatccatgtctctgcctgcattcccctagacaggaaggagcagtttgtcatccagttcacctctcagttcctcaagctggactacttccagaagctttacatgcactctgtctctttcctcgaaggccacctggaccagctgctcaggtgtctccaggcccccttggagacagtcgtaatgaccgaatgcctgctgtcagagtcggacctgaagcatctctcttggtgcccgagcatccgtcagctaaaagagctagacctgaggggcatcacactgacccatttcagtcctgagcccctctcagttctgctggagcaagctgaggccaccctgcagaccctggacttagaggactgtgggatcgtggattcccaactcagcgccatcctgcctgccctgagccgctgctcccagctcagcaccttcagcttctgtgggaacctcatctccatggccgccctggagaacctgctgcgccacaccgtcgggctgagcaagctaagcctggagctgtatcctgcccctctggagagttatgatgcccagggtgctctctgctggggaagattttctcaacttggggctgagctgatgaagacactgagggacttaaggcagcccaagattattgtgttcagcactgtcccctgccctcgctgtggcatcagggcctcctatgacctggagcccagtcactgtctgttgaatgcctgctgtcagggtggatttatttaaagctttcttctggtcatttggcaactgaatcctaggccatgagtgtatgtcaaagggagcacagacccatcgtttcatatgcctgctcaatgtgaacgggaaaggaaaggggatgcaggaagggagggactgggggaaaagttgagttggagtcaataggagctttagagacctgtgtcccagagaatcagaaatgggaatctgaattgctagaatgagaatcaggtaggagagacacatgagacagttacccctgcacggatggttgtaaagaaacagtcagaaataaagggaagctgagtgg

SEQ ID NO: 1456 - protein, 520 aa, Homo sapiens [sequence omitted]

SEQ ID NO: 1457 - DNA, 1906 bp, Homo sapiens
atggaaggagccctggacctttctcccagtgatgcctcccctactgtcaagttcctctggccctggagcttccagggacccctgcatcctttccttcctgcagccctgcctttgccaaagctccatgcatttgcctccaaattcatcaggatgagcctccaggccccacctagactcctggagctggctgagcagagtctgctgagagaccgggccttggccatccccaccctggaggagctgcccagggagctctttcccccactgttcatggaggcctttaccaggagatgctgcgagaccctgacaactatggtgcaggcctggcccttcacctgccttcctctagggtccctgatgaagtcatgtaatctagagatctttcgagctgtgctggaggggcttgatgcactgcttgcccagaaggttcgccccaggcggtggaaacttcaagtgttggacttgcggaatgtggatgagaacttctggggcatatggtctggagcttctgcactctccccagaggccctgagtaagagacgaacagcagggaactgtccaaggccgggtgggcagcagcccttgatggtgatcctagacctttgcttcaagaatgggatgctggatgaatgcctcacccacttcttagagtggggcaagcagagaaaaggcttactgcacgtgtgttgcaaggagctgcagatttttggaatagccatccacaggatcatagaggtcctgaacacggtggagctagactgtatccaggaggtggaagtgtgctgcccgtgggagctgtccattcttataaggttcgccccttacctgggccagatgaggaatctccgcaaacttgttctcttcaacatccatgtctctgcctgcattcccctagacaggaaggagcagtttgtcatccagttcacctctcagttcctcaagctggactacttccagaagctttacatgcactctgtctctttcctcgaaggccacctggaccagctgctcaggtgtctccaggcccccttggagacagtcgtaatgaccgaatgcctgctgtcagagtcggacctgaagcatctctcttggtgcccgagcatccgtcagctaaaagagctagacctgaggggcatcacactgacccatttcagtcctgagcccctctcagttctgctggagcaagctgaggccaccctgcagaccctggacttagaggactgtgggatcgtggattcccaactcagcgccatcctgcctgccctgagccgctgctcccagctcagcaccttcagcttctgtgggaacctcatctccatggccgccctggagaacctgctgcgccacaccgtcgggctgagcaagctaagcctggagctgtatcctgcccctctggagagttatgatgcccagggtgctctctgctggggaagattttctcaacttggggctgagctgatgaagacactgagggacttaaggcagcccaagattattgtgttcagcactgtcccctgccctcgctgtggcatcagggcctcctatgacctggagcccagtcactgtctgttgaatgcctgctgtcagggtggatttatttaaagctttcttctggtcatttggcaactgaatcctaggccatgagtgtatgtcaaagggagcacagacccatcgtttcatatgcctgctcaatgtgaacgggaaaggaaaggggatgcaggaagggagggactgggggaaaagttgagttggagtcaataggagctttagagacctgtgtcccagagaatcagaaatgggaatctgaattgctagaatgagaatcaggtaggagagacacatgagacagttacccctgcacggatggttgtaaagaaacagtcagaaataaagggaagctgagtgg

SEQ ID NO: 1458 - protein, 533 aa, Homo sapiens [sequence omitted]

SEQ ID NO: 1459 - DNA, 2160 bp, Homo sapiens
acccacagcactcattcctgaagctactggttggttccctgagaggtcccagaactctgcgaagtgagtccagcgctgagattttccttgcagatctatcaggatgagcatccaggccccacccagactactggagctggcagggcagagcctgctgagagaccaggccttgtccatctctgccatggaggagctgcccagggtgctctatctcccactcttcatggaggccttcagcaggagacacttccagactctgacggtgatggttcaggcctggcccttcacctgcctccctctgggatcactgatgaagacgcttcatttggagaccttaaaagcattgctggaagggcttcatatgctgcttacacagaaggatcgccccaggaggtggaaacttcaagtgctggatttgcgggatgttgacgagaatttctgggccagatggcctggagcctgggccctgtcctgcttcccagagaccacgagtaagaggcagacagcagaggactgtccaaggatgggagagcaccagcccttaaaggtgttcatagacatctgcctcaaggaaataccccaggatgaatgcctgagatacctcttccagtgggtttaccaaaggagaggtttagtacacctgtgctgtagtaagctggtcaattatctaacgccgattaaatatctcagaaagtcattgaaaataatatacctgaatagtattcaagagctggaaattcgcaacatgtcctggccacgtctgataagaaagcttcgttgttacctgaaggagatgaagaatcttcgcaaactcgttttctccaggtgccatcattacacgtcagataatgaactccaaggacggttagttgccaaattcagctctgtgttcctcaggctggaacaccttcagttgcttaaaataaaattgatcaccttcttcagtgggcacctggaacagctgatcaggtgcctccagaaccccttggagaacttggaattaacttatggctacctattggaagaagacatgaagtgtctctcccagtacccaagcctcggttacctaaagcatctgaatctcagctacgtgctgctgttccgcatcagtcttgaacccctcggagctctgctggagaaaattgctgcctctctcaaaaccctcatcttggagggctgtcagatccactactcccaactcagtgccatcctgcctgccctgagccggtgctcccagctcaccaccttctactttggcagaaattgcatgtctattgacgccctgaaggacctgctgcgccacaccagtgggctgagcaagttaagcctggagacgtatcctgcccctgaggagagtttgaattccttggttcgtgtcaattgggagatcttcaccccacttcgggctgagctgatgtgtacactgagggaagtcaggcagcccaagaggatcttcattggccccaccccctgcccttcctgtggctcatcaccgtctgaggaactggagctccatctttgctgctagggaaggcgtgcccagtggggtagagaaatccaaagttctcttccaggcacttggacactaaaatctactatgtgggtgcaaactatttttctcttttcttatttatttcattttttaataattccaaaatttttattaaagacaatttgagacagggtttcgctgtgttgctccagctggtctcaaactgctgggcttatgggatcctcctgcctcagcttcctaaagtgctgggattactggcatgagtgactgtgtccaggccacatgcaacttaaaggaagcacaggcaagtgttcagtgtgagggaaaaaacataacagcagggggcaaggttggaggaaaatgttgaggtgacatcagtgagaacttcagggacccgtgtcctagagtcggaaagagaagctaaagttctacagtgatgagactgttatccctgcaaggatggttaccaaggaatatcagcaataaagagcacctgaatgaaaacttttaacctgttgtgcaatttatccatcagaaatctctagttatcgagttacggatggaaaaataacgaaatactaatttgtctgtgattgagtttcagttgtagaacatcaaagcaaccaaataaaaattagatcattttg

SEQ ID NO: 1460 - protein, 474 aa, Homo sapiens; identical to SEQ ID NO: 15

SEQ ID NO: 1461 - DNA, 1323 bp, Homo sapiens
ggggtcacctggggtagaagctagagagggacatcatgtacaagctagttagtgggggtttcagctctattgggggtgcacgtgtgaatttcctgttacaaagtgtgtttcaagttgatatgatgtcaaagagataatagaggagggtatgaaaggagggaaagcgcatcaaacctgtccatttcacaatagaacgtctgtcctcaccggcttagtgatcacgaatgatcctgtctctgattccctgtttgtaaaaggttgttttgaactccaggaaaggtgcctccagaaccccttggagaacttggaattaacttatggctacctattggaagaagacatgaagtgtctctcccagtacccaagcctcggttacctaaagcatctgaatctcagctacgtgctgctgttccgcatcagtcttgaacccctcggagctctgctggagaaaattgctgcctctctcaaaaccctcatcttggagggctgtcagatccactactcccaactcagtgccatcctgcctgccctgagccggtgctcccagctcaccaccttctactttggcagaaattgcatgtctattgacgccctgaaggacctgctgcgccacaccagtgggctgagcaagttaagcctggagacgtatcctgcccctgaggagagtttgaattccttggttcgtgtcaattgggagatcttcaccccacttcgggctgagctgatgtgtacactgagggaagtcaggcagcccaagaggatcttcattggccccaccccctgcccttcctgtggctcatcaccgtctgaggaactggagctccatctttgctgctagggaaggcgtgcccagtggggtagagaaatccaaagttctcttccaggcacttggacactaaaatctactatgtgggtgcaaactatttttctcttttcttatttatttcattttttaataattccaaaatttttattaaagacaatttgagacagggtttcgctgtgttgctccagctggtctcaaactgctgggcttatgggatcctcctgcctcagcttcctaaagtgctgggattactggcatgagtgactgtgtccaggccacatgcaacttaaaggaagcacaggcaagtgttcagtgtgagggaaaaaacataacagcagggggcaaggttggaggaaaatgttgaggtgacatcagtgagaacttcagggacccgtgtcctagagtcggaaagagaagctaaagttctacagtgatgagactgttatccctgcaaggatggttaccaaggaatatcagcaataaagagcacctgaatg

SEQ ID NO: 1462 - protein, 229 aa, Homo sapiens
MKGGKAHQTCPFHNRTSVLTGLVITNDPVSDSLFVKGCFELQERCLQNPLENLELTYGYLLEEDMKCLSQYPSLGYLKHLNLSYVLLFRISLEPLGALLEKIAASLKTLILEGCQIHYSQLSAILPALSRCSQLTTFYFGRNCMSIDALKDLLRHTSGLSKLSLETYPAPEESLNSLVRVNWEIFTPLRAELMCTLREVRQPKRIFIGPTPCPSCGSSPSEELELHLCC

SEQ ID NO: 1463 - DNA, 1470 bp, Homo sapiens
ggggtcacctggggtagaagctagagagggacatcatgtacaagctagttagtgggggtttcagctctattgggggtgcacgtgtgaatttcctgttacaaagtgtgtttcaagttgatatgatgtcaaagagataatagaggagggtatgaaaggagggaaagcgcatcaaacctgtccatttcacaatagaacgtctgtcctcaccggcttagtgatcacgaatgatcctgtctctgattccctgtttgtaaaaggttgttttgaactccaggaaaggtgcctccagaaccccttggagaacttggaattaacttatggctacctattggaagaagacatgaagtgtctctcccagtacccaagcctcggttacctaaagcatctgaatctcagctacgtgctgctgttccgcatcagtcttgaacccctcggagctctgctggagaaaattgctgcctctctcaaaaccctcatcttggagggctgtcagatccactactcccaactcagtgccatcctgcctgccctgagccggtgctcccagctcaccaccttctactttggcagaaattgcatgtctattgacgccctgaaggacctgctgcgccacaccagtgggctgagcaagttaagcctggagacgtatcctgcccctgaggagagtttgaattccttggttcgtgtcaattgggagatcttcaccccacttcgggctgagctgatgtgtacactgagggaagtcaggcagcccaagaggatcttcattggccccaccccctgcccttcctgtggctcatcaccgtctgaggaactggagctccatctttgctgctagggaaggcgtgcccagtggggtagagaaatccaaagttctcttccaggcacttggacactaaaatctactatgtgggtgcaaactatttttctcttttcttatttatttcattttttaataattccaaaatttttattaaagacaatttgagacagggtttcgctgtgttgctccagctggtctcaaactgctgggcttatgggatcctcctgcctcagcttcctaaagtgctgggattactggcatgagtgactgtgtccaggccacatgcaacttaaaggaagcacaggcaagtgttcagtgtgagggaaaaaacataacagcagggggcaaggttggaggaaaatgttgaggtgacatcagtgagaacttcagggacccgtgtcctagagtcggaaagagaagctaaagttctacagtgatgagactgttatccctgcaaggatggttaccaaggaatatcagcaataaagagcacctgaatgaaaacttttaacctgttgtgcaatttatccatcagaaatctctagttatcgagttacggatggaaaaataacgaaatactaatttgtctgtgattgagtttcagttgtagaacatcaaagcaaccaaataaaaattagatcattttg

SEQ ID NO: 1464 - protein, 229 aa, Homo sapiens; identical to SEQ ID NO: 1462

SEQ ID NO: 1465 - DNA, 381 bp, Homo sapiens
gggcacccaagtgaaggatcctgctgtgtactcaggggctggtgttgctgtcagggatgttagcctagagcctcagcttcctgtaaaatgaggatgatgatatccaacagcttatgggaccttgaagtcccagcatttttcatctttcaatctcacctccttttcctgataatagagaggcaacaagaactcagggcatgcaatggggctcaacttctactctctgccacaatttcatcatgattcccccaaagagcagagccccaggagccagcagggggcagggtgggcatttctggactggattcattcataataagatcaaaatttccaatccgtatgtctcgggtgccatctgctgatagatcggaccagatggta

SEQ ID NO: 1466 - protein, 51 aa, Homo sapiens
MRMMISNSLWDLEVPAFFIFQSHLLFLIIERQQELRACNGAQLLLSATISS

SEQ ID NO: 1467 - DNA, 1850 bp, Homo sapiens
agtcttcaagcctggagttcctgcttggttcttcctgaggtctgagcaccttctagactacatccagatctgttttccctgcagattcatgaagatgagcatccggattccacccagactcctggagcttgcgggcggagcctgctgagggaccaagccttggccgtctccaccctggaggagctgcccacggaacttttccccccactgttcatggaggccttcagcaggagacgctgtgaggccctgaagctgatggtgcaggcctggcccttccgccgcctccctctgaggcctctgataaagatgccttgtctggaggccttccaagctgtgctcgatgggcttgatgcactgcttacccaaggggttcgtcccaggagatggaaacttcaagtgctggatttacaggatgtctgtgagaacttctggatggtttggtctgaagctatggcccatgggtgcttcctcaatgccaagaggaacaaaacaccagtgcaggactgtccaaggatgagagaacggcagcccttgactgtgtttgtagaactttggctcaagaacaggactctggatgaatacctcacctgcctccttctatgggtcaagcagaggagagatttactacacctgtgctgtaagaagctgaaaattttgggaatgcccttccgcaatatcagaagcatcctgaaaatggtgaacctagactgtatccaggaggtggaagtgaattgcaagtggatactgcccatcctgacacagtttaccccatacctgggccacttgaggaatcttcagaagctcgttctctcccacatggatgtctctcgctacgtttccccagagcagaagaaggagattgttacccagttcaccactcagttcctcaagctgcgctgcctccaaaagctttatatgaactctgtttctttcctcgaaggccacctggaccagctgctcagctgtctgaagacctcgttaaaggtcctcacaataactaactgtgtgcttttggaatcagacttgaagcatctctcccagtgcccgagtatcagtcaactaaagaccctggacctgagtggcatcagactgaccaattacagtcttgtgcctctccaaattctcctagaaaaagttgcagccacccttgagtacctggatttagatgactgtggcatcatagactcccaagtcaacgccatcctgcctgccctgagccgctgctttgagctcaacaccttcagcttctgtggaaatcccatctgcatggccaccctggagaacctgctgagccacacaatcatactcaaaaacttatgcctggagctgtatcctgccccgcaggaaagttatggtgctgatggtactctctgctggagcagatttgctcaaattagggctgagctgatgaagaaagtgaggcacttaaggcaccccaagaggatcttgttctgtactgacaactgccctgaccatggcgacaggtcattttatgacctggaggcagatcaatactgctgttgaatgcctgcctatttggatgggtatgtcaaacgctttcttctggacacttggaaactaaaacctaggtcttaggtacatcctaaagggagcacagaacccatcgtttcacacatgggctctgaaagtgggaaaggaaagctgatcaagcaggggcaggacttgggggaaatgttgccatggattcgatgggactttgggaacctgtatcctgtagagtcgaaaatgggaatctgaatgtctagagtggaattcaggcttgagaatacatgagggagttactcttgcatggatggttgtaaagaaacaatcagaaataaaggaaaact

SEQ ID NO: 1468 - protein, 436 aa, Homo sapiens
MEAFSRRRCEALKLMVQAWPFRRLPLRPLIKMPCLEAFQAVLDGLDALLTQGVRPRRWKLQVLDLQDVCENFWMVWSEAMAHGCFLNAKRNKTPVQDCPRMRERQPLTVFVELWLKNRTLDEYLTCLLLWVKQRRDLLHLCCKKLKILGMPFRNIRSILKMVNLDCIQEVEVNCKWILPILTQFTPYLGHLRNLQKLVLSHMDVSRYVSPEQKKEIVTQFTTQFLKLRCLQKLYMNSVSFLEGHLDQLLSCLKTSLKVLTITNCVLLESDLKHLSQCPSISQLKTLDLSGIRLTNYSLVPLQILLEKVAATLEYLDLDDCGIIDSQVNAILPALSRCFELNTFSFCGNPICMATLENLLSHTIILKNLCLELYPAPQESYGADGTLCWSRFAQIRAELMKKVRHLRHPKRILFCTDNCPDHGDRSFYDLEADQYCC

SEQ ID NO: 1469 - DNA, 1157 bp, Homo sapiens
atgagcctccagaccccatccagactcctggagctggcagggcagagcctgctgaggaaccagttcttgactatcttcaccctggatgagctgcccagggaggtctcccctctgttcatggaggccttcagcatgagatgttgtgaggccctgaagctgatggtgcaggcctggccctcccttcacctccctctgggatccctgatgaagacacctcatctggagaccttgcaagctgtgctgaagggacttgatacactagtgtcccagaaggtttgccccagttgaggtggaaacttcaagtgctggatttgagggatgttgatgagaatttctggaccatatggtctggagtcagggtcctcccctgctccccagaggccatgagtaagaggcagacagtggagaactgtccaaggatgggagagtgccagcccttgaaggtgttcatagacctctgcctgaaggaaaccttcggttatgagcctgaattatacgtgagcggccaatggcagttcattcctgacttggattggccattcctgtgcctgtactacccccagatgcattatataagaaaggtcagtaatatcaaagagcacctggagcacctgctcaggtacctcaagaaccccttgggggcctttacattcagtgatgcttacctagctgatcgggacatggagtgtctgtctcagtacccaagcctcagtcagctaaaggagctgcgtctgattcatatcctaatgtggaccacccatcttgagccccttggagttctgctggagaaagttgctgctactctcaagaccctcgtcttagaggactgtcggatccaggccccccaactcagggtccccctgcctgccctgagccactgttcccagctcaccaccttctactttcatggaaatgagacctccacgaatgctctgaaagacctgctgcgtcacacaggcgggctgagcaagttaggcctggacatggatcctgcccctctggagtgtcttgacaacaggggtcatgccaattgggagatcctcaccccaattagggctgagctgatgcgtacactcagggaattccaggtttacaagtgtgtgcagctgggcccggtcagccgtttcttaaaggaagcacacagctgtgtgtttcag

SEQ ID NO: 1470 - protein, 257 aa, Homo sapiens
MSKRQTVENCPRMGECQPLKVFIDLCLKETFGYEPELYVSGQWQFIPDLDWPFLCLYYPQMHYIRKVSNIKEHLEHLLRYLKNPLGAFTFSDAYLADRDMECLSQYPSLSQLKELRLIHILMWTTHLEPLGVLLEKVAATLKTLVLEDCRIQAPQLRVPLPALSHCSQLTTFYFHGNETSTNALKDLLRHTGGLSKLGLDMDPAPLECLDNRGHANWEILTPIRAELMRTLREFQVYKCVQLGPVSRFLKEAHSCVF

SEQ ID NO: 1471 - DNA, 1108 bp, Homo sapiens; identical to SEQ ID NO: 17

SEQ ID NO: 1472 - protein, 293 aa, Homo sapiens; identical to SEQ ID NO: 18

SEQ ID NO: 1473 - DNA, 830 bp, Homo sapiens
ctgagctacaactacaaccagaggtctaaactacaaccagatctgaattcttgttgggagccattttgtgaagagacgaagactgagctggtttggctgcatttctggcctcgagccgcagtcagtttctccccgtagaacccggcagtaggagacttagaatcgaatctcttctccctcccgcctcctgtttttggctttttgagaaaccttatcatccaacacaatggccagcaacgttaccaacaagatggatcctcactccatgaactcccgtgtgttcattgggaatctcaacactcttgttgtcaagaaatcggatgtggaggcgatcttttccaagtatggcaaaattgcgggctgctctgttcataagggctttgccttcgttcaatatgataaggagaaaaatgcccgggctgctgtagcaggagaggatggcagaatgattgctagccaggttgtagatattaacctggctgcagagccaaaagtgaaccgaggaaacgcaggtgtgaaacgatcagcagcggagatgtacggctcctcttttgacttggactatggctttcaacgggattattatgatggaatgtacagtttcccagcacgtgtacctcctcctcctcccattgctctggctgtagtgccctcgaaacgtcaacgtctatcaggaaacacctcacgaaggggcaaaagtggcttcaattctaagagtggaaagcggggatcttccaagtctggaaagttgaaaggtgatgaccttcaggccattaagcaggagttgacccagataaaacagaaagtggattctctcctggaaaacctgg

SEQ ID NO: 1474 - protein, 200 aa, Homo sapiens
MASNVTNKMDPHSMNSRVFIGNLNTLVVKKSDVEAIFSKYGKIAGCSVHKGFAFVQYDKEKNARAAVAGEDGRMIASQVVDINLAAEPKVNRGNAGVKRSAAEMYGSSFDLDYGFQRDYYDGMYSFPARVPPPPPIALAVVPSKRQRLSGNTSRRGKSGFNSKSGKRGSSKSGKLKGDDLQAIKQELTQIKQKVDSLLEN

SEQ ID NO: 1475 - DNA, 1642 bp, Homo sapiens; identical to SEQ ID NO: 19

SEQ ID NO: 1476 - protein, 474 aa, Homo sapiens; identical to SEQ ID NO: 20

SEQ ID NO: 1477 - DNA, 1840 bp, Homo sapiens
ttcctgcttggttcttcctgagatctgagcaccttctagactacatccagatctgttttccctgcagattcatgaagatgagcatctggactccacccagactcctggagcttgcagggcggagcctgctaagggaccaagctttggccatgtccaccctggaggagctgcccacagaacttttccccccactgttcatggaggccttcagcaggagacgctgtgaggccctgaagctgatggtgcagtcctggcccttccgccgcctccctctgaggcctctgataaagatgccttgtctggaggccttccaagctgtgctcgatgggctggatgcactgcttaacctaggggttcgtcccaggaggtggaaacttcaagtgctggatttacaggatgtctgtgagaacttctggatggtttggtctgaagctatggcccatgggtgcttcctcaatgccaagaggaacaaaaaaccagtggaggactgtccaaggatgagaggacggcagcccttgactgtgttcgtagaactttggctcaagaacaggactctggatgaatacctcacctgcctccttctatgggtcaagcagaggaaagatttactacacctgtgctgtaagaagctgaaaattttgggaatgcccttccgcaatatcagaagcatcctgaaaatggtgaacctagactgtatccaggaggtggaagtgaattgcaagtgggtactgcccatcctgacacagtttaccccatacctgggccacatgaggaatcttcagaaactcattctctcccacatggatgtctctcgctacgtttccccagagcagaagaaggagattgttacccagttcaccactcagttcctcaagctgcgctgcctccaaaagctttatatgaactctgtttctttcctcgaaggccacctggaccagctgctcagctgtctgaagacctcgttaaagttcctcacaataactaactgtgtgcttttggaatcagacttgaagcatctatcccagtgcccgagtatcagtcaactaaagaccctggacctgagtggcatcagactgaccaattacagtcttgtgcctctccaaattctcctagaaaaagttgcagccacccttgagtacctggatttagatgactgtggcatcatagactcccaagtcaacgccatcttgcctgccctgagccgctgctttgagctcaacaccttcagcttctgtggaaatcccatctgcatggccaccctggagaacctgctgagccacacaatcatactcaaaaacttatgcgtggagctgtatcctgccccccgggagagttatggtgctgatggtactctctgctggagcagatttgctcaaattagggctgagctgatgaacagagtgagggacttaaggcaccccaagaggatcttgttctgtactgactactgccctgactgtggcaacaggtcattttatgacctggaggcagatcaatactgctgttgaatgcctgcctatttggatgggtatgtcaaacgctttcttctggacacttggaaactaaaacctaggtcttaggtacatcctaaagggagcacagaacccatcatttcacacataggctctgaaagtgggaaaggaaagctgatcaagcaggggccggacttgggggaaatgttgccatggattcgatgggactttggggacctgtgtcctgtagagtcgaaaatgggaatctgaatgtctagagtggaattcaggcttgagaatacatgagggagttactcttgcatggatggttgtaaagaaacaatcagaaataaaggaaaactgagcag

SEQ ID NO: 1478 - protein, 478 aa, Homo sapiens; identical to SEQ ID NO: 22

SEQ ID NO: 1479 - DNA, 1525 bp, Homo sapiens
ttcctgcttagttcttcctgaggtctgagcaccctccaaactgagtccagatctgagtttttcctcggagatttgtcagaatgagcctccaggccccatccagactgctggagctggcagggcagagcctgctgaggaaccagttcttgaccatcttcaccctggatgagctgcccagggaggtcttccctctgatgttcatggaggccttcagcatgagacgttttgaggccctgaagctgatggtgcaggcctggcccttcctcagcctccctctgggatccctgatgaagacacttcatctggagaccttgcaagctgtcctgaggggacttgatacactggtggcccagaaggttcgccccaggaggtggaaacttcaagtgctggatttgcgggatgttgatgagaatttctggaccatatggtctggagccagggtcctctcctgctccccagaggccatgagtaagaggcagacagtggaggactgtccaaggatgggagagcaccagcccttgaaggtgttcatagacctctgcctaaaggaaagtacactggatgaatgcctgagctacctttttgggtggatccactacagaagaggcctagtgcacctgtgttgtagtaaggtgcagaattactcaatgcccacttcaagtttcagaaatctattggaaaggatatacccagacagtatccaggagttggaagtctggaaaaagtgctctctcaataaaacgggaaagtttgccccttacctgagccagatgagcaatcttcgtgaactctttttagccttcggttatgagcgtgagttgtacgtgagcgtccagtggccgtgcattcctgacttggactctccattcctctgcctgtactacccccagatgctttatataaaaaagatcagtaatatcaaagagcacctggagcacctgctcaggtacctcaagaaccccttgggggcctttatattcagtgatgcttacctaactgatcgggacatggagtgtctgtctcagtacccaagcctcagtcagctaaaggagctgcgtctgattcatatcctaatgtggaccacccatcttgagccccttggagttctgctggagaaagttgctgctactctcaagaccctcgtcttaaaggactgtcggatccaggacccccaactcagggtcctcctgcctgccctgagccactgttcccagctcaccaccttcaactttcatggaaatgagacctccatgaatgctctgaaagacctgctgcgtcacacaggcgggctgagcaagttaggcctggagttgtatcctgcccctctggagagtcttgactacaagggtcatgtcaattgggagatcctcaccccaattcgggctgagctgatgcgtacactcagggaagtcaggcagcccaagaggatcttctttggtcccgtcccttgccctaactgtggctcatggccatctgagaaagtggacttccatctttgctcctagggaaggcctggttcgtggga

SEQ ID NO: 1480 - protein, 474 aa, Homo sapiens
MSLQAPSRLLELAGQSLLRNQFLTIFTLDELPREVFPLMFMEAFSMRRFEALKLMVQAWPFLSLPLGSLMKTLHLETLQAVLRGLDTLVAQKVRPRRWKLQVLDLRDVDENFWTIWSGARVLSCSPEAMSKRQTVEDCPRMGEHQPLKVFIDLCLKESTLDECLSYLFGWIHYRRGLVHLCCSKVQNYSMPTSSFRNLLERIYPDSIQELEVWKKCSLNKTGKFAPYLSQMSNLRELFLAFGYERELYVSVQWPCIPDLDSPFLCLYYPQMLYIKKISNIKEHLEHLLRYLKNPLGAFIFSDAYLTDRDMECLSQYPSLSQLKELRLIHILMWTTHLEPLGVLLEKVAATLKTLVLKDCRIQDPQLRVLLPALSHCSQLTTFNFHGNETSMNALKDLLRHTGGLSKLGLELYPAPLESLDYKGHVNWEILTPIRAELMRTLREVRQPKRIFFGPVPCPNCGSWPSEKVDFHLCS

SEQ ID NO: 1481 - DNA, 1425 bp, Homo sapiens; identical to SEQ ID NO: 25

SEQ ID NO: 1482 - protein, 474 aa, Homo sapiens; identical to SEQ ID NO: 26

SEQ ID NO: 1483 - DNA, 951 bp, Homo sapiens
atggtgctggtgaggaagctcaaggaggctttggccgttgtccagatcctcagagaaaggactgctcaccatacagggtccactgtgggaacagaaacctgctttttcccagtggaagaggccatgagtaagaggcagacagcagaggactatccaaggatgggagagcaccagcccttaaaggtgttcatagacgtctgcctcaaggaaacaccccaagatgaatgcctgagatacctcttccagctggaacacctccaattgcttaaagtaaaattgatcaccttcttcagtgggcacctggaacagctgatcaggtgcctccagaaccccttggagaacttggagttaacttgtggctacctattggaagaggacatgaagtgtctgtctcagtacccaagcctcagctacctaaagcatctgaatctcagctacgtgctgctgttccgcatcagtcttgaacccctcggagctctgctagagaaaattgctgccactctcaagaccctcatcttcgagggctgtcagatccactactgccaactcagcgccatcctgcctggcctgagccgctgctcccagctcaccaccttctactttggcagaaattgcatgtctacggacaccctgaaggacctgctgcgccacaccagtgggctgagcaagttaagcctggagacgtatcctgcccctgaggagagtttgaattccttggttcgtgtcgattgggagatcttcgccccacttcgggctgagctgatgtgtacactgagggaagtcaggcagcccaagaggatcttcactggtcccactccctgcccttcctgtggctcatcaccgtctgaggaactggagctccatctttgctgctagggaaggcgtgcctagtggggttgataaatccaaagttctcttccaggcacttggacactaaaatctagtatgtaa

SEQ ID NO: 1484 - protein, 291 aa, Homo sapiens
MVLVRKLKEALAVVQILRERTAHHTGSTVGTETCFFPVEEAMSKRQTAEDYPRMGEHQPLKVFIDVCLKETPQDECLRYLFQLEHLQLLKVKLITFFSGHLEQLIRCLQNPLENLELTCGYLLEEDMKCLSQYPSLSYLKHLNLSYVLLFRISLEPLGALLEKIAATLKTLIFEGCQIHYCQLSAILPGLSRCSQLTTFYFGRNCMSTDTLKDLLRHTSGLSKLSLETYPAPEESLNSLVRVDWEIFAPLRAELMCTLREVRQPKRIFTGPTPCPSCGSSPSEELELHLCC

SEQ ID NO: 1485 - DNA, 1720 bp, Homo sapiens
aggtccccaaagtcccatcgaatccatggcaacacttcccccaagtcctgcccctgcttgatcaccttccctttcccactttcagagcccatgtgtgaaatgatgggttctgtgctccctataggatgtacctaagacctaggttttagtttccaagtgtccagaagaaagcgtttgacatatccacccaaataggcaggcattcaacagcagcattgatctgcctccaggtcataaaatgacctgttgccacagtcagggcagcagtcagtacagaacaagatcctcttggggtgccttaagtccctcactctcttcatcagctcagccctaatttgagcaaatctgctccagcagagagtaccatcagcatcataactctcccggggggcaggatacagctccacgcataagtttttgagtatgattgtgtggctcagcaggttctccagggtggccatggagatgggatttccacagaagctgaaggtgttgagctcaaagcagcggctcagggcaggcaggatggcgttgacttgggagtctatgatgccacagtcatctaaatccaggtactcaagggtggctgcaactttttctaggagaatttggagaggcacaagactgtaattggtcagtctgatgccactcaggtccagggtctttagttgactgatactcgggcactgggatagatgcttcaagtctgattccaaaagcacacagttagttattgtgaggacctttaacgaggtcttcagacagctgagcagctggtccaggtggccttcgaggaaagaaacagagttcatagaaagcttttggaggcagcacagcttgaggaactgagtggtgaactgggtaacaatctccttcttctgctctggggaaacgtagcgagagacatccatgtgggagagaacgagcttctgaagattcctcatgtggcccaggtatggggtaaactgtgtcaggatgggcagtacccacttgcaattcacttccacctcctggatacagtctaggttcaccattttcaggatgcttctgatattgcggaagggcattcccaaaattttcagcttcttacagcacaggtgtagtaaatctttcctctgcttgacccatagaaggaggcaggtgaggtattcatccagagtcctgttcttgagccaaagttctacgaacacagtcaagggctgctgtcctctcatccttggacagtcctgcactggtgttttgttcctcttggcattgaggaagcacccacgggccatagcttcagaccaaaccatccagaagttctcacagacatcctgtaaatccagcacttgaagtttccacctcctgggatgaaccccttgggtaagcagtgcatccagcccatcgagcacagcttggaaggcctccagacaaggcatctttatcagaggcctcagagggaggcggcggaagggccaggcctgcaccatcagcttcagggcctcacagcgtctcctgctgaaggcctccatgaacagtggggggaaaagttctgtgggcagctcctccagggtggacatggccaaggcttggtccctcagcaggctccgccctgcaagctccaggagtctgggtggagtccggatgctcatcttcacgaatctgcagggaaaacagatctggatgtagtctagaaggtgctcagtcctcaggaagaaccaagcaggaactccaggct

SEQ ID NO: 1486 - protein, 107 aa, Homo sapiens
MNPLGKQCIQPIEHSLEGLQTRHLYQRPQREAAEGPGLHHQLQGLTASPAEGLHEQWGEKFCGQLLQGGHGQGLVPQQAPPCKLQESGWSPDAHLHESAGKTDLDVV

SEQ ID NO: 1487 - DNA, 390 bp, Homo sapiens
atggaggccgtcagcaggagacgctgtgaggccctgaagctgatggtgcaggcctggtccttcctccacctccctctgggatccctgatgaagacacctcatctggagaccttgcaagctgtgctgaagggacttgatacactgctggcccagaaggtttgcctcaggaggtggaaacttcaagtgctggatttgcgggatgttgatgggaatttctggaccatatggtctggagccaaggtcctctcctgctccccagaggccatgagtaaaaggcagacagtggaggactgtccaaggatgggagagtgccagcccttgaaggtgttcatagaccgctgcctaaagaaaagtacactggatgaatgcctgagctacctttgtgggtag

SEQ ID NO: 1488 - protein, 129 aa, Homo sapiens
MEAVSRRRCEALKLMVQAWSFLHLPLGSLMKTPHLETLQAVLKGLDTLLAQKVCLRRWKLQVLDLRDVDGNFWTIWSGAKVLSCSPEAMSKRQTVEDCPRMGECQPLKVFIDRCLKKSTLDECLSYLCG

SEQ ID NO: 1489 - DNA, 2081 bp, Homo sapiens
cttgcagatttatgaggatgagcctacaggccccacgcagactcctggagctggcagggcagagcctgctgggggaccaggccttggccatctccatcttggatgagctgcccagggagctcttccccccactgttcgtggaggccttcactagcagacgctgcgaggttctgaaggtgatggtgcaggcctggcccttcccctgcctccctctggggtccctgatgaagacgcctgatctggagatcttacattatgtagtggatgggattgattgcctgcttgcccaaaaggttcgccccaggaggtggaaacttcaagtgctggaattgcgggatgttgatgagaatttttggaccatatggtctggagccaggcccctgtcctgctccccagaggccatgagtaagaggcagacagtggaggactgtccaaggacaggagagaagcagcccttgaaggtgttcatggatgtttgcctcaaggaaaaattcatggatgaagatctgagcttcttctctgggtgggtccagcacagaagaggttcagtacacctgtgctgtactaaggtggtgaattattcaatgagcattctaaatttcagaaacatattggaaacagtatacccagacagtatccaagtgttggaaatttggaacatgtgctggccgtgtatgatagtagagtttagccgttacctgagccagatgaggaatcttcgcaaactcttcatctccgatggctgtcgttacctgctaagctctgacagccaagaacagttagttgctgaattcagctctgtgctcctcaggctggagtacctccagatgctttatgtaagaagggtctgcttcttcagaggccacctggaccagctgatcaggtgcctcaggagcccattggagacattggcattaacttatggcttcctagaaaaagtggacttgaaatgtctgccccggtacccaagtctcagtcaactgaagcagctgaatctgagtcatggtgcactgcgcttcatccgtcttgagcccctccgagctctgctagagaaagttgctgccactcttcagaccctcttcttagtggactgtgggattcgggactccaaactcagggtcatcctgcctgccctgagctgctgctccaacctcaccactttctgttttcacggcaatgacacgtccatggatggtctgaaggacctgctgcgccacacaggcaggctgagcaatttgagcctggaaacatatcctgcccctcgggagagtcttgatgacaggggtcgtgtcatttcggagctcctcaccccacttcaggctgagctgatgcgtatactgagggaagtaagggagcccaaaaggatcttctttggtccggtgtcctgcccttgctgtggcacgtcgcccactgagcaactggagttcaatttttgcttgtggggaaggcctgcctagtggggtggaggtataaaaagctttttctccaggcacttggaaactaaaatctgggacatagatgtcttttatttttctttttccttattttacaattttacagtttttatttaaaaatttgagacagggtttccctatgttgtccaggctggtctcaaactcttacgcttaagggagccacctgcttggcctcccaagattctgggattacaggcataagcagctgtgccgggtctataggtgcattataaagggaacagagaaacctctgtttcaggcatgtgctttctgtgagtggaaaacaaaaaatcccagcagggggcagcactggggaaaaagttgaatggagtcactgagactcagggatctgtgtcctagacagtcagaaatagaaagctgaagttctagagtgaaggagttatctcagcaaggatggatacaaagaaacgtcggaagtagagggaacctaaatggaaactctctgctgtccttcatgattgattagcctgtttcagcaatttatacatcagaaatctttagttcctgatgaattaaaaaaagaggtactagttcatctgtgatttaggttcatctgcaggaaataaaggaatcaaaataaacttc

SEQ ID NO: 1490 - protein, 481 aa, Homo sapiens
MRMSLQAPRRLLELAGQSLLGDQALAISILDELPRELFPPLFVEAFTSRRCEVLKVMVQAWPFPCLPLGSLMKTPDLEILHYVVDGIDCLLAQKVRPRRWKLQVLELRDVDENFWTIWSGARPLSCSPEAMSKRQTVEDCPRTGEKQPLKVFMDVCLKEKFMDEDLSFFSGWVQHRRGSVHLCCTKVVNYSMSILNFRNILETVYPDSIQVLEIWNMCWPCMIVEFSRYLSQMRNLRKLFISDGCRYLLSSDSQEQLVAEFSSVLLRLEYLQMLYVRRVCFFRGHLDQLIRCLRSPLETLALTYGFLEKVDLKCLPRYPSLSQLKQLNLSHGALRFIRLEPLRALLEKVAATLQTLFLVDCGIRDSKLRVILPALSCCSNLTTFCFHGNDTSMDGLKDLLRHTGRLSNLSLETYPAPRESLDDRGRVISELLTPLQAELMRILREVREPKRIFFGPVSCPCCGTSPTEQLEFNFCLWGRPA

SEQ ID NO: 1491 - DNA, 2814 bp, Homo sapiens
atgagcctccagtccccatccagactcctggagctggcagggcagagcctgctgaggaaccagttcttgaccatcttcatcctggacgagctgcccagggaggtcttccctctgatgttcatggaggccgtcagcaggagacgctgtgaggccctgaagctgatggtgcaggcctggtccttcctccacctccctctgggatccctgatgaagacacctcatctggagaccttgcaagctgtgctgaagggacttgatacactgctggcccagaaggtttgcctcaggaggtggaaacttcaagtgctggatttgcgggatgttgatgggaatttctggaccatatggtctggagccaaggtcctctcctgctccccagaggccatgagtaaaagacagacagtggaggactgtccaaggatgggagagtgccagcccttgaaggtgttcatagaccgctgcctaaagaaaagtatgctggatgaatgcctgagctacctttgtgggtgcctcaagaacctcttgggggcctttatattctgtcatgcttacctagctgatcgggacatggagtgtctgtctcagtacccaagcctcagtcagctaaaggagctgcatctgattcatatcctaatgtggaccaccaatcttgagccccttggagctctgctagagaaagttgctgctactcttgagaccctcacgttaaaggactgtcagatccaggactcccaactcagggtcctcctgcctgccctgagccactgctcccagctcaccaccttctactttcaaggaaacgagacttccatgaatgctctgaaagaccttctgtgtcacacaggcgggctgagcaagttaggtctggagttgtatccttcccgtctggagagtcttgacaacaggggtcatgccaattgggagatccttgccccaattcgggctgagctgatgtgtacactcagggaagagagacccaaagtcttcaagcctagagttcctgcttggttcttcctgaggactgagcaccttctagactacatccagatctgttttccctgcagattcgtgaagatgagcatccggactccacccagactcctggagcttgcagggcggagcctgctgagggaccaagccttggccatgtccaccctggaggagctgcccacagaacttttccccccactgttcatggaggccttcagcaggagacgctgtgaggccctgaagctgatggtgcaggcctggcccttccgccgcctccctctgaggcctctgataaagatgccttgtctggaggccttccaagctgtgctcgatgggctggatgcactgcttacccaaggggttcatcccaggaggtggaaacttcaagtgctggatttacaggatgtctgtgagaacttctggatggtttggtctgaagctatggcccatgggtgcttcctcaatgccaagaggaacaaaaaaccagtgcaggactgtccaaggatgagaggacagcagcccttgactgtgttcgtagaactttggctcaagaacaggactctggatgaatacctcacctgcctccttctatgggtcaagcagaggaaagatttactacacctgtgctgtaagaagctgaaaattttgggaatgcccttccgcaatatcagaagcatcctgaaaatggtgaacctagactgtatccaggaggtggaagtgaattgcaagtgggtactgcccatcctgacacagtttaccccatacctgggccacatgaggaatcttcagaagctcgttctctcccacatggatgtctctcgctacgtttccccagagcagaagaaggagattgttacccagttcaccactcagttcctcaagctgtgctgcctccaaaagctttctatgaactctgtttctttcctcgaaggccacctggaccagctgctcagctgtctgaagacctcgttaaaggtcctcacaataactaactgtgtgcttttggaatcagacttgaagcatctatcccagtgcccgagtatcagtcaactaaagaccctggacctgagtggcatcagactgaccaattacagtcttgtgcctctccaaattctcctagaaaaagttgcagccacccttgagtacctggatttagatgactgtggcatcatagactcccaagtcaacgccatcctgcctgccctgagctgctgctttgagctcaacaccttcagcttctgtggaaatcccatctccatggccaccctggagaacctgctgagccacacaatcatactcaaaaacttatgcgtggagctgtatcctgccccccgggagagttatgatgctgatggtactctctgctggagcagatttcctcaaattagggctgagctgatgaagagagtgagggacttaaggcaccccaagaggatcttgttctgtactgactgctgccctgactgtggcaacaggtcattttatgacctggaggcagatcaatgctgctgttgaatgcctgcctatttgggtggatatgtcaaacgctttcttctggacacttggaaactaaaacctaggtcttaggtacatcctatagggagcacagaacccatcatttcacacatgggctctgaaagtgggaaaggaaaggtgatcaagcaggggcaggacttgggggaagtgttgccatggattcgatgggactttggggacctgtgtcctgtagagtggaaaatgggaatttgaatgtctagagtggaggcttgagaatacttgagggagttactcttggatgcatggttgtaaagaaacaatcagaaa

SEQ ID NO: 1492 - protein, 834 aa, Homo sapiens
MSLQSPSRLLELAGQSLLRNQFLTIFILDELPREVFPLMFMEAVSRRRCEALKLMVQAWSFLHLPLGSLMKTPHLETLQAVLKGLDTLLAQKVCLRRWKLQVLDLRDVDGNFWTIWSGAKVLSCSPEAMSKRQTVEDCPRMGECQPLKVFIDRCLKKSMLDECLSYLCGCLKNLLGAFIFCHAYLADRDMECLSQYPSLSQLKELHLIHILMWTTNLEPLGALLEKVAATLETLTLKDCQIQDSQLRVLLPALSHCSQLTTFYFQGNETSMNALKDLLCHTGGLSKLGLELYPSRLESLDNRGHANWEILAPIRAELMCTLREERPKVFKPRVPAWFFLRTEHLLDYIQICFPCRFVKMSIRTPPRLLELAGRSLLRDQALAMSTLEELPTELFPPLFMEAFSRRRCEALKLMVQAWPFRRLPLRPLIKMPCLEAFQAVLDGLDALLTQGVHPRRWKLQVLDLQDVCENFWMVWSEAMAHGCFLNAKRNKKPVQDCPRMRGQQPLTVFVELWLKNRTLDEYLTCLLLWVKQRKDLLHLCCKKLKILGMPFRNIRSILKMVNLDCIQEVEVNCKWVLPILTQFTPYLGHMRNLQKLVLSHMDVSRYVSPEQKKEIVTQFTTQFLKLCCLQKLSMNSVSFLEGHLDQLLSCLKTSLKVLTITNCVLLESDLKHLSQCPSISQLKTLDLSGIRLTNYSLVPLQILLEKVAATLEYLDLDDCGIIDSQVNAILPALSCCFELNTFSFCGNPISMATLENLLSHTIILKNLCVELYPAPRESYDADGTLCWSRFPQIRAELMKRVRDLRHPKRILFCTDCCPDCGNRSFYDLEADQCCC

SEQ ID NO: 1493 - DNA, 1785 bp, Homo sapiens
atgagcctacaggccccacgcagactcctggagctggcagggcagagcctgctgggggaccaggccttggccatctccatcttggatgagctgcccagggagctcttccccccactgttcgtggaggccttcactagcagacgctgcgaggttctgaaggtgatggtgcaggcctggcccttcccctgcctccctctggggtccctgatgaagacgcctgatctggagatcttacattatgtagtggatgggattgattgcctgcttgcccaaaaggttcgccccaggcggaaacttcaagtgctggaattgcgggatgttgatgagaatttttggaccatatggtctggagccaggcccctgtcctgctccccagaggccatgagtaagaggcagacagtggaggactgtccaaggacaggagagaagcagcccttgaaggtgttcatggatgtttgcctcaaggaaaaattcatggatgaagatctgagcttcttctctggaaacatattggaaacagtatacccagacagtatccaagtgttggaaatttggaacatgtgctggccgtgtatgatagtagagtttagcccttacctgagccagatgaggaatcttcgcaaactcttcatctccgatggctgtcgttacctgctaagctctgacagccaagaacagttagttgctgaattcagctctgtgctcctcaggctggagaacctccagatgctttatgtaagaagggtctgcttcttcagaggccacctggaccagctgatcaggtgagagcagaagaaggagattgttacccagttcaccactcagttcctcaagctgcactgcctccaaaagctttatatgaactctgtttctttcctcgaaggccacctggaccagctgctcagctgtctgaagacctcgttaaaggtcctcacaataactaactgtgtgcttttggaatcagacttgaagcatctatcccagtgcccgagtatcagtcaactaaagaccctggacctgagtggcatcagactgaccaattacagtcttgtgcctctccaaattctcctagaaaaagttgcagccacccttgagtacctggatttagatgactgtggcatcatagactcccaagtcaacgccatcctgcctgccctgagccgctgctttgagctcaacaccttcagcttctgtggaaatcccatctccatggccaccctggagaacctgctgagccacacaatcatactcaaaaacttatgcctggagctgtatcctgccccacgggagagttatggtgctgatggtactctctgctggagcagatttactcagattagggctgagctgatgaagagagttagggacttaaggcaccccaagaggatcttgttcggtactgactactgccctgactgtggcaacaggtcattttatgacctggaggcagatcaatactgctgttgaatgcctgcctatttggatgggtatgtcaaacgctttcttctggacacttggaaactaaaacctaggtcttaggtacatcctaaagggagcacagaacccatcgtttcacacatgggctctgaaagtgggaaaggaatgctgatcaagcaggggcaggacttgggggaaatgttgccatggattcgatgggactttgggaacgtgtatcctgtagagtcgaaaatgggaatctgaatgtctagagtggaattcaggcttgagaatacatgagggagttactcttgcatggatggttgtaaataaacaatcagaaataaa

SEQ ID NO: 1494 - protein, 261 aa, Homo sapiens
MSLQAPRRLLELAGQSLLGDQALAISILDELPRELFPPLFVEAFTSRRCEVLKVMVQAWPFPCLPLGSLMKTPDLEILHYVVDGIDCLLAQKVRPRRKLQVLELRDVDENFWTIWSGARPLSCSPEAMSKRQTVEDCPRTGEKQPLKVFMDVCLKEKFMDEDLSFFSGNILETVYPDSIQVLEIWNMCWPCMIVEFSPYLSQMRNLRKLFISDGCRYLLSSDSQEQLVAEFSSVLLRLENLQMLYVRRVCFFRGHLDQLIR

SEQ ID NO: 1495 - DNA, 1758 bp, Homo sapiens
atggaggccttcagcatgagatgttgtgaggccctgaagctgatggtgcaggcctggtcctcccttcacctccctctgggatccctgatgaagacaactcatctggagaccttgcaagctgtgctgaagggacttgatacactagtgtcccagaagatcctctggaaaaggactgctcaccatacagagtccactgaggaaacaggaacctgcttcctcccagtggaagaggccatgagtaagaggcagacagtggaggactgtccaaggatgggagagtgccagcccttgaaggtgttcatagacctctgcctgaaggaaaccttcggttatgagcctgaattatacgtgagcggccaatggcagttcattcctgacttggattggccattcctgtgcctgtactacccccagatgcattatataagaaaggtcagtaatatcaaagagcacctggagcacctgctcagacattcttcctggtaccagcagaagcagaaatatagatttgtggccaccaagtgcagagtggaattgggagtttttccttacagattcatcaggatgagcatccaggccccacccagactcctggagctggcggggcagagtctgctgagagacaagcccttggccatctctgccctggaggagctgcccagggagctctacctcccactcttcctggaggccttcagcaggagacacttccagactctgacagtgatggtgcaggcctggcccttcacccgcctccctctgggatcgctgatgaagacgcttcatctggagaccttaaaagcattgctggaagggcttcacatgctgcttacacagaaggatcgccccaggaggtggaaacttcaagtgctggatttgcgggatgttgatgagaatttctgggccatatggtctgaatccagggccctgtcctcctccccagaggccatgagtaagaggcagacagcagaggactgtccaaggatgggagagcaccagcccttgaaggtgttcatagacatctgcctcaaggaaataccccaggatgaatgcctgagatacctcttccgaaagcttcattgttacctgaaggagatgaagaatcttcgcaaactcatttttctccaggtgccatccttacacgtcaattaccgcgaggaatgctcagtcgccaaaatcagctctatgttcctcaggctgaaacacctccagctgcttaaaatgaatatggtcaccttccacagagggcacctgggacagctgatcagcaacttgcatgaggaccatcatcagatgaaccccttggagaacttggaattaacttgcggctacctattggaagaggacttgaagtgtctctaccagtacccaagcctcgcttacccaaagcatctgaatctcagctacatgctgcagttctgtatcagtcttgaacccctcggagctctgctggagaaagtttctgccaacacgagggtctcgagagaggcagcaattactcttaagaccctcatctcggagggctgtcagatccactactcccaactcagtgccatcctgcctggcctgagccgctgctcccagctcaccaccttctactttggcagaaattgcatgtctatggaagccctgaaggacctgctgtgccacaccagtgggctgagcaagttaagcctggagatgtatcctgcccccgaggagagtttgaattccttggttcatgtcgattgggagatcttcaccccacttcgggcttag

SEQ ID NO: 1496 - protein, 585 aa, Homo sapiens [sequence omitted]

SEQ ID NO: 1497 - DNA, 1687 bp, Homo sapiens
ctaaactacaaccagatctgaattcttgttggcagccattttgtgaagagacgaagactgagctgttttggctgcatttctggcctcgagccgcagtcagcttctccccgtagaacccggcagtaggagacttagaatcgaatctcttctccctcccgcctcctgtttttggctttttgagaaaccttatcatccaacacaatggccagcaacgttaccaacaagatggatcctcactccgtgaactcccgtgtgttcattgggaatctcaacactcttgttgtcaagaaatctgatgtggaggcgatcttttccaagtatggcaaaattgcgggctgctctgttcataagggctttgccttcgttcaatatgataaggagaaaaatgcccgggctgctgtagcaggagaggatggcagaatgattgctagccaggttgcagttattaacctggctgcagagccaaaagtgaaccgaggaaacgcaggtgtgaaacgatccgcagcggagatgtacggctcctcttttgacttggactatggctttcaacgggattattatgatgggatgtacagtttcccagcacgtgtacctcctcctcctcccattgctctggctgtagtgccctcgaaacaccagcgcatatcaggaaacacctcacgaaggggcaaaagtggcttcaattctaagagtggaaagcggggatcttccaagtctggaaagctgaaaggagatgaccttcaggccattaagcaggagttgacccagataaaacagaaagtggattctctcctggaaaacctggaaaaaattgaaaaggaacagagcaaacaagaggtagaggtgaaaaatgctaagtcagaagaggagcagagcagtagctccatgaagaaagatgagactcatgtaaagatggagtctgaggggggtgcagaagactctgctgaggagggggacccactggatgatgatgataatgaagatcagggggacaaccagcttcatttgatcaagaataatgaaaaagatgctgaggaaggagaggataacagagacagcaccaatggccaggatgactcttaagcacatagtggggttgagaaatcttatcccattgtttctttacctaggagcttgtctaacaacaaatttttcaccagatcctctcccttagtatcttcagcacatgcttactgttctccccatccttgtccttcccacattcattaattcatattgccctgtgcctagtcccattttcacttcccatgacacccctagtagttttcctaagtcttaccctgtaatttttgcttttaattttgacacctctttatgacttaacagtaaaaaggatgtatggtttttatcaactgtctccaaaataatctcttgttatgcagggaatacagttcttttctttcatacataagttcagtagttgcttccctaactgcaaaggcaatctcattgagttgagtagctcctgaaagcagcttggagttacaagtatgtgtgttacaccccatattagtgtgctgtgtggggcagttcaacaaaaatctaacaatgtatttttgtgaatgagagttggcatgtcaaatgcatcctcagaaacataattggtgttatagtcttcaaatgtgttttctaaagttgataccgtgggttatttttgtgaacagct

SEQ ID NO: 1498 - protein, 293 aa, Homo sapiens
MASNVTNKMDPHSVNSRVFIGNLNTLVVKKSDVEAIFSKYGKIAGCSVHKGFAFVQYDKEKNARAAVAGEDGRMIASQVAVINLAAEPKVNRGNAGVKRSAAEMYGSSFDLDYGFQRDYYDGMYSFPARVPPPPPIALAVVPSKHQRISGNTSRRGKSGFNSKSGKRGSSKSGKLKGDDLQAIKQELTQIKQKVDSLLENLEKIEKEQSKQEVEVKNAKSEEEQSSSSMKKDETHVKMESEGGAEDSAEEGDPLDDDDNEDQGDNQLHLIKNNEKDAEEGEDNRDSTNGQDDS

SEQ ID NO: 1499 - DNA, 1362 bp, Homo sapiens
atgttcatggtgaaaactgagaatggaggctgtctggggccacaggacactctcattctcattgctttagggcgacattcttcctggtaccagcagaagcagaaatatagatttgtggccaccaagtgcagagtggaattgggagtttttccttacagattcatcaggatgagcatccaggccccacccagactcctggagctggcggggcagagtctgctgagagacaagcccttggccatctctgccctggaggagctgcccagggagctctacctcccactcttcctggaggccttcagcaggagacacttccagactctgacagtgatggtgcaggcctggcccttcacccgcctccctctgggatcgctgatgaagacgcttcatctggagaccttaaaagcattgctggaagggcttcacatgctgcttacacagaaggatcgccccaggaggtggaaacttcaagtgctggatttgcgggatgttgatgagaatttctgggccatatggtctgaatccagggccctgtcctcctccccagaggccatgagtaagaggcagacagcagaggactgtccaaggatgggagagcaccagcccttgaaggtgttcatagacatctgcctcaaggaaataccccaggatgaatgcctgagatacctcttccgaaagcttcattgttacctgaaggagatgaagaatcttcgcaaactcatttttctccaggtgccatccttacacgtcaattaccgcgaggaatgctcagtcgccaaaatcagctctatgttcctcaggctgaaacacctccagctgcttaaaatgaatatggtcaccttccacagagggcacctgggacagctgatcagcaacttgcatgaggaccatcatcagatgaaccccttggagaacttggaattaacttgcggctacctattggaagaggacttgaagtgtctctaccagtacccaagcctcgcttacccaaagcatctgaatctcagctacatgctgcagttctgtatcagtcttgaacccctcggagctctgctggagaaagtttctgccaacacgagggtctcgagagaggcagcaattactcttaagaccctcatcttggagggctgtcagatccactactcccaactcagtgccatcctgcctggcctgagccgctgctcccagctcaccaccttctactttggcagaaattgcatgtctatggaagccctgaaggacctgctgtgccacaccagtgggctgagcaagttaagcctggagatgtatcctgcccccgaggagagtttgaattccttggttcatgtcgattgggagatcttcaccccacttcgggcttag

SEQ ID NO: 1500 - protein, 453 aa, Homo sapiens
MFMVKTENGGCLGPQDTLILIALGRHSSWYQQKQKYRFVATKCRVELGVFPYRFIRMSIQAPPRLLELAGQSLLRDKPLAISALEELPRELYLPLFLEAFSRRHFQTLTVMVQAWPFTRLPLGSLMKTLHLETLKALLEGLHMLLTQKDRPRRWKLQVLDLRDVDENFWAIWSESRALSSSPEAMSKRQTAEDCPRMGEHQPLKVFIDICLKEIPQDECLRYLFRKLHCYLKEMKNLRKLIFLQVPSLHVNYREECSVAKISSMFLRLKHLQLLKMNMVTFHRGHLGQLISNLHEDHHQMNPLENLELTCGYLLEEDLKCLYQYPSLAYPKHLNLSYMLQFCISLEPLGALLEKVSANTRVSREAAITLKTLILEGCQIHYSQLSAILPGLSRCSQLTTFYFGRNCMSMEALKDLLCHTSGLSKLSLEMYPAPEESLNSLVHVDWEIFTPLRA

SEQ ID NO: 1501 - DNA, 667 bp, Homo sapiens
tatctcagaagatcattgaaaataatccacctgaatagtattcaggagctggaaatttgctatgtgtcctggccacatctgataagaaagcttcattgttacctgaaggagatgaagaatcttcgcaaactcatttttctccaggtgccatccttacacgtcaattaccgcgaggaatgctcagtcgccaaaatcagctctatgttcctcaggctgaaacacctccagctgcttaaaatgaatatggtcaccttccacagagggcacctgggacagctgatcaggtgcctctagaaccccttggagaacttggaattaacttgcggctacctattggaagaggacttgaagtgtctctaccagtacccaagcctcgcttacccaaagcatctgaatctcagctacatgctgcagttctgtatcagtcttgaacccctcggagctctgctggagaaagtttctgccaacacgagggtctcgagagaggcagcaattactcttaagaccctcatcttggagggctgtcagatccactactcccaactcagtgccatcctgcctggcctgagccgctgctcccagctcaccaccttctactttggcagaaattgcatgtctatggaagccctgaaggacctgctgtgccacaccagtgggctgagcaagt

SEQ ID NO: 1502 - protein, 60 aa, Homo sapiens
MKNLRKLIFLQVPSLHVNYREECSVAKISSMFLRLKHLQLLKMNMVTFHRGHLGQLIRCL

SEQ ID NO: 1503 - DNA, 1484 bp, Homo sapiens
tctcacctctattttcccacaggaggtggaaacttcaagtgctggatttacaggatgtctgtgagaacttctggatggtttggtctgaagctatggcccgtgggtgcttcctcaatgccaagaggaacaaaaaaccagtgcaggactgtccaaggatgagaggacggcagcccttgactgtgttcgtagaactttggctcaagaacaggactctggatgaacacctcacctgcctccttctatgggtcaagcagaggaaagatttactacacctgtgctgtaagaagctgaaaattttgggaatgcccttccgcaatatcagaagcatcctgaaaatggtgaacctagactgtatccaggaggtggaagtgaattgcaagtgggtactgcccatcctgacacagtttaccccatacctgggccacatgaggaatcttcagaagctcgttctctcccacatggatgtctctcgctacgtttccccagagcagaagaaggagattgttacccagttcaccactcagttcctcaagctgcactgcctccaaaagctttatatgaactctgtttctttcctcgaaggccacctggaccagctgctcagctgtctgaagacctcgttaaaggtcctcacaataactaactgtgtgcttttggaatcagacttgaagcatctatcccagtgcccgagtatcagtcaactaaagaccctggacctgagtggcatcagactgaccaattacagtcttgtgcctctccaaattctcctagaaaaagttgcagccacccttgagtacctggatttagatgactgtggcatcatagactcccaagtcaacgccatcctgcctgccctgagccgctgctttgagctcaacaccttcagcttctgtggaaatcccatctccatggccaccctggagaacctgctgagccacacaatcatactcaaaaacttatgcctggagctgtatcctgccccacgggagagttatggtgctgatggtactctctgctggagcagatttactcagattagggctgagctgatgaagagagttagggacttaaggcaccccaagaggatcttgttcggtactgactactgccctgactgtggcaacaggtcattttatgacctggaggcagatcaatactgctgttgaatgcctgcctatttggatgggtatgtcaaacgctttcttctggacacttggaaactaaaacctaggtcttaggtacatcctaaagggagcacagaacccatcgtttcacacatgggctctgaaagtgggaaaggaatgctgatcaagcaggggcaggacttgggggaaatgttgccatggattcgatgggactttggggacctgtatcctgtagagtcgaaaatgggaatctgaatgtctagagtggaattcaggcttgagaatacatgagggagttactcttgcatggatggttgtaaagaaacaatcagaaataaa

SEQ ID NO: 1504 - protein, 363 aa, Homo sapiens
MVWSEAMARGCFLNAKRNKKPVQDCPRMRGRQPLTVFVELWLKNRTLDEHLTCLLLWVKQRKDLLHLCCKKLKILGMPFRNIRSILKMVNLDCIQEVEVNCKWVLPILTQFTPYLGHMRNLQKLVLSHMDVSRYVSPEQKKEIVTQFTTQFLKLHCLQKLYMNSVSFLEGHLDQLLSCLKTSLKVLTITNCVLLESDLKHLSQCPSISQLKTLDLSGIRLTNYSLVPLQILLEKVAATLEYLDLDDCGIIDSQVNAILPALSRCFELNTFSFCGNPISMATLENLLSHTIILKNLCLELYPAPRESYGADGTLCWSRFTQIRAELMKRVRDLRHPKRILFGTDYCPDCGNRSFYDLEADQYCC

SEQ ID NO: 1505 - DNA, 2104 bp, Homo sapiens; identical to SEQ ID NO: 38

SEQ ID NO: 1506 - protein, 481 aa, Homo sapiens
MRMSLQAPRRLLELAGQSLLGDQALAISILDELPRELFPPLFVEAFTSRRCEVLKVMVQAWPFPCLPLGSLMKTPDLEILHYVVDGIDCLLAQKVRPRRRKLQVLELRDVDENFWTIWSGARPLSCSPEAMSKRQTVEDCPRTGEKQPLKVFMDVCLKEKFMDEDLSFFSGWVQHRRGSVHLCCTKVVNYSMSILNFRNILETVYPDSIQVLEIWNMCWPCMIVEFIRYLSQMRNLRKLFISDGCRYLLSSDSQEQLVAEFSSVLLRLEYLQMLYVRRVCFFRGHLDQLIRCLRSPLETLALTYGFLEKVDLKCLPRYPSLSQLKQLNLSHGALRFIRLEPLRALLEKVAATLQTLFLVDCGIRDSKLRVILPALSCCSNLTTFCFHGNDTSMDGLKDLLRHTGRLSNLSLETYPAPRESLDDRGRVISELLTPLQAELMRILREVREPKRIFFGPVSCPCCGTSPTEQLEFNFCLWGRPA

SEQ ID NO: 1507 - DNA, 1855 bp, Homo sapiens; identical to SEQ ID NO: 40

SEQ ID NO: 1508 - protein, 476 aa, Homo sapiens; identical to SEQ ID NO: 41

SEQ ID NO: 1509 - DNA, 832 bp, Homo sapiens
atgagtaagaggcagacagcagaggactatccaaggatgggagagcaccagcccttaaaggtgttcatagacgtctgcctcaaggaaacaccccaagatgaatgcctgagatacctcttccagctggaacacctccaattgcttaaagtaaaattgatcaccttcttcagtgggcacctggaacagctgatcaggtgcctccagaaccccttggagaacttggagttaacttgtggctacctattggaagaagacatgaagtgtctgtctcagtacccaagcctcagctacctaaagcatctgaatctcagctacgtgctgctgttccgcatcagtcttgaacccctcggagctctgctagagaaaattgctgccactctcaagaccctcatcttcgagggctgtcagatccactactgccaactcagcgccatcctgcctggcctgagccgctgctcccagctcaccaccttctactttggcagaaattgcatgtctacggacaccctgaaggacctgctgcgccacaccagtgggctgagcaagttaagcctggagacgtatcctgcccctgaggagagtttgaattccttggttcgtgtcgattgggagatcttcgccccactttgggctgagctgatgtgtacactgagggaagtcaggcagcccaagaggatcttcactggtcccactccctgcccttcctgtggctcatcaccgtctgaggaactggagctccatctttgctgctagggaaggcgtgcctagtggggttgataaatccaaagttctcttccaggcacttggacactaaaatctagtatgtaagtgc

SEQ ID NO: 1510 - protein, 250 aa, Homo sapiens
MSKRQTAEDYPRMGEHQPLKVFIDVCLKETPQDECLRYLFQLEHLQLLKVKLITFFSGHLEQLIRCLQNPLENLELTCGYLLEEDMKCLSQYPSLSYLKHLNLSYVLLFRISLEPLGALLEKIAATLKTLIFEGCQIHYCQLSAILPGLSRCSQLTTFYFGRNCMSTDTLKDLLRHTSGLSKLSLETYPAPEESLNSLVRVDWEIFAPLWAELMCTLREVRQPKRIFTGPTPCPSCGSSPSEELELHLCC

SEQ ID NO: 1511 - DNA, 1844 bp, Homo sapiens; identical to SEQ ID NO: 43

SEQ ID NO: 1512 - protein, 474 aa, Homo sapiens; identical to SEQ ID NO: 44

SEQ ID NO: 1513 - DNA, 291 bp, Homo sapiens
atgagcctccaggccccatccagactgctggagctggcagggcagagcctgctgaggaaccagttcttgaccatcttcaccctggatgagctgcccagggaggtcttccctctgatgttcatggaggccttcagcatgagacgttttgaggccctgaagctgatggtgcaggcctggcccttcctccgcctccctctgggatccctgatgaagacacctcatctggagaccttgcaagctgtcctgaggggacttgatacactggtggcccagaaggttcgccccaggtga

SEQ ID NO: 1514 - protein, 96 aa, Homo sapiens [sequence omitted]

SEQ ID NO: 1515 - DNA, 1871 bp, Homo sapiens
caggagagacccaaagtcttcaagcctggagttcctgcttggttcttcctgaggtctgagcaccttctagactacatccagatctgttttccctgcagattcatgaagatgagcatccggactccacccagactcctggagcttgcagggcggagcctgctgagggaccaagctttggccatgtccaccctggaggagctgcccacagaacttttccccccactgttcatggaggccttcagcaggagacgctgtgaggccctgaagctgatggtgcaggcctggcccttccgccgcctccctctgaggcctctgataaagatgccttgtctggaggccttccaagctgtgctcgatgggcttgatgcactgcttacccaaggggttcgtcccaggaggtggaaactccaagtgctggatttacaggatgtctgtgagaacttctggatggtttggtctgaagctatggcccatgggtgcttcctcaatgccaagaggaacaaaaaaccagtgcaggactgtccaaggatgagaggacggcagcccttgactgtgttcgtagaactttggctcaagaacaggactctggatgaatacctcacctacctccttctatgggtcaagcagaggaaagatttactacacctgtgctgtaagaagctgaaaattttgggaatgcccttccgcaatatcagaagcatcctgaaaatggtgaacctagactgtatccaggaggtggaagtgaattgcaagtgggtactgcccatcctgacacagtttaccccatacctgggccacatgaggaatcttcagaagctcgttctctcccacatggatgtctctcgctacgtttccccagagcagaagaaggagattgttacccagttcaccactcagttcctcaagctgcgctgcctccaaaagctttatatgaactctgtttctttcctcgaaggccacctggaccagctgctcagctgtctgaagacctcgttaaaagtcctcacaataactaactgtgtgcttttggaatcagacttgaagcatctatcccagtgcccgagtatcagtcaactaaagaccctggacctgagtggcatcagactgaccaattatagtcttgtgcctctccaaattctcctagaaaaagttgcagccacccttgagtacctggatttagatgactgtggcatcatagactcccaagtcaacgccatcctgcctgccctgagccgctgctttgagctcaacaccttcagcttctgtggaaatcccatctgcatggccaccctggagaacctgctgagccacacaatcatactcaaaaacttatgtgtggagctgtatcctgccccccgagagagttatggtgctgatggtactctctgctggagcagatttgctcaaattagggctgagctgatgaacagagtgagggacttaaggcaccccaagaggatcttgttctgtactgactactgccctgactgtggcaacaggtcattttatgacctggaggcagatcaatactgctgttgaatgcctgcctatttggatgggtatgtcaaacgctttcttctggacacttggaaactaaaacctaggtcttaggtacatcctaaagggagcacagaacccatcatttcacacataggctctgaaagtgggaaaggaaagctgatcaagcaggggccggacttgggggaaatgttgccatggattcgatgggactttggggacctgtgtcctgtagattcgaaaatgggaatctgaatgtctagagtggaattcaggcttgagaatacatgagggagttactcttgcatggatggttgtaaagaaacaatcagaaataaaggaaaactgagcag

SEQ ID NO: 1516 - protein, 478 aa, Homo sapiens; identical to SEQ ID NO: 47

SEQ ID NO: 1517 - DNA, 2088 bp, Homo sapiens
tcttgcagatttatcaggatgagcttccaggccccacgcagactcctggagctggcagggcagagcctgctgagggaccaggccttggccatctccgtcctggatgagctgcccagggagctcttcccccgactgttcgtggaggccttcactagcagacgctgcgaggttctgaaggtgatggtgcaggcctggcccttcccctgcctccctctggggtccctgatgaagacgcctgatctggagatcttacattatgtagtggatgggattgattgcctgcttgcccaaaaggttcgccccaggaggtggaaacttcaagtgctggaaatgcgggatgttgatgagaatttttggaccatatggtctggagccaggcccctgtcctgctccccagaggccatgagtaagagacagacagtggaggactgtccaaggacaggagagaagcagcccttgaaggtgttcatggatgtttgcctcaaggaaaaatccgtggatgaagatctgagcttcttctctgggtgggtgcagcacagaagacgttcagtacacctgtgctgtactaaggtggtaaattattcaatgaacattctaaatttcagaaacatattagaaacagtatacccagacagtatccaagtattggaaatttggaacatgtgctggccgtgtatggtagcagaggttagccgttacctgagccagatgaagaatcttcgaaaactcttcatctccgatggctgtggttacctgccaagctttgagagccaaggacagttagttgctgaattcagctctgtgttcctcaggctggagtacctccagatgctttatatgagaaggatccgcttcttcgaaggctacctggaccagctgatcaggtgcctcaagagcccgttggagacattggcattaacttatggctccctagatgaagaggacttgaaatgtctgccctggtacccaagtctcagtcaactgaagcagctgaatctgagtcatggtacactgcgcttcatccgtcttgagcccctccgagctctgctagagaaagttgctgccactcttcagaccctcttcttagtggactgtgggattggggactccaaactcagggtcatcctgcctgccctgagccgctgctccaacctcaccactttctgctttcacggcaatgacacgtccatggatggtctgaaggacctgctgcgccacacaggcaggctgagcaatttgagcctggaaacatatcctgcccctcgggagagtcttgacaacaggggtcgtgtcatttcggagctcctcaccccacttcaggctgagctgatgcgtatactgagggaagtaagggagcccaacaggatcttctttggtcccgtctcctgcccttgctgtggcatgtcacccactgagcaactggagttcaatttttgcttgcggggaaggcctgcctagtggggtggaggtataaaaagctttttctccaggcacttggaaactaaaatctaggacatagatatcttttatttttctttttccttattttacaattttacagcttttatttaaaaatttgagacagggtttccctatgttgtccaggctggtctcaaactcttacgcttaagggagccccctgcttggcctcccaagattctgggattacaggcataagcagctgtgccgggtctataggtgtattataaagggagcagagaaacctctgtttcaggcatgtgctttctgtgagtgggaaaaaaaacacaaaaaaacccagcagggggcagcactggggaaaaggttgaatggagtcactgagactcagggatctgtgtcctagacagtcagaaatagaacctgaagttctagagtgaaggagttatctcagcaaggatggatacaaagaaacgtcggaagtaaagggaacctaaatggaaactctctgctgtccttcatgattgattagcctgtttcagcaatttatacatcagaaatctttagttcctgatgaattaaaaaaagaggtactagttcatctgtgatttaagttcatccgcaggaaataaaggaatcaaaataaacttc

SEQ ID NO: 1518 - protein, 479 aa, Homo sapiens
MSFQAPRRLLELAGQSLLRDQALAISVLDELPRELFPRLFVEAFTSRRCEVLKVMVQAWPFPCLPLGSLMKTPDLEILHYVVDGIDCLLAQKVRPRRWKLQVLEMRDVDENFWTIWSGARPLSCSPEAMSKRQTVEDCPRTGEKQPLKVFMDVCLKEKSVDEDLSFFSGWVQHRRRSVHLCCTKVVNYSMNILNFRNILETVYPDSIQVLEIWNMCWPCMVAEVSRYLSQMKNLRKLFISDGCGYLPSFESQGQLVAEFSSVFLRLEYLQMLYMRRIRFFEGYLDQLIRCLKSPLETLALTYGSLDEEDLKCLPWYPSLSQLKQLNLSHGTLRFIRLEPLRALLEKVAATLQTLFLVDCGIGDSKLRVILPALSRCSNLTTFCFHGNDTSMDGLKDLLRHTGRLSNLSLETYPAPRESLDNRGRVISELLTPLQAELMRILREVREPNRIFFGPVSCPCCGMSPTEQLEFNFCLRGRPA

SEQ ID NO: 1519 - DNA, 1425 bp, Homo sapiens
atgagcctccagtccccatccagactcctggagctggcaggccagagcctgctgaggaaccagttcttgaccatcttcatcctggacgagctgcccagggaggtcttccctctgatgttcatggaggcctccagcatgagacattttgaggccctgaagctgatggtgcaggcctggcccttcctccgcctccctctgggatccctgatgaagacacctcatctggagaccttgcaagctgtgctgaagggacttgatacactgctggcccagaagcttcgccccaggaggtggaaacttcaagtgctggatttgcgggatgttgatgggaatttctggactatatggtctggagccagggccctctcctgctccccagaggccatgagaaagaggcagacagtggaggactatccaaggacgggagagcaccagcccttgaaggtgttcatagacctctgccaaaaggaaagtacactggatgaatgcctgagctacctctgcaggtggatccactacagaagaggtctagtgcacctgtgttgtaataaggtgcagaattactcaatgcccacttcaagtttcagaaatttattgaaaagggtatacccagacagtatccaggagttggaaattaagagaaagtgctctctgaataaaacaggaaagtttgccccttacttgagccagatgagcaatcttcgcaaactctttttagccttcggttatgacgatgagttatatgtaagcggccaacagcagttcgttcctgacttggactgtccattcctctgcctgtactaccctcagatgctttatataagaaagatcagtaatatcaaagagcacctggagcacctgctcaggtgcctcaagaaccccttgggaacctttatattctgtcatgcttacctagctgatcaggacatggagtgtctgtctcagtacccaagcctcagtcagctaaaggagctgcatctgattcatatcctaatgtggactaccaatcttgagccccttggagctctgctagagaaagttgctgctactctcgagatcctcacgttaaaggactgtcagatccaggactcccagctcagggtcctcctgcctgccctgagccgctgctcccagctcaccaccttctactttcgcggaaatgagacctccacgaatgctctgaaagacctgctgtgtcacacaggtgggctgagcaagttaggtctggagttgtatcctgcccctctggagtgtcttgacaacaggggtcatgtcaattgggagatcctcgccccaattcgggctgagctgatgtgtacactcagggaagtcaggcagcccaagaggatcttttttggtcccatcccctgcccttcctgtggctcatggccatctgagaaagtggacttccatctttgctcttag

SEQ ID NO: 1520 - protein, 474 aa, Homo sapiens
MSLQSPSRLLELAGQSLLRNQFLTIFILDELPREVFPLMFMEASSMRHFEALKLMVQAWPFLRLPLGSLMKTPHLETLQAVLKGLDTLLAQKLRPRRWKLQVLDLRDVDGNFWTIWSGARALSCSPEAMRKRQTVEDYPRTGEHQPLKVFIDLCQKESTLDECLSYLCRWIHYRRGLVHLCCNKVQNYSMPTSSFRNLLKRVYPDSIQELEIKRKCSLNKTGKFAPYLSQMSNLRKLFLAFGYDDELYVSGQQQFVPDLDCPFLCLYYPQMLYIRKISNIKEHLEHLLRCLKNPLGTFIFCHAYLADQDMECLSQYPSLSQLKELHLIHILMWTTNLEPLGALLEKVAATLEILTLKDCQIQDSQLRVLLPALSRCSQLTTFYFRGNETSTNALKDLLCHTGGLSKLGLELYPAPLECLDNRGHVNWEILAPIRAELMCTLREVRQPKRIFFGPIPCPSCGSWPSEKVDFHLCS

SEQ ID NO: 1521 - DNA, 1832 bp, Homo sapiens
ctgcttgattctctgagagatcccagcaccctacaaactgagtccagatctgagttttcccttgcagattcatcaagatgagcatcagggccccacccagactcctggagctggcaaggcagaggctgctgagggaccaggccttggccatctccaccatggaggagctgcccagggagctcttccccacactgttcatggaggccttcagcaggagacgctgtgaaaccctgaaaacaatggtgcaggcctggcctttcacccgcctccctctagggtccctgatgaagtcgcctcatctggagtcattaaaatctgtgctggaaggggttgatgtgctgttgacccaagaggttcgccccaggcagtcaaaacttcaagtgctggacttgaggaatgtggatgagaacttctgcgacatattttctggagctactgcatccttcccggaggctctgagtcagaagcaaacagcagataactgtccagggacaggcaggcagcagccattcatggtgttcatagacctttgtctcaagaacaggacactagatgaatgcctcacccacctcttagagtggggcaagcagagaaaaggcttactgcatgtgtgttgcaaggagctgcaggtttttggaatgcccatccacagtatcatagaggtcctgaacatggtggagcttgactgtatccaggaggtggaagtgtgctgcccctgggagctgtccactcttgtgaagtttgccccttacctgggccagatgaggaatctccgcaaacttgttctcttcaacatccgtgcatctgcctgcattcccccagacaacaaggggcagttcattgcccgattcacctctcagttcctcaagctggactatttccagaatctgtctatgcactccgtctctttcctcgaaggccacctggaccagctgctcaggtgtctccaggcctccttggagatggtcgttatgaccgactgcctgctgtcagagtcggacttgaagcatctctcttggtgcccgagcatccgtcaattaaaggagctggacctgaggggtgtcacactgacccatttcagccctgagcccctcacaggtctgctggagcaagttgtggccaccctgcagaccctggacttagaggactgtgggatcatggattcccaactcagcgccatcctgcctgtcctgagccgctgctcccagctcagcaccttcagcttctgtgggaacctcatctccatggctgcccttgagaacctgctgcgccacaccgtcgggctgagcaagctaagcctggagctgtatcctgcccctctggagagttatgacacccagggtgctctctgctgggggagatttgctgaacttggggctgagctgatgaagacactgagggacttaaggcagcccaagatcattgtgttctgcaccgtcccctgccctcgctgtggcatcagggcctcctatgacctggagcccagtcactgcctctgttgaatgcctgccatcagggtggatatatttcaagctttcttctggtcatttcggagctgaaacctaggccatgagtgcatgttaaagggagcacagacccatcgtttcaaatgcctcctcagtgtgaatgggaaaggaatgaggatgcaggaggggcaggactgggggaaaagttgacttggagtggatgggctctttagagacctgtgtcccagagaatcagaaatgggaatctgaattgctagagtgagaatcagggaggagagacacatgagagggttacccctgcacagatggttgtaaagtaacagtcagaaataaagggaaactgag

SEQ ID NO: 1522 - protein, 474 aa, Homo sapiens; identical to SEQ ID NO: 49

SEQ ID NO: 1523 - DNA, 291 bp, Homo sapiens; identical to SEQ ID NO: 1513

SEQ ID NO: 1524 - protein, 96 aa, Homo sapiens [sequence omitted]

SEQ ID NO: 1525 - DNA, 1871 bp, Homo sapiens; identical to SEQ ID NO: 1515

SEQ ID NO: 1526 - protein, 478 aa, Homo sapiens; identical to SEQ ID NO: 47

SEQ ID NO: 1527 - DNA, 1425 bp, Homo sapiens
atgagcctccagtccccatccagactcctggagctggcaggccagagcctgctgaggaaccagttcttgaccatcttcatcctggacgagctgcccagggaggtcttccctctgatgttcatggaggcctccagcatgagacattttgaggccctgaagctgatggtgcaggcctggcccttcctccgcctccctctgggatccctgatgaagacacctcatctggagaccttgcaagctgtgctgaagggacttgatacactgctggcccagaagcttcgccccaggaggtggaaacttcaagtgctggatttgcgggatgttgatgggaatttctggactatatggtctggagccagggccctctcctgctccccagaggccatgagtaagaggcagacagtggaggactatccaaggacgggagagcaccagcccttgaaggtgttcatagacctctgccaaaaggaaagtacactggatgaatgcctgagctacctctgcaggtggatccactacagaagaggtctagtgcacctgtgttgtaataaggtgcagaattactcaatgcccacttcaagtttcagaaatttattgaaaagggtatacccagacagtatccaggagttggaaattaagagaaagtgctctctgaataaaacaggaaagtttgccccttacttgagccagatgagcaatcttcgcaaactctttttagccttcggttatgacgatgagttatatgtaagcggccaacagcagttcgttcctgacttggactgtccattcctctgcctgtactaccctcagatgctttatataagaaagatcagtaatatcaaagagcacctggagcacctgctcaggtgcctcaagaaccccttgggaacctttatattctgtcatgcttacctagctgatcaggacatggagtgtctgtctcagtacccaagcctcagtcagctaaaggagctgcatctgattcatatcctaatgtggaccaccaatcttgagccccttggagctctgctagagaaagttgctgctactctcgagatcctcacgttaaaggactgtcagatccaggactcccagctcagggtcctcctgcctgccctgagccgctgctcccagctcaccaccttctactttcgcggaaatgagacctccacgaatgctctgaaagacctgctgtgtcacacaggtgggctgagcaagttaggtctggagttgtatcctgcccctctggagtgtcttgacaacaggggtcatgtcaattgggagatcctcgccccaattcgggctgagctgatgtgtacactcagggaagtcaggcagcccaagaggatcttttttggtcccatcccctgcccttcctgtggctcatggccatctgagaaagtggacttccatctttgctcttag

SEQ ID NO: 1528 - protein, 474 aa, Homo sapiens
MSLQSPSRLLELAGQSLLRNQFLTIFILDELPREVFPLMFMEASSMRHFEALKLMVQAWPFLRLPLGSLMKTPHLETLQAVLKGLDTLLAQKLRPRRWKLQVLDLRDVDGNFWTIWSGARALSCSPEAMSKRQTVEDYPRTGEHQPLKVFIDLCQKESTLDECLSYLCRWIHYRRGLVHLCCNKVQNYSMPTSSFRNLLKRVYPDSIQELEIKRKCSLNKTGKFAPYLSQMSNLRKLFLAFGYDDELYVSGQQQFVPDLDCPFLCLYYPQMLYIRKISNIKEHLEHLLRCLKNPLGTFIFCHAYLADQDMECLSQYPSLSQLKELHLIHILMWTTNLEPLGALLEKVAATLEILTLKDCQIQDSQLRVLLPALSRCSQLTTFYFRGNETSTNALKDLLCHTGGLSKLGLELYPAPLECLDNRGHVNWEILAPIRAELMCTLREVRQPKRIFFGPIPCPSCGSWPSEKVDFHLCS

SEQ ID NO: 1529 - DNA, 1506 bp, Homo sapiens
atgcttatgctgatgcagcagaggcagaagcctggctttgtggccactgagtacagagtagaattggaattcaggaagatgagcatccggactccacccagactcctggagctggcggggcggagcctgctgagggacgaggccttggccatctccaccctggaggagctgcccacggaactttttcccccattgttcatggaggccttcagcaggagacactgtgaggccctgaagctgatggtgcaggcctggcctttcctccgccttcctctggggtctctgatgaaaaggccttgcccagagaccttccaagctgtgctcgatgggcttgatgcactgcttacccacagggttcgtctcaggaggtggaaacttcaagtgctggatttacaggatgtcagtgagaacttctggatggtttggtctgaagccatggcccgtaggtgcttaccaaatgccatgatgaacagaaaaccagtgcaggactgtccaaggatgagaggacagcagcccttgactgtgttcatagacctttgcctcaagaacaggactctggatgaatacttcacctgcctctttctatgggtcaagcagagggaaggtttagtacacctgtgctgtaagaagctgaaaatgttgggaatgctcttccacaatatcagaaacatcctgaaaacagtcaacctagactgtatccaggaggtggaagtgaattgcaattggacactgcccgtcctggcagagtttaccccatacctcggccagatgaggaatcttcggaagctcgttctctctgacatagattctcgctacatttccccagagcagaagaaggagtttgttacccagttcaccactcagttcctcaagctgcgctgcctccaaaagctttatatgaactctgtttctttcctcgaaggccacctggaccagatgctcagctgtctaaagacctcgttaaacatcctcgcaataactaactgtgtgcttttggaatcagacttgaagcatctgtccaagtacccgagcattggtcaactaaagaccctggacctgagtggcaccagactggccaatttcagccttgtgccgctccaagttctcctagaaaaagttgcagccacccttgagtacctggacttagatgactgtggcatcgtagactcccaagtcaacgccatcctgcctgccctgagccgctgctttgagctcaccaccttcagcttccgtggaaatcccatctccacggccaccctggagaacctgctgtgccacacaatcagactcaacaacttatgcctggagctgtatcctgccccgcgggagagttatgatgttcgtggtatcgtctgccggagcagatttgcccaacttggggctgagctgatggggagagtgagggccttaagggagcccgagaggatcttgttctgtaccgactactgccctcagtgtggcaacaggtcactttacgacctggaggtagatcggtgttgctgttga

SEQ ID NO: 1530 - protein, 501 aa, Homo sapiens
MLMLMQQRQKPGFVATEYRVELEFRKMSIRTPPRLLELAGRSLLRDEALAISTLEELPTELFPPLFMEAFSRRHCEALKLMVQAWPFLRLPLGSLMKRPCPETFQAVLDGLDALLTHRVRLRRWKLQVLDLQDVSENFWMVWSEAMARRCLPNAMMNRKPVQDCPRMRGQQPLTVFIDLCLKNRTLDEYFTCLFLWVKQREGLVHLCCKKLKMLGMLFHNIRNILKTVNLDCIQEVEVNCNWTLPVLAEFTPYLGQMRNLRKLVLSDIDSRYISPEQKKEFVTQFTTQFLKLRCLQKLYMNSVSFLEGHLDQMLSCLKTSLNILAITNCVLLESDLKHLSKYPSIGQLKTLDLSGTRLANFSLVPLQVLLEKVAATLEYLDLDDCGIVDSQVNAILPALSRCFELTTFSFRGNPISTATLENLLCHTIRLNNLCLELYPAPRESYDVRGIVCRSRFAQLGAELMGRVRALREPERILFCTDYCPQCGNRSLYDLEVDRCCC

SEQ ID NO: 1531 - DNA, 2353 bp, Homo sapiens
atggagctgctgttgcagccagttaacgggctggtgacaaagtcgcaattgtgtctgtggagcagggagcctgttccatcgaggcaggctgccccaagtaaaaggctagagagtgtctcctttcctggggcccatgagatgtcctcacgctccctggccaggccagtcagtccgtccgcgccgcgctccatcgcccccgcacgcccgggcgcacgccctccccgcccgggccgccctctggctccccgcgcccggcagccagtgcctcaccgcgccgtcccgcgccagggctcgctccgagagccgcttccttctcgccgcggccggcgcgggccccccggccatgcgcccccgagccccagcctgcgccgccgcggcgctcgggctctgcagccttctgctgctgctcgcgcccgggcacgcgtgccccgcgggctgcgcctgcaccgacccgcacaccgtggactgccgcgaccgcgggctgcccagcgtgccagaccctttccccctggacgtgcgcaagctgctggtggccggcaaccgcatccagcggatccccgaggacttcttcatcttctacggcgacctggtctacctggacttcaggaacaactcgctgcgctcgctggaggagggcacgttcagcggctcggccaagctcgtgttcctcgacctcagctacaacaacttgacccagctgggcgccggcgccttccgctcggccgggaggctggtgaagcttagcctggctaacaacaacctggtgggcgtgcacgaggacgccttcgagaccctggagtcgctgcaggtgctggagctcaacgacaacaacctgcgcagcctcagcgtggccgccctggccgcgctgcccgcgctgcgctccctgcgtctggacgggaacccctggctgtgcgactgtgacttcgcccacctcttctcctggatccaggagaacgcatccaaactgcccaaaggccttgatgaaatccagtgctccctgcccatggagagcaggaggatatccctgcgtgagctgtcggaggccagcttcagcgagtgtaggttcagcctgtcactcacagacctctgcatcatcattttctccggtgtggccgtgtccattgcggccatcatctccagcttcttcctggccactgtggtgcagtgcctccagaggtgcgcacccaacaaagatgcggaggatgaagacgaggacaaggatgactgagccacctcctccctcctgcctcttactctccagcaccgaaccagaagctctctccaagacgagagggaaatgctgaaaatggaaaagcactggccaccatctgtgaactgaacagagcctgttccgtgtcttggcccctgggtacacctgctgggaccactgatctcagagtttagaatcagcagagcacagaagcccaggaaggatggagggaattattcctggagcataacctgcctctcagatcgaggtgtgtgttgggggagaagatgaccgagtcaggcttcatagctgatgactaaaagcctcccccaggaaatgtgaagactggcagctttcaatggcaaagatgattttacgccattctttttctgacctgtactgggagatcatgaaacatctgccttcctcccaagaaacagcagctcaaacagtggagattcaaattcggatcattcaccacaagaacgagaactttgatccttatataataggcctcagcaaccttgggatgttatactgggaactaataaactcgtgtgcaatagactcaatgtttatgttcccccagattttatatgttgaaacctaatccccaatgtgatggtatttggaggtggggcttttgggaggtgattaggtttagatcatatcatgaggatggggcccaaatgatgggattagtgccctcatgaaaggtggccccagagagctccttcaccccttcaatgcttgaggatgcagcaagaaatcagctgcccatgaaccgagaagcaggccctcaccagaacccagccatgctggcacccagatctcagacttccagcctccagaactgggagaaataaataaatgtctgttgtttgtaagccactcaatctctggtattctgttatagtggtcgaaatggacccatgaagaagctaacaactggtcagagggtgtctgttgttaattttggtaagctggttgggaaaactttgacttgacataactcaaaccctgatctttatcctaagcggtagcgacttgtagaggaaggattagttgctttgtacagttgtgatggtctctctgctcagcatcatttttccttctgaaggacagacaggttgttcccctcca

SEQ ID NO: 1532 - protein, 364 aa, Homo sapiens
MRCPHAPWPGQSVRPRRAPSPPHARAHALPARAALWLPAPGSQCLTAPSRARARSESRFLLAAAGAGPPAMRPRAPACAAAALGLCSLLLLLAPGHACPAGCACTDPHTVDCRDRGLPSVPDPFPLDVRKLLVAGNRIQRIPEDFFIFYGDLVYLDFRNNSLRSLEEGTFSGSAKLVFLDLSYNNLTQLGAGAFRSAGRLVKLSLANNNLVGVHEDAFETLESLQVLELNDNNLRSLSVAALAALPALRSLRLDGNPWLCDCDFAHLFSWIQENASKLPKGLDEIQCSLPMESRRISLRELSEASFSECRFSLSLTDLCIIIFSGVAVSIAAIISSFFLATVVQCLQRCAPNKDAEDEDEDKDD

SEQ ID NO: 1533 - DNA, 1911 bp, Homo sapiens
atcgcccccgcacgcccgggcgcacgccctccccgcccgggccgccctctggctccccgcgcccggcagccagtgcctcaccgcgccgtcccgcgccagggctcgctccgagagccgcttccttctcgccgcggccggcgcgggccccccggccatgcgcccccgagccccagcctgcgccgccgcggcgctcgggctctgcagccttctgctgctgctcgcgcccgggcacgcgtgccccgcgggctgcgcctgcaccgacccgcacaccgtggactgccgcgaccgcgggctgcccagcgtgccagaccctttccccctggacgtgcgcaagctgctggtggccggcaaccgcatccagcggatccccgaggacttcttcatcttctacggcgacctggtctacctggacttcaggaacaactcgctgcgctcgctggaggagggcacgttcagcggctcggccaagctcgtgttcctcgacctcagctacaacaacttgacccagctgggcgccggcgccttccgctcggccgggaggctggtgaagcttagcctggctaacaacaacctggtgggcgtgcacgaggacgccttcgagaccctggagtcgctgcaggtgctggagctcaacgacaacaacctgcgcagcctcagcgtggccgccctggccgcgctgcccgcgctgcgctccctgcgtctggacgggaacccctggctgtgcgactgtgacttcgcccacctcttctcctggatccaggagaacgcatccaaactgcccaaaggccttgatgaaatccagtgctccctgcccatggagagcaggaggatatccctgcgtgagctgtcggaggccagcttcagcgagtgtaggttcagcctgtcactcacagacctctgcatcatcattttctccggtgtggccgtgtccattgcggccatcatctccagcttcttcctggccactgtggtgcagtgcctccagaggtgcgcacccaacaaagatgcggaggatgaagacgaggacaaggatgactgagccacctcctccctcctgcctcttactctccagcaccgaaccagaagctctctccaagacgagagggaaatgctgaaaatggaaaagcactggccaccatctgtgaactgaacagagcctgttccgtgtcttggcccctgggtacacctgctgggaccactgatctcagagtttagaatcagcagagcacagaagcccaggaaggatggagggaattattcctggagcataacctgcctctcagatcgaggtgtgtgttgggggagaagatgaccgagtcaggcttcatagctgatgactaaaagcctcccccaggaaatgtgaagactggcagctttcaatggcaaagatgattttacgccattctttttctgacctgtactgggagatcatgaaacatctgccttcctcccaagaaacagcagctcaaacagtggagattcaaattcggatcattcaccacaagaacgagaactttgatccttatataataggcctcagcaaccttgggatgttatactgggaactaataaactcgtgtgcaatagactcaatgtttatgttcccccagattttatatgttgaaacctaatccccaatgtgatggtatttggaggtggggcttttgggaggtgattaggtttagatcatatcatgaggatggggcccaaatgatgggattagtgccctcatgaaaggtggccccagagagctccttcaccccttcaatgcttgaggatgcagcaagaaatcagctgcccatgaaccgagaagcaggccctcaccagaacccagccatgctggcacccagatctcagacttccagcctccagaactgggagaaataaataaatgtctgttgtttgtaagcc

SEQ ID NO: 1534 - protein, 294 aa, Homo sapiens
MRPRAPACAAAALGLCSLLLLLAPGHACPAGCACTDPHTVDCRDRGLPSVPDPFPLDVRKLLVAGNRIQRIPEDFFIFYGDLVYLDFRNNSLRSLEEGTFSGSAKLVFLDLSYNNLTQLGAGAFRSAGRLVKLSLANNNLVGVHEDAFETLESLQVLELNDNNLRSLSVAALAALPALRSLRLDGNPWLCDCDFAHLFSWIQENASKLPKGLDEIQCSLPMESRRISLRELSEASFSECRFSLSLTDLCIIIFSGVAVSIAAIISSFFLATVVQCLQRCAPNKDAEDEDEDKDD

SEQ ID NO: 1535 - DNA, 2595 bp, Homo sapiens
aatgtcagtgcccgcccctgcttacaggctggggccatctgtaggcttggacaggaggggtttggggagacatggcctgctgtctgggaaaatattgataacatgttcccaggatgaggcatttctgacccttgttgtggtggaacgtggtgttccttgtactttctcccagcagaatatgataagaggcaggctatttctcatggcctgaatccctgtggaatatttcactttaagcacggtctgtgaaatggcgggggacttacaaaatggtgcagattggactttcttgccttctactttaatataaaaggaagaggggcgttgttgattatctggctgtttcctgtcgaattaggggcactgtaaccagggtttgggttttgaagtagtgggtgttcgactttagagttgttttcctggaagcgctgatactggacttagtggaggagaacgacggtatcaatgtgtttctggatgactgcctggacaagggagttcagcttttgggagactgactgggctatgaaggatggtagaggacagtcttcagcctgagacccatccctagttatatcttctggacagattcctagaagtgggattactggctcaaaagtgtacctttctactctgcagaggctggaaaggcaaaaatgatggctaaggcttccttgcagtggccgtgccattttgaatttccactggcattgaatgagagtccctgttccacatccttggcagcatttgtggtgttaacgttttggattttagccatcctcgtagccgctgatacagaagcctgagggaacacactcccccctacgtccttctccaacacagcagagccaggaaggacccggatggaagttaggacaaagaggcccagaattggcacagataccaacagaccattcgttgaagaagaaatccaaatggccataagaaccccagagatgaaaggcctcctcccactggcttggttcctggcttgtagtgtgcctgctgtgcaaggaggcttgctggacctaaaatcaatgatcgagaaggtgacagggaagaacgccctgacaaactacggcttctacggctgttactgcggctggggcggccgaggaacccccaaggatggcaccgattggtgctgttgggcgcatgaccactgctatgggcggctggaggagaagggctgcaacattcgcacacagtcctacaaatacagattcgcgtggggcgtggtcacctgcgagcccgggcccttctgccatgtgaacctctgtgcctgtgaccggaagctcgtctactgcctcaagagaaacctacggagctacaacccacagtaccaatactttcccaacatcctctgctcctaggcctccccagcgagctcctcccagaccaagacttttgttctgtttttctacaacacagagtactgactctgcctggttcctgagagaggctcctaagtcacagacctcagtctttctcgaagcttggcggacccccagggccacactgtaccctccagcgagtcccaggagagtgactctggtcataggacttggtagggtcccagggtccctaggcctccacttctgagggcagcccctctggtgccaagagctctcctccaactcagggttggctgtgtctcttttcttctctgaagacagcgtcctggctccagttggaacactttcctgagatgcacttacttctcagcttctgcgatcagattatcatcaccaccaccctccagagaatttttacgcaagaagagccaaattgactctctaaatctggtgtatgggtattaaataaaattcattctcaaggctaataaaaaccacattggcattttcctctgctgtgggggatcgctggtgcctctttctctgccactggggcaataaacccaaagatgtctacattatctccgaaacagaagggaagattagtaaatgcagggttttctgggatgagcttcaggctttctcttgggctaattttcttacaccttggggtcctctccagtattgggtctcattcttcctcgatggggtcagggaaagataactggtgattatgccagcttcagcttccaggccagagagggtggcattcaaatcccagtgctggcttcttcagctgtgtggtcttggacccgttactgaacctctttgactttcagtctctttgagaaataaactgtcttgttccttgcaatgtaaaatgagacttctaaagcccaccttgatgctgatatggagaatgctgaggttctaggatttcacacagcaggaatttttttttaataggtgtcagctgtggggtttattttttacaaagtaaggacattaaaaaaaccaacccgtctatcaattcataaaagaaaggatgttctgataccaagactgaaagaagaaaggatgtattccaaaacaaaggaacatccttccaagaaaggacctatggcttctttattccgacataccccaaaataactgcatgataaataggtctatatttaaaaagctctagtgtcgaatgttttcaaaataaaatttaattttatgagattaccctgaatgc

SEQ ID NO: 1536 - protein, 169 aa, Homo sapiens
MEVRTKRPRIGTDTNRPFVEEEIQMAIRTPEMKGLLPLAWFLACSVPAVQGGLLDLKSMIEKVTGKNALTNYGFYGCYCGWGGRGTPKDGTDWCCWAHDHCYGRLEEKGCNIRTQSYKYRFAWGVVTCEPGPFCHVNLCACDRKLVYCLKRNLRSYNPQYQYFPNILCS

SEQ ID NO: 1537 - DNA, 1524 bp, Homo sapiens
atttcactttaagcacggtctgtgaaatggcgggggacttacaaaatggtgcagattggactttcttgccttctactttaatataaaaggaagaggggcgttgttgattatctggctgtttcctgtcgaattaggggcactgtaaccagggtttgggttttgaagtagtgggtgttcgactttagagttgttttcctggaagcgctgatactggacttagtggaggagaacgacggtatcaatgtgtttctggatgactgcctggacaagggagttcagcttttgggagactgactgggctatgaagtgtacctttctactctgcagaggctggaaaggcaaaaatgatggctaaggcttccttgcagccgctgatacagaagcctgagggaacacactcccccctacgtccttctccaacacagcagagccaggaaggacccggatggaagttaggacaaagaggcccagaattggcacagataccaacagaccattcgttgaagaagaaatccaaatggccataagaaccccagagatgaaaggcctcctcccactggcttggttcctggcttgtagtgtgcctgctgtgcaaggaggcttgctggacctaaaatcaatgatcgagaaggtgacagggaagaacgccctgacaaactacggcttctacggctgttactgcggctggggcggccgaggaacccccaaggatggcaccgattgggtctcactctggttgcccaggctggagtgcaatggtgcgatctcagctcactgcatcctagaccttctgcactcaggtgctgttgggcgcatgaccactgctatgggcggctggaggagaagggctgcaacattcgcacacagtcctacaaatacagattcgcgtggggcgtggtcacctgcgagcccgggcccttctgccatgtgaacctctgtgcctgtgaccggaagctcgtctactgcctcaagagaaacctacggagctacaacccacagtaccaatactttcccaacatcctctgctcctaggcctccccagcgagctcctcccagaccaagacttttgttctgtttttctacaacacagagtactgactctgcctggttcctgagagaggctcctaagtcacagacctcagtctttctcgaagcttggcggacccccagggccacactgtaccctccagcgagtcccaggagagtgactctggtcataggacttggtagggtcccagggtccctaggcctccacttctgagggcagcccctctggtgccaagagctctcctccaactcagggttggctgtgtctcttttcttctctgaagacagcgtcctggctccagttggaacactttcctgagatgcacttacttctcagcttctgcgatcagattatcatcaccaccaccctccagagaatttttacgcaagaagagccaaattgactctctaaatctggtgtatgggtattaaataaaattcattctcaaggctaataaaaaccacattggcattttc

SEQ ID NO: 1538 - protein, 161 aa, Homo sapiens
MEVRTKRPRIGTDTNRPFVEEEIQMAIRTPEMKGLLPLAWFLACSVPAVQGGLLDLKSMIEKVTGKNALTNYGFYGCYCGWGGRGTPKDGTDWVSLWLPRLECNGAISAHCILDLLHSGAVGRMTTAMGGWRRRAATFAHSPTNTDSRGAWSPASPGPSAM

SEQ ID NO: 1539 - DNA, 1853 bp, Homo sapiens
atttcactttaagcacggtctgtgaaatggcgggggacttacaaaatggtgcagattggactttcttgccttctactttaatataaaaggaagaggggcgttgttgattatctggctgtttcctgtcgaattaggggcactgtaaccagggtttgggttttgaagtagtgggtgttcgactttagagttgttttcctggaagcgctgatactggacttagtggaggagaacgacggtatcaatgtgtttctggatgactgcctggacaagggagttcagcttttgggagactgactgggctatgaagtgtacctttctactctgcagaggctggaaaggcaaaaatgatggctaaggcttccttgcagccgctgatacagaagcctgagggaacacactcccccctacgtccttctccaacacagcagagccaggaaggacccggatggaagttaggacaaagaggcccagaattggcacagataccaacagaccattcgttgaagaagaaatccaaatggccataagctttaagattctggaggccaagaatttgactccccccggatccatggtctgtggataccaatgttccgactggagacggggagcccgcgagacccgggtctccagggtctgcccaaggaagttgctcatgggagcagacctctagagcaggatttgaggccaggccaaagagggagagaattcgccgacatctatttaacatcccttaattgttgagagcatccactgtgtgccagacacttcggtacacacagaaagaaacccagaggaggaaccccagagatgaaaggcctcctcccactggcttggttcctggcttgtagtgtgcctgctgtgcaaggaggcttgctggacctaaaatcaatgatcgagaaggtgacagggaagaacgccctgacaaactacggcttctacggctgttactgcggctggggcggccgaggaacccccaaggatggcaccgattgggtctcactctggttgcccaggctggagtgcaatggtgcgatctcagctcactgcatcctagaccttctgcactcagggatggggtcaggagggcacccctcccactcgggatctaagtctcttgcacggacaggtgctgttgggcgcatgaccactgctatgggcggctggaggagaagggctgcaacattcgcacacagtcctacaaatacagattcgcgtggggcgtggtcacctgcgagcccgggcccttctgccatgtgaacctctgtgcctgtgaccggaagctcgtctactgcctcaagagaaacctacggagctacaacccacagtaccaatactttcccaacatcctctgctcctaggcctccccagcgagctcctcccagaccaagacttttgttctgtttttctacaacacagagtactgactctgcctggttcctgagagaggctcctaagtcacagacctcagtctttctcgaagcttggcggacccccagggccacactgtaccctccagcgagtcccaggagagtgactctggtcataggacttggtagggtcccagggtccctaggcctccacttctgagggcagcccctctggtgccaagagctctcctccaactcagggttggctgtgtctcttttcttctctgaagacagcgtcctggctccagttggaacactttcctgagatgcacttacttctcagcttctgcgatcagattatcatcaccaccaccctccagagaatttttacgcaagaagagccaaattgactctctaaatctggtgtatgggtattaaataaaattcattctcaaggctaataaaaaccacattggcattttc

SEQ ID NO: 1540 - protein, 149 aa, Homo sapiens
MKGLLPLAWFLACSVPAVQGGLLDLKSMIEKVTGKNALTNYGFYGCYCGWGGRGTPKDGTDWVSLWLPRLECNGAISAHCILDLLHSGMGSGGHPSHSGSKSLARTGAVGRMTTAMGGWRRRAATFAHSPTNTDSRGAWSPASPGPSAM

SEQ ID NO: 1541 - DNA, 1504 bp, Homo sapiens
atttcactttaagcacggtctgtgaaatggcgggggacttacaaaatggtgcagattggactttcttgccttctactttaatataaaaggaagaggggcgttgttgattatctggctgtttcctgtcgaattaggggcactgtaaccagggtttgggttttgaagtagtgggtgttcgactttagagttgttttcctggaagcgctgatactggacttagtggaggagaacgacggtatcaatgtgtttctggatgactgcctggacaagggagttcagcttttgggagactgactgggctatgaagtgtacctttctactctgcagaggctggaaaggcaaaaatgatggctaaggcttccttgcagccgctgatacagaagcctgagggaacacactcccccctacgtccttctccaacacagcagagccaggaaggacccggatggaagttaggacaaagaggcccagaattggcacagataccaacagaccattcgttgaagaagaaatccaaatggccataagaaccccagagatgaaaggcctcctcccactggcttggttcctggcttgtagtgtgcctgctgtgcaaggaggcttgctggacctaaaatcaatgatcgagaaggtgacagggaagaacgccctgacaaactacggcttctacggctgttactgcggctggggcggccgaggaacccccaaggatggcaccgattgggatggggtcaggagggcacccctcccactcgggatctaagtctcttgcacggacaggtgctgttgggcgcatgaccactgctatgggcggctggaggagaagggctgcaacattcgcacacagtcctacaaatacagattcgcgtggggcgtggtcacctgcgagcccgggcccttctgccatgtgaacctctgtgcctgtgaccggaagctcgtctactgcctcaagagaaacctacggagctacaacccacagtaccaatactttcccaacatcctctgctcctaggcctccccagcgagctcctcccagaccaagacttttgttctgtttttctacaacacagagtactgactctgcctggttcctgagagaggctcctaagtcacagacctcagtctttctcgaagcttggcggacccccagggccacactgtaccctccagcgagtcccaggagagtgactctggtcataggacttggtagggtcccagggtccctaggcctccacttctgagggcagcccctctggtgccaagagctctcctccaactcagggttggctgtgtctcttttcttctctgaagacagcgtcctggctccagttggaacactttcctgagatgcacttacttctcagcttctgcgatcagattatcatcaccaccaccctccagagaatttttacgcaagaagagccaaattgactctctaaatctggtgtatgggtattaaataaaattcattctcaaggctaataaaaaccacattggcattttc

SEQ ID NO: 1542 - protein, 105 aa, Homo sapiens
MEVRTKRPRIGTDTNRPFVEEEIQMAIRTPEMKGLLPLAWFLACSVPAVQGGLLDLKSMIEKVTGKNALTNYGFYGCYCGWGGRGTPKDGTDWDGVRRAPLPLGI

SEQ ID NO: 1543 - DNA, 1340 bp, Homo sapiens
atttcactttaagcacggtctgtgaaatggcgggggacttacaaaatggtgcagattggactttcttgccttctactttaatataaaaggaagaggggcgttgttgattatctggctgtttcctgtcgaattaggggcactgtaaccagggtttgggttttgaagtagtgggtgttcgactttagagttgttttcctggaagcgctgatactggacttagtggaggagaacgacggtatcaatgtgtttctggatgactgcctggacaagggagttcagcttttgggagactgactgggctatgaagtgtacctttctactctgcagaggctggaaaggcaaaaatgatggctaaggcttccttgcagccgctgatacagaagcctgagggaacacactcccccctacgtccttctccaacacagcagagccaggaaggacccggatggaagttaggacaaagaggcccagaattggcacagataccaacagaccattcgttgaagaagaaatccaaatggccataagaaccccagagatgaaaggcctcctcccactggcttggttcctggcttgtagtgtgcctgctgtgcaaggaggcttgctggacctaaaatcaatgatcgagaaggtgacagggaagaacgccctgacaaactacggcttctacggctgttactgcggctggggcggccgaggaacccccaaggatggcaccgattgagcccgggcccttctgccatgtgaacctctgtgcctgtgaccggaagctcgtctactgcctcaagagaaacctacggagctacaacccacagtaccaatactttcccaacatcctctgctcctaggcctccccagcgagctcctcccagaccaagacttttgttctgtttttctacaacacagagtactgactctgcctggttcctgagagaggctcctaagtcacagacctcagtctttctcgaagcttggcggacccccagggccacactgtaccctccagcgagtcccaggagagtgactctggtcataggacttggtagggtcccagggtccctaggcctccacttctgagggcagcccctctggtgccaagagctctcctccaactcagggttggctgtgtctcttttcttctctgaagacagcgtcctggctccagttggaacactttcctgagatgcacttacttctcagcttctgcgatcagattatcatcaccaccaccctccagagaatttttacgcaagaagagccaaattgactctctaaatctggtgtatgggtattaaataaaattcattctcaaggctaataaaaaccacattggcattttc

SEQ ID NO: 1544 - protein, 92 aa, Homo sapiens
MEVRTKRPRIGTDTNRPFVEEEIQMAIRTPEMKGLLPLAWFLACSVPAVQGGLLDLKSMIEKVTGKNALTNYGFYGCYCGWGGRGTPKDGTD

SEQ ID NO: 1545 - DNA, 1619 bp, Homo sapiens
atttcactttaagcacggtctgtgaaatggcgggggacttacaaaatggtgcagattggactttcttgccttctactttaatataaaaggaagaggggcgttgttgattatctggctgtttcctgtcgaattaggggcactgtaaccagggtttgggttttgaagtagtgggtgttcgactttagagttgttttcctggaagcgctgatactggacttagtggaggagaacgacggtatcaatgtgtttctggatgactgcctggacaagggagttcagcttttgggagactgactgggctatgaagtgtacctttctactctgcagaggctggaaaggcaaaaatgatggctaaggcttccttgcagccgctgatacagaagcctgagggaacacactcccccctacgtccttctccaacacagcagagccaggaaggacccggatggaagttaggacaaagaggcccagaattggcacagataccaacagaccattcgttgaagaagaaatccaaatggccataagctttaagattctggaggccaagaatttgactccccccggatccatggtctgtggataccaatgttccgactggagacggggagcccgcgagacccgggtctccagggtctgcccaaggaagttgctcatgggagcagacctctagagcaggatttgaggccaggccaaagagaaccccagagatgaaaggcctcctcccactggcttggttcctggcttgtagtgtgcctgctgtgcaaggaggcttgctggacctaaaatcaatgatcgagaaggtgacagggaagaacgccctgacaaactacggcttctacggctgttactgcggctggggcggccgaggaacccccaaggatggcaccgattggtgctgttgggcgcatgaccactgctatgggcggctggaggagaagggctgcaacattcgcacacagtcctacaaatacagattcgcgtggggcgtggtcacctgcgagcccgggcccttctgccatgtgaacctctgtgcctgtgaccggaagctcgtctactgcctcaagagaaacctacggagctacaacccacagtaccaatactttcccaacatcctctgctcctaggcctccccagcgagctcctcccagaccaagacttttgttctgtttttctacaacacagagtactgactctgcctggttcctgagagaggctcctaagtcacagacctcagtctttctcgaagcttggcggacccccagggccacactgtaccctccagcgagtcccaggagagtgactctggtcataggacttggtagggtcccagggtccctaggcctccacttctgagggcagcccctctggtgccaagagctctcctccaactcagggttggctgtgtctcttttcttctctgaagacagcgtcctggctccagttggaacactttcctgagatgcacttacttctcagcttctgcgatcagattatcatcaccaccaccctccagagaatttttacgcaagaagagccaaattgactctctaaatctggtgtatgggtattaaataaaattcattctcaaggctaataaaaaccacattggcattttc

SEQ ID NO: 1546 - protein, 138 aa, Homo sapiens; identical to SEQ ID NO: 54

SEQ ID NO: 1547 - DNA, 2583 bp, Homo sapiens
atttcactttaagcacggtctgtgaaatggcgggggacttacaaaatggtgcagattggactttcttgccttctactttaatataaaaggaagaggggcgttgttgattatctggctgtttcctgtcgaattaggggcactgtaaccagggtttgggttttgaagtagtgggtgttcgactttagagttgttttcctggaagcgctgatactggacttagtggaggagaacgacggtatcaatgtgtttctggatgactgcctggacaagggagttcagcttttgggagactgactgggctatgaagtgtacctttctactctgcagaggctggaaaggcaaaaatgatggctaaggcttccttgcagccgctgatacagaagcctgagggaacacactcccccctacgtccttctccaacacagcagagccaggaaggacccggatggaagttaggacaaagaggcccagaattggcacagataccaacagaccattcgttgaagaagaaatccaaatggccataagctttaagattctggaggccaagaatttgactccccccggatccatggtctgtggataccaatgttccgactggagacggggagcccgcgagacccgggtctccagggtctgcccaaggaagttgctcatgggagcagacctctagagcaggatttgaggccaggccaaagagggagagaattcgccgacatctatttaacatcccttaattgttgagagcatccactgtgtgccagacacttcggtacacacagaaagaaacccagaggaggaaccccagagatgaaaggcctcctcccactggcttggttcctggcttgtagtgtgcctgctgtgcaaggaggcttgctggacctaaaatcaatgatcgagaaggtgacagggaagaacgccctgacaaactacggcttctacggctgttactgcggctggggcggccgaggaacccccaaggatggcaccgattgggtctcactctggttgcccaggctggagtgcaatggtgcgatctcagctcactgcatcctagaccttctgcactcagggatggggtcaggagggcacccctcccactcgggatctaagtctcttgcacggacaggtgctgttgggcgcatgaccactgctatgggcggctggaggagaagggctgcaacattcgcacacagtcctacaaatacagattcgcgtggggcgtggtcacctgcgagcccgggcccttctgccatgtgaacctctgtgcctgtgaccggaagctcgtctactgcctcaagagaaacctacggagctacaacccacagtaccaatactttcccaacatcctctgctcctaggcctccccagcgagctcctcccagaccaagacttttgttctgtttttctacaacacagagtactgactctgcctggttcctgagagaggctcctaagtcacagacctcagtctttctcgaagcttggcggacccccagggccacactgtaccctccagcgagtcccaggagagtgactctggtcataggacttggtagggtcccagggtccctaggcctccacttctgagggcagcccctctggtgccaagagctctcctccaactcagggttggctgtgtctcttttcttctctgaagacagcgtcctggctccagttggaacactttcctgagatgcacttacttctcagcttctgcgatcagattatcatcaccaccaccctccagagaatttttacgcaagaagagccaaattgactctctaaatctggtgtatgggtattaaataaaattcattctcaaggctaataaaaaccacattggcattttcctctgctgtgggggatcgctggtgcctctttctctgccactggggcaataaacccaaagatgtctacattatctccgaaacagaagggaagattagtaaatgcagggttttctgggatgagcttcaggctttctcttgggctaattttcttacaccttggggtcctctccagtattgggtctcattcttcctcgatggggtcagggaaagataactggtgattatgccagcttcagcttccaggccagagagggtggcattcaaatcccagtgctggcttcttcagctgtgtggtcttggacccgttactgaacctctttgactttcagtctctttgagaaataaactgtcttgttccttgcaatgtaaaatgagacttctaaagcccaccttgatgctgatatggagaatgctgaggttctaggatttcacacagcaggaatttttttttaataggtgtcagctgtggggtttattttttacaaagtaaggacattaaaaaaaccaacccgtctatcaattcataaaagaaaggatgttctgataccaagactgaaagaagaaaggatgtattccaaaacaaaggaacatccttccaagaaaggacctatggcttctttattccgacataccccaaaataactgcatgataaataggtctatatttaaaaagctctagtgtcgaatgttttcaaaataaaatttaattttatgagattaccctgaatgc

SEQ ID NO: 1548 - protein, 149 aa, Homo sapiens; identical to SEQ ID NO: 1540

SEQ ID NO: 1549 - DNA, 2234 bp, Homo sapiens
atttcactttaagcacggtctgtgaaatggcgggggacttacaaaatggtgcagattggactttcttgccttctactttaatataaaaggaagaggggcgttgttgattatctggctgtttcctgtcgaattaggggcactgtaaccagggtttgggttttgaagtagtgggtgttcgactttagagttgttttcctggaagcgctgatactggacttagtggaggagaacgacggtatcaatgtgtttctggatgactgcctggacaagggagttcagcttttgggagactgactgggctatgaagtgtacctttctactctgcagaggctggaaaggcaaaaatgatggctaaggcttccttgcagccgctgatacagaagcctgagggaacacactcccccctacgtccttctccaacacagcagagccaggaaggacccggatggaagttaggacaaagaggcccagaattggcacagataccaacagaccattcgttgaagaagaaatccaaatggccataagaaccccagagatgaaaggcctcctcccactggcttggttcctggcttgtagtgtgcctgctgtgcaaggaggcttgctggacctaaaatcaatgatcgagaaggtgacagggaagaacgccctgacaaactacggcttctacggctgttactgcggctggggcggccgaggaacccccaaggatggcaccgattgggatggggtcaggagggcacccctcccactcgggatctaagtctcttgcacggacaggtgctgttgggcgcatgaccactgctatgggcggctggaggagaagggctgcaacattcgcacacagtcctacaaatacagattcgcgtggggcgtggtcacctgcgagcccgggcccttctgccatgtgaacctctgtgcctgtgaccggaagctcgtctactgcctcaagagaaacctacggagctacaacccacagtaccaatactttcccaacatcctctgctcctaggcctccccagcgagctcctcccagaccaagacttttgttctgtttttctacaacacagagtactgactctgcctggttcctgagagaggctcctaagtcacagacctcagtctttctcgaagcttggcggacccccagggccacactgtaccctccagcgagtcccaggagagtgactctggtcataggacttggtagggtcccagggtccctaggcctccacttctgagggcagcccctctggtgccaagagctctcctccaactcagggttggctgtgtctcttttcttctctgaagacagcgtcctggctccagttggaacactttcctgagatgcacttacttctcagcttctgcgatcagattatcatcaccaccaccctccagagaatttttacgcaagaagagccaaattgactctctaaatctggtgtatgggtattaaataaaattcattctcaaggctaataaaaaccacattggcattttcctctgctgtgggggatcgctggtgcctctttctctgccactggggcaataaacccaaagatgtctacattatctccgaaacagaagggaagattagtaaatgcagggttttctgggatgagcttcaggctttctcttgggctaattttcttacaccttggggtcctctccagtattgggtctcattcttcctcgatggggtcagggaaagataactggtgattatgccagcttcagcttccaggccagagagggtggcattcaaatcccagtgctggcttcttcagctgtgtggtcttggacccgttactgaacctctttgactttcagtctctttgagaaataaactgtcttgttccttgcaatgtaaaatgagacttctaaagcccaccttgatgctgatatggagaatgctgaggttctaggatttcacacagcaggaatttttttttaataggtgtcagctgtggggtttattttttacaaagtaaggacattaaaaaaaccaacccgtctatcaattcataaaagaaaggatgttctgataccaagactgaaagaagaaaggatgtattccaaaacaaaggaacatccttccaagaaaggacctatggcttctttattccgacataccccaaaataactgcatgataaataggtctatatttaaaaagctctagtgtcgaatgttttcaaaataaaatttaattttatgagattaccctgaatgc

SEQ ID NO: 1550 - protein, 105 aa, Homo sapiens; identical to SEQ ID NO: 1542

SEQ ID NO: 1551 - DNA, 2070 bp, Homo sapiens
atttcactttaagcacggtctgtgaaatggcgggggacttacaaaatggtgcagattggactttcttgccttctactttaatataaaaggaagaggggcgttgttgattatctggctgtttcctgtcgaattaggggcactgtaaccagggtttgggttttgaagtagtgggtgttcgactttagagttgttttcctggaagcgctgatactggacttagtggaggagaacgacggtatcaatgtgtttctggatgactgcctggacaagggagttcagcttttgggagactgactgggctatgaagtgtacctttctactctgcagaggctggaaaggcaaaaatgatggctaaggcttccttgcagccgctgatacagaagcctgagggaacacactcccccctacgtccttctccaacacagcagagccaggaaggacccggatggaagttaggacaaagaggcccagaattggcacagataccaacagaccattcgttgaagaagaaatccaaatggccataagaaccccagagatgaaaggcctcctcccactggcttggttcctggcttgtagtgtgcctgctgtgcaaggaggcttgctggacctaaaatcaatgatcgagaaggtgacagggaagaacgccctgacaaactacggcttctacggctgttactgcggctggggcggccgaggaacccccaaggatggcaccgattgagcccgggcccttctgccatgtgaacctctgtgcctgtgaccggaagctcgtctactgcctcaagagaaacctacggagctacaacccacagtaccaatactttcccaacatcctctgctcctaggcctccccagcgagctcctcccagaccaagacttttgttctgtttttctacaacacagagtactgactctgcctggttcctgagagaggctcctaagtcacagacctcagtctttctcgaagcttggcggacccccagggccacactgtaccctccagcgagtcccaggagagtgactctggtcataggacttggtagggtcccagggtccctaggcctccacttctgagggcagcccctctggtgccaagagctctcctccaactcagggttggctgtgtctcttttcttctctgaagacagcgtcctggctccagttggaacactttcctgagatgcacttacttctcagcttctgcgatcagattatcatcaccaccaccctccagagaatttttacgcaagaagagccaaattgactctctaaatctggtgtatgggtattaaataaaattcattctcaaggctaataaaaaccacattggcattttcctctgctgtgggggatcgctggtgcctctttctctgccactggggcaataaacccaaagatgtctacattatctccgaaacagaagggaagattagtaaatgcagggttttctgggatgagcttcaggctttctcttgggctaattttcttacaccttggggtcctctccagtattgggtctcattcttcctcgatggggtcagggaaagataactggtgattatgccagcttcagcttccaggccagagagggtggcattcaaatcccagtgctggcttcttcagctgtgtggtcttggacccgttactgaacctctttgactttcagtctctttgagaaataaactgtcttgttccttgcaatgtaaaatgagacttctaaagcccaccttgatgctgatatggagaatgctgaggttctaggatttcacacagcaggaatttttttttaataggtgtcagctgtggggtttattttttacaaagtaaggacattaaaaaaaccaacccgtctatcaattcataaaagaaaggatgttctgataccaagactgaaagaagaaaggatgtattccaaaacaaaggaacatccttccaagaaaggacctatggcttctttattccgacataccccaaaataactgcatgataaataggtctatatttaaaaagctctagtgtcgaatgttttcaaaataaaatttaattttatgagattaccctgaatgc

SEQ ID NO: 1552 - protein, 92 aa, Homo sapiens; identical to SEQ ID NO: 1544

SEQ ID NO: 1553 - DNA, 2254 bp, Homo sapiens
atttcactttaagcacggtctgtgaaatggcgggggacttacaaaatggtgcagattggactttcttgccttctactttaatataaaaggaagaggggcgttgttgattatctggctgtttcctgtcgaattaggggcactgtaaccagggtttgggttttgaagtagtgggtgttcgactttagagttgttttcctggaagcgctgatactggacttagtggaggagaacgacggtatcaatgtgtttctggatgactgcctggacaagggagttcagcttttgggagactgactgggctatgaagtgtacctttctactctgcagaggctggaaaggcaaaaatgatggctaaggcttccttgcagccgctgatacagaagcctgagggaacacactcccccctacgtccttctccaacacagcagagccaggaaggacccggatggaagttaggacaaagaggcccagaattggcacagataccaacagaccattcgttgaagaagaaatccaaatggccataagaaccccagagatgaaaggcctcctcccactggcttggttcctggcttgtagtgtgcctgctgtgcaaggaggcttgctggacctaaaatcaatgatcgagaaggtgacagggaagaacgccctgacaaactacggcttctacggctgttactgcggctggggcggccgaggaacccccaaggatggcaccgattgggtctcactctggttgcccaggctggagtgcaatggtgcgatctcagctcactgcatcctagaccttctgcactcaggtgctgttgggcgcatgaccactgctatgggcggctggaggagaagggctgcaacattcgcacacagtcctacaaatacagattcgcgtggggcgtggtcacctgcgagcccgggcccttctgccatgtgaacctctgtgcctgtgaccggaagctcgtctactgcctcaagagaaacctacggagctacaacccacagtaccaatactttcccaacatcctctgctcctaggcctccccagcgagctcctcccagaccaagacttttgttctgtttttctacaacacagagtactgactctgcctggttcctgagagaggctcctaagtcacagacctcagtctttctcgaagcttggcggacccccagggccacactgtaccctccagcgagtcccaggagagtgactctggtcataggacttggtagggtcccagggtccctaggcctccacttctgagggcagcccctctggtgccaagagctctcctccaactcagggttggctgtgtctcttttcttctctgaagacagcgtcctggctccagttggaacactttcctgagatgcacttacttctcagcttctgcgatcagattatcatcaccaccaccctccagagaatttttacgcaagaagagccaaattgactctctaaatctggtgtatgggtattaaataaaattcattctcaaggctaataaaaaccacattggcattttcctctgctgtgggggatcgctggtgcctctttctctgccactggggcaataaacccaaagatgtctacattatctccgaaacagaagggaagattagtaaatgcagggttttctgggatgagcttcaggctttctcttgggctaattttcttacaccttggggtcctctccagtattgggtctcattcttcctcgatggggtcagggaaagataactggtgattatgccagcttcagcttccaggccagagagggtggcattcaaatcccagtgctggcttcttcagctgtgtggtcttggacccgttactgaacctctttgactttcagtctctttgagaaataaactgtcttgttccttgcaatgtaaaatgagacttctaaagcccaccttgatgctgatatggagaatgctgaggttctaggatttcacacagcaggaatttttttttaataggtgtcagctgtggggtttattttttacaaagtaaggacattaaaaaaaccaacccgtctatcaattcataaaagaaaggatgttctgataccaagactgaaagaagaaaggatgtattccaaaacaaaggaacatccttccaagaaaggacctatggcttctttattccgacataccccaaaataactgcatgataaataggtctatatttaaaaagctctagtgtcgaatgttttcaaaataaaatttaattttatgagattaccctgaatgc

SEQ ID NO: 1554 - protein, 161 aa, Homo sapiens; identical to SEQ ID NO: 1538

SEQ ID NO: 1555 - DNA, 2349 bp, Homo sapiens
atttcactttaagcacggtctgtgaaatggcgggggacttacaaaatggtgcagattggactttcttgccttctactttaatataaaaggaagaggggcgttgttgattatctggctgtttcctgtcgaattaggggcactgtaaccagggtttgggttttgaagtagtgggtgttcgactttagagttgttttcctggaagcgctgatactggacttagtggaggagaacgacggtatcaatgtgtttctggatgactgcctggacaagggagttcagcttttgggagactgactgggctatgaagtgtacctttctactctgcagaggctggaaaggcaaaaatgatggctaaggcttccttgcagccgctgatacagaagcctgagggaacacactcccccctacgtccttctccaacacagcagagccaggaaggacccggatggaagttaggacaaagaggcccagaattggcacagataccaacagaccattcgttgaagaagaaatccaaatggccataagctttaagattctggaggccaagaatttgactccccccggatccatggtctgtggataccaatgttccgactggagacggggagcccgcgagacccgggtctccagggtctgcccaaggaagttgctcatgggagcagacctctagagcaggatttgaggccaggccaaagagaaccccagagatgaaaggcctcctcccactggcttggttcctggcttgtagtgtgcctgctgtgcaaggaggcttgctggacctaaaatcaatgatcgagaaggtgacagggaagaacgccctgacaaactacggcttctacggctgttactgcggctggggcggccgaggaacccccaaggatggcaccgattggtgctgttgggcgcatgaccactgctatgggcggctggaggagaagggctgcaacattcgcacacagtcctacaaatacagattcgcgtggggcgtggtcacctgcgagcccgggcccttctgccatgtgaacctctgtgcctgtgaccggaagctcgtctactgcctcaagagaaacctacggagctacaacccacagtaccaatactttcccaacatcctctgctcctaggcctccccagcgagctcctcccagaccaagacttttgttctgtttttctacaacacagagtactgactctgcctggttcctgagagaggctcctaagtcacagacctcagtctttctcgaagcttggcggacccccagggccacactgtaccctccagcgagtcccaggagagtgactctggtcataggacttggtagggtcccagggtccctaggcctccacttctgagggcagcccctctggtgccaagagctctcctccaactcagggttggctgtgtctcttttcttctctgaagacagcgtcctggctccagttggaacactttcctgagatgcacttacttctcagcttctgcgatcagattatcatcaccaccaccctccagagaatttttacgcaagaagagccaaattgactctctaaatctggtgtatgggtattaaataaaattcattctcaaggctaataaaaaccacattggcattttcctctgctgtgggggatcgctggtgcctctttctctgccactggggcaataaacccaaagatgtctacattatctccgaaacagaagggaagattagtaaatgcagggttttctgggatgagcttcaggctttctcttgggctaattttcttacaccttggggtcctctccagtattgggtctcattcttcctcgatggggtcagggaaagataactggtgattatgccagcttcagcttccaggccagagagggtggcattcaaatcccagtgctggcttcttcagctgtgtggtcttggacccgttactgaacctctttgactttcagtctctttgagaaataaactgtcttgttccttgcaatgtaaaatgagacttctaaagcccaccttgatgctgatatggagaatgctgaggttctaggatttcacacagcaggaatttttttttaataggtgtcagctgtggggtttattttttacaaagtaaggacattaaaaaaaccaacccgtctatcaattcataaaagaaaggatgttctgataccaagactgaaagaagaaaggatgtattccaaaacaaaggaacatccttccaagaaaggacctatggcttctttattccgacataccccaaaataactgcatgataaataggtctatatttaaaaagctctagtgtcgaatgttttcaaaataaaatttaattttatgagattaccctgaatgc

SEQ ID NO: 1556 - protein, 138 aa, Homo sapiens; identical to SEQ ID NO: 54

SEQ ID NO: 1557 - DNA, 3137 bp, Homo sapiens
gcctgagacacatggaatttcctggactctaagctggcaatggctgtttttaccaaagacagattctaaggagtgaagccaagggctctggcctgagaggtagagcatgagaaggaacaaacacagacccctaaaggattcatgcctctgggaaaagccactggcacattgtgggagcccaggcttcacactgtgagctaaaaggagtatgagatgtagaatcaccggctttccttctgccctcctgctgtgggcgtcaagtgctctctgtccaggaatttttttcttccgtcttacatctttcatcaaaggccatgtctaggttatatcaagtcctgcttctccacgtatgccaccaaatctccatttaagaatcctgcccattctctggtcccttttagccattttgccaacggggtgagtatgtctggggtgtttgtggctaaaagtgcactggtggtagggacagtgtccctgcaaatgcttccattattgtccctctgcctccagggccctcagtggacctacagttttttgcctcatcttttctggctggactcatcttgtttattgcccaccatgacggggagtggaatagatggggcctggtggagagccagggtgggatctgaatgggccacgggggcattgcctgatagatctgttgtgggatgtgtttttttttccagaaccccagagatgaaaggcctcctcccactggcttggttcctggcttgtagtaagtgctggccccgtgaccttcgaatgaacttttaccccatgcctcagctgtgtaaaggttgtggacatagaggttatgtggctggcaagtgtaggaggcagattttttccctgtatgcaaataaaataagatttacaaaatcccccaatcaatccaaataaaaatcaaaactcttatctaaatatcccaacctatgattcctgggtcattctcagctcaggcttgtccagctgggaagtgactgtatagatggctttagtcccatcctgcggccccgtgaccgtatatacaacccccgacaggctgtcctgctccttgatgtcttgctagatccctggagactccaggaggagctggaggcctggtgcaaggagagagccttgggccttatgttctaaagggtgtgaggggagggagtggtggggaagagggatgtattgccaagagagacaggaagctcctatctgcctgcttcatgcaaatacattatgaattacaccttatatgtcatggtttgcacctcccttcccactaatggagagaataaaaaagagacatgcaggtccctccaagccctgggtgggagaaagggtaggagatgttgggcagtgggcctaaagcagggctgggctgcctgggtgtcacctggggacatgggctatcttccaggtgtgcctgctgtgcaaggaggcttgctggacctaaaatcaatgatcgagaaggtgacagggaagaacgccctgacaaactacggcttctacggctgttactgcggctggggcggccgaggaacccccaaggatggcaccgattggtgagctgatcgctataactgccctttaggctccagtactttttatgtgcaatctgctacacctaacatagtgtgatcatatacatatacgtttttttttagaagtttatttctggatcacataacagttcagtaggaatcacacgttgggtccatgacctgctggctagaaatgaggagcaggaaattactcagtcacactaccagatcctccctgccacatcgcgtccaccaaggtggcctctgctaaagtgacatggttgaatttttgctcctattagggatggggtcaggagggcacccctcccactcgggatctaagtctcttgcacggacaggtgctgttgggcgcatgaccactgctatgggcggctggaggagaagggctgcaacattcgcacacagtcctacaaatacagattcgcgtggggcgtggtcacctgcggtaaggctggggcttcccgttcgggccattggaagagcacctgactttaagttcagctgccctagagaacagccagcctgtatcttgttgggggaggaggagttgggtgcagaactgggacgagaggagcaggattattgcagctgtatcagacccccagggtagggctgaatcatccactgggtgcaataaatctggggatggttctgctctatgagaatgagagttcctccagagcagcggctgcctccaccatcagactgggagtcccccagaggaaggaaggtgcttcctctatcagactgggaactccctgagggcaggagctgtctcctgcactgaaacctcaccctgagcagcagctgtgccccttccatcagattctctattcccccgatttaggagccatgcctcttccatcaggctgaaagctcctcggagcaggaagtccatggggtctctgctgagactggagcatgctcttcccaccctcattctgctcttggtgtccttttgcagagcccgggcccttctgccatgtgaacctctgtgcctgtgaccggaagctcgtctactgcctcaagagaaacctacggagctacaacccacagtaccaatactttcccaacatcctctgctcctaggcctccccagcgagctcctcccagaccaagacttttgttctgtttttctacaacacagagtactgactctgcctggttcctgagagaggctcctaagtcacagacctcagtctttctcgaagcttggcggacccccagggccacactgtaccctccagcgagtcccaggagagtgactctggtcataggacttggtagggtcccagggtccctaggcctccacttctgagggcagcccctctggtgccaagagctctcctccaactcagggttggctgtgtctcttttcttctctgaagacagcgtcctggctccagttggaacactttcctgagatgcacttacttctcagcttctgcgatcagattatcatcaccaccaccctccagagaatttttacgcaagaagagccaaattgactctctaaatctggtgtatgggtattaaataaaattcattctcaaggctaataaaaaccacattggcattttc

SEQ ID NO: 1558 - protein, 159 aa, Homo sapiens
MSGVFVAKSALVVGTVSLQMLPLLSLCLQGPQWTYSFLPHLFWLDSSCLLPTMTGSGIDGAWWRARVGSEWATGALPDRSVVGCVFFSRTPEMKGLLPLAWFLACSKCWPRDLRMNFYPMPQLCKGCGHRGYVAGKCRRQIFSLYANKIRFTKSPNQSK

SEQ ID NO: 1559 - DNA, 2626 bp, Homo sapiens
gggcagcctgcatggaaagggactgccagcatctgcctccactgctctgtgctgggatcatggaacttgcactgctgtgtgggctggtggtgatggctggtgtgattccaatccagggcgggatcctgaacctgaacaagatggtcaagcaagtgactgggaaaatgcccatcctctcctactggccctacggctgtcactgcggactaggtggcagaggccaacccaaagatgccacggactggtgctgccagacccatgactgctgctatgaccacctgaagacccaggggtgcagcatctacaaggactattacagatacaacttttcccaggggaacatccactgctctgacaagggaagctggtgtgagcagcagctgtgtgcctgtgacaaggaggtggccttctgcctgaagcgcaacctggacacctaccagaagcgactgcgtttctactggcggccccactgccgggggcagacccctgggtgctagaagcccacaccctctaccctgttcctcagcatggagctctggcatccccacctcagtatctaacctgaaccagcctggcttttcaaacactccggggggaggtagtcccagcctcccccggaaccctctaccaatgccttctgaccttctgaagctttccgaatcctcccagttgaggcagtagctgtgtcctctgagggtggatgggaatcttgggagaagcccaagcaagggagccctcagaggtggtgtttggaccaaagcatcggggtgggggaggggtctgccgctgtcccccacctgctggcccccttgtccttcctcaccccctccaatatagtctcggagctacaaccgcagcagccactataaagggcaatattgatctttctgtccatgtggctctatcttttaaaacctcaaggccctccactgtcctaagataaagcctctcataggcactggggaccctgcacagtctggccatgtgaccctctccccaggcaagctctgaagtccctgcaggtggaggccatgcctgtcttaaactcagttgcatccctggtgcccaaagcaacaccagaaccaagaaggagctccataaatccttcttgggtgaagcctagacaaagccgccaggtcttgtggctccaggcaccagagccttgagtactttctcctgcctccaggcattggctcagggtgaattacaaggggctactgaatggctattactttcatcacgactgatccccacctcctcagggtcaaagggctactttctggaagtctccccaggctgactccttctccctgactgcaagggctcactccctcctccaagctcccacaatgcttcatggctctgccgcttacctagcttggcctagagtggcaaatggaacttctctgatctcccccaactagactggagcccccgaaggatggagaccatgtctgtgccatctctgtttcccctgttttcccacatactaggtgctcaattcatgcctgtgaatggcgtgagcccataatggatacacagaggttgcagcagatggtgtgggtacctcacccagatatcatccaggcccaaggcccctctccctgagtgaggccaggtgttggcagccaactgctccaatctgcctccttcccctaaatactgccctggtctagtgggagctgccttccccctgccccacctctcccaccaagaggccacctgtcactcatggccaggagagtgacaccatggagggtacaattgccagctcccccgtgtctgtgcaggattgtctgggttgaatgacactctcaaattgttcctgggatcgggctgaggccaggcctctcctggaaccacctctctgcttggtctgaccccttggcctatccagttttcctggttccctcacaggtttctccagaaagtactccctcagtaaagcatttgcacaagaatccttgtctcaggctctgcttctaaggaaagagactgaagagggacaactttttcctatgaggactcccaatctgccatttgtgtgtggctagctgtttccagccagggggctgaggcacctgcagtcacccacactctgggcctgtggcaccatctgtgcctcagctgactgagcagttctgagatgtggtgactcatgtgaagtggtgtcataggaatgaaggactgtgggcgctgggttcaaattccagttctatgcaccactccaggtagggatacccatgggggcagctgtgcctgtgtgggggaacagggtagggaaatctccataccttctcaattttgctgtgaacctaaaactgccatataaagataaagtctaggccaggcatggtggctcatgcctgtaatcccaacacttagggtggctgaggcaggcagatcacctggggtcaggagttcaagaccagcctgcccaacatggcaaaacctcgtctctactaaaaatacaaaaattagccaggcatcgtggtgggtgcctgtaatcccagctattcaggaggctgaggcaggagaatcacttggacctgggaggcagaggtttcagtgagcccagatcgcgacactgcactccagcctgggcaacagagtgacactctgtctc

SEQ ID NO: 1560 - protein, 161 aa, Homo sapiens
MERDCQHLPPLLCAGIMELALLCGLVVMAGVIPIQGGILNLNKMVKQVTGKMPILSYWPYGCHCGLGGRGQPKDATDWCCQTHDCCYDHLKTQGCSIYKDYYRYNFSQGNIHCSDKGSWCEQQLCACDKEVAFCLKRNLDTYQKRLRFYWRPHCRGQTPGC

SEQ ID NO: 1561 - DNA, 443 bp, Homo sapiens
tgcccatcctctcctactggccctacggctgtcactgcggactaggtggcagaggccaacccaaagatgccacggactggtgctgccagacccatgactgctgctatgaccacctgaagacccaggggtgcagcatctacaaggactattacagatacaacttttcccaggggaacatccactgctctcccaccaagaggccacctgtcactcatggccaggagagtgacaccatggagggtacaattgccagctcccccgtgtctgtgcaggattgtctgggttgaatgacactctcaaattgttcctgggatcgggctgaggccaggcctctcctggaaccacctctctgcttggtctgaccccttggcctatccagttttcctggttccctcacaggtttctccagaaagtactccctcagtaaagcatttgcacaagaa

SEQ ID NO: 1562 - protein, 39 aa, Homo sapiens
PPEDPGVQHLQGLLQIQLFPGEHPLLSHQEATCHSWPGE

SEQ ID NO: 1563 - DNA, 1335 bp, Homo sapiens
actgccagcatctgcctccactgctctgtgctgggatcatggaacttgcactgctgtgtgggctggtggtgatggctggtgtgattccaatccagggcgggatcctgaacctgaacaagatggtcaagcaagtgactgggaaaatgcccatcctctcctactggccctacggctgtcactgcggactaggtggcagaggccaacccaaagatgccacggactgctgacaagggaagctggtgtgagcagcagctgtgtgcctgtgacaaggaggtggccttctgcctgaagcgcaacctggacacctaccagaagcgactgcgtttctactggcggccccactgccgggggcagacccctgggtgctagaagcccacaccctctaccctgttcctcagcatggagctctggcatccccacctcagtatctaacctgaaccagcctggcttttcaaacactccggggggaggtagtcccagcctcccccggaaccctctaccaatgccttctgaccttctgaagctttccgaatcctcccagttgaggcagtagctgtgtcctctgagggtggatgggaatcttgggagaagcccaagcaagggagccctcagaggtggtgtttggaccaaagcatcggggtgggggaggggtctgccgctgtcccccacctgctggcccccttgtccttcctcaccccctccaatatagtctcggagctacaaccgcagcagccactataaagggcaatattgatctttctgtccatgtggctctatcttttaaaacctcaaggccctccactgtcctaagataaagcctctcataggcactggggaccctgcacagtctggccatgtgaccctctccccaggcaagctctgaagtccctgcaggtggaggccatgcctgtcttaaactcagttgcatccctggtgcccaaagcaacaccagaaccaagaaggagctccataaatccttcttgggtgaagcctagacaaagccgccaggtcttgtggctccaggcaccagagccttgagtactttctcctgcctccaggcattggctcagggtgaattacaaggggctactgaatggctattactttcatcacgactgatccccacctcctcagggtcaaagggctactttctggaagtctccccaggctgactccttctccctgactgcaagggctcactccctcctccaagctcccacaatgcttcatggctctgccgcttacctagcttggcctagagtggcaaatggaacttctctgatctcccccaactagactggagcccccgaaggatggagaccatgtctgtgccat

SEQ ID NO: 1564 - protein, 62 aa, Homo sapiens
MELALLCGLVVMAGVIPIQGGILNLNKMVKQVTGKMPILSYWPYGCHCGLGGRGQPKDATDC

SEQ ID NO: 1565 - DNA, 880 bp, Homo sapiens
gggcagcctgcatggaaagggactgccagcatctgcctccactgctctgtgctgggatcatggaacttgcactgctgtgtgggctggtggtgatggctggtgtgattccaatccagggcgggatcctgaacctgaacaagatggtcaagcaagtgactgggaaaatgcccatcctctcctactggccctacggctgtcactgcggactaggtggcagaggccaacccaaagatgccacggactggtgctgccagacccatgactgctgctatgaccacctgaagacccaggggtgcagcatctacaaggactattacagatacaacttttcccaggggaacatccactgctctgacaagggaagctggtgtgagcagcagctgtgtgcctgtgacaaggaggtggccttctgcctgaagcgcaacctggacacctaccagaagcgactgcgtttctactggcggccccactgccgggggcagacccctgggtgctagaagcccacaccctctaccctgttcctcagcatggagctctggcatccccacctcagtatctaacctgaaccagcctggcttttcaaacactccggggggaggtagtcccagcctcccccggaaccctctaccaatgccttctgaccttctgaagctttccgaatcctcccagttgaggcagtagctgtgtcctctgagggtggatgggaatcttgggagaagcccaagcaagggagccctcagaggtggtgtttggaccaaagcatcggggtgggggaggggtctgccgctgtcccccacctgctggcccccttgtccttcctcaccccctccaatatagtctcggagctacaaccgcagcagccactataaagggcaatatt

SEQ ID NO: 1566 - protein, 161 aa, Homo sapiens; identical to SEQ ID NO: 1560

SEQ ID NO: 1567 - DNA, 2723 bp, Homo sapiens
agtgtgcgaggcagcgtgaagctggggcctgctccccgcagcctctggagcgcatctcagaccttctgagacctatgttgctggccccccagaacccgcaacatggcagatggggcaaaggccaaccccaaagggttcaaaaagaaggtgctggatagatgcttctctgggtggaggggcccacgcttcggggcctcctgtccttcaagaacctccaggtctagcctgggtatgaagaagttcttcaccgtggccatccttgctggcagcgttctgtccacagctcacggcagcctgctcaacctgaaggccatggtggaggccgtcacagggaggagcgccatcctgtccttcgtgggctacggttgctactgtgggctggggggccgtggccagcccaaggatgaggtggactggtgctgccacgcccacgactgctgctaccaggaactctttgaccaaggctgtcacccctatgtggaccactatgatcacaccatcgagaacaacactgagatagtctgcagtgacctcaacaagacagagtgtgacaagcagacatgcatgtgtgacaagaacatggttctgtgcctcatgaaccagacgtaccgagaggagtaccgtggcttcctcaatgtctactgccagggccccacgcccaactgcagcatctatgaaccgccccctgaggaggtcacctgcagtcaccaatccccagcgccccccgcccctccctagagcctctgaggtttgagagagagagcgggaggagggtctggcttggggaccagacgaggtgcagggagggtaggagccaggccaggagcctgagggttgctggttgcctcctccctggagctctccagtgagggctcagctctcagaggactcaggaaggcctgggtcctgactcccccagcccagccccaggcatgggtgcctcctgctgctggttctggactgggtgggaggcacggagcttataggggtctctcctgagggtggccggggagacctgagagagaggaggaggggcctctgagtggggcctctgttgctggcgccagtttaactccccggagccttagaaagtctgagccttagaaagtctgggcctgagcatccaggcccagagctggatgcatcctcggcccaagatcacaggaaggcagattgctggtcacaaagcatgggttccgggagcccctcagctgatcccacaggatggcctggggtggtggctactttgggcttgaagctctctagagccccattcacagagcaggtgccccaccccagccctcactgaggtggccatgagtccaggttcagaccctaggggatgtgcagtgctgagtgtcccagccctgaagtctagcctcagagcaggctcctgggcactgacagagccacacacccaggtacaccccccaggctaatatggggacacacaaaaatatggccttcaacacctacaagtcttctctgtgtcccccatcgacccatgcacatcaccccaaccctgctctgccacaccacgtgggtctgaggagcactcctaccccccggctccgggtccctgacagacactgccctcctggcctgcacctggaatggcagccagaacactggagggggacccacaccctctctccctgggctgtggatgggtgttgcaagtcccatccctcctggcctgcacctggaacagcagccagaacaccggagggggacccacaccctctctccctgggctgtgggcaggcgtcacaagtcccattggtggggaagaggctgagggctgagacccacctcagtgaagagggaaacgtaagcagggagagcatcaaggcgggaggcagcctggaaacttctagaagagggtcaaggtaggaggctacatggaagcttctagaaggcagtaaggaacagggtggtgaaggagaggggagaagatgggagcatggagagacgaggtgagtgacagccaccagcagggacgggcctccaggcaacacagaggagctgggggccagggccttacggggctgggttcctgtgtggggcgtggagctggggctgaagtggaggggacggccctgcggcccccagcactgttgtttctccaggtgcaccttaccttcctccttacctgcccgagcctcaactcagggtcagcagcctccacggagccagccccacctgcccgaaaaccactgaagccaccctccgcccggactcaacagccgccagcaagctcgcctggcagtgcccctggagcaccattgtcgctggggagggagagccgggaagggtggagaaggaggcagaagggacatgtatgaaaaaaggacaggaaacctgaccagaggcggtttccagagccccagccttggagacaaggacactgccacccagcgccacagtcagtctgggaggggcccacgccccccaccccccatgccacactgccgcctcttgctggccatggttctccggcttgggggaacgcaggttcccagctgcgcccctcccccgcgcacacacaccctcccctgtccctcggaaagactaggccagggtctggggatgggattctgctgccaggggtcctgcctgcccccactcaccccagacgcttcggatgctgcagctcctggataatctccacaggactcggcttcctctcctcaaatgaataaaggcctcctacctcaactccc

SEQ ID NO: 1568 - protein, 211 aa, Homo sapiens; identical to SEQ ID NO: 58

SEQ ID NO: 1569 - DNA, 4094 bp, Homo sapiens
tgcgaggcagcgtgaagctggggcctgctccccgcagcctctggagcgcatctcagaccttctgagacctatgttgctggccccccagaacccgcaacatggcagatggggcaaaggccaaccccaaagggttcaaaaagaaggtgctggatagatgcttctctgggtggaggggcccacgcttcggggcctcctgtccttcaagaacctccaggtctagcctgggtatgaagaagttcttcaccgtggccatccttgctggcagcggtgagtaaagactccagagggctcctccttctctcccactcccagcttgtctcccgtgaccttgggcgcctgagttatggttccactgaccagcctaggttccttcctgtctctgggcttctgcttcttgtctcagcccagcaggctgcacccaattctggggctgtttacccctccagccacctgtaaacatgcatttatgagccctggggggcagggcgcagggctgagcaagcatcgtaaaatgctggtgttggctgggcatttgtgtacctgaatgtgtactagtgtgtgtccatcagactggagttaatgattttgtgtgcagacaggcacaggcatctatgtgtgtgtaggtgtgtctgagcatgtgatgatgtctatgtgtgcaacatgcatccataaagtatgtgacagtgtaggcacctgagtgcgagcccatttgtgtctctttgtgtgagtgtgtgttaattggggtgtgtgtcttcagagcatgcttatggatgaagggtgcatagatctgcaggagggtgtgtgtgtgtaggatgggtgtctgtgtactgcatagtggtgggaggtcaggggcttctttctggggttggtacccagggcatcatggctctgggcagccgccccataggattgttgcgtgaggctcttgacacagacctgaccctgccactcgtcccggcatcatttatgtggcaggtgtcccagctccatggaccattggctgggcctctcactggccttgcatgcagcctgttaaacctcgccagaacacagcctggcttgaggaaaagaaataaatgacaaaaaccaaaataaggttccacgtggccagacgtgagagagggctggttgcattcaggcaaagtgacttgttattgagaagacgactgcttgagttcagtccaagccactggttaggggcagagccttcaacccaactgaatgcggacttggattccttcgcttggacggtcagtgtggatgtggccttgggccaggcccctgattctcccctggatgcgttgtgtatgtgagtgcatctgtaatgcacgagggcgagtgtgcaagtgtgtgtatcaggtatgtgtgtatgagtgtatcaggtatgtatgtgtgagtgttgagtgtatcaggtatgtgggggtgagtgtgagtttgaggtgtctgggaatgagtgtgtatgcaagtgcatgtggtgtgtaaaggagagtgtgaggtgggcaggtgtgtgagtgtgtgtgagatgggtgtgtgtgtgtcagtgtgtgttcaccctgtgcatggccacgtagacttcttgctcttcttctcttgccacatgggagttgactgtcgggggtcctgggactggaggtgccccctcccgggtaacacttacaaggccaggggcagatggggaggcagccagggcctcgcagtggttgggtccctcctcaaggcgctgtgtgggccaggcactctacacaccttcatgatcacacttcaacctccaaggtgccctgcaaggaggcgtcatgatctccatcctctgctttgggcattgtgatccgagaggttgctggtgtgtgccaggcctccagcagggcactggcctgcctgatctctcatggtttagattgttactcccattttacagatgggagaacagagccccagggagtcccagctgggcttggttattggcctaggtctgtctgactccagattcaatgctcttcccactaaggcacattgaggtggtgagttccctgtcattagagatgtcggacaccatgtctctggaagcaggcaagagtggcctttgggattcccctgagccaccagtttctgaaaccgttggctttcccctctcccagtacatttcctcattcaggctggggagcagggtggacatggagagagtggcaggaagggtgctgagctaggcccctcacgctgactgcagctagaatggctggggtgggggaagcaggcggagctgcactgccctgcgctgcggttagcttcccagctccgcagtacacaaacctggggcagtctgggctctgccccctccagcctgtgggacctgggcaagcctgcacctttctgagccttagtttcctcacccataaaatcgtgatagattggctctcctgctggtgtgtgtagggcagcttcccccaggtaaggactgtaggtgccaggctgggcgtgtggacccagtgctgcatccaggaggatgtgcagaggcagcgcaggcaattcagagagccaccgcacaggcacagactgcaagatggagacaagcagtggccagggggagaatgtgtcctggggtgggccggcctggcaggtgccatgaagctgatttcgctggtgcaggaagtgtccttgcactatttctccctctgtgtgtgtgtggggagactgttttccttcttcccacctccagccagtatcagcctgtaatacgaagccttttctgtttcttcattagcgatcagagcaccgaattgtcgctggattgatcctgagatgcaccaggcccgggatcagggtggggactctgaggcccccaggagggcagaggcaggaggcagagaccaggaagggacccagaatcaaccccctgagcttcctaagagcatgtggcctttgcgaagctccctccagcataccaggcacttgggcatcccccttgagaagtgtgtacagccaagtggcagggggtgtggatgcaaaaccctcactgcctgggtccaaattctgtctccactgctttctgacaacgggatgtagagcaagttactaaatgcactgggcctcagtcttctcatctgcacagaggcataacaagagcatgcagggggttgcagtgagcactcaatggattcatgcacatggaaggggcttgggacagtacctggcatggagcaagtccctagcaaggatgacctgcgttgttttctcagggccgcagggatgtgggtgcacaccatacatggtaccttgcagatttctttcctctggcttagctgcccacgcttcttgccccagcttcctctcctgctttctccttccttctcccacctaccctaggtattgggaggatggtcagtccagactctcaggatgagagaggctgggagcggccagccccggggcaggggctcagagcaccccctggttctcttgcagttctgtccacagctcacggcagcctgctcaacctgaaggccatggtggaggccgtcacagggaggagcgccatcctgtccttcgtgggctacggttgctactgtgggctggggggccgtggccagcccaaggatgaggtggactggtaggtaccagaggcctgggctcctgtcaggggccaaatgaggacagctgaaggtcagactgaccttgccctccatccctgagtgggggagaccttctttccccaaaggatccagcttctttgatgacttggtgaccagagcctggtctttgactatgttctttccaaactgttttgagcgctttctgttgtccatctccaaggccatgggcttggaagtgtttcagcccctcctctctctaggaagggacctttgacttgctccaaaacacacatgggagagcagtcacacagctgacaccccacaaaggcaagggctgtgacccctgcctgcctcacactggaggctctggaagacaggaccatgcctcctccatcagactgtgagctcccagcagccatggcttgtcttctgctcctatctccccaacagcaggcagcaccaagtttgtatcacagaaagctaaataaatacacattgactagctga

SEQ ID NO: 1570 - protein, 86 aa, Homo sapiens
MRTWIPSLGRSVWMWPWARPLILPWMRCVCECICNARGRVCKCVYQVCVYECIRYVCVSVECIRYVGVSVSLRCLGMSVYASACGV

SEQ ID NO: 1571 - DNA, 1081 bp, Homo sapiens
ccgggaaatcgggtgactgatggacggtggaggcagccccttaggcagtttaggcctgccctgtgaagtatccctgtgggcggctctggccagcttgagtgacgcagatcctgagagcgctcctggttcaccctttctccccaggtgatcgggtatggatcacggattggaacatagcctccttgcagccacggtggagaggaccccagaccatcgtcttgaccactcccacagccataaaggtagaaggaatcccagcctggattcaccacagccatgtaaaacctaaagcatctgagacctgggaggtgagaccaagcttggacaacccatgcaagatgactttgaagaagatgacaagccctgctccagtcacacctggaagctgactggtccgtgcatggctgaagcatgaggaaactcatcgtgggactcattttcctaaaattttggacttgtacagtaaggacttcaactgaccttcctcagactgaggtagggcaaaaagttaaaacagactttctgtttaaaagggacttgtgtgtataatgctacccagtacaagatatgcagcccaagaagtgaccagcttgatgtgtgctataacccattggaactagtttatccctgttggaaaacagagtatgtaactctaggaattgatggaactggactggaagacctgggtagtgaagatgacagtgagaactcccactagtgagtgagattctcaaaggggggaatgagaagtgaggccatttctcttactgtctcctgtctctgaagaggaggaggaagtaaaagttgaaaaacaacaggaatgaagtcattggcaagaccagccggtgccactgatgaccaggcctgaggttaaaagatcaaccccccactctaaccacatgtgctctcaatctatcatgaccctttcatgtggacccccttagagttgtaagcccttaaaagggccaggaactctgtcttcagggagctcggttcttgagacatgagtctgccaaagctcccagctgttgagatgcgagtctgccaaagctcctggccgaataaagccaaatccttcctt

SEQ ID NO: 1572 - protein, 42 aa, Homo sapiens
MDGGGSPLGSLGLPCEVSLWAALASLSDADPESAPGSPFLPR

SEQ ID NO: 1573 - DNA, 3446 bp, Homo sapiens
gtgtcggtgcgcggtgctccgtggctgcgctgctggaacccgctggaagagatacaggtttgctctggagcagcagcagctggcggagcaatggagatgcaatcctattatgccaagcttttgggggagctgaatgaacagagaaagagggactttttctgtgactgcagcatcattgtggaagggcggatcttcaaggcccacaggaacattttgtttgctaacagcggctacttccgagccctgctcattcactatatccaggacagcgggcggcatagcaccgcctccttggacattgtcacctctgatgccttctccatcatcttagatttcctctattctgggaagttggatttgtgtggggagaatgtgattgaagtgatgtcggctgccagctacctgcagatgaatgacgtggtgaacttctgcaagacatacattaggtcatccctcgacatttgccgaaagatggagaaggaggctgctgtggctgcagcagtggcggcggcagcggcggcggctgcagcggcggcagcagcggcggctcatcaggttgacagtgaaagccccagttcaggccgggaggggacctcctgtggtaccaagagcttggtctcctctccagccgagggagaaaagagcgtggagtgcctgagagagtccccttgcggtgactgcggagactgccaccccttggaactggtggtgagagacagccttggcggtggctcggctgacagcaacctctctactccacccaaacggatagagcccaaggtggaatttgatgctgatgaagtggaggtggacgttggtgaacagctgcagcagtatgctgccccgctgaacctggcccacgtggaggaggccttgccaagcggccaggcggttgacttggcttacagcaactaccacgtgaagcagttcctggaggcgctcttgcgcaacagcgctgccccgagcaaggatgatgcagaccatcacttttctaggagtttggaaggaagaccagaaggtgcaggagtagccatgagttccatgatggatgtccaggctgactggtatggagaggactcaggtgatgtgctggtggtccccatcaagctccacaagtgtcctttctgcccttacactgccaaacagaagggcatcctcaagcggcacatccgttcacacacaggcgagcggccctacccctgtgagacctgcggcaagaggttcactcgacaagagcacctgcggagccacgcactgagtgtccacagatccaaccgtccaatcatctgcaagggctgcaggagaacattcacgagtcacctgtcccaggggctgcggcgcttcgggctgtgtgacagctgcacctgcgttacagacacacccgatgatgatgatgatttgatgcccatcaaccttagcttggtggaggcttcatctgaaagccaagaaaagagcgacacagacaatgactggccaatctatgtggagtcggagatcgggtctcattatgttgcccaggctagtctggaactcctggccttaagccaacctcctgcctcagcctcccaaagtgctggcattacagacggagtctcactctgttgcccaggccggagtacagtggcatgatctcagctctctgcaacctccacctcctgggttcaagacaatcctccaaacacagactgtttgacttagaatcttcccttttttactccattcaagagcagcattcataaatttccagaatggagatctcctctcatcagtctcacctcctgcagcaactgaacgagcagcgcaggcaagatgtattttgtgactgcagtattctagttgaagggaaggtcttcaaagcacatcgaaatgtattattcgctagtagcggctactttaaaatgcttctttctcagaattcaaaggagacgagtcagccaaccacagctacatttcaggctttctcccctgacacttttacagttatcttggacttcgtatattctggcaaactgtctcttactggtcagaatgtcatagaagtgatgtcggctgctagcttccttcagatgactgatgtcataagtgtatgtaagacttttattaaatcttccttagacattagtgagaaagaaaaagatcgctatttcagtctctcagataaagatgccaattctaatggtgtagaacgttcctctttttatagtggtggctggcaagaaggaagcagttctccacgttctcacctaagcccagagcaaggaacaggtataataagtggaaaatcttggaataagtataattatcatccagcctcccagaagaatactcaacaacccttggccaagcatgaaccaaggaaagagtccattaaaaagaccaaacatttgagattgtcacagccttctgaagttactcattataagtcaagcaaacgagaagtacgaacatctgattcttccagccatgtttcccagtctgaagaacaagcacagattgatgctgaaatggactctactcctgttggctatcagtacggtcaaggatctgatgtcacatccaaaagctttccagatgatctgcctcggatgcgattcaagtgcccgtactgcacacatgtggtgaagcggaaggcagacctaaagcgccaccttcgttgtcatacaggagaaaggccctatccatgtcaagcttgtggaaaaagatttagcaggctagaccatctaagtagccattttcgaacaattcaccaggcatgtaaactcatctgcagaaaatgtaaacgtcatgtgacagatctaacagggcaagtggtacaggagggaaccaggcgctacagactgtgtaatgagtgtcttgcagaatttggcatagacagcctccccattgacttggaagctgaacaacatcttatgtccccatcagatggagataaggattccagatggcacttgagtgaagatgagaatagatcctatgtggagattgtagaagatgggtctggtgatctggtcatccaacaggttgatgatagtgaagaagaagaagaaaaagaaattaagcccaacattaggtagctgtaatgtgaaccaacagagctggcatgtctgcaatttacattgacttcctgtatctctctctttctatggtcggagtctagttaacaaatttatcacactgactttaaagaaatgatctgatataacttgcatgctttctgaacaggccattgtatccattctgaactttgttgccctaaaatgtgttgctgcactggaaagaaagaactagcttgagttggcttgatggatgaacaattatcctcttactttcattacaatcctcttactttattccagagatacctttttcttttaatattggaggatctacttagcaaacttttttcaaagaaaatactttaaataaattcaccacaaccaaacttt

SEQ ID NO: 1574 - protein, 512 aa, Homo sapiens; identical to SEQ ID NO: 60

SEQ ID NO: 1575 - DNA, 3966 bp, Homo sapiens
gtgtcggtgcgcggtgctccgtggctgcgctgctggaacccgctggaagagatacaggtttgctctggagcagcagcagctggcggagcaatggagatgcaatcctattatgccaagcttttgggggagctgaatgaacagagaaagagggactttttctgtgactgcagcatcattgtggaagggcggatcttcaaggcccacaggaacattttgtttgctaacagcggctacttccgagccctgctcattcactatatccaggacagcgggcggcatagcaccgcctccttggacattgtcacctctgatgccttctccatcatcttagatttcctctattctgggaagttggatttgtgtggggagaatgtgattgaagtgatgtcggctgccagctacctgcagatgaatgacgtggtgaacttctgcaagacatacattaggtcatccctcgacatttgccgaaagatggagaaggaggctgctgtggctgcagcagtggcggcggcagcggcggcggctgcagcggcggcagcagcggcggctcatcaggttgacagtgaaagccccagttcaggccgggaggggacctcctgtggtaccaagagcttggtctcctctccagccgagggagaaaagagcgtggagtgcctgagagagtccccttgcggtgactgcggagactgccaccccttggaactggtggtgagagacagccttggcggtggctcggctgacagcaacctctctactccacccaaacggatagagcccaaggtggaatttgatgctgatgaagtggaggtggacgttggtgaacagctgcagcagtatgctgccccgctgaacctggcccacgtggaggaggccttgccaagcggccaggcggttgacttggcttacagcaactaccacgtgaagcagttcctggaggcgctcttgcgcaacagcgctgccccgagcaaggatgatgcagaccatcacttttctaggagtttggaaggaagaccagaaggtgcaggagtagccatgagttccatgatggatgtccaggctgactggtatggagaggactcaggtgatgtgctggtggtccccatcaagctccacaagtgtcctttctgcccttacactgccaaacagaagggcatcctcaagcggcacatccgttcacacacaggcgagcggccctacccctgtgagacctgcggcaagaggttcactcgacaagagcacctgcggagccacgcactgagtgtccacagatccaaccgtccaatcatctgcaagggctgcaggagaacattcacgagtcacctgtcccaggggctgcggcgcttcgggctgtgtgacagctgcacctgcgttacagacacacccgatgatgatgatgatttgatgcccatcaaccttagcttggtggaggcttcatctgaaagccaagaaaagagcgacacagacaatgactggccaatctatgtggagtcggagatcgggtctcattatgttgcccaggctagtctggaactcctggccttaagccaacctcctgcctcagcctcccaaagtgctggcattacagacggagtctcactctgttgcccaggccggagtacagtggcatgatctcagctctctgcaacctccacctcctgggttcaagacaatcctccaaacacagactgtttgacttagaatcttcccttttttactccattcaagagcagcattcataaatttccagaatggagatctcctctcatcagtctcacctcctgcagcaactgaacgagcagcgcaggcaagatgtattttgtgactgcagtattctagttgaagggaaggtcttcaaagcacatcgaaatgtattattcgctagtagcggctactttaaaatgcttctttctcagaattcaaaggagacgagtcagccaaccacagctacatttcaggctttctcccctgacacttttacagttatcttggacttcgtatattctggcaaactgtctcttactggtcagaatgtcatagaagtgatgtcggctgctagcttccttcagatgactgatgtcataagtgtatgtaagacttttattaaatcttccttagacattagtgagaaagaaaaagatcgctatttcagtctctcagataaagatgccaattctaatggtgtagaacgttcctctttttatagtggtggctggcaagaaggaagcagttctccacgttctcacctaagcccagagcaaggaacaggtataataagtggaaaatcttggaataagtataattatcatccagcctcccagaagaatactcaacaacccttggccaagcatgaaccaaggaaagagtccattaaaaagaccaaacatttgagattgtcacagccttctgaagttactcattataagtcaagcaaacgagaagtacgaacatctgattcttccagccatgtttcccagtctgaagaacaagcacagattgatgctgaaatggactctactcctgttggctatcagtacggtcaaggatctgatgtcacatccaaaagctttccagatgatctgcctcggatgcgattcaagtgcccgtactgcacacatgtggtgaagcggaaggcagacctaaagcgccaccttcgttgtcatacaggagaaaggccctatccatgtcaagcttgtggaaaaagatttagcaggctagaccatctaagtagccattttcgaacaattcaccaggcatgtaaactcatctgcagaaaatgtaaacgtcatgtgacagatctaacagggcaagtggtacaggagggaaccaggcgctacagactgtgtaatgagtgtcttgcagaatttggcatagacagcctccccattgacttggaagctgaacaacatcttatgtccccatcagatggagataaggattccagatggcacttgagtgaagatgagaatagatcctatgtggagattgtagaagatgggtctggtgatctggtcatccaacaggttgatgatagtgaagaagaagaagaaaaagaaattaagcccaacattaggtagctgtaatgtgaaccaacagagctggcatgtctgcaatttacattgacttcctgtatctctctctttctatggtcggagtctagttaacaaatttatcacactgactttaaagaaatgatctgatataacttgcatgctttctgaacaggccattgtatccattctgaactttgttgccctaaaatgtgttgctgcactggaaagaaagaactagcttgagttggcttgatggatgaacaattatcctcttactttcattacaatcctcttactttattccagagatacctttttcttttaatattggaggatctacttagcaaacttttttcaaagaaaatactttaaataaattcaccacaaccaaactttatgtaagacaatttcaaggtgtttcaaaaacacataactaccaatgtttaatttcacagggaaccagttaagagcacatttaaggatctggcaacccaccttactaaacaaattagtctttctattaatttgagatctgaaacaacctgtcattactctgatatcctgaacgtttaaggattatggaagaagactaaagtgtttgaaatcattcatatttgaaatttttatcattagcttaaaaattactctcagtattgttaaaaaaaaaaaaaagtagaggctggccaaagattatatacagatattttcttaaagcaggaaactaatgttgcctaaaagtcaaggtagtttgtgaagacaatctgtcaatatggttgtccatctctctaaagaaaagcaggctgggcgctgtggctcatgcctataatcccaatactttgggaggccgaggcaggcggatcacaaggtcaggagtttgaaaccagcctggccaacatggtgaaacctcgtctctact

SEQ ID NO: 1576 - protein, 512 aa, Homo sapiens; identical to SEQ ID NO: 60

SEQ ID NO: 1577 - DNA, 2018 bp, Homo sapiens
cctaaaccaaatccccagatcctagaaatccagcccttctgccctccggaggcgcctttcccaacgtaaagtacaattttaaatttcagctcctgactaaaatcatgatccgcagtcaactgctagagaatctgggcaccccggtgtctctggagcgtgcagcgagtgtgggcaagggcagggggagtgggcgaagctgctggttggtgcctgaaatctgtgcgttgcccctttaattgtgtccccagccctcgggcgtttctgtccaacgcccacgtcagcaaataccttttgtttctctcacgttggggctacttgttttagggcgcaaaggaacggcctcgaaagggggtccttccccagccgagaaccaggaatcttccctcggcccgcgcgcgcgaccggccggtgcgccgcggcccgcggacaatcctccaaacacagactgtttgacttagaatcttcccttttttactccattcaagagcagcattcataaatttccagaatggagatctcctctcatcagtctcacctcctgcagcaactgaacgagcagcgcaggcaagatgtattttgtgactgcagtattctagttgaagggaaggtcttcaaagcacatcgaaatgtattattcgctagtagcggctactttaaaatgcttctttctcagaattcaaaggagacgagtcagccaaccacagctacatttcaggctttctcccctgacacttttacagttatcttggacttcgtatattctggcaaactgtctcttactggtcagaatgtcatagaagtgatgtcggctgctagcttccttcagatgactgatgtcataagtgtatgtaagacttttattaaatcttccttagacattagtgagaaagaaaaagatcgctatttcagtctctcagataaagatgccaattctaatggtgtagaacgttcctctttttatagtggtggctggcaagaaggaagcagttctccacgttctcacctaagcccagagcaaggaacaggtataataagtggaaaatcttggaataagtataattatcatccagcctcccagaagaatactcaacaacccttggccaagcatgaaccaaggaaagagtccattaaaaagaccaaacatttgagattgtcacagccttctgaagttactcattataagtcaagcaaacgagaagtacgaacatctgattcttccagccatgtttcccagtctgaagaacaagcacagattgatgctgaaatggactctactcctgttggctatcagtacggtcaaggatctgatgtcacatccaaaagctttccagatgatctgcctcggatgcgattcaagtgcccgtactgcacacatgtggtgaagcggaaggcagacctaaagcgccaccttcgttgtcatacaggagaaaggccctatccatgtcaagcttgtggaaaaagatttagcaggctagaccatctaagtagccattttcgaacaatggagataaggattccagatggcacttgagtgaagatgagaatagatcctatgtggagattgtagaagatgggtctggtgatctggtcatccaacaggttgatgatagtgaagaagaagaagaaaaagaaattaagcccaacattaggtagctgtaatgtgaaccaacagagctggcatgtctgcaatttacattgacttcctgtatctctctctttctatggtcggagtctagttaacaaatttatcacactgactttaaagaaatgatctgatataacttgcatgctttctgaacaggccattgtatccattctgaactttgttgccctaaaatgtgttgctgcactggaaagaaagaactagcttgagttggcttgatggatgaacaattatcctcttactttcattacaatcctcttactttattccagagatacctttttcttttaatattggaggatctacttagcaaacttttttcaaagaaaatactttaaataaattcaccacaacc

SEQ ID NO: 1578 - protein, 340 aa, Homo sapiens
MEISSHQSHLLQQLNEQRRQDVFCDCSILVEGKVFKAHRNVLFASSGYFKMLLSQNSKETSQPTTATFQAFSPDTFTVILDFVYSGKLSLTGQNVIEVMSAASFLQMTDVISVCKTFIKSSLDISEKEKDRYFSLSDKDANSNGVERSSFYSGGWQEGSSSPRSHLSPEQGTGIISGKSWNKYNYHPASQKNTQQPLAKHEPRKESIKKTKHLRLSQPSEVTHYKSSKREVRTSDSSSHVSQSEEQAQIDAEMDSTPVGYQYGQGSDVTSKSFPDDLPRMRFKCPYCTHVVKRKADLKRHLRCHTGERPYPCQACGKRFSRLDHLSSHFRTMEIRIPDGT

SEQ ID NO: 1579 - DNA, 2206 bp, Homo sapiens
cctaaaccaaatccccagatcctagaaatccagcccttctgccctccggaggcgcctttcccaacgtaaagtacaattttaaatttcagctcctgactaaaatcatgatccgcagtcaactgctagagaatctgggcaccccggtgtctctggagcgtgcagcgagtgtgggcaagggcagggggagtgggcgaagctgctggttggtgcctgaaatctgtgcgttgcccctttaattgtgtccccagccctcgggcgtttctgtccaacgcccacgtcagcaaataccttttgtttctctcacgttggggctacttgttttagggcgcaaaggaacggcctcgaaagggggtccttccccagccgagaaccaggaatcttccctcggcccgcgcgcgcgaccggccggtgcgccgcggcccgcggacaatcctccaaacacagactgtttgacttagaatcttcccttttttactccattcaagagcagcattcataaatttccagaatggagatctcctctcatcagtctcacctcctgcagcaactgaacgagcagcgcaggcaagatgtattttgtgactgcagtattctagttgaagggaaggtcttcaaagcacatcgaaatgtattattcgctagtagcggctactttaaaatgcttctttctcagaattcaaaggagacgagtcagccaaccacagctacatttcaggctttctcccctgacacttttacagttatcttggacttcgtatattctggcaaactgtctcttactggtcagaatgtcatagaagtgatgtcggctgctagcttccttcagatgactgatgtcataagtgtatgtaagacttttattaaatcttccttagacattagtgagaaagaaaaagatcgctatttcagtctctcagataaagatgccaattctaatggtgtagaacgttcctctttttatagtggtggctggcaagaaggaagcagttctccacgttctcacctaagcccagagcaaggaacaggtataataagtggaaaatcttggaataagtataattatcatccagcctcccagaagaatactcaacaacccttggccaagcatgaaccaaggaaagagtccattaaaaagaccaaacatttgagattgtcacagccttctgaagttactcattataagtcaagcaaacgagaagtacgaacatctgattcttccagccatgtttcccagtctgaagaacaagcacagattgatgctgaaatggactctactcctgttggctatcagtacggtcaaggatctgatgtcacatccaaaagctttccagatgatctgcctcggatgcgattcaagtgcccgtactgcacacatgtggtgaagcggaaggcagacctaaagcgccaccttcgttgtcatacaggagaaaggccctatccatgtcaagcttgtggaaaaagatttagcaggctagaccatctaagtagccattttcgaacaattcaccaggcatgtaaactcatctgcagaaaatgtaaacgtcatgtgacagatctaacagggcaagtggtacaggagggaaccaggcgctacagactgtgtaatgagtgtcttgcagaatttggcatagacagcctccccattgacttggaagctgaacaacatcttatgtccccatcagatggagataaggattccagatggcacttgagtgaagatgagaatagatcctatgtggagattgtagaagatgggtctggtgatctggtcatccaacaggttgatgatagtgaagaagaagaagaaaaagaaattaagcccaacattaggtagctgtaatgtgaaccaacagagctggcatgtctgcaatttacattgacttcctgtatctctctctttctatggtcggagtctagttaacaaatttatcacactgactttaaagaaatgatctgatataacttgcatgctttctgaacaggccattgtatccattctgaactttgttgccctaaaatgtgttgctgcactggaaagaaagaactagcttgagttggcttgatggatgaacaattatcctcttactttcattacaatcctcttactttattccagagatacctttttcttttaatattggaggatctacttagcaaacttttttcaaagaaaatactttaaataaattcaccacaaccaaacttt

SEQ ID NO: 1580 - protein, 441 aa, Homo sapiens; identical to SEQ ID NO: 62

SEQ ID NO: 1581 - DNA, 2545 bp, Homo sapiens
cctaaaccaaatccccagatcctagaaatccagcccttctgccctccggaggcgcctttcccaacgtaaagtacaattttaaatttcagctcctgactaaaatcatgatccgcagtcaactgctagagaatctgggcaccccggtgtctctggagcgtgcagcgagtgtgggcaagggcagggggagtgggcgaagctgctggttggtgcctgaaatctgtgcgttgcccctttaattgtgtccccagccctcgggcgtttctgtccaacgcccacgtcagcaaataccttttgtttctctcacgttggggctacttgttttagggcgcaaaggaacggcctcgaaagggggtccttccccagccgagaaccaggaatcttccctcggcccgcgcgcgcgaccggccggtgcgccgcggcccgcggacaatcctccaaacacagactgtttgacttagaatcttcccttttttactccattcaagagcagcattcataaatttccagaatggagatctcctctcatcagtctcacctcctgcagcaactgaacgagcagcgcaggcaagatgtattttgtgactgcagtattctagttgaagggaaggtcttcaaagcacatcgaaatgtattattcgctagtagcggctactttaaaatgcttctttctcagaattcaaaggagacgagtcagccaaccacagctacatttcaggctttctcccctgacacttttacagttatcttggacttcgtatattctggcaaactgtctcttactggtcagaatgtcatagaagtgatgtcggctgctagcttccttcagatgactgatgtcataagtgtatgtaagacttttattaaatcttccttagacattagtgagaaagaaaaagatcgctatttcagtctctcagataaagatgccaattctaatggtgtagaacgttcctctttttatagtggtggctggcaagaaggaagcagttctccacgttctcacctaagcccagagcaaggaacaggtataataagtggaaaatcttggaataagtataattatcatccagcctcccagaagaatactcaacaacccttggccaagcatgaaccaaggaaagagtccattaaaaagaccaaacatttgagattgtcacagccttctgaagttactcattataagtcaagcaaacgagaagtacgaacatctgattcttccagccatgtttcccagtctgaagaacaagcacagattgatgctgaaatggactctactcctgttggctatcagtacggtcaaggatctgatgtcacatccaaaagctttccagatgatctgcctcggatgcgattcaagtgcccgtactgcacacatgtggtgaagcggaaggcagacctaaagcgccaccttcgttgtcatacaggagaaaggccctatccatgtcaagcttgtggaaaaagatttagcaggctagaccatctaagtagccattttcgaacaatggagataaggattccagatggcacttgagtgaagatgagaatagatcctatgtggagattgtagaagatgggtctggtgatctggtcatccaacaggttgatgatagtgaagaagaagaagaaaaagaaattaagcccaacattaggtagctgtaatgtgaaccaacagagctggcatgtctgcaatttacattgacttcctgtatctctctctttctatggtcggagtctagttaacaaatttatcacactgactttaaagaaatgatctgatataacttgcatgctttctgaacaggccattgtatccattctgaactttgttgccctaaaatgtgttgctgcactggaaagaaagaactagcttgagttggcttgatggatgaacaattatcctcttactttcattacaatcctcttactttattccagagatacctttttcttttaatattggaggatctacttagcaaacttttttcaaagaaaatactttaaataaattcaccacaaccaaactttatgtaagacaatttcaaggtgtttcaaaaacacataactaccaatgtttaatttcacagggaaccagttaagagcacatttaaggatctggcaacccaccttactaaacaaattagtctttctattaatttgagatctgaaacaacctgtcattactctgatatcctgaacgtttaaggattatggaagaagactaaagtgtttgaaatcattcatatttgaaatttttatcattagcttaaaaattactctcagtattgttaaaaaaaaaaaaaagtagaggctggccaaagattatatacagatattttcttaaagcaggaaactaatgttgcctaaaagtcaaggtagtttgtgaagacaatctgtcaatatggttgtccatctctctaaagaaaagcaggctgggcgctgtggctcatgcctataatcccaatactttgggaggccgaggcaggcggatcacaaggtcaggagtttgaaaccagcctggccaacatggtgaaacctcgtctctact

SEQ ID NO: 1582 - protein, 340 aa, Homo sapiens; identical to SEQ ID NO: 1578

SEQ ID NO: 1583 - DNA, 2726 bp, Homo sapiens
cctaaaccaaatccccagatcctagaaatccagcccttctgccctccggaggcgcctttcccaacgtaaagtacaattttaaatttcagctcctgactaaaatcatgatccgcagtcaactgctagagaatctgggcaccccggtgtctctggagcgtgcagcgagtgtgggcaagggcagggggagtgggcgaagctgctggttggtgcctgaaatctgtgcgttgcccctttaattgtgtccccagccctcgggcgtttctgtccaacgcccacgtcagcaaataccttttgtttctctcacgttggggctacttgttttagggcgcaaaggaacggcctcgaaagggggtccttccccagccgagaaccaggaatcttccctcggcccgcgcgcgcgaccggccggtgcgccgcggcccgcggacaatcctccaaacacagactgtttgacttagaatcttcccttttttactccattcaagagcagcattcataaatttccagaatggagatctcctctcatcagtctcacctcctgcagcaactgaacgagcagcgcaggcaagatgtattttgtgactgcagtattctagttgaagggaaggtcttcaaagcacatcgaaatgtattattcgctagtagcggctactttaaaatgcttctttctcagaattcaaaggagacgagtcagccaaccacagctacatttcaggctttctcccctgacacttttacagttatcttggacttcgtatattctggcaaactgtctcttactggtcagaatgtcatagaagtgatgtcggctgctagcttccttcagatgactgatgtcataagtgtatgtaagacttttattaaatcttccttagacattagtgagaaagaaaaagatcgctatttcagtctctcagataaagatgccaattctaatggtgtagaacgttcctctttttatagtggtggctggcaagaaggaagcagttctccacgttctcacctaagcccagagcaaggaacaggtataataagtggaaaatcttggaataagtataattatcatccagcctcccagaagaatactcaacaacccttggccaagcatgaaccaaggaaagagtccattaaaaagaccaaacatttgagattgtcacagccttctgaagttactcattataagtcaagcaaacgagaagtacgaacatctgattcttccagccatgtttcccagtctgaagaacaagcacagattgatgctgaaatggactctactcctgttggctatcagtacggtcaaggatctgatgtcacatccaaaagctttccagatgatctgcctcggatgcgattcaagtgcccgtactgcacacatgtggtgaagcggaaggcagacctaaagcgccaccttcgttgtcatacaggagaaaggccctatccatgtcaagcttgtggaaaaagatttagcaggctagaccatctaagtagccattttcgaacaattcaccaggcatgtaaactcatctgcagaaaatgtaaacgtcatgtgacagatctaacagggcaagtggtacaggagggaaccaggcgctacagactgtgtaatgagtgtcttgcagaatttggcatagacagcctccccattgacttggaagctgaacaacatcttatgtccccatcagatggagataaggattccagatggcacttgagtgaagatgagaatagatcctatgtggagattgtagaagatgggtctggtgatctggtcatccaacaggttgatgatagtgaagaagaagaagaaaaagaaattaagcccaacattaggtagctgtaatgtgaaccaacagagctggcatgtctgcaatttacattgacttcctgtatctctctctttctatggtcggagtctagttaacaaatttatcacactgactttaaagaaatgatctgatataacttgcatgctttctgaacaggccattgtatccattctgaactttgttgccctaaaatgtgttgctgcactggaaagaaagaactagcttgagttggcttgatggatgaacaattatcctcttactttcattacaatcctcttactttattccagagatacctttttcttttaatattggaggatctacttagcaaacttttttcaaagaaaatactttaaataaattcaccacaaccaaactttatgtaagacaatttcaaggtgtttcaaaaacacataactaccaatgtttaatttcacagggaaccagttaagagcacatttaaggatctggcaacccaccttactaaacaaattagtctttctattaatttgagatctgaaacaacctgtcattactctgatatcctgaacgtttaaggattatggaagaagactaaagtgtttgaaatcattcatatttgaaatttttatcattagcttaaaaattactctcagtattgttaaaaaaaaaaaaaagtagaggctggccaaagattatatacagatattttcttaaagcaggaaactaatgttgcctaaaagtcaaggtagtttgtgaagacaatctgtcaatatggttgtccatctctctaaagaaaagcaggctgggcgctgtggctcatgcctataatcccaatactttgggaggccgaggcaggcggatcacaaggtcaggagtttgaaaccagcctggccaacatggtgaaacctcgtctctact

SEQ ID NO: 1584 - protein, 441 aa, Homo sapiens; identical to SEQ ID NO: 62

SEQ ID NO: 1585 - DNA, 1023 bp, Homo sapiens
cttctgccctccggaggcgcctttcccaacgtaaagtacaattttaaatttcagctcctgactaaaatcatgatccgcagtcaactgctagagaatctgggcaccccggtgtctctggagcgtgcagcgagtgtgggcaagggcagggggagtgggcgaagctgctggttggtgcctgaaatctggcgcaaaggaacggcctcgaaagggggtccttccccagccgagaaccaggaatcttccctcggcccgcgcgcgcgaccggccggtgcgccgcggcccgcggacaatcctccaaacacagactgtttgacttagaatcttcccttttttactccattcaagagcagcattcataaatttccaggttttggtaaccacatgtgtcttttcctcttcagaatggagatctcctctcatcagtctcacctcctgcagcaactgaacgagcagcgcaggcaagatgtattttgtgactgcagtattctagttgaagggaaggtcttcaaagcacatcgaaatgtattattcgctagtagcggctactttaaaatgcttctttctcagaattcaaaggagacgagtcagccaaccacagctacatttcaggctttctcccctgacacttttacagttatcttggacttcgtatattctggcaaactgtctcttactggtcagaatgtcatagaagtgatgtcggctgctagcttccttcagatgactgatgtcataagtgtatgtaagacttttattaaatcttccttagacattagtgagaaagaaaaagatcgctatttcagtctctcagataaagatgccaattctaatggtgtagaacgttcctctttttatagtggtggctggcaagaaggaagcagttctccacgttctcacctaagcccagagcaaggaacaggtataataagtggaaaatcttggaataagtataattatcatccagcctcccagaagaatactcaacaacccttggccaagcatgaaccaaggaaagagtccatt

SEQ ID NO: 1586 - protein, 82 aa, Homo sapiens [sequence omitted]

SEQ ID NO: 1587 - DNA, 1888 bp, Homo sapiens
agcaaataccttttgtttctctcacgttggggctacttgttttagggcgcaaaggaacggcctcgaaagggggtccttccccagccgagaaccaggaatcttccctggacaatcctccaaacacagactgtttgacttagaatcttcccttttttactccattcaagagcagcattcataaatttccagaatggagatctcctctcatcagtctcacctcctgcagcaactgaacgagcagcgcaggcaagatgtattttgtgactgcagtattctagttgaagggaaggtcttcaaagcacatcgaaatgtattattcgctagtagcggctactttaaaatgcttctttctcagaattcaaaggagacgagtcagccaaccacagctacatttcaggctttctcccctgacacttttacagttatcttggacttcgtatattctggcaaactgtctcttactggtcagaatgtcatagaagtgatgtcggctgctagcttccttcagatgactgatgtcataagtgtatgtaagacttttattaaatcttccttagacattagtgagaaagaaaaagatcgctatttcagtctctcagataaagatgccaattctaatggtgtagaacgttcctctttttatagtggtggctggcaagaaggaagcagttctccacgttctcacctaagcccagagcaaggaacaggtataataagtggaaaatcttggaataagtataattatcatccagcctcccagaagaatactcaacaacccttggccaagcatgaaccaaggaaagagtccattaaaaagaccaaacatttgagattgtcacagccttctgaagttactcattataagtcaagcaaacgagaagtacgaacatctgattcttccagccatgtttcccagtctgaagaacaagcacagattgatgctgaaatggactctactcctgttggctatcagtacggtcaaggatctgatgtcacatccaaaagctttccagatgatctgcctcggatgcgattcaagtgcccgtactgcacacatgtggtgaagcggaaggcagacctaaagcgccaccttcgttgtcatacaggagaaaggccctatccatgtcaagcttgtggaaaaagatttagcaggctagaccatctaagtagccattttcgaacaattcaccaggcatgtaaactcatctgcagaaaatgtaaacgtcatgtgacagatctaacagggcaagtggtacaggagggaaccaggcgctacagactgtgtaatgagtgtcttgcagaatttggcatagacagcctccccattgacttggaagctgaacaacatcttatgtccccatcagatggagataaggattccagatggcacttgagtgaagatgagaatagatcctatgtggagattgtagaagatgggtctggtgatctggtcatccaacaggttgatgatagtgaagaagaagaagaaaaagaaattaagcccaacattaggtagctgtaatgtgaaccaacagagctggcatgtctgcaatttacattgacttcctgtatctctctctttctatggtcggagtctagttaacaaatttatcacactgactttaaagaaatgatctgatataacttgcatgctttctgaacaggccattgtatccattctgaactttgttgccctaaaatgtgttgctgcactggaaagaaagaactagcttgagttggcttgatggatgaacaattatcctcttactttcattacaatcctcttactttattccagagatacctttttcttttaatattggaggatctacttagcaaacttttttcaaagaaaatactttaaataaattcaccacaaccaaacttt

SEQ ID NO: 1588 - protein, 441 aa, Homo sapiens; identical to SEQ ID NO: 62

SEQ ID NO: 1589 - DNA, 2408 bp, Homo sapiens
agcaaataccttttgtttctctcacgttggggctacttgttttagggcgcaaaggaacggcctcgaaagggggtccttccccagccgagaaccaggaatcttccctggacaatcctccaaacacagactgtttgacttagaatcttcccttttttactccattcaagagcagcattcataaatttccagaatggagatctcctctcatcagtctcacctcctgcagcaactgaacgagcagcgcaggcaagatgtattttgtgactgcagtattctagttgaagggaaggtcttcaaagcacatcgaaatgtattattcgctagtagcggctactttaaaatgcttctttctcagaattcaaaggagacgagtcagccaaccacagctacatttcaggctttctcccctgacacttttacagttatcttggacttcgtatattctggcaaactgtctcttactggtcagaatgtcatagaagtgatgtcggctgctagcttccttcagatgactgatgtcataagtgtatgtaagacttttattaaatcttccttagacattagtgagaaagaaaaagatcgctatttcagtctctcagataaagatgccaattctaatggtgtagaacgttcctctttttatagtggtggctggcaagaaggaagcagttctccacgttctcacctaagcccagagcaaggaacaggtataataagtggaaaatcttggaataagtataattatcatccagcctcccagaagaatactcaacaacccttggccaagcatgaaccaaggaaagagtccattaaaaagaccaaacatttgagattgtcacagccttctgaagttactcattataagtcaagcaaacgagaagtacgaacatctgattcttccagccatgtttcccagtctgaagaacaagcacagattgatgctgaaatggactctactcctgttggctatcagtacggtcaaggatctgatgtcacatccaaaagctttccagatgatctgcctcggatgcgattcaagtgcccgtactgcacacatgtggtgaagcggaaggcagacctaaagcgccaccttcgttgtcatacaggagaaaggccctatccatgtcaagcttgtggaaaaagatttagcaggctagaccatctaagtagccattttcgaacaattcaccaggcatgtaaactcatctgcagaaaatgtaaacgtcatgtgacagatctaacagggcaagtggtacaggagggaaccaggcgctacagactgtgtaatgagtgtcttgcagaatttggcatagacagcctccccattgacttggaagctgaacaacatcttatgtccccatcagatggagataaggattccagatggcacttgagtgaagatgagaatagatcctatgtggagattgtagaagatgggtctggtgatctggtcatccaacaggttgatgatagtgaagaagaagaagaaaaagaaattaagcccaacattaggtagctgtaatgtgaaccaacagagctggcatgtctgcaatttacattgacttcctgtatctctctctttctatggtcggagtctagttaacaaatttatcacactgactttaaagaaatgatctgatataacttgcatgctttctgaacaggccattgtatccattctgaactttgttgccctaaaatgtgttgctgcactggaaagaaagaactagcttgagttggcttgatggatgaacaattatcctcttactttcattacaatcctcttactttattccagagatacctttttcttttaatattggaggatctacttagcaaacttttttcaaagaaaatactttaaataaattcaccacaaccaaactttatgtaagacaatttcaaggtgtttcaaaaacacataactaccaatgtttaatttcacagggaaccagttaagagcacatttaaggatctggcaacccaccttactaaacaaattagtctttctattaatttgagatctgaaacaacctgtcattactctgatatcctgaacgtttaaggattatggaagaagactaaagtgtttgaaatcattcatatttgaaatttttatcattagcttaaaaattactctcagtattgttaaaaaaaaaaaaaagtagaggctggccaaagattatatacagatattttcttaaagcaggaaactaatgttgcctaaaagtcaaggtagtttgtgaagacaatctgtcaatatggttgtccatctctctaaagaaaagcaggctgggcgctgtggctcatgcctataatcccaatactttgggaggccgaggcaggcggatcacaaggtcaggagtttgaaaccagcctggccaacatggtgaaacctcgtctctact

SEQ ID NO: 1590 - protein, 441 aa, Homo sapiens; identical to SEQ ID NO: 62

SEQ ID NO: 1591 - DNA, 905 bp, Homo sapiens
gaaagggggtccttccccagccgagaaccaggaatcttccctcggcccgcgcgcgcgaccggccggtgcgccgcggcccgcggacaatcctccaaacacagactgtttgacttagaatcttcccttttttactccattcaagagcagcattcataaatttccagcctagatttcctgagcgtatatccagacatccataatatactgacttcatgctcagtgagcaacattttgatgactgactttccacatcacttcctcataaggaaaggagaatatgttgaatggagatctcctctcatcagtctcacctcctgcagcaactgaacgagcagcgcaggcaagatgtattttgtgactgcagtattctagttgaagggaaggtcttcaaagcacatcgaaatgtattattcgctagtagcggctactttaaaatgcttctttctcagaattcaaaggagacgagtcagccaaccacagctacatttcaggctttctcccctgacacttttacagttatcttggacttcgtatattctggcaaactgtctcttactggtcagaatgtcatagaagtgatgtcggctgctagcttccttcagatgactgatgtcataagtgtatgtaagacttttattaaatcttccttagacattagtgagaaagaaaaagatcgctatttcagtctctcagataaagatgccaattctaatggtgtagaacgttcctctttttatagtggtggctggcaagaaggaagcagttctccacgttctcacctaagcccagagcaaggaacaggtataataagtggaaaatcttggaataagtataattatcatccagcctcccagaagaatactcaacaacccttggccaagcatgaaccaaggaaagagtccatt

SEQ ID NO: 1592 - protein, 30 aa, Homo sapiens
MTDFPHHFLIRKGEYVEWRSPLISLTSCSN

SEQ ID NO: 1593 - DNA, 1700 bp, Homo sapiens
tttgaaaccacgtcagtaggaagactgaatgtttcaatcttgtggattgtattacacagagcatgaatatacttctttaggttacacgcatggggagatactctggaggaagcatttgagcaatgtgcaatggccatgtttggttacatgacagatactgggacagtggagcccctccaaacagtagaagtagaaacccaaggagatgacttacagtctcttctgtttcactttttggatgaatggctttataagttcagtgctgatgaattcttcataccccgggaagtgaaagtacttagcattgatcaaagaaatttcaaattacgatcaattgggtggggagaagaattttcattgtccaagcaccctcagggaacagaagtcaaagcaataacatattcagcaatgcaggtctataatgaagagaacccggaagtttttgtgatcattgacatttaagacaccaaaaaataaaagactcctacgaagaactgtttttgttttcctcttccttttgagaagacactatgaattaaattctacagcttttttttgatatatggaaatttgtagaacagaaatattttagttaaagtgtgactttcagaaagggaaaatcagggcacagccttggtctgtgttccccaaatattcacactttaaagaattcttcaaccccccaagggacagttatggtcctttgattctctgctgtggcagtaggtgtgcctcatgcccttccagtgcaatgcaagccctccagcctcaccccagagaggatcactgatgtcagcagcagcctgaggctgaatccaggttgaaagaagaataacttgaaaaaatatatttccacacacagaattttgtttttcttccaagttggttaagacatatattttgtttcttttttttttttttttttgagacggagtctcgctctgtagcccaggctgaagcgcagtggtgtgagctcggcttactgcaagctccacctcccgggttcacgccattctcctacctcagcctcccgagtagctgggactataggcacccgccaccatgcccggctaatttttgtatctttagtagagacggggtttcactgtgttagctaggatggtcttgatctcctgaccttgtgatccgcccaccttggcctcccaaggtactgcgattacaggcatgagctaccatgcccggccacaagacatagattttctatatgcacatcaagggaggtgctggtttaggttgctataggacagagctatcctgtattccagttggtttttgtagagaaacaattagacttctctagatagagccctgatttttctctcacgctttcagttttttaaaagcactaatgatatttcctgttttctcataagaaaaagtcaatactatgccttacaaagagacctttccttctaatatagaattttatttgaaagtgagtacatgtttataactagagaataaaaggagaatttttgaaaaatttctttattgttgtttttgtttaactacttaagctattcgtccttttttttgagacagggtcttgctctgtcccccaggctggaatgcagtggtgcaatcatagcttactgtggcctcgaactcctgggctcgagcagtccttccaactcagcttcccaaattgctggaactacaggaatgcaccaccatacctg

SEQ ID NO: 1594 - protein, 110 aa, Homo sapiens
MAMFGYMTDTGTVEPLQTVEVETQGDDLQSLLFHFLDEWLYKFSADEFFIPREVKVLSIDQRNFKLRSIGWGEEFSLSKHPQGTEVKAITYSAMQVYNEENPEVFVIIDI

SEQ ID NO: 1595 - DNA, 1871 bp, Homo sapiens
ctctctgtccccgcaaaaaaaaaaagattccaacaaagcaaagcaattagctttgttgagtgaatagatagcaaaaggtgtggatggactggcccacattttcttgctctttaaagatgatattcctaataataatggactagagttattttgtgtgtgtgatttgagagtcaagtttagtgtcttataagtgtttttccctctgtccctcagatttggatcatacagcagatgtccagtgagtatagcgggagttcattcctttgaaaccacgtcagtaggaagactgaatgtttcaatcttggttacacgcatggggagatactctggaggaagcatttgagcaatgtgcaatggccatgtttggttacatgacagatactgggacagtggagcccctccaaacagtagaagtagaaacccaaggagatgacttacagtctcttctgtttcactttttggatgaatggctttataagttcagtgctgatgaattcttcataccccgggtggggagaagaattttcattgtccaagcaccctcagggaacagaagtcaaagcaataacatattcagcaatgcaggtctataatgaagagaacccggaagtttttgtgatcattgacatttaagacaccaaaaaataaaagactcctacgaagaactgtttttgttttcctcttccttttgagaagacactatgaattaaattctacagcttttttttgatatatggaaatttgtagaacagaaatattttagttaaagtgtgactttcagaaagggaaaatcagggcacagccttggtctgtgttccccaaatattcacactttaaagaattcttcaaccccccaagggacagttatggtcctttgattctctgctgtggcagtaggtgtgcctcatgcccttccagtgcaatgcaagccctccagcctcaccccagagaggatcactgatgtcagcagcagcctgaggctgaatccaggttgaaagaagaataacttgaaaaaatatatttccacacacagaattttgtttttcttccaagttggttaagacatatattttgtttcttttttttttttttttttgagacggagtctcgctctgtagcccaggctgaagcgcagtggtgtgagctcggcttactgcaagctccacctcccgggttcacgccattctcctacctcagcctcccgagtagctgggactataggcacccgccaccatgcccggctaatttttgtatctttagtagagacggggtttcactgtgttagctaggatggtcttgatctcctgaccttgtgatccgcccaccttggcctcccaaggtactgcgattacaggcatgagctaccatgcccggccacaagacatagattttctatatgcacatcaagggaggtgctggtttaggttgctataggacagagctatcctgtattccagttggtttttgtagagaaacaattagacttctctagatagagccctgatttttctctcacgctttcagttttttaaaagcactaatgatatttcctgttttctcataagaaaaagtcaatactatgccttacaaagagacctttccttctaatatagaattttatttgaaagtgagtacatgtttataactagagaataaaaggagaatttttgaaaaatttctttattgttgtttttgtttaactacttaagctattcgtccttttttttgagacagggtcttgctctgtcccccaggctggaatgcagtggtgcaatcatagcttactgtggcctcgaactcctgggctcgagcagtccttccaactcagcttcccaaattgctggaactacaggaatgcaccaccatacctg

SEQ ID NO: 1596 - protein, 100 aa, Homo sapiens
MFQSWLHAWGDTLEEAFEQCAMAMFGYMTDTGTVEPLQTVEVETQGDDLQSLLFHFLDEWLYKFSADEFFIPRVGRRIFIVQAPSGNRSQSNNIFSNAGL

SEQ ID NO: 1597 - DNA, 2251 bp, Homo sapiens
gacgggactgcgcccggtcagggtcacgtgagagaggtttggtccgcacactcccgcggcaagagggcagccattttcttgaaggctattaagcttacgaccctttcagagtactgagatgaaaaatctagaatgccttcgggtctagttatcaattttgggggtgaagcgggggaaagaacctcgccagtcagacccagacgggtttcattcaaggtgcccttcaacgtttttccttagtctttggaaagaactagtaatgaaggaatcgcagaagatggggttttggctttttaaatatgcgatccaagcggcagggtagggactaaagtaggtcaacagccaactccgagaaaggagtgtggtcctttaagggtgtgcgccaaggggcggagtctagagcggaagtagtaactccgggccgaagtccggtggatgaagggcggaagtagagtgtctaatcctgcagtcatggcgcaggaagaggaagatgttagagattacaatttgactgaagaacagaaggcgatcaaggccaagtatccgccagtcaataggaagtacgagtatttggatcatacagcagatgtccatggattgtattacacagagcatgaatatacttctttaggttacacgcatggggagatactctggaggaagcatttgagcaatgtgcaatggccatgtttggttacatgacagatactgggacagtggagcccctccaaacagtagaagtagaaacccaaggagatgacttacagtctcttctgtttcactttttggatgaatggctttataagttcagtgctgatgaattcttcataccccgggaagtgaaagtacttagcattgatcaaagaaatttcaaattacgatcaattgggtggggagaagaattttcattgtccaagcaccctcagggaacagaagtcaaagcaataacatattcagcaatgcaggtctataatgaagagaacccggaagtttttgtgatcattgacatttaagacaccaaaaaataaaagactcctacgaagaactgtttttgttttcctcttccttttgagaagacactatgaattaaattctacagcttttttttgatatatggaaatttgtagaacagaaatattttagttaaagtgtgactttcagaaagggaaaatcagggcacagccttggtctgtgttccccaaatattcacactttaaagaattcttcaaccccccaagggacagttatggtcctttgattctctgctgtggcagtaggtgtgcctcatgcccttccagtgcaatgcaagccctccagcctcaccccagagaggatcactgatgtcagcagcagcctgaggctgaatccaggttgaaagaagaataacttgaaaaaatatatttccacacacagaattttgtttttcttccaagttggttaagacatatattttgtttcttttttttttttttttttgagacggagtctcgctctgtagcccaggctgaagcgcagtggtgtgagctcggcttactgcaagctccacctcccgggttcacgccattctcctacctcagcctcccgagtagctgggactataggcacccgccaccatgcccggctaatttttgtatctttagtagagacggggtttcactgtgttagctaggatggtcttgatctcctgaccttgtgatccgcccaccttggcctcccaaggtactgcgattacaggcatgagctaccatgcccggccacaagacatagattttctatatgcacatcaagggaggtgctggtttaggttgctataggacagagctatcctgtattccagttggtttttgtagagaaacaattagacttctctagatagagccctgatttttctctcacgctttcagttttttaaaagcactaatgatatttcctgttttctcataagaaaaagtcaatactatgccttacaaagagacctttccttctaatatagaattttatttgaaagtgagtacatgtttataactagagaataaaaggagaatttttgaaaaatttctttattgttgtttttgtttaactacttaagctattcgtccttttttttgagacagggtcttgctctgtcccccaggctggaatgcagtggtgcaatcatagcttactgtggcctcgaactcctgggctcgagcagtccttccaactcagcttcccaaattgctggaactacaggaatgcaccaccatacctg

SEQ ID NO: 1598 - protein, 110 aa, Homo sapiens; identical to SEQ ID NO: 1594

SEQ ID NO: 1599 - DNA, 2066 bp, Homo sapiens
gacgggactgcgcccggtcagggtcacgtgagagaggtttggtccgcacactcccgcggcaagagggcagccattttcttgaaggctattaagcttacgaccctttcagagtactgagatgaaaaatctagaatgccttcgggtctagttatcaattttgggggtgaagcgggggaaagaacctcgccagtcagacccagacgggtttcattcaaggtgcccttcaacgtttttccttagtctttggaaagaactagtaatgaaggaatcgcagaagatggggttttggctttttaaatatgcgatccaagcggcagggtagggactaaagtaggtcaacagccaactccgagaaaggagtgtggtcctttaagggtgtgcgccaaggggcggagtctagagcggaagtagtaactccgggccgaagtccggtggatgaagggcggaagtagagtgtctaatcctgcagtcatggcgcaggaagaggaagatgttagagattacaatttgactgaagaacagaaggcgatcaaggccaagtatccgccagtcaataggaagtacgagtgagatgacttacagtctcttctgtttcactttttggatgaatggctttataagttcagtgctgatgaattcttcataccccgggaagtgaaagtacttagcattgatcaaagaaatttcaaattacgatcaattgggtggggagaagaattttcattgtccaagcaccctcagggaacagaagtcaaagcaataacatattcagcaatgcaggtctataatgaagagaacccggaagtttttgtgatcattgacatttaagacaccaaaaaataaaagactcctacgaagaactgtttttgttttcctcttccttttgagaagacactatgaattaaattctacagcttttttttgatatatggaaatttgtagaacagaaatattttagttaaagtgtgactttcagaaagggaaaatcagggcacagccttggtctgtgttccccaaatattcacactttaaagaattcttcaaccccccaagggacagttatggtcctttgattctctgctgtggcagtaggtgtgcctcatgcccttccagtgcaatgcaagccctccagcctcaccccagagaggatcactgatgtcagcagcagcctgaggctgaatccaggttgaaagaagaataacttgaaaaaatatatttccacacacagaattttgtttttcttccaagttggttaagacatatattttgtttcttttttttttttttttttgagacggagtctcgctctgtagcccaggctgaagcgcagtggtgtgagctcggcttactgcaagctccacctcccgggttcacgccattctcctacctcagcctcccgagtagctgggactataggcacccgccaccatgcccggctaatttttgtatctttagtagagacggggtttcactgtgttagctaggatggtcttgatctcctgaccttgtgatccgcccaccttggcctcccaaggtactgcgattacaggcatgagctaccatgcccggccacaagacatagattttctatatgcacatcaagggaggtgctggtttaggttgctataggacagagctatcctgtattccagttggtttttgtagagaaacaattagacttctctagatagagccctgatttttctctcacgctttcagttttttaaaagcactaatgatatttcctgttttctcataagaaaaagtcaatactatgccttacaaagagacctttccttctaatatagaattttatttgaaagtgagtacatgtttataactagagaataaaaggagaatttttgaaaaatttctttattgttgtttttgtttaactacttaagctattcgtccttttttttgagacagggtcttgctctgtcccccaggctggaatgcagtggtgcaatcatagcttactgtggcctcgaactcctgggctcgagcagtccttccaactcagcttcccaaattgctggaactacaggaatgcaccaccatacctg

SEQ ID NO: 1600 - protein, 44 aa, Homo sapiens
MKGGSRVSNPAVMAQEEEDVRDYNLTEEQKAIKAKYPPVNRKYE

SEQ ID NO: 1601 - DNA, 2279 bp, Homo sapiens
gacgggactgcgcccggtcagggtcacgtgagagaggtttggtccgcacactcccgcggcaagagggcagccattttcttgaaggctattaagcttacgaccctttcagagtactgagatgaaaaatctagaatgccttcgggtctagttatcaattttgggggtgaagcgggggaaagaacctcgccagtcagacccagacgggtttcattcaaggtgcccttcaacgtttttccttagtctttggaaagaactagtaatgaaggaatcgcagaagatggggttttggctttttaaatatgcgatccaagcggcagggtagggactaaagtaggtcaacagccaactccgagaaaggagtgtggtcctttaagggtgtgcgccaaggggcggagtctagagcggaagtagtaactccgggccgaagtccggtggatgaagggcggaagtagagtgtctaatcctgcagtcatggcgcaggaagaggaagatgttagagattacaatttgactgaagaacagaaggcgatcaaggccaagtatccgccagtcaataggaagtacgagtatttggatcatacagcagatgtccagtgagtatagcgggagttcattcctttgaaaccacgtcagtaggaagactgaatgtttcaatcttggttacacgcatggggagatactctggaggaagcatttgagcaatgtgcaatggccatgtttggttacatgacagatactgggacagtggagcccctccaaacagtagaagtagaaacccaaggagatgacttacagtctcttctgtttcactttttggatgaatggctttataagttcagtgctgatgaattcttcataccccgggaagtgaaagtacttagcattgatcaaagaaatttcaaattacgatcaattgggtggggagaagaattttcattgtccaagcaccctcagggaacagaagtcaaagcaataacatattcagcaatgcaggtctataatgaagagaacccggaagtttttgtgatcattgacatttaagacaccaaaaaataaaagactcctacgaagaactgtttttgttttcctcttccttttgagaagacactatgaattaaattctacagcttttttttgatatatggaaatttgtagaacagaaatattttagttaaagtgtgactttcagaaagggaaaatcagggcacagccttggtctgtgttccccaaatattcacactttaaagaattcttcaaccccccaagggacagttatggtcctttgattctctgctgtggcagtaggtgtgcctcatgcccttccagtgcaatgcaagccctccagcctcaccccagagaggatcactgatgtcagcagcagcctgaggctgaatccaggttgaaagaagaataacttgaaaaaatatatttccacacacagaattttgtttttcttccaagttggttaagacatatattttgtttcttttttttttttttttttgagacggagtctcgctctgtagcccaggctgaagcgcagtggtgtgagctcggcttactgcaagctccacctcccgggttcacgccattctcctacctcagcctcccgagtagctgggactataggcacccgccaccatgcccggctaatttttgtatctttagtagagacggggtttcactgtgttagctaggatggtcttgatctcctgaccttgtgatccgcccaccttggcctcccaaggtactgcgattacaggcatgagctaccatgcccggccacaagacatagattttctatatgcacatcaagggaggtgctggtttaggttgctataggacagagctatcctgtattccagttggtttttgtagagaaacaattagacttctctagatagagccctgatttttctctcacgctttcagttttttaaaagcactaatgatatttcctgttttctcataagaaaaagtcaatactatgccttacaaagagacctttccttctaatatagaattttatttgaaagtgagtacatgtttataactagagaataaaaggagaatttttgaaaaatttctttattgttgtttttgtttaactacttaagctattcgtccttttttttgagacagggtcttgctctgtcccccaggctggaatgcagtggtgcaatcatagcttactgtggcctcgaactcctgggctcgagcagtccttccaactcagcttcccaaattgctggaactacaggaatgcaccaccatacctg

SEQ ID NO: 1602 - protein, 131 aa, Homo sapiens
MFQSWLHAWGDTLEEAFEQCAMAMFGYMTDTGTVEPLQTVEVETQGDDLQSLLFHFLDEWLYKFSADEFFIPREVKVLSIDQRNFKLRSIGWGEEFSLSKHPQGTEVKAITYSAMQVYNEENPEVFVIIDI

SEQ ID NO: 1603 - DNA, 2139 bp, Homo sapiens
gacgggactgcgcccggtcagggtcacgtgagagaggtttggtccgcacactcccgcggcaagagggcagccattttcttgaaggctattaagcttacgaccctttcagagtactgagatgaaaaatctagaatgccttcgggtctagttatcaattttgggggtgaagcgggggaaagaacctcgccagtcagacccagacgggtttcattcaaggtgcccttcaacgtttttccttagtctttggaaagaactagtaatgaaggaatcgcagaagatggggttttggctttttaaatatgcgatccaagcggcagggtagggactaaagtaggtcaacagccaactccgagaaaggagtgtggtcctttaagggtgtgcgccaaggggcggagtctagagcggaagtagtaactccgggccgaagtccggtggatgaagggcggaagtagagtgtctaatcctgcagtcatggcgcaggaagaggaagatgttagagattacaatttgactgaagaacagaaggcgatcaaggccaagtatccgccagtcaataggaagtacgagtgtgagttacacgcatggggagatactctggaggaagcatttgagcaatgtgcaatggccatgtttggttacatgacagatactgggacagtggagcccctccaaacagtagaagtagaaacccaaggagatgacttacagtctcttctgtttcactttttggatgaatggctttataagttcagtgctgatgaattcttcataccccgggtggggagaagaattttcattgtccaagcaccctcagggaacagaagtcaaagcaataacatattcagcaatgcaggtctataatgaagagaacccggaagtttttgtgatcattgacatttaagacaccaaaaaataaaagactcctacgaagaactgtttttgttttcctcttccttttgagaagacactatgaattaaattctacagcttttttttgatatatggaaatttgtagaacagaaatattttagttaaagtgtgactttcagaaagggaaaatcagggcacagccttggtctgtgttccccaaatattcacactttaaagaattcttcaaccccccaagggacagttatggtcctttgattctctgctgtggcagtaggtgtgcctcatgcccttccagtgcaatgcaagccctccagcctcaccccagagaggatcactgatgtcagcagcagcctgaggctgaatccaggttgaaagaagaataacttgaaaaaatatatttccacacacagaattttgtttttcttccaagttggttaagacatatattttgtttcttttttttttttttttttgagacggagtctcgctctgtagcccaggctgaagcgcagtggtgtgagctcggcttactgcaagctccacctcccgggttcacgccattctcctacctcagcctcccgagtagctgggactataggcacccgccaccatgcccggctaatttttgtatctttagtagagacggggtttcactgtgttagctaggatggtcttgatctcctgaccttgtgatccgcccaccttggcctcccaaggtactgcgattacaggcatgagctaccatgcccggccacaagacatagattttctatatgcacatcaagggaggtgctggtttaggttgctataggacagagctatcctgtattccagttggtttttgtagagaaacaattagacttctctagatagagccctgatttttctctcacgctttcagttttttaaaagcactaatgatatttcctgttttctcataagaaaaagtcaatactatgccttacaaagagacctttccttctaatatagaattttatttgaaagtgagtacatgtttataactagagaataaaaggagaatttttgaaaaatttctttattgttgtttttgtttaactacttaagctattcgtccttttttttgagacagggtcttgctctgtcccccaggctggaatgcagtggtgcaatcatagcttactgtggcctcgaactcctgggctcgagcagtccttccaactcagcttcccaaattgctggaactacaggaatgcaccaccatacctg

SEQ ID NO: 1604 - protein, 141 aa, Homo sapiens
MKGGSRVSNPAVMAQEEEDVRDYNLTEEQKAIKAKYPPVNRKYECELHAWGDTLEEAFEQCAMAMFGYMTDTGTVEPLQTVEVETQGDDLQSLLFHFLDEWLYKFSADEFFIPRVGRRIFIVQAPSGNRSQSNNIFSNAGL

SEQ ID NO: 1605 - DNA, 1897 bp, Homo sapiens
gacgggactgcgcccggtcagggtcacgtgagagaggtttggtccgcacactcccgcggcaagagggcagccattttcttgaaggctattaagcttacgaccctttcagagtactgagatgaaaaatctagaatgccttcgggtctagttatcaattttgggggtgaagcgggggaaagaacctcgccagtcagacccagacgggtttcattcaaggtgcccttcaacgtttttccttagtctttggaaagaactagtaatgaaggaatcgcagaagatggggttttggctttttaaatatgcgatccaagcggcagggtagggactaaagtaggtcaacagccaactccgagaaaggagtgtggtcctttaagggtgtgcgccaaggggcggagtctagagcggaagtagtaactccgggccgaagtccggtggatgaagggcggaagtagagtgtctaatcctgcagtcatggcgcaggaagaggaagatgttagagattacaatttgactgaagaacagaaggcgatcaaggccaagtatccgccagtcaataggaagtacgagtgtgaggaacagaagtcaaagcaataacatattcagcaatgcaggtctataatgaagagaacccggaagtttttgtgatcattgacatttaagacaccaaaaaataaaagactcctacgaagaactgtttttgttttcctcttccttttgagaagacactatgaattaaattctacagcttttttttgatatatggaaatttgtagaacagaaatattttagttaaagtgtgactttcagaaagggaaaatcagggcacagccttggtctgtgttccccaaatattcacactttaaagaattcttcaaccccccaagggacagttatggtcctttgattctctgctgtggcagtaggtgtgcctcatgcccttccagtgcaatgcaagccctccagcctcaccccagagaggatcactgatgtcagcagcagcctgaggctgaatccaggttgaaagaagaataacttgaaaaaatatatttccacacacagaattttgtttttcttccaagttggttaagacatatattttgtttcttttttttttttttttttgagacggagtctcgctctgtagcccaggctgaagcgcagtggtgtgagctcggcttactgcaagctccacctcccgggttcacgccattctcctacctcagcctcccgagtagctgggactataggcacccgccaccatgcccggctaatttttgtatctttagtagagacggggtttcactgtgttagctaggatggtcttgatctcctgaccttgtgatccgcccaccttggcctcccaaggtactgcgattacaggcatgagctaccatgcccggccacaagacatagattttctatatgcacatcaagggaggtgctggtttaggttgctataggacagagctatcctgtattccagttggtttttgtagagaaacaattagacttctctagatagagccctgatttttctctcacgctttcagttttttaaaagcactaatgatatttcctgttttctcataagaaaaagtcaatactatgccttacaaagagacctttccttctaatatagaattttatttgaaagtgagtacatgtttataactagagaataaaaggagaatttttgaaaaatttctttattgttgtttttgtttaactacttaagctattcgtccttttttttgagacagggtcttgctctgtcccccaggctggaatgcagtggtgcaatcatagcttactgtggcctcgaactcctgggctcgagcagtccttccaactcagcttcccaaattgctggaactacaggaatgcaccaccatacctg

SEQ ID NO: 1606 - protein, 52 aa, Homo sapiens
MKGGSRVSNPAVMAQEEEDVRDYNLTEEQKAIKAKYPPVNRKYECEEQKSKQ

SEQ ID NO: 1607 - DNA, 1955 bp, Homo sapiens
gacgggactgcgcccggtcagggtcacgtgagagaggtttggtccgcacactcccgcggcaagagggcagccattttcttgaaggctattaagcttacgaccctttcagagtactgagatgaaaaatctagaatgccttcgggtctagttatcaattttgggggtgaagcgggggaaagaacctcgccagtcagacccagacgggtttcattcaaggtgcccttcaacgtttttccttagtctttggaaagaactagtaatgaaggaatcgcagaagatggggttttggctttttaaatatgcgatccaagcggcagggtagggactaaagtaggtcaacagccaactccgagaaaggagtgtggtcctttaagggtgtgcgccaaggggcggagtctagagcggaagtagtaactccgggccgaagtccggtggatgaagggcggaagtagagtgtctaatcctgcagtcatggcgcaggaagaggaagatgttagagattacaatttgactgaagaacagaaggcgatcaaggccaagtatccgccagtcaataggaagtacgagtatttggatcatacagcagatgtccagtggggagaagaattttcattgtccaagcaccctcagggaacagaagtcaaagcaataacatattcagcaatgcaggtctataatgaagagaacccggaagtttttgtgatcattgacatttaagacaccaaaaaataaaagactcctacgaagaactgtttttgttttcctcttccttttgagaagacactatgaattaaattctacagcttttttttgatatatggaaatttgtagaacagaaatattttagttaaagtgtgactttcagaaagggaaaatcagggcacagccttggtctgtgttccccaaatattcacactttaaagaattcttcaaccccccaagggacagttatggtcctttgattctctgctgtggcagtaggtgtgcctcatgcccttccagtgcaatgcaagccctccagcctcaccccagagaggatcactgatgtcagcagcagcctgaggctgaatccaggttgaaagaagaataacttgaaaaaatatatttccacacacagaattttgtttttcttccaagttggttaagacatatattttgtttcttttttttttttttttttgagacggagtctcgctctgtagcccaggctgaagcgcagtggtgtgagctcggcttactgcaagctccacctcccgggttcacgccattctcctacctcagcctcccgagtagctgggactataggcacccgccaccatgcccggctaatttttgtatctttagtagagacggggtttcactgtgttagctaggatggtcttgatctcctgaccttgtgatccgcccaccttggcctcccaaggtactgcgattacaggcatgagctaccatgcccggccacaagacatagattttctatatgcacatcaagggaggtgctggtttaggttgctataggacagagctatcctgtattccagttggtttttgtagagaaacaattagacttctctagatagagccctgatttttctctcacgctttcagttttttaaaagcactaatgatatttcctgttttctcataagaaaaagtcaatactatgccttacaaagagacctttccttctaatatagaattttatttgaaagtgagtacatgtttataactagagaataaaaggagaatttttgaaaaatttctttattgttgtttttgtttaactacttaagctattcgtccttttttttgagacagggtcttgctctgtcccccaggctggaatgcagtggtgcaatcatagcttactgtggcctcgaactcctgggctcgagcagtccttccaactcagcttcccaaattgctggaactacaggaatgcaccaccatacctg

SEQ ID NO: 1608 - protein, 93 aa, Homo sapiens
MKGGSRVSNPAVMAQEEEDVRDYNLTEEQKAIKAKYPPVNRKYEYLDHTADVQWGEEFSLSKHPQGTEVKAITYSAMQVYNEENPEVFVIIDI

SEQ ID NO: 1609 - DNA, 2205 bp, Homo sapiens
gcgcgccggcgttgacgggactgcgcccggtcagggtcacgtgagagaggtttggtccgcacactcccgcggcaagagggcagccattttcttgaaggctattaagcttacgaccctttcagagtactgagatgaaaaatctagaatgccttcgggtctagttatcaattttgggggtgaagcgggggaaagaacctcgccagtcagacccagacgggtttcattcaaggtgcccttcaacgtttttccttagtctttggaaagaactagtaatgaaggaatcgcagaagatggggttttggctttttaaatatgcgatccaagcggcagggtagggactaaagtaggtcaacagccaactccgagaaaggagtgtggtcctttaagggtgtgcgccaaggggcggagtctagagcggaagtagtaactccgggccgaagtccggtggatgaagggcggaagtagagtgtctaatcctgcagtcatggcgcaggaagaggaagatgttagagattacaatttgactgaagaacagaaggcgatcaaggccaagtatccgccagtcaataggaagtacgagtgtgagttacacgcatggggagatactctggaggaagcatttgagcaatgtgcaatggccatgtttggttacatgacagatactgggacagtggagcccctccaaacagtagaagtagaaacccaaggagatgacttacagtctcttctgtttcactttttggatgaatggctttataagttcagtgctgatgaattcttcataccccgggaagtgaaagtacttagcattgatcaaagaaatttcaaattacgatcaattgggtggggagaagaattttcattgtccaagcaccctcagggaacagaagtcaaagcaataacatattcagcaatgcaggtctataatgaagagaacccggaagtttttgtgatcattgacatttaagacaccaaaaaataaaagactcctacgaagaactgtttttgttttcctcttccttttgagaagacactatgaattaaattctacagcttttttttgatatatggaaatttgtagaacagaaatattttagttaaagtgtgactttcagaaagggaaaatcagggcacagccttggtctgtgttccccaaatattcacactttaaagaattcttcaaccccccaagggacagttatggtcctttgattctctgctgtggcagtaggtgtgcctcatgcccttccagtgcaatgcaagccctccagcctcaccccagagaggatcactgatgtcagcagcagcctgaggctgaatccaggttgaaagaagaataacttgaaaaaatatatttccacacacagaattttgtttttcttccaagttggttaagacatatattttgtttcttttttttttttttttttgagacggagtctcgctctgtagcccaggctgaagcgcagtggtgtgagctcggcttactgcaagctccacctcccgggttcacgccattctcctacctcagcctcccgagtagctgggactataggcacccgccaccatgcccggctaatttttgtatctttagtagagacggggtttcactgtgttagctaggatggtcttgatctcctgaccttgtgatccgcccaccttggcctcccaaggtactgcgattacaggcatgagctaccatgcccggccacaagacatagattttctatatgcacatcaagggaggtgctggtttaggttgctataggacagagctatcctgtattccagttggtttttgtagagaaacaattagacttctctagatagagccctgatttttctctcacgctttcagttttttaaaagcactaatgatatttcctgttttctcataagaaaaagtcaatactatgccttacaaagagacctttccttctaatatagaattttatttgaaagtgagtacatgtttataactagagaataaaaggagaatttttgaaaaatttctttattgttgtttttgtttaactacttaagctattcgtccttttttttgagacagggtcttgctctgtcccccaggctggaatgcagtggtgcaatcatagcttactgtggcctcgaactcctgggctcgagcagtccttccaactcagcttcccaaattgctggaactacaggaatgcaccaccatacctg

SEQ ID NO: 1610 - protein, 172 aa, Homo sapiens
MKGGSRVSNPAVMAQEEEDVRDYNLTEEQKAIKAKYPPVNRKYECELHAWGDTLEEAFEQCAMAMFGYMTDTGTVEPLQTVEVETQGDDLQSLLFHFLDEWLYKFSADEFFIPREVKVLSIDQRNFKLRSIGWGEEFSLSKHPQGTEVKAITYSAMQVYNEENPEVFVIIDI

SEQ ID NO: 1611 - DNA, 2239 bp, Homo sapiens
gcgcgccggcgttgacgggactgcgcccggtcagggtcacgtgagagaggtttggtccgcacactcccgcggcaagagggcagccattttcttgaaggctattaagcttacgaccctttcagagtactgagatgaaaaatctagaatgccttcgggtctagttatcaattttgggggtgaagcgggggaaagaacctcgccagtcagacccagacgggtttcattcaaggtgcccttcaacgtttttccttagtctttggaaagaactagtaatgaaggaatcgcagaagatggggttttggctttttaaatatgcgatccaagcggcagggtagggactaaagtaggtcaacagccaactccgagaaaggagtgtggtcctttaagggtgtgcgccaaggggcggagtctagagcggaagtagtaactccgggccgaagtccggtggatgaagggcggaagtagagtgtctaatcctgcagtcatggcgcaggaagaggaagatgttagagattacaatttgactgaagaacagaaggcgatcaaggccaagtatccgccagtcaataggaagtacgagttggattgtattacacagagcatgaatatacttctttaggttacacgcatggggagatactctggaggaagcatttgagcaatgtgcaatggccatgtttggttacatgacagatactgggacagtggagcccctccaaacagtagaagtagaaacccaaggagatgacttacagtctcttctgtttcactttttggatgaatggctttataagttcagtgctgatgaattcttcataccccgggaagtgaaagtacttagcattgatcaaagaaatttcaaattacgatcaattgggtggggagaagaattttcattgtccaagcaccctcagggaacagaagtcaaagcaataacatattcagcaatgcaggtctataatgaagagaacccggaagtttttgtgatcattgacatttaagacaccaaaaaataaaagactcctacgaagaactgtttttgttttcctcttccttttgagaagacactatgaattaaattctacagcttttttttgatatatggaaatttgtagaacagaaatattttagttaaagtgtgactttcagaaagggaaaatcagggcacagccttggtctgtgttccccaaatattcacactttaaagaattcttcaaccccccaagggacagttatggtcctttgattctctgctgtggcagtaggtgtgcctcatgcccttccagtgcaatgcaagccctccagcctcaccccagagaggatcactgatgtcagcagcagcctgaggctgaatccaggttgaaagaagaataacttgaaaaaatatatttccacacacagaattttgtttttcttccaagttggttaagacatatattttgtttcttttttttttttttttttgagacggagtctcgctctgtagcccaggctgaagcgcagtggtgtgagctcggcttactgcaagctccacctcccgggttcacgccattctcctacctcagcctcccgagtagctgggactataggcacccgccaccatgcccggctaatttttgtatctttagtagagacggggtttcactgtgttagctaggatggtcttgatctcctgaccttgtgatccgcccaccttggcctcccaaggtactgcgattacaggcatgagctaccatgcccggccacaagacatagattttctatatgcacatcaagggaggtgctggtttaggttgctataggacagagctatcctgtattccagttggtttttgtagagaaacaattagacttctctagatagagccctgatttttctctcacgctttcagttttttaaaagcactaatgatatttcctgttttctcataagaaaaagtcaatactatgccttacaaagagacctttccttctaatatagaattttatttgaaagtgagtacatgtttataactagagaataaaaggagaatttttgaaaaatttctttattgttgtttttgtttaactacttaagctattcgtccttttttttgagacagggtcttgctctgtcccccaggctggaatgcagtggtgcaatcatagcttactgtggcctcgaactcctgggctcgagcagtccttccaactcagcttcccaaattgctggaactacaggaatgcaccaccatacctg

SEQ ID NO: 1612 - protein, 110 aa, Homo sapiens; identical to SEQ ID NO: 1594

SEQ ID NO: 1613 - DNA, 2186 bp, Homo sapiens
gcgcgccggcgttgacgggactgcgcccggtcagggtcacgtgagagaggtttggtccgcacactcccgcggcaagagggcagccattttcttgaaggctattaagcttacgaccctttcagagtactgagatgaaaaatctagaatgccttcgggtctagttatcaattttgggggtgaagcgggggaaagaacctcgccagtcagacccagacgggtttcattcaaggtgcccttcaacgtttttccttagtctttggaaagaactagtaatgaaggaatcgcagaagatggggttttggctttttaaatatgcgatccaagcggcagggtagggactaaagtaggtcaacagccaactccgagaaaggagtgtggtcctttaagggtgtgcgccaaggggcggagtctagagcggaagtagtaactccgggccgaagtccggtggatgaagggcggaagtagagtgtctaatcctgcagtcatggcgcaggaagaggaagatgttagagattacaatttgactgaagaacagaaggcgatcaaggccaagtatccgccagtcaataggaagtacgagttggattgtattacacagagcatgaatatacttctttaggttacacgcatggggagatactctggaggaagcatttgagcaatgtgcaatggccatgtttggttacatgacagatactgggacagtggagcccctccaaacagtagaagtagaaacccaaggagatgacttacagtctcttctgtttcactttttggatgaatggctttataagttcagtgctgatgaattcttcataccccgggtggggagaagaattttcattgtccaagcaccctcagggaacagaagtcaaagcaataacatattcagcaatgcaggtctataatgaagagaacccggaagtttttgtgatcattgacatttaagacaccaaaaaataaaagactcctacgaagaactgtttttgttttcctcttccttttgagaagacactatgaattaaattctacagcttttttttgatatatggaaatttgtagaacagaaatattttagttaaagtgtgactttcagaaagggaaaatcagggcacagccttggtctgtgttccccaaatattcacactttaaagaattcttcaaccccccaagggacagttatggtcctttgattctctgctgtggcagtaggtgtgcctcatgcccttccagtgcaatgcaagccctccagcctcaccccagagaggatcactgatgtcagcagcagcctgaggctgaatccaggttgaaagaagaataacttgaaaaaatatatttccacacacagaattttgtttttcttccaagttggttaagacatatattttgtttcttttttttttttttttttgagacggagtctcgctctgtagcccaggctgaagcgcagtggtgtgagctcggcttactgcaagctccacctcccgggttcacgccattctcctacctcagcctcccgagtagctgggactataggcacccgccaccatgcccggctaatttttgtatctttagtagagacggggtttcactgtgttagctaggatggtcttgatctcctgaccttgtgatccgcccaccttggcctcccaaggtactgcgattacaggcatgagctaccatgcccggccacaagacatagattttctatatgcacatcaagggaggtgctggtttaggttgctataggacagagctatcctgtattccagttggtttttgtagagaaacaattagacttctctagatagagccctgatttttctctcacgctttcagttttttaaaagcactaatgatatttcctgttttctcataagaaaaagtcaatactatgccttacaaagagacctttccttctaatatagaattttatttgaaagtgagtacatgtttataactagagaataaaaggagaatttttgaaaaatttctttattgttgtttttgtttaactacttaagctattcgtccttttttttgagacagggtcttgctctgtcccccaggctggaatgcagtggtgcaatcatagcttactgtggcctcgaactcctgggctcgagcagtccttccaactcagcttcccaaattgctggaactacaggaatgcaccaccatacctg

SEQ ID NO: 1614 - protein, 79 aa, Homo sapiens [sequence omitted]

SEQ ID NO: 1615 - DNA, 1943 bp, Homo sapiens
gcgcgccggcgttgacgggactgcgcccggtcagggtcacgtgagagaggtttggtccgcacactcccgcggcaagagggcagccattttcttgaaggctattaagcttacgaccctttcagagtactgagatgaaaaatctagaatgccttcgggtctagttatcaattttgggggtgaagcgggggaaagaacctcgccagtcagacccagacgggtttcattcaaggtgcccttcaacgtttttccttagtctttggaaagaactagtaatgaaggaatcgcagaagatggggttttggctttttaaatatgcgatccaagcggcagggtagggactaaagtaggtcaacagccaactccgagaaaggagtgtggtcctttaagggtgtgcgccaaggggcggagtctagagcggaagtagtaactccgggccgaagtccggtggatgaagggcggaagtagagtgtctaatcctgcagtcatggcgcaggaagaggaagatgttagagattacaatttgactgaagaacagaaggcgatcaaggccaagtatccgccagtcaataggaagtacgagtgtggggagaagaattttcattgtccaagcaccctcagggaacagaagtcaaagcaataacatattcagcaatgcaggtctataatgaagagaacccggaagtttttgtgatcattgacatttaagacaccaaaaaataaaagactcctacgaagaactgtttttgttttcctcttccttttgagaagacactatgaattaaattctacagcttttttttgatatatggaaatttgtagaacagaaatattttagttaaagtgtgactttcagaaagggaaaatcagggcacagccttggtctgtgttccccaaatattcacactttaaagaattcttcaaccccccaagggacagttatggtcctttgattctctgctgtggcagtaggtgtgcctcatgcccttccagtgcaatgcaagccctccagcctcaccccagagaggatcactgatgtcagcagcagcctgaggctgaatccaggttgaaagaagaataacttgaaaaaatatatttccacacacagaattttgtttttcttccaagttggttaagacatatattttgtttcttttttttttttttttttgagacggagtctcgctctgtagcccaggctgaagcgcagtggtgtgagctcggcttactgcaagctccacctcccgggttcacgccattctcctacctcagcctcccgagtagctgggactataggcacccgccaccatgcccggctaatttttgtatctttagtagagacggggtttcactgtgttagctaggatggtcttgatctcctgaccttgtgatccgcccaccttggcctcccaaggtactgcgattacaggcatgagctaccatgcccggccacaagacatagattttctatatgcacatcaagggaggtgctggtttaggttgctataggacagagctatcctgtattccagttggtttttgtagagaaacaattagacttctctagatagagccctgatttttctctcacgctttcagttttttaaaagcactaatgatatttcctgttttctcataagaaaaagtcaatactatgccttacaaagagacctttccttctaatatagaattttatttgaaagtgagtacatgtttataactagagaataaaaggagaatttttgaaaaatttctttattgttgtttttgtttaactacttaagctattcgtccttttttttgagacagggtcttgctctgtcccccaggctggaatgcagtggtgcaatcatagcttactgtggcctcgaactcctgggctcgagcagtccttccaactcagcttcccaaattgctggaactacaggaatgcaccaccatacctg

SEQ ID NO: 1616 - protein, 63 aa, Homo sapiens
MKGGSRVSNPAVMAQEEEDVRDYNLTEEQKAIKAKYPPVNRKYECGEKNFHCPSTLREQKSKQ

SEQ ID NO: 1617 - DNA, 2173 bp, Homo sapiens
gcgcgccggcgttgacgggactgcgcccggtcagggtcacgtgagagaggtttggtccgcacactcccgcggcaagagggcagccattttcttgaaggctattaagcttacgaccctttcagagtactgagatgaaaaatctagaatgccttcgggtctagttatcaattttgggggtgaagcgggggaaagaacctcgccagtcagacccagacgggtttcattcaaggtgcccttcaacgtttttccttagtctttggaaagaactagtaatgaaggaatcgcagaagatggggttttggctttttaaatatgcgatccaagcggcagggtagggactaaagtaggtcaacagccaactccgagaaaggagtgtggtcctttaagggtgtgcgccaaggggcggagtctagagcggaagtagtaactccgggccgaagtccggtggatgaagggcggaagtagagtgtctaatcctgcagtcatggcgcaggaagaggaagatgttagagattacaatttgactgaagaacagaaggcgatcaaggccaagtatccgccagtcaataggaagtacgagtatttggatcatacagcagatgtccagttacacgcatggggagatactctggaggaagcatttgagcaatgtgcaatggccatgtttggttacatgacagatactgggacagtggagcccctccaaacagtagaagtagaaacccaaggagatgacttacagtctcttctgtttcactttttggatgaatggctttataagttcagtgctgatgaattcttcataccccgggtggggagaagaattttcattgtccaagcaccctcagggaacagaagtcaaagcaataacatattcagcaatgcaggtctataatgaagagaacccggaagtttttgtgatcattgacatttaagacaccaaaaaataaaagactcctacgaagaactgtttttgttttcctcttccttttgagaagacactatgaattaaattctacagcttttttttgatatatggaaatttgtagaacagaaatattttagttaaagtgtgactttcagaaagggaaaatcagggcacagccttggtctgtgttccccaaatattcacactttaaagaattcttcaaccccccaagggacagttatggtcctttgattctctgctgtggcagtaggtgtgcctcatgcccttccagtgcaatgcaagccctccagcctcaccccagagaggatcactgatgtcagcagcagcctgaggctgaatccaggttgaaagaagaataacttgaaaaaatatatttccacacacagaattttgtttttcttccaagttggttaagacatatattttgtttcttttttttttttttttttgagacggagtctcgctctgtagcccaggctgaagcgcagtggtgtgagctcggcttactgcaagctccacctcccgggttcacgccattctcctacctcagcctcccgagtagctgggactataggcacccgccaccatgcccggctaatttttgtatctttagtagagacggggtttcactgtgttagctaggatggtcttgatctcctgaccttgtgatccgcccaccttggcctcccaaggtactgcgattacaggcatgagctaccatgcccggccacaagacatagattttctatatgcacatcaagggaggtgctggtttaggttgctataggacagagctatcctgtattccagttggtttttgtagagaaacaattagacttctctagatagagccctgatttttctctcacgctttcagttttttaaaagcactaatgatatttcctgttttctcataagaaaaagtcaatactatgccttacaaagagacctttccttctaatatagaattttatttgaaagtgagtacatgtttataactagagaataaaaggagaatttttgaaaaatttctttattgttgtttttgtttaactacttaagctattcgtccttttttttgagacagggtcttgctctgtcccccaggctggaatgcagtggtgcaatcatagcttactgtggcctcgaactcctgggctcgagcagtccttccaactcagcttcccaaattgctggaactacaggaatgcaccaccatacctg

SEQ ID NO: 1618 - protein, 148 aa, Homo sapiens
MKGGSRVSNPAVMAQEEEDVRDYNLTEEQKAIKAKYPPVNRKYEYLDHTADVQLHAWGDTLEEAFEQCAMAMFGYMTDTGTVEPLQTVEVETQGDDLQSLLFHFLDEWLYKFSADEFFIPRVGRRIFIVQAPSGNRSQSNNIFSNAGL

SEQ ID NO: 1619 - DNA, 2226 bp, Homo sapiens
gcgcgccggcgttgacgggactgcgcccggtcagggtcacgtgagagaggtttggtccgcacactcccgcggcaagagggcagccattttcttgaaggctattaagcttacgaccctttcagagtactgagatgaaaaatctagaatgccttcgggtctagttatcaattttgggggtgaagcgggggaaagaacctcgccagtcagacccagacgggtttcattcaaggtgcccttcaacgtttttccttagtctttggaaagaactagtaatgaaggaatcgcagaagatggggttttggctttttaaatatgcgatccaagcggcagggtagggactaaagtaggtcaacagccaactccgagaaaggagtgtggtcctttaagggtgtgcgccaaggggcggagtctagagcggaagtagtaactccgggccgaagtccggtggatgaagggcggaagtagagtgtctaatcctgcagtcatggcgcaggaagaggaagatgttagagattacaatttgactgaagaacagaaggcgatcaaggccaagtatccgccagtcaataggaagtacgagtatttggatcatacagcagatgtccagttacacgcatggggagatactctggaggaagcatttgagcaatgtgcaatggccatgtttggttacatgacagatactgggacagtggagcccctccaaacagtagaagtagaaacccaaggagatgacttacagtctcttctgtttcactttttggatgaatggctttataagttcagtgctgatgaattcttcataccccgggaagtgaaagtacttagcattgatcaaagaaatttcaaattacgatcaattgggtggggagaagaattttcattgtccaagcaccctcagggaacagaagtcaaagcaataacatattcagcaatgcaggtctataatgaagagaacccggaagtttttgtgatcattgacatttaagacaccaaaaaataaaagactcctacgaagaactgtttttgttttcctcttccttttgagaagacactatgaattaaattctacagcttttttttgatatatggaaatttgtagaacagaaatattttagttaaagtgtgactttcagaaagggaaaatcagggcacagccttggtctgtgttccccaaatattcacactttaaagaattcttcaaccccccaagggacagttatggtcctttgattctctgctgtggcagtaggtgtgcctcatgcccttccagtgcaatgcaagccctccagcctcaccccagagaggatcactgatgtcagcagcagcctgaggctgaatccaggttgaaagaagaataacttgaaaaaatatatttccacacacagaattttgtttttcttccaagttggttaagacatatattttgtttcttttttttttttttttttgagacggagtctcgctctgtagcccaggctgaagcgcagtggtgtgagctcggcttactgcaagctccacctcccgggttcacgccattctcctacctcagcctcccgagtagctgggactataggcacccgccaccatgcccggctaatttttgtatctttagtagagacggggtttcactgtgttagctaggatggtcttgatctcctgaccttgtgatccgcccaccttggcctcccaaggtactgcgattacaggcatgagctaccatgcccggccacaagacatagattttctatatgcacatcaagggaggtgctggtttaggttgctataggacagagctatcctgtattccagttggtttttgtagagaaacaattagacttctctagatagagccctgatttttctctcacgctttcagttttttaaaagcactaatgatatttcctgttttctcataagaaaaagtcaatactatgccttacaaagagacctttccttctaatatagaattttatttgaaagtgagtacatgtttataactagagaataaaaggagaatttttgaaaaatttctttattgttgtttttgtttaactacttaagctattcgtccttttttttgagacagggtcttgctctgtcccccaggctggaatgcagtggtgcaatcatagcttactgtggcctcgaactcctgggctcgagcagtccttccaactcagcttcccaaattgctggaactacaggaatgcaccaccatacctg

SEQ ID NO: 1620 - protein, 179 aa, Homo sapiens; identical to SEQ ID NO: 64

SEQ ID NO: 1621 - DNA, 1507 bp, Homo sapiens
tttgaaaccacgtcagtaggaagactgaatgtttcaatcttgtggattgtattacacagagcatgaatatacttctttaggttacacgcatggggagatactctggaggaagcatttgagcaatgtgcaatggccatgtttggttacatgacagatactgggacagtggagcccctccaaacagtagaagtagaaacccaaggagatgacttacagtctcttctgtttcactttttggatgaatggctttataagttcagtgctgatgaattcttcataccccgggaagtgaaagtacttagcattgatcaaagaaatttcaaattacgatcaattgggtggggagaagaattttcattgtccaagcaccctcagggaacagaagtcaaagcaataacatattcagcaatgcaggtctataatgaagagaacccggaagtttttgtgatcattgacatttaagacaccaaaaaataaaagactcctacgaagaactgtttttgttttcctcttccttttgagaagacactatgaattaaattctacagcttttttttgatatatggaaatttgtagaacagaaatattttagttaaagtgtgactttcagaaagggaaaatcagggcacagccttggtctgtgttccccaaatattcacactttaaagaattcttcaaccccccaagggacagttatggtcctttgattctctgctgtggcagtaggtgtgcctcatgcccttccagtgcaatgcaagccctccagcctcaccccagagaggatcactgatgtcagcagcagcctgaggctgaatccaggttgaaagaagaataacttgaaaaaatatatttccacacacagaattttgtttttcttccaagttggttaagacatatattttgtttcttttttttttttttttttgagacggagtctcgctctgtagcccaggctgaagcgcagtggtgtgagctcggcttactgcaagctccacctcccgggttcacgccattctcctacctcagcctcccgagtagctgggactataggcacccgccaccatgcccggctaatttttgtatctttagtagagacggggtttcactgtgttagctaggatggtcttgatctcctgaccttgtgatccgcccaccttggcctcccaaggtactgcgattacaggcatgagctaccatgcccggccacaagacatagattttctatatgcacatcaagggaggtgctggtttaggttgctataggacagagctatcctgtattccagttggtttttgtagagaaacaattagacttctctagatagagccctgatttttctctcacgctttcagttttttaaaagcactaatgatatttcctgttttctcataagaaaaagtcaatactatgccttacaaagagacctttccttctaatatagaattttatttgaaagtgagtacatgtttataactagagaataaaaggagaatttttgaaaaattt

SEQ ID NO: 1622 - protein, 110 aa, Homo sapiens; identical to SEQ ID NO: 1594

SEQ ID NO: 1623 - DNA, 1678 bp, Homo sapiens
ctctctgtccccgcaaaaaaaaaaagattccaacaaagcaaagcaattagctttgttgagtgaatagatagcaaaaggtgtggatggactggcccacattttcttgctctttaaagatgatattcctaataataatggactagagttattttgtgtgtgtgatttgagagtcaagtttagtgtcttataagtgtttttccctctgtccctcagatttggatcatacagcagatgtccagtgagtatagcgggagttcattcctttgaaaccacgtcagtaggaagactgaatgtttcaatcttggttacacgcatggggagatactctggaggaagcatttgagcaatgtgcaatggccatgtttggttacatgacagatactgggacagtggagcccctccaaacagtagaagtagaaacccaaggagatgacttacagtctcttctgtttcactttttggatgaatggctttataagttcagtgctgatgaattcttcataccccgggtggggagaagaattttcattgtccaagcaccctcagggaacagaagtcaaagcaataacatattcagcaatgcaggtctataatgaagagaacccggaagtttttgtgatcattgacatttaagacaccaaaaaataaaagactcctacgaagaactgtttttgttttcctcttccttttgagaagacactatgaattaaattctacagcttttttttgatatatggaaatttgtagaacagaaatattttagttaaagtgtgactttcagaaagggaaaatcagggcacagccttggtctgtgttccccaaatattcacactttaaagaattcttcaaccccccaagggacagttatggtcctttgattctctgctgtggcagtaggtgtgcctcatgcccttccagtgcaatgcaagccctccagcctcaccccagagaggatcactgatgtcagcagcagcctgaggctgaatccaggttgaaagaagaataacttgaaaaaatatatttccacacacagaattttgtttttcttccaagttggttaagacatatattttgtttcttttttttttttttttttgagacggagtctcgctctgtagcccaggctgaagcgcagtggtgtgagctcggcttactgcaagctccacctcccgggttcacgccattctcctacctcagcctcccgagtagctgggactataggcacccgccaccatgcccggctaatttttgtatctttagtagagacggggtttcactgtgttagctaggatggtcttgatctcctgaccttgtgatccgcccaccttggcctcccaaggtactgcgattacaggcatgagctaccatgcccggccacaagacatagattttctatatgcacatcaagggaggtgctggtttaggttgctataggacagagctatcctgtattccagttggtttttgtagagaaacaattagacttctctagatagagccctgatttttctctcacgctttcagttttttaaaagcactaatgatatttcctgttttctcataagaaaaagtcaatactatgccttacaaagagacctttccttctaatatagaattttatttgaaagtgagtacatgtttataactagagaataaaaggagaatttttgaaaaattt

SEQ ID NO: 1624 - protein, 100 aa, Homo sapiens; identical to SEQ ID NO: 1596

SEQ ID NO: 1625 - DNA, 1873 bp, Homo sapiens
gacgggactgcgcccggtcagggtcacgtgagagaggtttggtccgcacactcccgcggcaagagggcagccattttcttgaaggctattaagcttacgaccctttcagagtactgagatgaaaaatctagaatgccttcgggtctagttatcaattttgggggtgaagcgggggaaagaacctcgccagtcagacccagacgggtttcattcaaggtgcccttcaacgtttttccttagtctttggaaagaactagtaatgaaggaatcgcagaagatggggttttggctttttaaatatgcgatccaagcggcagggtagggactaaagtaggtcaacagccaactccgagaaaggagtgtggtcctttaagggtgtgcgccaaggggcggagtctagagcggaagtagtaactccgggccgaagtccggtggatgaagggcggaagtagagtgtctaatcctgcagtcatggcgcaggaagaggaagatgttagagattacaatttgactgaagaacagaaggcgatcaaggccaagtatccgccagtcaataggaagtacgagtgagatgacttacagtctcttctgtttcactttttggatgaatggctttataagttcagtgctgatgaattcttcataccccgggaagtgaaagtacttagcattgatcaaagaaatttcaaattacgatcaattgggtggggagaagaattttcattgtccaagcaccctcagggaacagaagtcaaagcaataacatattcagcaatgcaggtctataatgaagagaacccggaagtttttgtgatcattgacatttaagacaccaaaaaataaaagactcctacgaagaactgtttttgttttcctcttccttttgagaagacactatgaattaaattctacagcttttttttgatatatggaaatttgtagaacagaaatattttagttaaagtgtgactttcagaaagggaaaatcagggcacagccttggtctgtgttccccaaatattcacactttaaagaattcttcaaccccccaagggacagttatggtcctttgattctctgctgtggcagtaggtgtgcctcatgcccttccagtgcaatgcaagccctccagcctcaccccagagaggatcactgatgtcagcagcagcctgaggctgaatccaggttgaaagaagaataacttgaaaaaatatatttccacacacagaattttgtttttcttccaagttggttaagacatatattttgtttcttttttttttttttttttgagacggagtctcgctctgtagcccaggctgaagcgcagtggtgtgagctcggcttactgcaagctccacctcccgggttcacgccattctcctacctcagcctcccgagtagctgggactataggcacccgccaccatgcccggctaatttttgtatctttagtagagacggggtttcactgtgttagctaggatggtcttgatctcctgaccttgtgatccgcccaccttggcctcccaaggtactgcgattacaggcatgagctaccatgcccggccacaagacatagattttctatatgcacatcaagggaggtgctggtttaggttgctataggacagagctatcctgtattccagttggtttttgtagagaaacaattagacttctctagatagagccctgatttttctctcacgctttcagttttttaaaagcactaatgatatttcctgttttctcataagaaaaagtcaatactatgccttacaaagagacctttccttctaatatagaattttatttgaaagtgagtacatgtttataactagagaataaaaggagaatttttgaaaaattt

SEQ ID NO: 1626 - protein, 44 aa, Homo sapiens; identical to SEQ ID NO: 1600

SEQ ID NO: 1627 - DNA, 1704 bp, Homo sapiens
gacgggactgcgcccggtcagggtcacgtgagagaggtttggtccgcacactcccgcggcaagagggcagccattttcttgaaggctattaagcttacgaccctttcagagtactgagatgaaaaatctagaatgccttcgggtctagttatcaattttgggggtgaagcgggggaaagaacctcgccagtcagacccagacgggtttcattcaaggtgcccttcaacgtttttccttagtctttggaaagaactagtaatgaaggaatcgcagaagatggggttttggctttttaaatatgcgatccaagcggcagggtagggactaaagtaggtcaacagccaactccgagaaaggagtgtggtcctttaagggtgtgcgccaaggggcggagtctagagcggaagtagtaactccgggccgaagtccggtggatgaagggcggaagtagagtgtctaatcctgcagtcatggcgcaggaagaggaagatgttagagattacaatttgactgaagaacagaaggcgatcaaggccaagtatccgccagtcaataggaagtacgagtgtgaggaacagaagtcaaagcaataacatattcagcaatgcaggtctataatgaagagaacccggaagtttttgtgatcattgacatttaagacaccaaaaaataaaagactcctacgaagaactgtttttgttttcctcttccttttgagaagacactatgaattaaattctacagcttttttttgatatatggaaatttgtagaacagaaatattttagttaaagtgtgactttcagaaagggaaaatcagggcacagccttggtctgtgttccccaaatattcacactttaaagaattcttcaaccccccaagggacagttatggtcctttgattctctgctgtggcagtaggtgtgcctcatgcccttccagtgcaatgcaagccctccagcctcaccccagagaggatcactgatgtcagcagcagcctgaggctgaatccaggttgaaagaagaataacttgaaaaaatatatttccacacacagaattttgtttttcttccaagttggttaagacatatattttgtttcttttttttttttttttttgagacggagtctcgctctgtagcccaggctgaagcgcagtggtgtgagctcggcttactgcaagctccacctcccgggttcacgccattctcctacctcagcctcccgagtagctgggactataggcacccgccaccatgcccggctaatttttgtatctttagtagagacggggtttcactgtgttagctaggatggtcttgatctcctgaccttgtgatccgcccaccttggcctcccaaggtactgcgattacaggcatgagctaccatgcccggccacaagacatagattttctatatgcacatcaagggaggtgctggtttaggttgctataggacagagctatcctgtattccagttggtttttgtagagaaacaattagacttctctagatagagccctgatttttctctcacgctttcagttttttaaaagcactaatgatatttcctgttttctcataagaaaaagtcaatactatgccttacaaagagacctttccttctaatatagaattttatttgaaagtgagtacatgtttataactagagaataaaaggagaatttttgaaaaattt

SEQ ID NO: 1628 - protein, 52 aa, Homo sapiens; identical to SEQ ID NO: 1606

SEQ ID NO: 1629 - DNA, 2058 bp, Homo sapiens
gacgggactgcgcccggtcagggtcacgtgagagaggtttggtccgcacactcccgcggcaagagggcagccattttcttgaaggctattaagcttacgaccctttcagagtactgagatgaaaaatctagaatgccttcgggtctagttatcaattttgggggtgaagcgggggaaagaacctcgccagtcagacccagacgggtttcattcaaggtgcccttcaacgtttttccttagtctttggaaagaactagtaatgaaggaatcgcagaagatggggttttggctttttaaatatgcgatccaagcggcagggtagggactaaagtaggtcaacagccaactccgagaaaggagtgtggtcctttaagggtgtgcgccaaggggcggagtctagagcggaagtagtaactccgggccgaagtccggtggatgaagggcggaagtagagtgtctaatcctgcagtcatggcgcaggaagaggaagatgttagagattacaatttgactgaagaacagaaggcgatcaaggccaagtatccgccagtcaataggaagtacgagtatttggatcatacagcagatgtccatggattgtattacacagagcatgaatatacttctttaggttacacgcatggggagatactctggaggaagcatttgagcaatgtgcaatggccatgtttggttacatgacagatactgggacagtggagcccctccaaacagtagaagtagaaacccaaggagatgacttacagtctcttctgtttcactttttggatgaatggctttataagttcagtgctgatgaattcttcataccccgggaagtgaaagtacttagcattgatcaaagaaatttcaaattacgatcaattgggtggggagaagaattttcattgtccaagcaccctcagggaacagaagtcaaagcaataacatattcagcaatgcaggtctataatgaagagaacccggaagtttttgtgatcattgacatttaagacaccaaaaaataaaagactcctacgaagaactgtttttgttttcctcttccttttgagaagacactatgaattaaattctacagcttttttttgatatatggaaatttgtagaacagaaatattttagttaaagtgtgactttcagaaagggaaaatcagggcacagccttggtctgtgttccccaaatattcacactttaaagaattcttcaaccccccaagggacagttatggtcctttgattctctgctgtggcagtaggtgtgcctcatgcccttccagtgcaatgcaagccctccagcctcaccccagagaggatcactgatgtcagcagcagcctgaggctgaatccaggttgaaagaagaataacttgaaaaaatatatttccacacacagaattttgtttttcttccaagttggttaagacatatattttgtttcttttttttttttttttttgagacggagtctcgctctgtagcccaggctgaagcgcagtggtgtgagctcggcttactgcaagctccacctcccgggttcacgccattctcctacctcagcctcccgagtagctgggactataggcacccgccaccatgcccggctaatttttgtatctttagtagagacggggtttcactgtgttagctaggatggtcttgatctcctgaccttgtgatccgcccaccttggcctcccaaggtactgcgattacaggcatgagctaccatgcccggccacaagacatagattttctatatgcacatcaagggaggtgctggtttaggttgctataggacagagctatcctgtattccagttggtttttgtagagaaacaattagacttctctagatagagccctgatttttctctcacgctttcagttttttaaaagcactaatgatatttcctgttttctcataagaaaaagtcaatactatgccttacaaagagacctttccttctaatatagaattttatttgaaagtgagtacatgtttataactagagaataaaaggagaatttttgaaaaattt

SEQ ID NO: 1630 - protein, 110 aa, Homo sapiens; identical to SEQ ID NO: 1594

SEQ ID NO: 1631 - DNA, 2086 bp, Homo sapiens
gacgggactgcgcccggtcagggtcacgtgagagaggtttggtccgcacactcccgcggcaagagggcagccattttcttgaaggctattaagcttacgaccctttcagagtactgagatgaaaaatctagaatgccttcgggtctagttatcaattttgggggtgaagcgggggaaagaacctcgccagtcagacccagacgggtttcattcaaggtgcccttcaacgtttttccttagtctttggaaagaactagtaatgaaggaatcgcagaagatggggttttggctttttaaatatgcgatccaagcggcagggtagggactaaagtaggtcaacagccaactccgagaaaggagtgtggtcctttaagggtgtgcgccaaggggcggagtctagagcggaagtagtaactccgggccgaagtccggtggatgaagggcggaagtagagtgtctaatcctgcagtcatggcgcaggaagaggaagatgttagagattacaatttgactgaagaacagaaggcgatcaaggccaagtatccgccagtcaataggaagtacgagtatttggatcatacagcagatgtccagtgagtatagcgggagttcattcctttgaaaccacgtcagtaggaagactgaatgtttcaatcttggttacacgcatggggagatactctggaggaagcatttgagcaatgtgcaatggccatgtttggttacatgacagatactgggacagtggagcccctccaaacagtagaagtagaaacccaaggagatgacttacagtctcttctgtttcactttttggatgaatggctttataagttcagtgctgatgaattcttcataccccgggaagtgaaagtacttagcattgatcaaagaaatttcaaattacgatcaattgggtggggagaagaattttcattgtccaagcaccctcagggaacagaagtcaaagcaataacatattcagcaatgcaggtctataatgaagagaacccggaagtttttgtgatcattgacatttaagacaccaaaaaataaaagactcctacgaagaactgtttttgttttcctcttccttttgagaagacactatgaattaaattctacagcttttttttgatatatggaaatttgtagaacagaaatattttagttaaagtgtgactttcagaaagggaaaatcagggcacagccttggtctgtgttccccaaatattcacactttaaagaattcttcaaccccccaagggacagttatggtcctttgattctctgctgtggcagtaggtgtgcctcatgcccttccagtgcaatgcaagccctccagcctcaccccagagaggatcactgatgtcagcagcagcctgaggctgaatccaggttgaaagaagaataacttgaaaaaatatatttccacacacagaattttgtttttcttccaagttggttaagacatatattttgtttcttttttttttttttttttgagacggagtctcgctctgtagcccaggctgaagcgcagtggtgtgagctcggcttactgcaagctccacctcccgggttcacgccattctcctacctcagcctcccgagtagctgggactataggcacccgccaccatgcccggctaatttttgtatctttagtagagacggggtttcactgtgttagctaggatggtcttgatctcctgaccttgtgatccgcccaccttggcctcccaaggtactgcgattacaggcatgagctaccatgcccggccacaagacatagattttctatatgcacatcaagggaggtgctggtttaggttgctataggacagagctatcctgtattccagttggtttttgtagagaaacaattagacttctctagatagagccctgatttttctctcacgctttcagttttttaaaagcactaatgatatttcctgttttctcataagaaaaagtcaatactatgccttacaaagagacctttccttctaatatagaattttatttgaaagtgagtacatgtttataactagagaataaaaggagaatttttgaaaaattt

SEQ ID NO: 1632 - protein, 131 aa, Homo sapiens; identical to SEQ ID NO: 1602

SEQ ID NO: 1633 - DNA, 1946 bp, Homo sapiens
gacgggactgcgcccggtcagggtcacgtgagagaggtttggtccgcacactcccgcggcaagagggcagccattttcttgaaggctattaagcttacgaccctttcagagtactgagatgaaaaatctagaatgccttcgggtctagttatcaattttgggggtgaagcgggggaaagaacctcgccagtcagacccagacgggtttcattcaaggtgcccttcaacgtttttccttagtctttggaaagaactagtaatgaaggaatcgcagaagatggggttttggctttttaaatatgcgatccaagcggcagggtagggactaaagtaggtcaacagccaactccgagaaaggagtgtggtcctttaagggtgtgcgccaaggggcggagtctagagcggaagtagtaactccgggccgaagtccggtggatgaagggcggaagtagagtgtctaatcctgcagtcatggcgcaggaagaggaagatgttagagattacaatttgactgaagaacagaaggcgatcaaggccaagtatccgccagtcaataggaagtacgagtgtgagttacacgcatggggagatactctggaggaagcatttgagcaatgtgcaatggccatgtttggttacatgacagatactgggacagtggagcccctccaaacagtagaagtagaaacccaaggagatgacttacagtctcttctgtttcactttttggatgaatggctttataagttcagtgctgatgaattcttcataccccgggtggggagaagaattttcattgtccaagcaccctcagggaacagaagtcaaagcaataacatattcagcaatgcaggtctataatgaagagaacccggaagtttttgtgatcattgacatttaagacaccaaaaaataaaagactcctacgaagaactgtttttgttttcctcttccttttgagaagacactatgaattaaattctacagcttttttttgatatatggaaatttgtagaacagaaatattttagttaaagtgtgactttcagaaagggaaaatcagggcacagccttggtctgtgttccccaaatattcacactttaaagaattcttcaaccccccaagggacagttatggtcctttgattctctgctgtggcagtaggtgtgcctcatgcccttccagtgcaatgcaagccctccagcctcaccccagagaggatcactgatgtcagcagcagcctgaggctgaatccaggttgaaagaagaataacttgaaaaaatatatttccacacacagaattttgtttttcttccaagttggttaagacatatattttgtttcttttttttttttttttttgagacggagtctcgctctgtagcccaggctgaagcgcagtggtgtgagctcggcttactgcaagctccacctcccgggttcacgccattctcctacctcagcctcccgagtagctgggactataggcacccgccaccatgcccggctaatttttgtatctttagtagagacggggtttcactgtgttagctaggatggtcttgatctcctgaccttgtgatccgcccaccttggcctcccaaggtactgcgattacaggcatgagctaccatgcccggccacaagacatagattttctatatgcacatcaagggaggtgctggtttaggttgctataggacagagctatcctgtattccagttggtttttgtagagaaacaattagacttctctagatagagccctgatttttctctcacgctttcagttttttaaaagcactaatgatatttcctgttttctcataagaaaaagtcaatactatgccttacaaagagacctttccttctaatatagaattttatttgaaagtgagtacatgtttataactagagaataaaaggagaatttttgaaaaattt

SEQ ID NO: 1634 - protein, 141 aa, Homo sapiens; identical to SEQ ID NO: 1604

SEQ ID NO: 1635 - DNA, 1762 bp, Homo sapiens
gacgggactgcgcccggtcagggtcacgtgagagaggtttggtccgcacactcccgcggcaagagggcagccattttcttgaaggctattaagcttacgaccctttcagagtactgagatgaaaaatctagaatgccttcgggtctagttatcaattttgggggtgaagcgggggaaagaacctcgccagtcagacccagacgggtttcattcaaggtgcccttcaacgtttttccttagtctttggaaagaactagtaatgaaggaatcgcagaagatggggttttggctttttaaatatgcgatccaagcggcagggtagggactaaagtaggtcaacagccaactccgagaaaggagtgtggtcctttaagggtgtgcgccaaggggcggagtctagagcggaagtagtaactccgggccgaagtccggtggatgaagggcggaagtagagtgtctaatcctgcagtcatggcgcaggaagaggaagatgttagagattacaatttgactgaagaacagaaggcgatcaaggccaagtatccgccagtcaataggaagtacgagtatttggatcatacagcagatgtccagtggggagaagaattttcattgtccaagcaccctcagggaacagaagtcaaagcaataacatattcagcaatgcaggtctataatgaagagaacccggaagtttttgtgatcattgacatttaagacaccaaaaaataaaagactcctacgaagaactgtttttgttttcctcttccttttgagaagacactatgaattaaattctacagcttttttttgatatatggaaatttgtagaacagaaatattttagttaaagtgtgactttcagaaagggaaaatcagggcacagccttggtctgtgttccccaaatattcacactttaaagaattcttcaaccccccaagggacagttatggtcctttgattctctgctgtggcagtaggtgtgcctcatgcccttccagtgcaatgcaagccctccagcctcaccccagagaggatcactgatgtcagcagcagcctgaggctgaatccaggttgaaagaagaataacttgaaaaaatatatttccacacacagaattttgtttttcttccaagttggttaagacatatattttgtttcttttttttttttttttttgagacggagtctcgctctgtagcccaggctgaagcgcagtggtgtgagctcggcttactgcaagctccacctcccgggttcacgccattctcctacctcagcctcccgagtagctgggactataggcacccgccaccatgcccggctaatttttgtatctttagtagagacggggtttcactgtgttagctaggatggtcttgatctcctgaccttgtgatccgcccaccttggcctcccaaggtactgcgattacaggcatgagctaccatgcccggccacaagacatagattttctatatgcacatcaagggaggtgctggtttaggttgctataggacagagctatcctgtattccagttggtttttgtagagaaacaattagacttctctagatagagccctgatttttctctcacgctttcagttttttaaaagcactaatgatatttcctgttttctcataagaaaaagtcaatactatgccttacaaagagacctttccttctaatatagaattttatttgaaagtgagtacatgtttataactagagaataaaaggagaatttttgaaaaattt

SEQ ID NO: 1636 - protein, 93 aa, Homo sapiens; identical to SEQ ID NO: 1608

SEQ ID NO: 1637 - DNA, 1750 bp, Homo sapiens
gcgcgccggcgttgacgggactgcgcccggtcagggtcacgtgagagaggtttggtccgcacactcccgcggcaagagggcagccattttcttgaaggctattaagcttacgaccctttcagagtactgagatgaaaaatctagaatgccttcgggtctagttatcaattttgggggtgaagcgggggaaagaacctcgccagtcagacccagacgggtttcattcaaggtgcccttcaacgtttttccttagtctttggaaagaactagtaatgaaggaatcgcagaagatggggttttggctttttaaatatgcgatccaagcggcagggtagggactaaagtaggtcaacagccaactccgagaaaggagtgtggtcctttaagggtgtgcgccaaggggcggagtctagagcggaagtagtaactccgggccgaagtccggtggatgaagggcggaagtagagtgtctaatcctgcagtcatggcgcaggaagaggaagatgttagagattacaatttgactgaagaacagaaggcgatcaaggccaagtatccgccagtcaataggaagtacgagtgtggggagaagaattttcattgtccaagcaccctcagggaacagaagtcaaagcaataacatattcagcaatgcaggtctataatgaagagaacccggaagtttttgtgatcattgacatttaagacaccaaaaaataaaagactcctacgaagaactgtttttgttttcctcttccttttgagaagacactatgaattaaattctacagcttttttttgatatatggaaatttgtagaacagaaatattttagttaaagtgtgactttcagaaagggaaaatcagggcacagccttggtctgtgttccccaaatattcacactttaaagaattcttcaaccccccaagggacagttatggtcctttgattctctgctgtggcagtaggtgtgcctcatgcccttccagtgcaatgcaagccctccagcctcaccccagagaggatcactgatgtcagcagcagcctgaggctgaatccaggttgaaagaagaataacttgaaaaaatatatttccacacacagaattttgtttttcttccaagttggttaagacatatattttgtttcttttttttttttttttttgagacggagtctcgctctgtagcccaggctgaagcgcagtggtgtgagctcggcttactgcaagctccacctcccgggttcacgccattctcctacctcagcctcccgagtagctgggactataggcacccgccaccatgcccggctaatttttgtatctttagtagagacggggtttcactgtgttagctaggatggtcttgatctcctgaccttgtgatccgcccaccttggcctcccaaggtactgcgattacaggcatgagctaccatgcccggccacaagacatagattttctatatgcacatcaagggaggtgctggtttaggttgctataggacagagctatcctgtattccagttggtttttgtagagaaacaattagacttctctagatagagccctgatttttctctcacgctttcagttttttaaaagcactaatgatatttcctgttttctcataagaaaaagtcaatactatgccttacaaagagacctttccttctaatatagaattttatttgaaagtgagtacatgtttataactagagaataaaaggagaatttttgaaaaattt

SEQ ID NO: 1638 - protein, 63 aa, Homo sapiens; identical to SEQ ID NO: 1616

SEQ ID NO: 1639 - DNA, 1993 bp, Homo sapiens
gcgcgccggcgttgacgggactgcgcccggtcagggtcacgtgagagaggtttggtccgcacactcccgcggcaagagggcagccattttcttgaaggctattaagcttacgaccctttcagagtactgagatgaaaaatctagaatgccttcgggtctagttatcaattttgggggtgaagcgggggaaagaacctcgccagtcagacccagacgggtttcattcaaggtgcccttcaacgtttttccttagtctttggaaagaactagtaatgaaggaatcgcagaagatggggttttggctttttaaatatgcgatccaagcggcagggtagggactaaagtaggtcaacagccaactccgagaaaggagtgtggtcctttaagggtgtgcgccaaggggcggagtctagagcggaagtagtaactccgggccgaagtccggtggatgaagggcggaagtagagtgtctaatcctgcagtcatggcgcaggaagaggaagatgttagagattacaatttgactgaagaacagaaggcgatcaaggccaagtatccgccagtcaataggaagtacgagttggattgtattacacagagcatgaatatacttctttaggttacacgcatggggagatactctggaggaagcatttgagcaatgtgcaatggccatgtttggttacatgacagatactgggacagtggagcccctccaaacagtagaagtagaaacccaaggagatgacttacagtctcttctgtttcactttttggatgaatggctttataagttcagtgctgatgaattcttcataccccgggtggggagaagaattttcattgtccaagcaccctcagggaacagaagtcaaagcaataacatattcagcaatgcaggtctataatgaagagaacccggaagtttttgtgatcattgacatttaagacaccaaaaaataaaagactcctacgaagaactgtttttgttttcctcttccttttgagaagacactatgaattaaattctacagcttttttttgatatatggaaatttgtagaacagaaatattttagttaaagtgtgactttcagaaagggaaaatcagggcacagccttggtctgtgttccccaaatattcacactttaaagaattcttcaaccccccaagggacagttatggtcctttgattctctgctgtggcagtaggtgtgcctcatgcccttccagtgcaatgcaagccctccagcctcaccccagagaggatcactgatgtcagcagcagcctgaggctgaatccaggttgaaagaagaataacttgaaaaaatatatttccacacacagaattttgtttttcttccaagttggttaagacatatattttgtttcttttttttttttttttttgagacggagtctcgctctgtagcccaggctgaagcgcagtggtgtgagctcggcttactgcaagctccacctcccgggttcacgccattctcctacctcagcctcccgagtagctgggactataggcacccgccaccatgcccggctaatttttgtatctttagtagagacggggtttcactgtgttagctaggatggtcttgatctcctgaccttgtgatccgcccaccttggcctcccaaggtactgcgattacaggcatgagctaccatgcccggccacaagacatagattttctatatgcacatcaagggaggtgctggtttaggttgctataggacagagctatcctgtattccagttggtttttgtagagaaacaattagacttctctagatagagccctgatttttctctcacgctttcagttttttaaaagcactaatgatatttcctgttttctcataagaaaaagtcaatactatgccttacaaagagacctttccttctaatatagaattttatttgaaagtgagtacatgtttataactagagaataaaaggagaatttttgaaaaattt

SEQ ID NO: 1640 - protein, 79 aa, Homo sapiens [sequence omitted]

SEQ ID NO: 1641 - DNA, 2033 bp, Homo sapiens
gcgcgccggcgttgacgggactgcgcccggtcagggtcacgtgagagaggtttggtccgcacactcccgcggcaagagggcagccattttcttgaaggctattaagcttacgaccctttcagagtactgagatgaaaaatctagaatgccttcgggtctagttatcaattttgggggtgaagcgggggaaagaacctcgccagtcagacccagacgggtttcattcaaggtgcccttcaacgtttttccttagtctttggaaagaactagtaatgaaggaatcgcagaagatggggttttggctttttaaatatgcgatccaagcggcagggtagggactaaagtaggtcaacagccaactccgagaaaggagtgtggtcctttaagggtgtgcgccaaggggcggagtctagagcggaagtagtaactccgggccgaagtccggtggatgaagggcggaagtagagtgtctaatcctgcagtcatggcgcaggaagaggaagatgttagagattacaatttgactgaagaacagaaggcgatcaaggccaagtatccgccagtcaataggaagtacgagtatttggatcatacagcagatgtccagttacacgcatggggagatactctggaggaagcatttgagcaatgtgcaatggccatgtttggttacatgacagatactgggacagtggagcccctccaaacagtagaagtagaaacccaaggagatgacttacagtctcttctgtttcactttttggatgaatggctttataagttcagtgctgatgaattcttcataccccgggaagtgaaagtacttagcattgatcaaagaaatttcaaattacgatcaattgggtggggagaagaattttcattgtccaagcaccctcagggaacagaagtcaaagcaataacatattcagcaatgcaggtctataatgaagagaacccggaagtttttgtgatcattgacatttaagacaccaaaaaataaaagactcctacgaagaactgtttttgttttcctcttccttttgagaagacactatgaattaaattctacagcttttttttgatatatggaaatttgtagaacagaaatattttagttaaagtgtgactttcagaaagggaaaatcagggcacagccttggtctgtgttccccaaatattcacactttaaagaattcttcaaccccccaagggacagttatggtcctttgattctctgctgtggcagtaggtgtgcctcatgcccttccagtgcaatgcaagccctccagcctcaccccagagaggatcactgatgtcagcagcagcctgaggctgaatccaggttgaaagaagaataacttgaaaaaatatatttccacacacagaattttgtttttcttccaagttggttaagacatatattttgtttcttttttttttttttttttgagacggagtctcgctctgtagcccaggctgaagcgcagtggtgtgagctcggcttactgcaagctccacctcccgggttcacgccattctcctacctcagcctcccgagtagctgggactataggcacccgccaccatgcccggctaatttttgtatctttagtagagacggggtttcactgtgttagctaggatggtcttgatctcctgaccttgtgatccgcccaccttggcctcccaaggtactgcgattacaggcatgagctaccatgcccggccacaagacatagattttctatatgcacatcaagggaggtgctggtttaggttgctataggacagagctatcctgtattccagttggtttttgtagagaaacaattagacttctctagatagagccctgatttttctctcacgctttcagttttttaaaagcactaatgatatttcctgttttctcataagaaaaagtcaatactatgccttacaaagagacctttccttctaatatagaattttatttgaaagtgagtacatgtttataactagagaataaaaggagaatttttgaaaaattt

SEQ ID NO: 1642 - protein, 179 aa, Homo sapiens; identical to SEQ ID NO: 64

SEQ ID NO: 1643 - DNA, 1980 bp, Homo sapiens
gcgcgccggcgttgacgggactgcgcccggtcagggtcacgtgagagaggtttggtccgcacactcccgcggcaagagggcagccattttcttgaaggctattaagcttacgaccctttcagagtactgagatgaaaaatctagaatgccttcgggtctagttatcaattttgggggtgaagcgggggaaagaacctcgccagtcagacccagacgggtttcattcaaggtgcccttcaacgtttttccttagtctttggaaagaactagtaatgaaggaatcgcagaagatggggttttggctttttaaatatgcgatccaagcggcagggtagggactaaagtaggtcaacagccaactccgagaaaggagtgtggtcctttaagggtgtgcgccaaggggcggagtctagagcggaagtagtaactccgggccgaagtccggtggatgaagggcggaagtagagtgtctaatcctgcagtcatggcgcaggaagaggaagatgttagagattacaatttgactgaagaacagaaggcgatcaaggccaagtatccgccagtcaataggaagtacgagtatttggatcatacagcagatgtccagttacacgcatggggagatactctggaggaagcatttgagcaatgtgcaatggccatgtttggttacatgacagatactgggacagtggagcccctccaaacagtagaagtagaaacccaaggagatgacttacagtctcttctgtttcactttttggatgaatggctttataagttcagtgctgatgaattcttcataccccgggtggggagaagaattttcattgtccaagcaccctcagggaacagaagtcaaagcaataacatattcagcaatgcaggtctataatgaagagaacccggaagtttttgtgatcattgacatttaagacaccaaaaaataaaagactcctacgaagaactgtttttgttttcctcttccttttgagaagacactatgaattaaattctacagcttttttttgatatatggaaatttgtagaacagaaatattttagttaaagtgtgactttcagaaagggaaaatcagggcacagccttggtctgtgttccccaaatattcacactttaaagaattcttcaaccccccaagggacagttatggtcctttgattctctgctgtggcagtaggtgtgcctcatgcccttccagtgcaatgcaagccctccagcctcaccccagagaggatcactgatgtcagcagcagcctgaggctgaatccaggttgaaagaagaataacttgaaaaaatatatttccacacacagaattttgtttttcttccaagttggttaagacatatattttgtttcttttttttttttttttttgagacggagtctcgctctgtagcccaggctgaagcgcagtggtgtgagctcggcttactgcaagctccacctcccgggttcacgccattctcctacctcagcctcccgagtagctgggactataggcacccgccaccatgcccggctaatttttgtatctttagtagagacggggtttcactgtgttagctaggatggtcttgatctcctgaccttgtgatccgcccaccttggcctcccaaggtactgcgattacaggcatgagctaccatgcccggccacaagacatagattttctatatgcacatcaagggaggtgctggtttaggttgctataggacagagctatcctgtattccagttggtttttgtagagaaacaattagacttctctagatagagccctgatttttctctcacgctttcagttttttaaaagcactaatgatatttcctgttttctcataagaaaaagtcaatactatgccttacaaagagacctttccttctaatatagaattttatttgaaagtgagtacatgtttataactagagaataaaaggagaatttttgaaaaattt

SEQ ID NO: 1644 - protein, 148 aa, Homo sapiens; identical to SEQ ID NO: 1618

SEQ ID NO: 1645 - DNA, 2046 bp, Homo sapiens
gcgcgccggcgttgacgggactgcgcccggtcagggtcacgtgagagaggtttggtccgcacactcccgcggcaagagggcagccattttcttgaaggctattaagcttacgaccctttcagagtactgagatgaaaaatctagaatgccttcgggtctagttatcaattttgggggtgaagcgggggaaagaacctcgccagtcagacccagacgggtttcattcaaggtgcccttcaacgtttttccttagtctttggaaagaactagtaatgaaggaatcgcagaagatggggttttggctttttaaatatgcgatccaagcggcagggtagggactaaagtaggtcaacagccaactccgagaaaggagtgtggtcctttaagggtgtgcgccaaggggcggagtctagagcggaagtagtaactccgggccgaagtccggtggatgaagggcggaagtagagtgtctaatcctgcagtcatggcgcaggaagaggaagatgttagagattacaatttgactgaagaacagaaggcgatcaaggccaagtatccgccagtcaataggaagtacgagttggattgtattacacagagcatgaatatacttctttaggttacacgcatggggagatactctggaggaagcatttgagcaatgtgcaatggccatgtttggttacatgacagatactgggacagtggagcccctccaaacagtagaagtagaaacccaaggagatgacttacagtctcttctgtttcactttttggatgaatggctttataagttcagtgctgatgaattcttcataccccgggaagtgaaagtacttagcattgatcaaagaaatttcaaattacgatcaattgggtggggagaagaattttcattgtccaagcaccctcagggaacagaagtcaaagcaataacatattcagcaatgcaggtctataatgaagagaacccggaagtttttgtgatcattgacatttaagacaccaaaaaataaaagactcctacgaagaactgtttttgttttcctcttccttttgagaagacactatgaattaaattctacagcttttttttgatatatggaaatttgtagaacagaaatattttagttaaagtgtgactttcagaaagggaaaatcagggcacagccttggtctgtgttccccaaatattcacactttaaagaattcttcaaccccccaagggacagttatggtcctttgattctctgctgtggcagtaggtgtgcctcatgcccttccagtgcaatgcaagccctccagcctcaccccagagaggatcactgatgtcagcagcagcctgaggctgaatccaggttgaaagaagaataacttgaaaaaatatatttccacacacagaattttgtttttcttccaagttggttaagacatatattttgtttcttttttttttttttttttgagacggagtctcgctctgtagcccaggctgaagcgcagtggtgtgagctcggcttactgcaagctccacctcccgggttcacgccattctcctacctcagcctcccgagtagctgggactataggcacccgccaccatgcccggctaatttttgtatctttagtagagacggggtttcactgtgttagctaggatggtcttgatctcctgaccttgtgatccgcccaccttggcctcccaaggtactgcgattacaggcatgagctaccatgcccggccacaagacatagattttctatatgcacatcaagggaggtgctggtttaggttgctataggacagagctatcctgtattccagttggtttttgtagagaaacaattagacttctctagatagagccctgatttttctctcacgctttcagttttttaaaagcactaatgatatttcctgttttctcataagaaaaagtcaatactatgccttacaaagagacctttccttctaatatagaattttatttgaaagtgagtacatgtttataactagagaataaaaggagaatttttgaaaaattt

SEQ ID NO: 1646 - protein, 110 aa, Homo sapiens; identical to SEQ ID NO: 1594

SEQ ID NO: 1647 - DNA, 2012 bp, Homo sapiens
gcgcgccggcgttgacgggactgcgcccggtcagggtcacgtgagagaggtttggtccgcacactcccgcggcaagagggcagccattttcttgaaggctattaagcttacgaccctttcagagtactgagatgaaaaatctagaatgccttcgggtctagttatcaattttgggggtgaagcgggggaaagaacctcgccagtcagacccagacgggtttcattcaaggtgcccttcaacgtttttccttagtctttggaaagaactagtaatgaaggaatcgcagaagatggggttttggctttttaaatatgcgatccaagcggcagggtagggactaaagtaggtcaacagccaactccgagaaaggagtgtggtcctttaagggtgtgcgccaaggggcggagtctagagcggaagtagtaactccgggccgaagtccggtggatgaagggcggaagtagagtgtctaatcctgcagtcatggcgcaggaagaggaagatgttagagattacaatttgactgaagaacagaaggcgatcaaggccaagtatccgccagtcaataggaagtacgagtgtgagttacacgcatggggagatactctggaggaagcatttgagcaatgtgcaatggccatgtttggttacatgacagatactgggacagtggagcccctccaaacagtagaagtagaaacccaaggagatgacttacagtctcttctgtttcactttttggatgaatggctttataagttcagtgctgatgaattcttcataccccgggaagtgaaagtacttagcattgatcaaagaaatttcaaattacgatcaattgggtggggagaagaattttcattgtccaagcaccctcagggaacagaagtcaaagcaataacatattcagcaatgcaggtctataatgaagagaacccggaagtttttgtgatcattgacatttaagacaccaaaaaataaaagactcctacgaagaactgtttttgttttcctcttccttttgagaagacactatgaattaaattctacagcttttttttgatatatggaaatttgtagaacagaaatattttagttaaagtgtgactttcagaaagggaaaatcagggcacagccttggtctgtgttccccaaatattcacactttaaagaattcttcaaccccccaagggacagttatggtcctttgattctctgctgtggcagtaggtgtgcctcatgcccttccagtgcaatgcaagccctccagcctcaccccagagaggatcactgatgtcagcagcagcctgaggctgaatccaggttgaaagaagaataacttgaaaaaatatatttccacacacagaattttgtttttcttccaagttggttaagacatatattttgtttcttttttttttttttttttgagacggagtctcgctctgtagcccaggctgaagcgcagtggtgtgagctcggcttactgcaagctccacctcccgggttcacgccattctcctacctcagcctcccgagtagctgggactataggcacccgccaccatgcccggctaatttttgtatctttagtagagacggggtttcactgtgttagctaggatggtcttgatctcctgaccttgtgatccgcccaccttggcctcccaaggtactgcgattacaggcatgagctaccatgcccggccacaagacatagattttctatatgcacatcaagggaggtgctggtttaggttgctataggacagagctatcctgtattccagttggtttttgtagagaaacaattagacttctctagatagagccctgatttttctctcacgctttcagttttttaaaagcactaatgatatttcctgttttctcataagaaaaagtcaatactatgccttacaaagagacctttccttctaatatagaattttatttgaaagtgagtacatgtttataactagagaataaaaggagaatttttgaaaaattt

SEQ ID NO: 1648 - protein, 172 aa, Homo sapiens; identical to SEQ ID NO: 1610

SEQ ID NO: 1649 - DNA, 386 bp, Homo sapiens
ctgtactccagcctgggcgatggagtaaggctccatctcaaaaaaaaaaaaaaaaaaaaaaaaaaaggttttaccaatttttagtagatggtccaaaaaaacaaaacagaacaaaaagatttttagtagatagtctattatgaactttttttaattaaaaaatttttcttcctgtctaggaagtgaaagtacttagcattgatcaaagaaatttcaaattacgatcaattgggtggggagaagaattttcattgtccaagcaccctcagggaacagaagtcaaagcaataacatattcagcaatgcaggtctataatgaagagaacccggaagtttttgtgatcattgacatttaagacaccaaaaaataaaagactcctacgaag

SEQ ID NO: 1650 - protein, 37 aa, Homo sapiens
SKKFQITINWVGRRIFIVQAPSGNRSQSNNIFSNAGL

SEQ ID NO: 1651 - DNA, 492 bp, Homo sapiens
tttgaaaccacgtcagtaggaagactgaatgtttcaatcttgtggattgtattacacagagcatgaatatacttctttaggttacacgcatggggagatactctggaggaagcatttgagcaatgtgcaatggccatgtttggttacatgacagatactgggacagtggagcccctccaaacagtagaagtagaaacccaaggagatgacttacagtctcttctgtttcactttttggatgaatggctttataagttcagtgctgatgaattcttcataccccgggaagtgaaagtacttagcattgatcaaagaaatttcaaattacgatcaattgggtggggagaagaattttcattgtccaagcaccctcagggaacagaagtcaaagcaataacatattcagcaatgcaggtctataatgaagagaacccggaagtttttgtgatcattgacatttaagacaccaaaaaataaaagactcctacgaag

SEQ ID NO: 1652 - protein, 110 aa, Homo sapiens; identical to SEQ ID NO: 1594

SEQ ID NO: 1653 - DNA, 663 bp, Homo sapiens
ctctctgtccccgcaaaaaaaaaaagattccaacaaagcaaagcaattagctttgttgagtgaatagatagcaaaaggtgtggatggactggcccacattttcttgctctttaaagatgatattcctaataataatggactagagttattttgtgtgtgtgatttgagagtcaagtttagtgtcttataagtgtttttccctctgtccctcagatttggatcatacagcagatgtccagtgagtatagcgggagttcattcctttgaaaccacgtcagtaggaagactgaatgtttcaatcttggttacacgcatggggagatactctggaggaagcatttgagcaatgtgcaatggccatgtttggttacatgacagatactgggacagtggagcccctccaaacagtagaagtagaaacccaaggagatgacttacagtctcttctgtttcactttttggatgaatggctttataagttcagtgctgatgaattcttcataccccgggtggggagaagaattttcattgtccaagcaccctcagggaacagaagtcaaagcaataacatattcagcaatgcaggtctataatgaagagaacccggaagtttttgtgatcattgacatttaagacaccaaaaaataaaagactcctacgaag

SEQ ID NO: 1654 - protein, 100 aa, Homo sapiens; identical to SEQ ID NO: 1596

SEQ ID NO: 1655 - DNA, 931 bp, Homo sapiens
gacgggactgcgcccggtcagggtcacgtgagagaggtttggtccgcacactcccgcggcaagagggcagccattttcttgaaggctattaagcttacgaccctttcagagtactgagatgaaaaatctagaatgccttcgggtctagttatcaattttgggggtgaagcgggggaaagaacctcgccagtcagacccagacgggtttcattcaaggtgcccttcaacgtttttccttagtctttggaaagaactagtaatgaaggaatcgcagaagatggggttttggctttttaaatatgcgatccaagcggcagggtagggactaaagtaggtcaacagccaactccgagaaaggagtgtggtcctttaagggtgtgcgccaaggggcggagtctagagcggaagtagtaactccgggccgaagtccggtggatgaagggcggaagtagagtgtctaatcctgcagtcatggcgcaggaagaggaagatgttagagattacaatttgactgaagaacagaaggcgatcaaggccaagtatccgccagtcaataggaagtacgagtgtgagttacacgcatggggagatactctggaggaagcatttgagcaatgtgcaatggccatgtttggttacatgacagatactgggacagtggagcccctccaaacagtagaagtagaaacccaaggagatgacttacagtctcttctgtttcactttttggatgaatggctttataagttcagtgctgatgaattcttcataccccgggtggggagaagaattttcattgtccaagcaccctcagggaacagaagtcaaagcaataacatattcagcaatgcaggtctataatgaagagaacccggaagtttttgtgatcattgacatttaagacaccaaaaaataaaagactcctacgaag

SEQ ID NO: 1656 - protein, 141 aa, Homo sapiens; identical to SEQ ID NO: 1604

SEQ ID NO: 1657 - DNA, 689 bp, Homo sapiens
gacgggactgcgcccggtcagggtcacgtgagagaggtttggtccgcacactcccgcggcaagagggcagccattttcttgaaggctattaagcttacgaccctttcagagtactgagatgaaaaatctagaatgccttcgggtctagttatcaattttgggggtgaagcgggggaaagaacctcgccagtcagacccagacgggtttcattcaaggtgcccttcaacgtttttccttagtctttggaaagaactagtaatgaaggaatcgcagaagatggggttttggctttttaaatatgcgatccaagcggcagggtagggactaaagtaggtcaacagccaactccgagaaaggagtgtggtcctttaagggtgtgcgccaaggggcggagtctagagcggaagtagtaactccgggccgaagtccggtggatgaagggcggaagtagagtgtctaatcctgcagtcatggcgcaggaagaggaagatgttagagattacaatttgactgaagaacagaaggcgatcaaggccaagtatccgccagtcaataggaagtacgagtgtgaggaacagaagtcaaagcaataacatattcagcaatgcaggtctataatgaagagaacccggaagtttttgtgatcattgacatttaagacaccaaaaaataaaagactcctacgaag

SEQ ID NO: 1658 - protein, 52 aa, Homo sapiens; identical to SEQ ID NO: 1606

SEQ ID NO: 1659 - DNA, 747 bp, Homo sapiens
gacgggactgcgcccggtcagggtcacgtgagagaggtttggtccgcacactcccgcggcaagagggcagccattttcttgaaggctattaagcttacgaccctttcagagtactgagatgaaaaatctagaatgccttcgggtctagttatcaattttgggggtgaagcgggggaaagaacctcgccagtcagacccagacgggtttcattcaaggtgcccttcaacgtttttccttagtctttggaaagaactagtaatgaaggaatcgcagaagatggggttttggctttttaaatatgcgatccaagcggcagggtagggactaaagtaggtcaacagccaactccgagaaaggagtgtggtcctttaagggtgtgcgccaaggggcggagtctagagcggaagtagtaactccgggccgaagtccggtggatgaagggcggaagtagagtgtctaatcctgcagtcatggcgcaggaagaggaagatgttagagattacaatttgactgaagaacagaaggcgatcaaggccaagtatccgccagtcaataggaagtacgagtatttggatcatacagcagatgtccagtggggagaagaattttcattgtccaagcaccctcagggaacagaagtcaaagcaataacatattcagcaatgcaggtctataatgaagagaacccggaagtttttgtgatcattgacatttaagacaccaaaaaataaaagactcctacgaag

SEQ ID NO: 1660 - protein, 93 aa, Homo sapiens; identical to SEQ ID NO: 1608

SEQ ID NO: 1661 - DNA, 858 bp, Homo sapiens
gacgggactgcgcccggtcagggtcacgtgagagaggtttggtccgcacactcccgcggcaagagggcagccattttcttgaaggctattaagcttacgaccctttcagagtactgagatgaaaaatctagaatgccttcgggtctagttatcaattttgggggtgaagcgggggaaagaacctcgccagtcagacccagacgggtttcattcaaggtgcccttcaacgtttttccttagtctttggaaagaactagtaatgaaggaatcgcagaagatggggttttggctttttaaatatgcgatccaagcggcagggtagggactaaagtaggtcaacagccaactccgagaaaggagtgtggtcctttaagggtgtgcgccaaggggcggagtctagagcggaagtagtaactccgggccgaagtccggtggatgaagggcggaagtagagtgtctaatcctgcagtcatggcgcaggaagaggaagatgttagagattacaatttgactgaagaacagaaggcgatcaaggccaagtatccgccagtcaataggaagtacgagtgagatgacttacagtctcttctgtttcactttttggatgaatggctttataagttcagtgctgatgaattcttcataccccgggaagtgaaagtacttagcattgatcaaagaaatttcaaattacgatcaattgggtggggagaagaattttcattgtccaagcaccctcagggaacagaagtcaaagcaataacatattcagcaatgcaggtctataatgaagagaacccggaagtttttgtgatcattgacatttaagacaccaaaaaataaaagactcctacgaag

SEQ ID NO: 1662 - protein, 44 aa, Homo sapiens; identical to SEQ ID NO: 1600

SEQ ID NO: 1663 - DNA, 1043 bp, Homo sapiens
gacgggactgcgcccggtcagggtcacgtgagagaggtttggtccgcacactcccgcggcaagagggcagccattttcttgaaggctattaagcttacgaccctttcagagtactgagatgaaaaatctagaatgccttcgggtctagttatcaattttgggggtgaagcgggggaaagaacctcgccagtcagacccagacgggtttcattcaaggtgcccttcaacgtttttccttagtctttggaaagaactagtaatgaaggaatcgcagaagatggggttttggctttttaaatatgcgatccaagcggcagggtagggactaaagtaggtcaacagccaactccgagaaaggagtgtggtcctttaagggtgtgcgccaaggggcggagtctagagcggaagtagtaactccgggccgaagtccggtggatgaagggcggaagtagagtgtctaatcctgcagtcatggcgcaggaagaggaagatgttagagattacaatttgactgaagaacagaaggcgatcaaggccaagtatccgccagtcaataggaagtacgagtatttggatcatacagcagatgtccatggattgtattacacagagcatgaatatacttctttaggttacacgcatggggagatactctggaggaagcatttgagcaatgtgcaatggccatgtttggttacatgacagatactgggacagtggagcccctccaaacagtagaagtagaaacccaaggagatgacttacagtctcttctgtttcactttttggatgaatggctttataagttcagtgctgatgaattcttcataccccgggaagtgaaagtacttagcattgatcaaagaaatttcaaattacgatcaattgggtggggagaagaattttcattgtccaagcaccctcagggaacagaagtcaaagcaataacatattcagcaatgcaggtctataatgaagagaacccggaagtttttgtgatcattgacatttaagacaccaaaaaataaaagactcctacgaag

SEQ ID NO: 1664 - protein, 110 aa, Homo sapiens; identical to SEQ ID NO: 1594

SEQ ID NO: 1665 - DNA, 965 bp, Homo sapiens
gcgcgccggcgttgacgggactgcgcccggtcagggtcacgtgagagaggtttggtccgcacactcccgcggcaagagggcagccattttcttgaaggctattaagcttacgaccctttcagagtactgagatgaaaaatctagaatgccttcgggtctagttatcaattttgggggtgaagcgggggaaagaacctcgccagtcagacccagacgggtttcattcaaggtgcccttcaacgtttttccttagtctttggaaagaactagtaatgaaggaatcgcagaagatggggttttggctttttaaatatgcgatccaagcggcagggtagggactaaagtaggtcaacagccaactccgagaaaggagtgtggtcctttaagggtgtgcgccaaggggcggagtctagagcggaagtagtaactccgggccgaagtccggtggatgaagggcggaagtagagtgtctaatcctgcagtcatggcgcaggaagaggaagatgttagagattacaatttgactgaagaacagaaggcgatcaaggccaagtatccgccagtcaataggaagtacgagtatttggatcatacagcagatgtccagttacacgcatggggagatactctggaggaagcatttgagcaatgtgcaatggccatgtttggttacatgacagatactgggacagtggagcccctccaaacagtagaagtagaaacccaaggagatgacttacagtctcttctgtttcactttttggatgaatggctttataagttcagtgctgatgaattcttcataccccgggtggggagaagaattttcattgtccaagcaccctcagggaacagaagtcaaagcaataacatattcagcaatgcaggtctataatgaagagaacccggaagtttttgtgatcattgacatttaagacaccaaaaaataaaagactcctacgaag

SEQ ID NO: 1666 - protein, 148 aa, Homo sapiens; identical to SEQ ID NO: 1618

SEQ ID NO: 1667 - DNA, 1018 bp, Homo sapiens
gcgcgccggcgttgacgggactgcgcccggtcagggtcacgtgagagaggtttggtccgcacactcccgcggcaagagggcagccattttcttgaaggctattaagcttacgaccctttcagagtactgagatgaaaaatctagaatgccttcgggtctagttatcaattttgggggtgaagcgggggaaagaacctcgccagtcagacccagacgggtttcattcaaggtgcccttcaacgtttttccttagtctttggaaagaactagtaatgaaggaatcgcagaagatggggttttggctttttaaatatgcgatccaagcggcagggtagggactaaagtaggtcaacagccaactccgagaaaggagtgtggtcctttaagggtgtgcgccaaggggcggagtctagagcggaagtagtaactccgggccgaagtccggtggatgaagggcggaagtagagtgtctaatcctgcagtcatggcgcaggaagaggaagatgttagagattacaatttgactgaagaacagaaggcgatcaaggccaagtatccgccagtcaataggaagtacgagtatttggatcatacagcagatgtccagttacacgcatggggagatactctggaggaagcatttgagcaatgtgcaatggccatgtttggttacatgacagatactgggacagtggagcccctccaaacagtagaagtagaaacccaaggagatgacttacagtctcttctgtttcactttttggatgaatggctttataagttcagtgctgatgaattcttcataccccgggaagtgaaagtacttagcattgatcaaagaaatttcaaattacgatcaattgggtggggagaagaattttcattgtccaagcaccctcagggaacagaagtcaaagcaataacatattcagcaatgcaggtctataatgaagagaacccggaagtttttgtgatcattgacatttaagacaccaaaaaataaaagactcctacgaag

SEQ ID NO: 1668 - protein, 179 aa, Homo sapiens; identical to SEQ ID NO: 64

SEQ ID NO: 1669 - DNA, 735 bp, Homo sapiens
gcgcgccggcgttgacgggactgcgcccggtcagggtcacgtgagagaggtttggtccgcacactcccgcggcaagagggcagccattttcttgaaggctattaagcttacgaccctttcagagtactgagatgaaaaatctagaatgccttcgggtctagttatcaattttgggggtgaagcgggggaaagaacctcgccagtcagacccagacgggtttcattcaaggtgcccttcaacgtttttccttagtctttggaaagaactagtaatgaaggaatcgcagaagatggggttttggctttttaaatatgcgatccaagcggcagggtagggactaaagtaggtcaacagccaactccgagaaaggagtgtggtcctttaagggtgtgcgccaaggggcggagtctagagcggaagtagtaactccgggccgaagtccggtggatgaagggcggaagtagagtgtctaatcctgcagtcatggcgcaggaagaggaagatgttagagattacaatttgactgaagaacagaaggcgatcaaggccaagtatccgccagtcaataggaagtacgagtgtggggagaagaattttcattgtccaagcaccctcagggaacagaagtcaaagcaataacatattcagcaatgcaggtctataatgaagagaacccggaagtttttgtgatcattgacatttaagacaccaaaaaataaaagactcctacgaag

SEQ ID NO: 1670 - protein, 63 aa, Homo sapiens; identical to SEQ ID NO: 1616

SEQ ID NO: 1671 - DNA, 978 bp, Homo sapiens
gcgcgccggcgttgacgggactgcgcccggtcagggtcacgtgagagaggtttggtccgcacactcccgcggcaagagggcagccattttcttgaaggctattaagcttacgaccctttcagagtactgagatgaaaaatctagaatgccttcgggtctagttatcaattttgggggtgaagcgggggaaagaacctcgccagtcagacccagacgggtttcattcaaggtgcccttcaacgtttttccttagtctttggaaagaactagtaatgaaggaatcgcagaagatggggttttggctttttaaatatgcgatccaagcggcagggtagggactaaagtaggtcaacagccaactccgagaaaggagtgtggtcctttaagggtgtgcgccaaggggcggagtctagagcggaagtagtaactccgggccgaagtccggtggatgaagggcggaagtagagtgtctaatcctgcagtcatggcgcaggaagaggaagatgttagagattacaatttgactgaagaacagaaggcgatcaaggccaagtatccgccagtcaataggaagtacgagttggattgtattacacagagcatgaatatacttctttaggttacacgcatggggagatactctggaggaagcatttgagcaatgtgcaatggccatgtttggttacatgacagatactgggacagtggagcccctccaaacagtagaagtagaaacccaaggagatgacttacagtctcttctgtttcactttttggatgaatggctttataagttcagtgctgatgaattcttcataccccgggtggggagaagaattttcattgtccaagcaccctcagggaacagaagtcaaagcaataacatattcagcaatgcaggtctataatgaagagaacccggaagtttttgtgatcattgacatttaagacaccaaaaaataaaagactcctacgaag

SEQ ID NO: 1672 - protein, 79 aa, Homo sapiens [sequence omitted]

SEQ ID NO: 1673 - DNA, 1031 bp, Homo sapiens
gcgcgccggcgttgacgggactgcgcccggtcagggtcacgtgagagaggtttggtccgcacactcccgcggcaagagggcagccattttcttgaaggctattaagcttacgaccctttcagagtactgagatgaaaaatctagaatgccttcgggtctagttatcaattttgggggtgaagcgggggaaagaacctcgccagtcagacccagacgggtttcattcaaggtgcccttcaacgtttttccttagtctttggaaagaactagtaatgaaggaatcgcagaagatggggttttggctttttaaatatgcgatccaagcggcagggtagggactaaagtaggtcaacagccaactccgagaaaggagtgtggtcctttaagggtgtgcgccaaggggcggagtctagagcggaagtagtaactccgggccgaagtccggtggatgaagggcggaagtagagtgtctaatcctgcagtcatggcgcaggaagaggaagatgttagagattacaatttgactgaagaacagaaggcgatcaaggccaagtatccgccagtcaataggaagtacgagttggattgtattacacagagcatgaatatacttctttaggttacacgcatggggagatactctggaggaagcatttgagcaatgtgcaatggccatgtttggttacatgacagatactgggacagtggagcccctccaaacagtagaagtagaaacccaaggagatgacttacagtctcttctgtttcactttttggatgaatggctttataagttcagtgctgatgaattcttcataccccgggaagtgaaagtacttagcattgatcaaagaaatttcaaattacgatcaattgggtggggagaagaattttcattgtccaagcaccctcagggaacagaagtcaaagcaataacatattcagcaatgcaggtctataatgaagagaacccggaagtttttgtgatcattgacatttaagacaccaaaaaataaaagactcctacgaag

SEQ ID NO: 1674 - protein, 110 aa, Homo sapiens; identical to SEQ ID NO: 1594

SEQ ID NO: 1675 - DNA, 557 bp, Homo sapiens
gcctcccgagtagctgggattacaggcccatgcaaccatgccaggctaatttttgtattttagtagagactgggtttcaccatgttggccaggctggtttcgaactcccgacctcaggtgatccacctgcctcggcctcccaaagtgctgagattacaggcatgagccactgggcccagccaatcaacttttcaaagcaaaaaggaatgttttacaaatagcttattaaaacatctggttcctggaatatttcttggtttaaaaataccttcctggttttaatactgtctttaccttctctccatgaatccatatgccatccatccatgaatttatgcatgcattcagcaaatacttatcaagtgcctccagtgtttcagacttttttttatgcactcgaggtagaaatgtaataggataagcgaagtctctgcccttactgagtttaaaatgtagtgggagaagtgagccagacaaacatgtaaacacataatataatttcagatagtgaacagtgccatcaggataaggtaagagtggttggaggaggggagggg

SEQ ID NO: 1676 - protein, 63 aa, Homo sapiens
MQPCQANFCILVETGFHHVGQAGFELPTSGDPPASASQSAEITGMSHWAQPINFSKQKGMFYK

SEQ ID NO: 1677 - DNA, 1815 bp, Homo sapiens
gacgggactgcgcccggtcagggtcacgtgagagaggtttggtccgcacactcccgcggcaagagggcagccattttcttgaaggctattaagcttacgaccctttcagagtactgagatgaaaaatctagaatgccttcgggtctagttatcaattttgggggtgaagcgggggaaagaacctcgccagtcagacccagacgggtttcattcaaggtgcccttcaacgtttttccttagtctttggaaagaactagtaatgaaggaatcgcagaagatggggttttggctttttaaatatgcgatccaagcggcagggtagggactaaagtaggtcaacagccaactccgagaaaggagtgtggtcctttaagggtgtgcgccaaggggcggagtctagagcggaagtagtaactccgggccgaagtccggtggatgaagggcggaagtagagtgtctaatcctgcagtcatggcgcaggaagaggaagatgttagagattacaatttgactgaagaacagaaggcgatcaaggccaagtatccgccagtcaataggaagtacgagtgtgagttacacgcatggggagatactctggaggaagcatttgagcaatgtgcaatggccatgtttggttacatgacagatactgggacagtggagcccctccaaacagtagaagtagaaacccaaggagatgacttacagtctcttctgtttcactttttggatgaatggctttataagttcagtgctgatgaattcttcataccccgggtaagcaaaggtttttcttttttactgagcaaatggattcttagttcatattttaaaatagaacagatgatttaaaataggacatgtgaaacaaaaccaatccatacaaataagatgatactgatttgcagagattataatgaccacgggcacttcctggttaacctgcatttgcctatgtgggaacatttcgtatttagatctcatgtatttgtcactaatcaggattgtgtgataaaaatgtacctacagttttcatccacatttttttctgtttttgtttttgatagagacagggtgttgctatgttgtcgaggctagtcttgaactcctagcttccggcaatcctcctgcctcaattttgcaaagtgctgggattacaggtgtgagcattgcacgcagcctcatccacactttttatgtttcccaagtttgagctatatttatgtccatccattttttccttttgttccatgaaatttagtagccctgtcacattggcctaagttaaacaactgcagcttttagttttccttaacatgaaaaaaggaaaagccaaatggagattgcttgctgctgtcatcctttagaagggaacacatctgcaatgtcattgttatttaatagagatggcactctctgcttttataattcctccattctctgctttaccagcttcactacttatactcattctatcaactgagtcactcatcctacagaattcaagtgcctaccagtagtttattaggctcagagtgattgaaatcctatgtcgtcctcctccaccatatatctgttttcccccagcgttaaacaacagcttttattgaagtggcagtgtacagcagcggcagaggtactgcccctgtgtgcccagagtagttctctaccatatatcttgcagagaaattcttttgactcatatttttagatcttacatttttctagaatacctcccttgaatatgtaagaaaaaacttatttccttgaaatatatttaatactcagcttgggcaacatggcgaaactccctgt

SEQ ID NO: 1678 - protein, 138 aa, Homo sapiens
MKGGSRVSNPAVMAQEEEDVRDYNLTEEQKAIKAKYPPVNRKYECELHAWGDTLEEAFEQCAMAMFGYMTDTGTVEPLQTVEVETQGDDLQSLLFHFLDEWLYKFSADEFFIPRVSKGFSFLLSKWILSSYFKIEQMI

SEQ ID NO: 1679 - DNA, 763 bp, Homo sapiens
gacgggactgcgcccggtcagggtcacgtgagagaggtttggtccgcacactcccgcggcaagagggcagccattttcttgaaggctattaagcttacgaccctttcagagtactgagatgaaaaatctagaatgccttcgggtctagttatcaattttgggggtgaagcgggggaaagaacctcgccagtcagacccagacgggtttcattcaaggtgcccttcaacgtttttccttagtctttggaaagaactagtaatgaaggaatcgcagaagatggggttttggctttttaaatatgcgatccaagcggcagggtagggactaaagtaggtcaacagccaactccgagaaaggagtgtggtcctttaagggtgtgcgccaaggggcggagtctagagcggaagtagtaactccgggccgaagtccggtggatgaagggcggaagtagagtgtctaatcctgcagtcatggcgcaggaagaggaagatgttagagattacaatttgactgaagaacagaaggcgatcaaggccaagtatccgccagtcaataggaagtacgagtatttggatcatacagcagatgtccagtgagtatagcgggagttcattcctttgaaaccacgtcagtaggaagactgaatgtttcaatcttggtatccctatctttaatttttctcctctcattttggttccttcacaatatgaaaatgatggtttgaaagcactcagttttgcagggttcagtggctcagtgagc

SEQ ID NO: 1680 - protein, 53 aa, Homo sapiens
MKGGSRVSNPAVMAQEEEDVRDYNLTEEQKAIKAKYPPVNRKYEYLDHTADVQ

SEQ ID NO: 1681 - DNA, 2241 bp, Homo sapiens
aggagcgctcccattggctgatgttggcgcgaaggtgcgcgagtcagccctcgcgctgggggcgcaggaaacaatagaggccgcgcgcacagagcgagctcttgcagcctccccgcccctcccgcaacgctcgaccccaggattcccccggctcgcctgcccgccatggccgacaaggaagcagccttcgacgacgcagtggaagaacgagtgatcaacgaggaatacaaaatatggaaaaagaacaccccttttctttatgatttggtgatgacccatgctctggagtggcccagcctaactgcccagtggcttccagatgtaaccagaccagaagggaaagatttcagcattcatcgacttgtcctggggacacacacatcggatgaacaaaaccatcttgttatagccagtgtgcagctccctaatgatgatgctcagtttgatgcgtcacactacgacagtgagaaaggagaatttggaggttttggttcagttagtggaaaaattgaaatagaaatcaagatcaaccatgaaggagaagtaaacagggcccgttatatgccccagaacccttgtatcatcgcaacaaagactccttccagtgatgttcttgtttttgactatacaaaacatccttctaaaccagatccttctggagagtgcaacccagacttgcgtctccgtggacatcagaaggaaggctatgggctttcttggaacccaaatctcagtgggcacttacttagtgcttcagatgaccataccatctgcctgtgggacatcagtgccgttccaaaggagggaaaagtggtagatgcgaagaccatctttacagggcatacggcagtagtagaagatgtttcctggcatctactccatgagtctctgtttgggtcagttgctgatgatcagaaacttatgatttgggatactcgttcaaacaatacttccaaaccaagccactcagttgatgctcacactgctgaagtgaactgcctttctttcaatccttatagtgagttcattcttgccacaggatcagctgacaagactgttgccttgtgggatctgagaaatctgaaacttaagttgcattcctttgagtcacataaggatgaaatattccaggttcagtggtcacctcacaatgagactattttagcttccagtggtactgatcgcagactgaatgtctgggatttaagtaaaattggagaggaacaatccccagaagatgcagaagacgggccaccagagttgttgtttattcatggtggtcatactgccaagatatctgatttctcctggaatcccaatgaaccttgggtgatttgttctgtatcagaagacaatatcatgcaagtgtggcaaatggcagagaacatttataatgatgaagaccctgaaggaagcgtggatccagaaggacaagggtcctagatatgtctttacttgttgtgattttagactccccttttttcttctcaaccctgagagtgatttaacactggttttgagacagactttattcagctatccctctatataataggtaccaccgataatgctattagcccaaaccgtgggtgttttctaaatattaataggggggcttgattcaacaaagccacagacttaacgttgaaattttcttcaggaattttctagtaacccaggtctaaagtagctacagaaaggggaatattatgtgtgattatttttcttcttatgctatatccccaagtttttcagactcatttaagtaaaggctagagtgagtaaggaatagagccaaatgaggtaggtgtctgagccatgaagtataaatactgaaagatgtcacttttattcaggaaatagggggagattcaagtcatatagattcctactcgaaaatcttgacacctgactttccaggatgcacattttcatacgtagaccagtttcctcttggtttcttcagttaagtcaaaacaacacgttcctctttccccatatattcatatatttttgctcgttagtgtatttcttgagctgttttcatgttgtttatttcctgtctgtgaaatggtgtttttttttttgttgttggtttttttttttttttttttaacttgggaccaccaagttgtaaagatgtatgtttttacctgacagttataccacaggtagactgtcaagttgagaagagtgaatcaataacttgtatttgttttaaaaattaaattaatccttgat

SEQ ID NO: 1682 - protein, 425 aa, Homo sapiens; identical to SEQ ID NO: 66

SEQ ID NO: 1683 - DNA, 1509 bp, Homo sapiens
aggagcgctcccattggctgatgttggcgcgaaggtgcgcgagtcagccctcgcgctgggggcgcaggaaacaatagaggccgcgcgcacagagcgagctcttgcagcctccccgcccctcccgcaacgctcgaccccaggattcccccggctcgcctgcccgccatggccgacaaggaagcagccttcgacgacgcagtggaagaacgagtgatcaacgaggaatacaaaatatggaaaaagaacaccccttttctttatgatttggtgatgacccatgctctggagtggcccagcctaactgcccagtggcttccagatgtaaccagaccagaagggaaagatttcagcattcatcgacttgtcctggggacacacacatcggatgaacaaaaccatcttgttatagccagtgtgcagctccctaatgatgatgctcagtttgatgcgtcacactacgacagtgagaaaggagaatttggaggttttggttcagttagtggaaaaattgaaatagaaatcaagatcaaccatgaaggagaagtaaacagggcccgttatatgccccagaacccttgtatcatcgcaacaaagactccttccagtgatgttcttgtttttgactatacaaaacatccttctaaaccagatccttctggagagtgcaacccagacttgcgtctccgtggacatcagaaggaaggctatgggctttcttggaacccaaatctcagtgggcacttacttagtgcttcagatgaccataccatctgcctgtgggacatcagtgccgttccaaaggagggaaaagtggtagatgcgaagaccatctttacagggcatacggcagtagtagaagatgtttcctggcatctactccatgagtctctgtttgggtcagttgctgatgatcagaaacttatgatttgggatactcgttcaaacaatacttccaaaccaagccactcagttgatgctcacactgctgaagtgaactgcctttctttcaatccttatagtgagttcattcttgccacaggatcagctgacaagactgttgccttgtgggatctgagaaatctgaaacttaagttgcattcctttgagtcacataaggatgaaatattccaggttcagtggtcacctcacaatgagactattttagcttccagtggtactgatcgcagactgaatgtctgggatttaagtaaaattggagaggaacaatccccagaagatgcagaagacgggccaccagagttgttgtttattcatggtggtcatactgccaagatatctgatttctcctggaatcccaatgaaccttgggtgatttgttctgtatcagaagacaatatcatgcaagtgtggcaaatggagttagtccttgaccactagtttgatgccatctccattttgggtgacctgtttcaccagcaggcctgttactctccatgactaactgtgtaagtgcttaaaatggaataaattgcttttctacataacccc

SEQ ID NO: 1684 - protein, 410 aa, Homo sapiens
MADKEAAFDDAVEERVINEEYKIWKKNTPFLYDLVMTHALEWPSLTAQWLPDVTRPEGKDFSIHRLVLGTHTSDEQNHLVIASVQLPNDDAQFDASHYDSEKGEFGGFGSVSGKIEIEIKINHEGEVNRARYMPQNPCIIATKTPSSDVLVFDYTKHPSKPDPSGECNPDLRLRGHQKEGYGLSWNPNLSGHLLSASDDHTICLWDISAVPKEGKVVDAKTIFTGHTAVVEDVSWHLLHESLFGSVADDQKLMIWDTRSNNTSKPSHSVDAHTAEVNCLSFNPYSEFILATGSADKTVALWDLRNLKLKLHSFESHKDEIFQVQWSPHNETILASSGTDRRLNVWDLSKIGEEQSPEDAEDGPPELLFIHGGHTAKISDFSWNPNEPWVICSVSEDNIMQVWQMELVLDH

SEQ ID NO: 1685 - DNA, 2395 bp, Homo sapiens
aggagcgctcccattggctgatgttggcgcgaaggtgcgcgagtcagccctcgcgctgggggcgcaggaaacaatagaggccgcgcgcacagagcgagctcttgcagcctccccgcccctcccgcaacgctcgaccccaggattcccccggctcgcctgcccgccatggccgacaaggaagcagccttcgacgacgcagtggaagaacgagtgatcaacgaggaatacaaaatatggaaaaagaacaccccttttctttatgatttggtgatgacccatgctctggagtggcccagcctaactgcccagtggcttccagatgtaaccagaccagaagggaaagatttcagcattcatcgacttgtcctggggacacacacatcggatgaacaaaaccatcttgttatagccagtgtgcagctccctaatgatgatgctcagtttgatgcgtcacactacgacagtgagaaaggagaatttggaggttttggttcagttagtggaaaaattgaaatagaaatcaagatcaaccatgaaggagaagtaaacagggcccgttatatgccccagaacccttgtatcatcgcaacaaagactccttccagtgatgttcttgtttttgactatacaaaacatccttctaaaccagatccttctggagagtgcaacccagacttgcgtctccgtggacatcagaaggaaggctatgggctttcttggaacccaaatctcagtgggcacttacttagtgcttcagatgaccataccatctgcctgtgggacatcagtgccgttccaaaggagggaaaagtggtagatgcgaagaccatctttacagggcatacggcagtagtagaagatgtttcctggcatctactccatgagtctctgtttgggtcagttgctgatgatcagaaacttatgatttgggatactcgttcaaacaatacttccaaaccaagccactcagttgatgctcacactgctgaagtgaactgcctttctttcaatccttatagtgagttcattcttgccacaggatcagctgacaagactgttgccttgtgggatctgagaaatctgaaacttaagttgcattcctttgagtcacataaggatgaaatattccaggttcagtggtcacctcacaatgagactattttagcttccagtggtactgatcgcagactgaatgtctgggatttaagtaaaattggagaggaacaatccccagaagatgcagaagacgggccaccagagttgttgtttattcatggtggtcatactgccaagatatctgatttctcctggaatcccaatgaaccttgggtgatttgttctgtatcagaagacaatatcatgcaagtgtggcaaatggcagagaacatttataatgatgaagaccctgaaggaagcgtggatccagaaggacaagggtcctagatatgtctttacttgttgtgattttagactccccttttttcttctcaaccctgagagtgatttaacactggttttgagacagactttattcagctatccctctatataataggtaccaccgataatgctattagcccaaaccgtgggtgttttctaaatattaataggggggcttgattcaacaaagccacagacttaacgttgaaattttcttcaggaattttctagtaacccaggtctaaagtagctacagaaaggggaatattatgtgtgattatttttcttcttatgctatatccccaagtttttcagactcatttaagtaaaggctagagtgagtaaggaatagagccaaatgaggtaggtgtctgagccatgaagtataaatactgaaagatgtcacttttattcaggaaatagggggagattcaagtcatatagattcctactcgaaaatcttgacacctgactttccaggatgcacattttcatacgtagaccagtttcctcttggtttcttcagttaagtcaaaacaacacgttcctctttccccatatattcatatatttttgctcgttagtgtatttcttgagctgttttcatgttgtttatttcctgtctgtgaaatggtgtttttttttttgttgttggtttttttttttttttttttaacttgggaccaccaagttgtaaagatgtatgtttttacctgacagttataccacaggtagactgtcaagttgagaagagtgaatcaataacttgtatttgttttaaaaattaaattaatccttgataagagttgctttttttttttaggagttagtccttgaccactagtttgatgccatctccattttgggtgacctgtttcaccagcaggcctgttactctccatgactaactgtgtaagtgcttaaaatggaataaattgcttttctacataacccc

SEQ ID NO: 1686 - protein, 425 aa, Homo sapiens; identical to SEQ ID NO: 66

SEQ ID NO: 1687 - DNA, 7063 bp, Homo sapiens
aggagcgctcccattggctgatgttggcgcgaaggtgcgcgagtcagccctcgcgctgggggcgcaggaaacaatagaggccgcgcgcacagagcgagctcttgcagcctccccgcccctcccgcaacgctcgaccccaggattcccccggctcgcctgcccgccatggccgacaaggaagcagccttcgacgacgcagtggaagaacgagtgatcaacgaggaatacaaaatatggaaaaagaacaccccttttctttatgatttggtgatgacccatgctctggagtggcccagcctaactgcccagtggcttccagatgtaaccagaccagaagggaaagatttcagcattcatcgacttgtcctggggacacacacatcggatgaacaaaaccatcttgttatagccagtgtgcagctccctaatgatgatgctcagtttgatgcgtcacactacgacagtgagaaaggagaatttggaggttttggttcagttagtggaaaaattgaaatagaaatcaagatcaaccatgaaggagaagtaaacagggcccgttatatgccccagaacccttgtatcatcgcaacaaagactccttccagtgatgttcttgtttttgactatacaaaacatccttctaaaccagatccttctggagagtgcaacccagacttgcgtctccgtggacatcagaaggaaggctatgggctttcttggaacccaaatctcagtgggcacttacttagtgcttcagatgaccataccatctgcctgtgggacatcagtgccgttccaaaggagggaaaagtggtagatgcgaagaccatctttacagggcatacggcagtagtagaagatgtttcctggcatctactccatgagtctctgtttgggtcagttgctgatgatcagaaacttatgatttgggatactcgttcaaacaatacttccaaaccaagccactcagttgatgctcacactgctgaagtgaactgcctttctttcaatccttatagtgagttcattcttgccacaggatcagctgacaagactgttgccttgtgggatctgagaaatctgaaacttaagttgcattcctttgagtcacataaggatgaaatattccaggttcagtggtcacctcacaatgagactattttagcttccagtggtactgatcgcagactgaatgtctgggatttaagtaaaattggagaggaacaatccccagaagatgcagaagacgggccaccagagttgttgtttattcatggtggtcatactgccaagatatctgatttctcctggaatcccaatgaaccttgggtgatttgttctgtatcagaagacaatatcatgcaagtgtggcaaatggagttagtccttgaccactagtttgatgccatctccattttgggtgacctgtttcaccagcaggcctgttactctccatgactaactgtgtaagtgcttaaaatggaataaattgcttttctacataaccccatgctgatgggttttatttagtataaaacatccatcaaacaccagtctctggcttctagaagagtccttcagatgacagttgttgtccatggtctttgactatcaagagcagaattaaatgtaatagtcccagagctgtagaaaagaactttactccttcccagggaaagtgaaagacataaaacactgaatcagaggtggcacagattagtctttgataaggtaacgtttctttgaagtctatctgtagagaactacatggacttccaagagtgtcaaaggcagtgtggtagagagaatttaaggcaagatttaaatttggaaaaggtgcttgaaccttttctcagaggttttatttccccagtatgtttttcactggggcctttacttaggttagaaataataggctttgaaggcctctatcaccagatgcaataaccagataaaattcctgttttttcccaatcgcttagttttttgttgttgttgttttttaactgagtagatcattctgacccagaactactttcatgaggtaagatctttgggaaaatctgaatagcgttaaccattagattcaaatctcaaatggtttcttttcaagtctagttgttttagagtatagtgagaaataccttgacacaattttaagagtaaactatatgggtcagcatatccttgaacaaaaagtagactttgtaaaagtattcatttaaattctaacactcgtggcacaaaagaatggaaattgtaaacccatgtaatggaaattggctatctttttgaccccacatgtgcccctcaaaaatgtttttggtttgggtcaacacaaggcaagatacattctttaaaatactcccagatgtgtccatacattcatccttcactcagtgcatatgtgagggttgttgctggaagacaggaggctcatctttcctttccttggtgcattgagatcagtatcaacagcagatgaaatagaatccagcaaagagttgacatgttctgcctccggccaactctagaatctttttaagcaggtcagccagtatttgcaacttccacaggatgaattgcttgccaagtttctggcactcttgtctggttggaagagtacatccaaagggtacttagtgatcctttgctaagaagttttttgctgtttccgggttacagatttggccatatatttctaaacagcccctgtaaagttgaaagaaaaagtttataacagtgaacttctgaggtttagttactgcaggctttgttgagaagagattgttacagtgtgatttatggatgatcagggatgactttcccctagcaaatatttggatgcctcctgtttgtcaaatagaatgaatggtgatggtgatgggagggatagttaaacgttttctctgctaggttaacttcttacaggtataattacaatgcctgaaattctgtagtttcatttctttggattagtcgttgtcttttccagattgtacacaatctgatcaacacaaaggtagttagtagatcattaacctcaattgcaaggttataatttctcaaacattaagcatattatcagtcatgtggattcaaacacagtataagaaaatcctcaaggctgggtgtgatggcttatgcctgtaatcccagctacttagcaggctgaggcaggagtattgtttgaacccaggaggcagagttgcagtgagccaagatcgtgccactactccagcctgggcaaaatagcaagacccgaccccccatctctactaaaaagaaatttaaaaaaataaaatcctagaaaattagaaaaagcaacaatagttacttgtgggccaggcgcggtggttcacgcctgtaatcccagcactttgagaggctgaggcacgtggatcacaaggtcaggagttcaagaccagcctggccaagatggtgaaaccccgtttctactaaaaatacaaaaactagctggccgtggtggcatgctcctgtagtcccagctactcaggaggctgaggcaggaaaatcacttgaacccaggaggtggaggttgcagtgaactgagaccgtgccactgcactccagcctgggtggcagagcgagactgtctcaaaaaaaaaagaaagttgtgaatttgatgtaagcttaggaaatgaataaaatttataggcatctgtataatgtacaacttgacacggactttcttttatccttagtttctttcacggactctagaacttttatcagaatatactggtaaaacattgggggagggatcctgagtaggtgattggtcagaaagatgccttcagttttgtcagtgtctaaaagttaagtctgtttaggccaagcatggtggctcacacctgaaatcccagcactctgggaggccgaggcaagtggatcacaaggtcaggagatgagaccatcttagccaacatggtgaaaccccgtctctactaaaatacaaaaaaattagccaggcgtggtggtgcgtgcctataatcccagctacttgggaggctgaggcaggggaatcgcttgaacccgggaggcagaggtcacgccactgcactccagcctggcaacagagcaagactccgtctcaaaaaaaaaaaaaaaaaaaaagagtaagtctgtgtaacatgaacatctctgcttccacccaaaaccacagcctttgaatattatataaggaacttaatggatagatatgtttattatttttgatagcacaactgctttctctgctattataaggaaaactgagaatagcaggtgggtagggtaggatgaggaaacaagatgcccaaagcctagatgccacagaattcatggtgataatcagggcatattttgagtcctactagaaacaaacattccaaatgaactctgaatgcctgactcaggcgttttggaggtttgggttatccccttgtcattaggcacacaagggttttttgttgtttttgttttttgggtttttgttttgttttgaggcagtctcactctgttgtacaagctggagtgctgtattgtgatcttgactcactgcaacctctgcctcctggttcaagcgattctcctgccttggcctcctgagtagctgggattataagtgcctgccactatgcccggctaatttttgtatttttagtggagatggagttttgccatgttggccaggctggtcttgaactcctgactccaggtgatccaccctcctcagcctcccaaagtgctaggattacaggcgtgagccaccccgtccggcctgtttttaaggcattaattagtattgttaggaaagcagtaacaatgcaaacaccactcttctcttcacaaagatcaccttgagactgtgtctccattccacctgcctgagaagtgggagcatcagcctgttccaggctcttgggtagtagcatagccctttaaaaagagagagccattttccatgtgtttttggataagcacaatttgaaaatcatttcccaaatcctctttttgtttttgattctaaggtaaaattttccctaagccctcccaccatcccctcagccagtattagatgagatttgtatagcagcagaaactgacttataagtagagagctcttcagcaagactgagccttagctgttccatctctttgttcttctgttgctggagttgcaccccatttcttaactgcctctggcgttcttccatttcctccagctgttcctgcatgagatggccaagaacatttctaatgagccaaacaataaaaactcacattgtccactcttacttataaaacacttttttgttcattgtttaatcttgatagcagtattgaggctggtatttatatgataggttatgaaacaggttcaaagaagttgtgtcttggaaaaaaagtgacaatgcttttgaaaatgatgacgaaaaaggcatcttgtctgttaaccacagcttgctttaatagaatcctgggagggtgattgggactttttagtattacaaccttagtgtcattgaggaggattttggtctagttagtgggctgagtttcatatacctctccctccatgtgcaggtttgttaagataattggtagtttttaataatataaaatacttaagttgaaatacaaaagtgtggcaacaattattaaatattggctagaattctaggagagttacacaactagtggaagtccatgtttagaaaataaatggcttgtttaaggaaaagtttttgtgtccaaagctccttaaagtcagagagatttctacctggtacttaacatcatatggaaattgatgctttagtgagggtgttggctatcctattgctaatttcctgcatccttttttcttctttatttttgtatagagacagggtctcgctatgttgcccaggctggtcttgttcctgggctcaagcagtcctcccgcctcggtctcccaaagtgctgggattacaggtgtgagccactgtgcccagcttatccttttttcattacacaaaaagactgaatttggttagttctaagttggaagataaagatggtatgcacaggaggcccttgggagccctcagataactttctcattcttccagaatcaggctgggatgcattctgtaaattttccctgcctaggatgtatacctgaggaataaggtaaggaagatgtcagcaagtcagtctctggtttacctgctagctggcatggatccttaaggaagcaggagggagttgggaagagaggaaggggtgaagttggtatcttttaaagcgagagtgattttacctcagattttgaagaatactaaggaatccagttgttggggtacatgctattattagaaggatctagataatttgtcctctgagtcatacttgacattgtacctgtggcacatcaatccgcactgtttgatactctggctgaatctcagctttcaccaacattgtcaaaggaccttttttagtgcccagccatgcctaagagtgtgtcatctgaagagggaagcatctgcatactgctgtcctgattgctcagtcctcactacctaccagacccgttggtaaggtacaaaagtacatgcttggaaaagcagtctgcaccaccagtgataagctgtgacagagtggaacagcctcaatgaaatgaaggaaggattgctacagtggcattaaggatggtctcttaatcctgtgttaaccactagattaactttacaatcaactcaaaatccttcaaaggctttccactttctttagtggcattcagaccccctctagtttgacccctacctccaacttgaacctctgttactcttccgtatgaacattttcctctagccctggactactagtaccgaagtcactagtcacataggactcatttgaaatatgactagtctcaattgagatgtaatgtaagtgtaaaatacacagcagatttctaagacagcacacaaaatgtaaaatatgtcaaaaatatttgatactgattacatgttgaaatatatgtgttgggttaaataaaatgcattaaagttaa

SEQ ID NO: 1688 - protein, 410 aa, Homo sapiens; identical to SEQ ID NO: 1684

SEQ ID NO: 1689 - DNA, 7949 bp, Homo sapiens
aggagcgctcccattggctgatgttggcgcgaaggtgcgcgagtcagccctcgcgctgggggcgcaggaaacaatagaggccgcgcgcacagagcgagctcttgcagcctccccgcccctcccgcaacgctcgaccccaggattcccccggctcgcctgcccgccatggccgacaaggaagcagccttcgacgacgcagtggaagaacgagtgatcaacgaggaatacaaaatatggaaaaagaacaccccttttctttatgatttggtgatgacccatgctctggagtggcccagcctaactgcccagtggcttccagatgtaaccagaccagaagggaaagatttcagcattcatcgacttgtcctggggacacacacatcggatgaacaaaaccatcttgttatagccagtgtgcagctccctaatgatgatgctcagtttgatgcgtcacactacgacagtgagaaaggagaatttggaggttttggttcagttagtggaaaaattgaaatagaaatcaagatcaaccatgaaggagaagtaaacagggcccgttatatgccccagaacccttgtatcatcgcaacaaagactccttccagtgatgttcttgtttttgactatacaaaacatccttctaaaccagatccttctggagagtgcaacccagacttgcgtctccgtggacatcagaaggaaggctatgggctttcttggaacccaaatctcagtgggcacttacttagtgcttcagatgaccataccatctgcctgtgggacatcagtgccgttccaaaggagggaaaagtggtagatgcgaagaccatctttacagggcatacggcagtagtagaagatgtttcctggcatctactccatgagtctctgtttgggtcagttgctgatgatcagaaacttatgatttgggatactcgttcaaacaatacttccaaaccaagccactcagttgatgctcacactgctgaagtgaactgcctttctttcaatccttatagtgagttcattcttgccacaggatcagctgacaagactgttgccttgtgggatctgagaaatctgaaacttaagttgcattcctttgagtcacataaggatgaaatattccaggttcagtggtcacctcacaatgagactattttagcttccagtggtactgatcgcagactgaatgtctgggatttaagtaaaattggagaggaacaatccccagaagatgcagaagacgggccaccagagttgttgtttattcatggtggtcatactgccaagatatctgatttctcctggaatcccaatgaaccttgggtgatttgttctgtatcagaagacaatatcatgcaagtgtggcaaatggcagagaacatttataatgatgaagaccctgaaggaagcgtggatccagaaggacaagggtcctagatatgtctttacttgttgtgattttagactccccttttttcttctcaaccctgagagtgatttaacactggttttgagacagactttattcagctatccctctatataataggtaccaccgataatgctattagcccaaaccgtgggtgttttctaaatattaataggggggcttgattcaacaaagccacagacttaacgttgaaattttcttcaggaattttctagtaacccaggtctaaagtagctacagaaaggggaatattatgtgtgattatttttcttcttatgctatatccccaagtttttcagactcatttaagtaaaggctagagtgagtaaggaatagagccaaatgaggtaggtgtctgagccatgaagtataaatactgaaagatgtcacttttattcaggaaatagggggagattcaagtcatatagattcctactcgaaaatcttgacacctgactttccaggatgcacattttcatacgtagaccagtttcctcttggtttcttcagttaagtcaaaacaacacgttcctctttccccatatattcatatatttttgctcgttagtgtatttcttgagctgttttcatgttgtttatttcctgtctgtgaaatggtgtttttttttttgttgttggtttttttttttttttttttaacttgggaccaccaagttgtaaagatgtatgtttttacctgacagttataccacaggtagactgtcaagttgagaagagtgaatcaataacttgtatttgttttaaaaattaaattaatccttgataagagttgctttttttttttaggagttagtccttgaccactagtttgatgccatctccattttgggtgacctgtttcaccagcaggcctgttactctccatgactaactgtgtaagtgcttaaaatggaataaattgcttttctacataaccccatgctgatgggttttatttagtataaaacatccatcaaacaccagtctctggcttctagaagagtccttcagatgacagttgttgtccatggtctttgactatcaagagcagaattaaatgtaatagtcccagagctgtagaaaagaactttactccttcccagggaaagtgaaagacataaaacactgaatcagaggtggcacagattagtctttgataaggtaacgtttctttgaagtctatctgtagagaactacatggacttccaagagtgtcaaaggcagtgtggtagagagaatttaaggcaagatttaaatttggaaaaggtgcttgaaccttttctcagaggttttatttccccagtatgtttttcactggggcctttacttaggttagaaataataggctttgaaggcctctatcaccagatgcaataaccagataaaattcctgttttttcccaatcgcttagttttttgttgttgttgttttttaactgagtagatcattctgacccagaactactttcatgaggtaagatctttgggaaaatctgaatagcgttaaccattagattcaaatctcaaatggtttcttttcaagtctagttgttttagagtatagtgagaaataccttgacacaattttaagagtaaactatatgggtcagcatatccttgaacaaaaagtagactttgtaaaagtattcatttaaattctaacactcgtggcacaaaagaatggaaattgtaaacccatgtaatggaaattggctatctttttgaccccacatgtgcccctcaaaaatgtttttggtttgggtcaacacaaggcaagatacattctttaaaatactcccagatgtgtccatacattcatccttcactcagtgcatatgtgagggttgttgctggaagacaggaggctcatctttcctttccttggtgcattgagatcagtatcaacagcagatgaaatagaatccagcaaagagttgacatgttctgcctccggccaactctagaatctttttaagcaggtcagccagtatttgcaacttccacaggatgaattgcttgccaagtttctggcactcttgtctggttggaagagtacatccaaagggtacttagtgatcctttgctaagaagttttttgctgtttccgggttacagatttggccatatatttctaaacagcccctgtaaagttgaaagaaaaagtttataacagtgaacttctgaggtttagttactgcaggctttgttgagaagagattgttacagtgtgatttatggatgatcagggatgactttcccctagcaaatatttggatgcctcctgtttgtcaaatagaatgaatggtgatggtgatgggagggatagttaaacgttttctctgctaggttaacttcttacaggtataattacaatgcctgaaattctgtagtttcatttctttggattagtcgttgtcttttccagattgtacacaatctgatcaacacaaaggtagttagtagatcattaacctcaattgcaaggttataatttctcaaacattaagcatattatcagtcatgtggattcaaacacagtataagaaaatcctcaaggctgggtgtgatggcttatgcctgtaatcccagctacttagcaggctgaggcaggagtattgtttgaacccaggaggcagagttgcagtgagccaagatcgtgccactactccagcctgggcaaaatagcaagacccgaccccccatctctactaaaaagaaatttaaaaaaataaaatcctagaaaattagaaaaagcaacaatagttacttgtgggccaggcgcggtggttcacgcctgtaatcccagcactttgagaggctgaggcacgtggatcacaaggtcaggagttcaagaccagcctggccaagatggtgaaaccccgtttctactaaaaatacaaaaactagctggccgtggtggcatgctcctgtagtcccagctactcaggaggctgaggcaggaaaatcacttgaacccaggaggtggaggttgcagtgaactgagaccgtgccactgcactccagcctgggtggcagagcgagactgtctcaaaaaaaaaagaaagttgtgaatttgatgtaagcttaggaaatgaataaaatttataggcatctgtataatgtacaacttgacacggactttcttttatccttagtttctttcacggactctagaacttttatcagaatatactggtaaaacattgggggagggatcctgagtaggtgattggtcagaaagatgccttcagttttgtcagtgtctaaaagttaagtctgtttaggccaagcatggtggctcacacctgaaatcccagcactctgggaggccgaggcaagtggatcacaaggtcaggagatgagaccatcttagccaacatggtgaaaccccgtctctactaaaatacaaaaaaattagccaggcgtggtggtgcgtgcctataatcccagctacttgggaggctgaggcaggggaatcgcttgaacccgggaggcagaggtcacgccactgcactccagcctggcaacagagcaagactccgtctcaaaaaaaaaaaaaaaaaaaaagagtaagtctgtgtaacatgaacatctctgcttccacccaaaaccacagcctttgaatattatataaggaacttaatggatagatatgtttattatttttgatagcacaactgctttctctgctattataaggaaaactgagaatagcaggtgggtagggtaggatgaggaaacaagatgcccaaagcctagatgccacagaattcatggtgataatcagggcatattttgagtcctactagaaacaaacattccaaatgaactctgaatgcctgactcaggcgttttggaggtttgggttatccccttgtcattaggcacacaagggttttttgttgtttttgttttttgggtttttgttttgttttgaggcagtctcactctgttgtacaagctggagtgctgtattgtgatcttgactcactgcaacctctgcctcctggttcaagcgattctcctgccttggcctcctgagtagctgggattataagtgcctgccactatgcccggctaatttttgtatttttagtggagatggagttttgccatgttggccaggctggtcttgaactcctgactccaggtgatccaccctcctcagcctcccaaagtgctaggattacaggcgtgagccaccccgtccggcctgtttttaaggcattaattagtattgttaggaaagcagtaacaatgcaaacaccactcttctcttcacaaagatcaccttgagactgtgtctccattccacctgcctgagaagtgggagcatcagcctgttccaggctcttgggtagtagcatagccctttaaaaagagagagccattttccatgtgtttttggataagcacaatttgaaaatcatttcccaaatcctctttttgtttttgattctaaggtaaaattttccctaagccctcccaccatcccctcagccagtattagatgagatttgtatagcagcagaaactgacttataagtagagagctcttcagcaagactgagccttagctgttccatctctttgttcttctgttgctggagttgcaccccatttcttaactgcctctggcgttcttccatttcctccagctgttcctgcatgagatggccaagaacatttctaatgagccaaacaataaaaactcacattgtccactcttacttataaaacacttttttgttcattgtttaatcttgatagcagtattgaggctggtatttatatgataggttatgaaacaggttcaaagaagttgtgtcttggaaaaaaagtgacaatgcttttgaaaatgatgacgaaaaaggcatcttgtctgttaaccacagcttgctttaatagaatcctgggagggtgattgggactttttagtattacaaccttagtgtcattgaggaggattttggtctagttagtgggctgagtttcatatacctctccctccatgtgcaggtttgttaagataattggtagtttttaataatataaaatacttaagttgaaatacaaaagtgtggcaacaattattaaatattggctagaattctaggagagttacacaactagtggaagtccatgtttagaaaataaatggcttgtttaaggaaaagtttttgtgtccaaagctccttaaagtcagagagatttctacctggtacttaacatcatatggaaattgatgctttagtgagggtgttggctatcctattgctaatttcctgcatccttttttcttctttatttttgtatagagacagggtctcgctatgttgcccaggctggtcttgttcctgggctcaagcagtcctcccgcctcggtctcccaaagtgctgggattacaggtgtgagccactgtgcccagcttatccttttttcattacacaaaaagactgaatttggttagttctaagttggaagataaagatggtatgcacaggaggcccttgggagccctcagataactttctcattcttccagaatcaggctgggatgcattctgtaaattttccctgcctaggatgtatacctgaggaataaggtaaggaagatgtcagcaagtcagtctctggtttacctgctagctggcatggatccttaaggaagcaggagggagttgggaagagaggaaggggtgaagttggtatcttttaaagcgagagtgattttacctcagattttgaagaatactaaggaatccagttgttggggtacatgctattattagaaggatctagataatttgtcctctgagtcatacttgacattgtacctgtggcacatcaatccgcactgtttgatactctggctgaatctcagctttcaccaacattgtcaaaggaccttttttagtgcccagccatgcctaagagtgtgtcatctgaagagggaagcatctgcatactgctgtcctgattgctcagtcctcactacctaccagacccgttggtaaggtacaaaagtacatgcttggaaaagcagtctgcaccaccagtgataagctgtgacagagtggaacagcctcaatgaaatgaaggaaggattgctacagtggcattaaggatggtctcttaatcctgtgttaaccactagattaactttacaatcaactcaaaatccttcaaaggctttccactttctttagtggcattcagaccccctctagtttgacccctacctccaacttgaacctctgttactcttccgtatgaacattttcctctagccctggactactagtaccgaagtcactagtcacataggactcatttgaaatatgactagtctcaattgagatgtaatgtaagtgtaaaatacacagcagatttctaagacagcacacaaaatgtaaaatatgtcaaaaatatttgatactgattacatgttgaaatatatgtgttgggttaaataaaatgcattaaagttaa

SEQ ID NO: 1690 - protein, 425 aa, Homo sapiens; identical to SEQ ID NO: 66

SEQ ID NO: 1691 - DNA, 816 bp, Homo sapiens
gctcccattggctgatgttggcgcgaaggtgcgcgagtcagccctcgcgctgggggcgcaggaaacaatagaggccgcgcgcacagagcgagctcttgcagcctccccgcccctcccgcaacgctcgaccccaggattcccccggctcgcctgcccgccatggccgacaaggaagcagccttcgacgacgcagtggaagaacgagtgatcaacgaggaatacaaaatatggaaaaagaacaccccttttctttatgatttggtgatgacccatgctctggagtggcccagcctaactgcccagtggcttccagatgtaaccagaccagaagggaaagatttcagcattcatcgacttgtcctggggacacacacatcggatgaacaaaaccatcttgttatagccagtgtgcagctccctaatgatgatgctcagtttgatgcgtcacactacgacagtgagaaaggagaatttggaggttttggttcagttagtggaaaaattgaaatagaaatcaagatcaaccatgaaggagaagtaaacagggcccgttatatgccccagaacccttgtatcatcgcaacaaagactccttccagtgatgttcttgtttttgactatacaaaacatccttctaaaccaggtatgtgcccttttctattcaaatacaaatgagtcactatagaaatacatggttccactcactgtgagtttaattgcatgttactctgtgtaatttaacatcttgtgatttgtattgatatgtgtatatttttcttcattttgcctccatgaaaaaataatgcttttttacat

SEQ ID NO: 1692 - protein, 171 aa, Homo sapiens
MADKEAAFDDAVEERVINEEYKIWKKNTPFLYDLVMTHALEWPSLTAQWLPDVTRPEGKDFSIHRLVLGTHTSDEQNHLVIASVQLPNDDAQFDASHYDSEKGEFGGFGSVSGKIEIEIKINHEGEVNRARYMPQNPCIIATKTPSSDVLVFDYTKHPSKPGMCPFLFKYK

SEQ ID NO: 1693 - DNA, 691 bp, Homo sapiens
gcgcacagagcgagctcttgcagcctccccgcccctcccgcaacgctcgaccccaggattcccccggctcgcctgcccgccatggccgacaaggaagcagccttcgacgacgcagtggaagaacgagtgatcaacgaggaatacaaaatatggaaaaagaacaccccttttctttatgatttggtgatgacccatgctctggagtggcccagcctaactgcccagtggcttccagatgtaaccaggtgacatgactctcccgaacgttattttgatgtattttcagtgtagatttctcatattgattttcttttttccgctcttcagtcacccggagaaggcatgtgatcaaaacctcttggtgacattttttctaggccacaaagtaaggcaaaataacaaaatgattttgtaacttacctgacaagagaaaacatattggcgtttttttctcaatactgaattaaatagctgtagctgatgataatacctgtaataatagtggctgtaccaaataatagtacaaaacttgtcaactttcaaaaagtattatggccaggagcagtggctcacacttggaatccgagcactttgggaggcccaggcaggagacttacttgaggccaggagttggagaccagccctgggaataccctcgtctctactgccccccacacaaaaaaagaaaaaa

SEQ ID NO: 1694 - protein, 55 aa, Homo sapiens
MADKEAAFDDAVEERVINEEYKIWKKNTPFLYDLVMTHALEWPSLTAQWLPDVTR

SEQ ID NO: 1695 - DNA, 288 bp, Homo sapiens
atttggaataatggattttctggtacaaaagtaagttttctgaattacattcaaaagcgattgtatgctaagtaaattccttcaaaacttggatctttaaaagttaagataattgcaaaatgttattagactatgatgtagctcaacaaatgaacttgtggcagagtacttaatgagaagtgtactggaatggtgattccacatttactatagtcatatgctaaattgtgcttattggactagtggatcacaaatattggccatcccatacctactaaacattctaga

SEQ ID NO: 1696 - DNA, 3592 bp, Homo sapiens
ggagaaatctaaccctgaggagagcctcagagccgagcagagccccagcatggaggagaacctgagcatagaggacctggaattgctagaggggcgtttccagcagtgtgtccaagctgtggcccagctggaagaggagagggatcagctcatccatgagcttgtattgctccgggaaccagccctgcaggaggtacagcaagtccatcaagacatcctggctgcctacaagctccatgcccaagcagagctggagagagatggcctaagggaggagatccggctggtcaagcagaagcttttcaaagtgacaaaggaatgtgtggcctaccaataccagctggagtgccgccagcaggacgtggctcagtttgccgatttccgggaagtgctgactacaagggcaacccagctctcagaggaactggcccagctccgggatgcctatcagaagcagaaggagcagctgcggcaacaactagaagcccctccaagccagagggatgggcactttctccaggaaagccggcgactctctgcccagtttgaaaatctcatggcagagagccgccaggacctggaggaggagtatgagcctcagttcctgcggctcctagagaggaaagaagctgggaccaaagctctgcagagaacccaggctgagatccaggaaatgaaggaggctctgagacccctgcaagcagaggcccggcagctccgcctgcaaaacaggaacctggaggaccagatcgcacttgtgaggcaaaaacgagatgaagaggtgcagcagtacagggaacagctggaggaaatggaagaacgccagaggcagttaagaaatggggtgcaactccagcaacagaagaacaaagagatggaacagctaaggctcagtcttgctgaagagctctctacttataaggctatgctactacccaagagcctggaacaggctgatgctcccacttctcaggcaggtggaatggagacacagtctcaaggggctgtttagaaatatatggccaaatctgtaacccggaaacagcaaaaaacttcttagcaaaggatcactaagtaccctttggatgtactcttccaaccagacaagagtgccagaaacttggcaagcaattcatcctgtggaagttgcaaatactggctgacctgcttaaaaagattctagagttggccggaggcagaacatgtcaactctttgctggattctatttcatctgctgttgatactgatctcaatgcaccaaggaaaggaaagatgagcctcctgtcttccagcaacaaccctcacatatgcactgagtgaaggatgaatgtatggacacatctgggagtattttaaagaatgtatcttgccttgtgttgacccaaaccaaaaacatttttgaggggcacatgtggggtcaaaaagatagccaatttccattacatgggtttacaatttccattcttttgtgccacgagtgttagaatttaaatgaatacttttacaaagtctactttttgttcaaggatatgctgacccatatagtttactcttaaaattgtgtcaaggtatttctcactatactctaaaacaactagacttgaaaagaaaccatttgagatttgaatctaatggttaacgctattcagattttcccaaagatcttacctcatgaaagtagttctgggtcagaatgatctactcagttaaaaaacaacaacaacaaaaaactaagcgattgggaaaaaacaggaattttatctggttattgcatctggtgatagaggccttcaaagcctattatttctaacctaagtaaaggccccagtgaaaaacatactggggaaataaaacctctgagaaaaggttcaagcaccttttccaaatttaaatcttgccttaaattctctctaccacactgcctttgacactcttggaagtccatgtagttctctacagatagacttcaaagaaacgttaccttatcaaagactaatctgtgccacctctgattcagtgttttatgtctttcactttccctgggaaggagtaaagttcttttctacagctctgggactattacatttaattctgctcttgatagtcaaagaccatggacaacaactgtcatctgaaggactcttctagaagccagagactggtgtttgatggatgttttatactaaataaaacccatcagcatggggttatgtagaaaagcaatttattccattttaagcacttacacagttagtcatggagagtaacaggcctgctggtgaaacaggtcacccaaaatggagatggcatcaaactagtggtcaaggactaactcctaaaaaaaaaaagcaactcttatcaaggattaatttaatttttaaaacaaatacaagttattgattcactcttctcaacttgacagtctacctgtggtataactgtcaggtaaaaacatacatctttacaacttggtggtcccaagttaaaaaaaaaaaaaaaaaaaccaacaacaaaaaaaaaaacaccatttcacagacaggaaataaacaacatgaaaacagctcaagaaatacactaacgagcaaaaatatatgaatatatggggaaagaggaacgtgttgttttgacttaactgaagaaaccaagaggaaactggtctacgtatgaaaatgtgcatcctggaaagtcaggtgtcaagattttcgagtaggaatctatatgacttgaatctccccctatttcctgaataaaagtgacatctttcagtatttatacttcatggctcagacacctacctcatttggctctattccttactcactctagcctttacttaaatgagtctgaaaaacttggggatatagcataagaagaaaaataatcacacataatattcccctttctgtagctactttagacctgggttactagaaaattcctgaagaaaatttcaacgttaagtctgtggctttgttgaatcaagcccccctattaatatttagaaaacacccacggtttgggctaatagcattatcggtggtacctattatatagagggatagctgaataaagtctgtctcaaaaccagtgttaaatcactctcagggttgagaagaaaaaaggggagtctaaaatcacaacaagtaaagacatatctaggacccttgtccttctggatccacgcttccttcagggtcttcatcattataaatgttctctgcctgcccaaaaacaagaaaaagaatttaaacatgaagacttcttctaaaactcaaggtttcaacaacagattaggccaggaagccagagagtaaatactttatagcttttgggccacacaatctgtgttacaactattcaactcttggatgaaagtatccggagacaacctataatgggtaatgaaatattaattagcatgatcatgttccaataaaaataagcagctgatccccagacgcctgattaggacattcccacaaaactgcagtgtggatactatttgtcttgatagccaacattcttgagttctttaaccaggcattattatttttctttccttttgagatggagccttgctctgtctcccag

SEQ ID NO: 1697 - protein, 320 aa, Homo sapiens
MEENLSIEDLELLEGRFQQCVQAVAQLEEERDQLIHELVLLREPALQEVQQVHQDILAAYKLHAQAELERDGLREEIRLVKQKLFKVTKECVAYQYQLECRQQDVAQFADFREVLTTRATQLSEELAQLRDAYQKQKEQLRQQLEAPPSQRDGHFLQESRRLSAQFENLMAESRQDLEEEYEPQFLRLLERKEAGTKALQRTQAEIQEMKEALRPLQAEARQLRLQNRNLEDQIALVRQKRDEEVQQYREQLEEMEERQRQLRNGVQLQQQKNKEMEQLRLSLAEELSTYKAMLLPKSLEQADAPTSQAGGMETQSQGAV

SEQ ID NO: 1698 - DNA, 3512 bp, Homo sapiens
ggagaaatctaaccctgaggagagcctcagagccgagcagagccccagcatggaggagaacctgagcatagaggacctggaattgctagaggggcgtttccagcagtgtgtccaagctgtggcccagctggaagaggagagggatcagctcatccatgagcttgtattgctccgggaaccagccctgcaggaggtacagcaagtccatcaagacatcctggctgcctacaagctccatgcccaagcagagctggagagagatggcctaagggaggagatccggctggtcaagcagaagcttttcaaagtgacaaaggaatgtgtggcctaccaataccagctggagtgccgccagcaggacgtggctcagtttgccgatttccgggaagtgctgactacaagggcaacccagctctcagaggaactggcccagctccgggatgcctatcagaagcagaaggagcagctgcggcaacaactagaagcccctccaagccagagggatgggcactttctccaggaaagccggcgactctctgcccagtttgaaaatctcatggcagagagccgccaggacctggaggaggagtatgagcctcagttcctgcggctcctagagaggaaagaagctgggaccaaagctctgcagagaacccaggctgagatccaggaaatgaaggaggctctgagacccctgcaagcagaggcccggcagctccgcctgcaaaacaggaacctggaggaccagatcgcacttgtgaggcaaaaacgagatgaagaggtgcagcagtacagggaacagctggaggaaatggaagaacgccagaggcagttaagaaatggggtgcaactccagcaacagaagaacaaagagatggaacagctaaggctcagtcttgctgaagagctctctacttataagggctgtttagaaatatatggccaaatctgtaacccggaaacagcaaaaaacttcttagcaaaggatcactaagtaccctttggatgtactcttccaaccagacaagagtgccagaaacttggcaagcaattcatcctgtggaagttgcaaatactggctgacctgcttaaaaagattctagagttggccggaggcagaacatgtcaactctttgctggattctatttcatctgctgttgatactgatctcaatgcaccaaggaaaggaaagatgagcctcctgtcttccagcaacaaccctcacatatgcactgagtgaaggatgaatgtatggacacatctgggagtattttaaagaatgtatcttgccttgtgttgacccaaaccaaaaacatttttgaggggcacatgtggggtcaaaaagatagccaatttccattacatgggtttacaatttccattcttttgtgccacgagtgttagaatttaaatgaatacttttacaaagtctactttttgttcaaggatatgctgacccatatagtttactcttaaaattgtgtcaaggtatttctcactatactctaaaacaactagacttgaaaagaaaccatttgagatttgaatctaatggttaacgctattcagattttcccaaagatcttacctcatgaaagtagttctgggtcagaatgatctactcagttaaaaaacaacaacaacaaaaaactaagcgattgggaaaaaacaggaattttatctggttattgcatctggtgatagaggccttcaaagcctattatttctaacctaagtaaaggccccagtgaaaaacatactggggaaataaaacctctgagaaaaggttcaagcaccttttccaaatttaaatcttgccttaaattctctctaccacactgcctttgacactcttggaagtccatgtagttctctacagatagacttcaaagaaacgttaccttatcaaagactaatctgtgccacctctgattcagtgttttatgtctttcactttccctgggaaggagtaaagttcttttctacagctctgggactattacatttaattctgctcttgatagtcaaagaccatggacaacaactgtcatctgaaggactcttctagaagccagagactggtgtttgatggatgttttatactaaataaaacccatcagcatggggttatgtagaaaagcaatttattccattttaagcacttacacagttagtcatggagagtaacaggcctgctggtgaaacaggtcacccaaaatggagatggcatcaaactagtggtcaaggactaactcctaaaaaaaaaaagcaactcttatcaaggattaatttaatttttaaaacaaatacaagttattgattcactcttctcaacttgacagtctacctgtggtataactgtcaggtaaaaacatacatctttacaacttggtggtcccaagttaaaaaaaaaaaaaaaaaaaccaacaacaaaaaaaaaaacaccatttcacagacaggaaataaacaacatgaaaacagctcaagaaatacactaacgagcaaaaatatatgaatatatggggaaagaggaacgtgttgttttgacttaactgaagaaaccaagaggaaactggtctacgtatgaaaatgtgcatcctggaaagtcaggtgtcaagattttcgagtaggaatctatatgacttgaatctccccctatttcctgaataaaagtgacatctttcagtatttatacttcatggctcagacacctacctcatttggctctattccttactcactctagcctttacttaaatgagtctgaaaaacttggggatatagcataagaagaaaaataatcacacataatattcccctttctgtagctactttagacctgggttactagaaaattcctgaagaaaatttcaacgttaagtctgtggctttgttgaatcaagcccccctattaatatttagaaaacacccacggtttgggctaatagcattatcggtggtacctattatatagagggatagctgaataaagtctgtctcaaaaccagtgttaaatcactctcagggttgagaagaaaaaaggggagtctaaaatcacaacaagtaaagacatatctaggacccttgtccttctggatccacgcttccttcagggtcttcatcattataaatgttctctgcctgcccaaaaacaagaaaaagaatttaaacatgaagacttcttctaaaactcaaggtttcaacaacagattaggccaggaagccagagagtaaatactttatagcttttgggccacacaatctgtgttacaactattcaactcttggatgaaagtatccggagacaacctataatgggtaatgaaatattaattagcatgatcatgttccaataaaaataagcagctgatccccagacgcctgattaggacattcccacaaaactgcagtgtggatactatttgtcttgatagccaacattcttgagttctttaaccaggcattattatttttctttccttttgagatggagccttgctctgtctcccag

SEQ ID NO: 1699 - protein, 314 aa, Homo sapiens
MEENLSIEDLELLEGRFQQCVQAVAQLEEERDQLIHELVLLREPALQEVQQVHQDILAAYKLHAQAELERDGLREEIRLVKQKLFKVTKECVAYQYQLECRQQDVAQFADFREVLTTRATQLSEELAQLRDAYQKQKEQLRQQLEAPPSQRDGHFLQESRRLSAQFENLMAESRQDLEEEYEPQFLRLLERKEAGTKALQRTQAEIQEMKEALRPLQAEARQLRLQNRNLEDQIALVRQKRDEEVQQYREQLEEMEERQRQLRNGVQLQQQKNKEMEQLRLSLAEELSTYKGCLEIYGQICNPETAKNFLAKDH

SEQ ID NO: 1700 - DNA, 6584 bp, Homo sapiens
ggttgtctccggatactttcatccaagagttgaatagttgtaacacagattgtgtggcccaaaagctataaagtatttactctctggcttcctggcctaatctgttgttgaaaccttgagttttagaagaagtcttcatgtttaaattctttttcttgtttttgggcaggcagagaacatttataatgatgaagaccctgaaggaagcgtggatccagaaggacaagggtcctagatatgtctttacttgttgtgattttagactccccttttttcttctcaaccctgagagtgatttaacactggttttgagacagactttattcagctatccctctatataataggtaccaccgataatgctattagcccaaaccgtgggtgttttctaaatattaataggggggcttgattcaacaaagccacagacttaacgttgaaattttcttcaggaattttctagtaacccaggtctaaagtagctacagaaaggggaatattatgtgtgattatttttcttcttatgctatatccccaagtttttcagactcatttaagtaaaggctagagtgagtaaggaatagagccaaatgaggtaggtgtctgagccatgaagtataaatactgaaagatgtcacttttattcaggaaatagggggagattcaagtcatatagattcctactcgaaaatcttgacacctgactttccaggatgcacattttcatacgtagaccagtttcctcttggtttcttcagttaagtcaaaacaacacgttcctctttccccatatattcatatatttttgctcgttagtgtatttcttgagctgttttcatgttgtttatttcctgtctgtgaaatgtaatccttgataagagttgctttttttttttaggagttagtccttgaccactagtttgatgccatctccattttgggtgacctgtttcaccagcaggcctgttactctccatgactaactgtgtaagtgcttaaaatggaataaattgcttttctacataaccccatgctgatgggttttatttagtataaaacatccatcaaacaccagtctctggcttctagaagagtccttcagatgacagttgttgtccatggtctttgactatcaagagcagaattaaatgtaatagtcccagagctgtagaaaagaactttactccttcccagggaaagtgaaagacataaaacactgaatcagaggtggcacagattagtctttgataaggtaacgtttctttgaagtctatctgtagagaactacatggacttccaagagtgtcaaaggcagtgtggtagagagaatttaaggcaagatttaaatttggaaaaggtgcttgaaccttttctcagaggttttatttccccagtatgtttttcactggggcctttacttaggttagaaataataggctttgaaggcctctatcaccagatgcaataaccagataaaattcctgttttttcccaatcgcttagttttttgttgttgttgttttttaactgagtagatcattctgacccagaactactttcatgaggtaagatctttgggaaaatctgaatagcgttaaccattagattcaaatctcaaatggtttcttttcaagtctagttgttttagagtatagtgagaaataccttgacacaattttaagagtaaactatatgggtcagcatatccttgaacaaaaagtagactttgtaaaagtattcatttaaattctaacactcgtggcacaaaagaatggaaattgtaaacccatgtaatggaaattggctatctttttgaccccacatgtgcccctcaaaaatgtttttggtttgggtcaacacaaggcaagatacattctttaaaatactcccagatgtgtccatacattcatccttcactcagtgcatatgtgagggttgttgctggaagacaggaggctcatctttcctttccttggtgcattgagatcagtatcaacagcagatgaaatagaatccagcaaagagttgacatgttctgcctccggccaactctagaatctttttaagcaggtcagccagtatttgcaacttccacaggatgaattgcttgccaagtttctggcactcttgtctggttggaagagtacatccaaagggtacttagtgatcctttgctaagaagttttttgctgtttccgggttacagatttggccatatatttctaaacagcccctgtaaagttgaaagaaaaagtttataacagtgaacttctgaggtttagttactgcaggctttgttgagaagagattgttacagtgtgatttatggatgatcagggatgactttcccctagcaaatatttggatgcctcctgtttgtcaaatagaatgaatggtgatggtgatgggagggatagttaaacgttttctctgctaggttaacttcttacaggtataattacaatgcctgaaattctgtagtttcatttctttggattagtcgttgtcttttccagattgtacacaatctgatcaacacaaaggtagttagtagatcattaacctcaattgcaaggttataatttctcaaacattaagcatattatcagtcatgtggattcaaacacagtataagaaaatcctcaaggctgggtgtgatggcttatgcctgtaatcccagctacttagcaggctgaggcaggagtattgtttgaacccaggaggcagagttgcagtgagccaagatcgtgccactactccagcctgggcaaaatagcaagacccgaccccccatctctactaaaaagaaatttaaaaaaataaaatcctagaaaattagaaaaagcaacaatagttacttgtgggccaggcgcggtggttcacgcctgtaatcccagcactttgagaggctgaggcacgtggatcacaaggtcaggagttcaagaccagcctggccaagatggtgaaaccccgtttctactaaaaatacaaaaactagctggccgtggtggcatgctcctgtagtcccagctactcaggaggctgaggcaggaaaatcacttgaacccaggaggtggaggttgcagtgaactgagaccgtgccactgcactccagcctgggtggcagagcgagactgtctcaaaaaaaaaagaaagttgtgaatttgatgtaagcttaggaaatgaataaaatttataggcatctgtataatgtacaacttgacacggactttcttttatccttagtttctttcacggactctagaacttttatcagaatatactggtaaaacattgggggagggatcctgagtaggtgattggtcagaaagatgccttcagttttgtcagtgtctaaaagttaagtctgtttaggccaagcatggtggctcacacctgaaatcccagcactctgggaggccgaggcaagtggatcacaaggtcaggagatgagaccatcttagccaacatggtgaaaccccgtctctactaaaatacaaaaaaattagccaggcgtggtggtgcgtgcctataatcccagctacttgggaggctgaggcaggggaatcgcttgaacccgggaggcagaggtcacgccactgcactccagcctggcaacagagcaagactccgtctcaaaaaaaaaaaaaaaaaaaaagagtaagtctgtgtaacatgaacatctctgcttccacccaaaaccacagcctttgaatattatataaggaacttaatggatagatatgtttattatttttgatagcacaactgctttctctgctattataaggaaaactgagaatagcaggtgggtagggtaggatgaggaaacaagatgcccaaagcctagatgccacagaattcatggtgataatcagggcatattttgagtcctactagaaacaaacattccaaatgaactctgaatgcctgactcaggcgttttggaggtttgggttatccccttgtcattaggcacacaagggttttttgttgtttttgttttttgggtttttgttttgttttgaggcagtctcactctgttgtacaagctggagtgctgtattgtgatcttgactcactgcaacctctgcctcctggttcaagcgattctcctgccttggcctcctgagtagctgggattataagtgcctgccactatgcccggctaatttttgtatttttagtggagatggagttttgccatgttggccaggctggtcttgaactcctgactccaggtgatccaccctcctcagcctcccaaagtgctaggattacaggcgtgagccaccccgtccggcctgtttttaaggcattaattagtattgttaggaaagcagtaacaatgcaaacaccactcttctcttcacaaagatcaccttgagactgtgtctccattccacctgcctgagaagtgggagcatcagcctgttccaggctcttgggtagtagcatagccctttaaaaagagagagccattttccatgtgtttttggataagcacaatttgaaaatcatttcccaaatcctctttttgtttttgattctaaggtaaaattttccctaagccctcccaccatcccctcagccagtattagatgagatttgtatagcagcagaaactgacttataagtagagagctcttcagcaagactgagccttagctgttccatctctttgttcttctgttgctggagttgcaccccatttcttaactgcctctggcgttcttccatttcctccagctgttcctgcatgagatggccaagaacatttctaatgagccaaacaataaaaactcacattgtccactcttacttataaaacacttttttgttcattgtttaatcttgatagcagtattgaggctggtatttatatgataggttatgaaacaggttcaaagaagttgtgtcttggaaaaaaagtgacaatgcttttgaaaatgatgacgaaaaaggcatcttgtctgttaaccacagcttgctttaatagaatcctgggagggtgattgggactttttagtattacaaccttagtgtcattgaggaggattttggtctagttagtgggctgagtttcatatacctctccctccatgtgcaggtttgttaagataattggtagtttttaataatataaaatacttaagttgaaatacaaaagtgtggcaacaattattaaatattggctagaattctaggagagttacacaactagtggaagtccatgtttagaaaataaatggcttgtttaaggaaaagtttttgtgtccaaagctccttaaagtcagagagatttctacctggtacttaacatcatatggaaattgatgctttagtgagggtgttggctatcctattgctaatttcctgcatccttttttcttctttatttttgtatagagacagggtctcgctatgttgcccaggctggtcttgttcctgggctcaagcagtcctcccgcctcggtctcccaaagtgctgggattacaggtgtgagccactgtgcccagcttatccttttttcattacacaaaaagactgaatttggttagttctaagttggaagataaagatggtatgcacaggaggcccttgggagccctcagataactttctcattcttccagaatcaggctgggatgcattctgtaaattttccctgcctaggatgtatacctgaggaataaggtaaggaagatgtcagcaagtcagtctctggtttacctgctagctggcatggatccttaaggaagcaggagggagttgggaagagaggaaggggtgaagttggtatcttttaaagcgagagtgattttacctcagattttgaagaatactaaggaatccagttgttggggtacatgctattattagaaggatctagataatttgtcctctgagtcatacttgacattgtacctgtggcacatcaatccgcactgtttgatactctggctgaatctcagctttcaccaacattgtcaaaggaccttttttagtgcccagccatgcctaagagtgtgtcatctgaagagggaagcatctgcatactgctgtcctgattgctcagtcctcactacctaccagacccgttggtaaggtacaaaagtacatgcttggaaaagcagtctgcaccaccagtgataagctgtgacagagtggaacagcctcaatgaaatgaaggaaggattgctacagtggcattaaggatggtctcttaatcctgtgttaaccactagattaactttacaatcaactcaaaatccttcaaaggctttccactttctttagtggcattcagaccccctctagtttgacccctacctccaacttgaacctctgttactcttccgtatgaacattttcctctagccctggactactagtaccgaagtcactagtcacataggactcatttgaaatatgactagtctcaattgagatgtaatgtaagtgtaaaatacacagcagatttctaagacagcacacaaaatgtaaaatatgtcaaaaatatttgatactgattacatgttgaaatatatgtgttgggttaaataaaatgcattaaagttaa

SEQ ID NO: 1701 - protein, 53 aa, Homo sapiens [sequence omitted]

SEQ ID NO: 1702 - DNA, 2779 bp, Homo sapiens
ggagaaatctaaccctgaggagagcctcagagccgagcagagccccagcatggaggagaacctgagcatagaggacctggaattgctagaggggcgtttccagcagtgtgtccaagctgtggcccagctggaagaggagagggatcagctcatccatgagcttgtattgctccgggaaccagccctgcaggaggtacagcaagtccatcaagacatcctggctgcctacaagctccatgcccaagcagagctggagagagatggcctaagggaggagatccggctggtcaagcagaagcttttcaaagtgacaaaggaatgtgtggcctaccaataccagctggagtgccgccagcaggacgtggctcagtttgccgatttccgggaagtgctgactacaagggcaacccagctctcagaggaactggcccagctccgggatgcctatcagaagcagaaggagcagctgcggcaacaactagaagcccctccaagccagagggatgggcactttctccaggaaagccggcgactctctgcccagtttgaaaatctcatggcagagagccgccaggacctggaggaggagtatgagcctcagttcctgcggctcctagagaggaaagaagctgggaccaaagctctgcagagaacccaggctgagatccaggaaatgaaggaggctctgagacccctgcaagcagaggcccggcagctccgcctgcaaaacaggaacctggaggaccagatcgcacttgtgaggcaaaaacgagatgaagaggtgcagcagtacagggaacagctggaggaaatggaagaacgccagaggcagttaagaaatggggtgcaactccagcaacagaagaacaaagagatggaacagctaaggctcagtcttgctgaagagctctctacttataaggctatgctactacccaagagcctggaacaggctgatgctcccacttctcaggcaggtggaatggagacacagtctcaaggggctgtttagaaatatatggccaaatctgtaacccggaaacagcaaaaaacttcttagcaaaggatcactaagtaccctttggatgtactcttccaaccagacaagagtgccagaaacttggcaagcaattcatcctgtggaagttgcaaatactggctgacctgcttaaaaagattctagagttggccggaggcagaacatgtcaactctttgctggattctatttcatctgctgttgatactgatctcaatgcaccaaggaaaggaaagatgagcctcctgtcttccagcaacaaccctcacatatgcactgagtgaaggatgaatgtatggacacatctgggagtattttaaagaatgtatcttgccttgtgttgacccaaaccaaaaacatttttgaggggcacatgtggggtcaaaaagatagccaatttccattacatgggtttacaatttccattcttttgtgccacgagtgttagaatttaaatgaatacttttacaaagtctactttttgttcaaggatatgctgacccatatagtttactcttaaaattgtgtcaaggtatttctcactatactctaaaacaactagacttgaaaagaaaccatttgagatttgaatctaatggttaacgctattcagattttcccaaagatcttacctcatgaaagtagttctgggtcagaatgatctactcagttaaaaaacaacaacaacaaaaaactaagcgattgggaaaaaacaggaattttatctggttattgcatctggtgatagaggccttcaaagcctattatttctaacctaagtaaaggccccagtgaaaaacatactggggaaataaaacctctgagaaaaggttcaagcaccttttccaaatttaaatcttgccttaaattctctctaccacactgcctttgacactcttggaagtccatgtagttctctacagatagacttcaaagaaacgttaccttatcaaagactaatctgtgccacctctgattcagtgttttatgtctttcactttccctgggaaggagtaaagttcttttctacagctctgggactattacatttaattctgctcttgatagtcaaagaccatggacaacaactgtcatctgaaggactcttctagaagccagagactggtgtttgatggatgttttatactaaataaaacccatcagcatggggttatgtagaaaagcaatttattccattttaagcacttacacagttagtcatggagagtaacaggcctgctggtgaaacaggtcacccaaaatggagatggcatcaaactagtggtcaaggactaactcctaaaaaaaaaaagcaactcttatcaaggattaatttaatttttaaaacaaatacaagttattgattcactcttctcaacttgacagtctacctgtggtataactgtcaggtaaaaacatacatctttacaacttggtggtcccaagttaaaaaaaaaaaaaaaaaaaccaacaacaaaaaaaaaaacaccatttcacagacaggaaataaacaacatgaaaacagctcaagaaatacactaacgagcaaaaatatatgaatatatggggaaagaggaacgtgttgttttgacttaactgaagaaaccaagaggaaactggtctacgtatgaaaatgtgcatcctggaaagtcaggtgtcaagattttcgagtaggaatctatatgacttgaatctccccctatttcctgaataaaagtgacatctttcagtatttatacttc

SEQ ID NO: 1703 - protein, 320 aa, Homo sapiens; identical to SEQ ID NO: 1697

SEQ ID NO: 1704 - DNA, 2699 bp, Homo sapiens
ggagaaatctaaccctgaggagagcctcagagccgagcagagccccagcatggaggagaacctgagcatagaggacctggaattgctagaggggcgtttccagcagtgtgtccaagctgtggcccagctggaagaggagagggatcagctcatccatgagcttgtattgctccgggaaccagccctgcaggaggtacagcaagtccatcaagacatcctggctgcctacaagctccatgcccaagcagagctggagagagatggcctaagggaggagatccggctggtcaagcagaagcttttcaaagtgacaaaggaatgtgtggcctaccaataccagctggagtgccgccagcaggacgtggctcagtttgccgatttccgggaagtgctgactacaagggcaacccagctctcagaggaactggcccagctccgggatgcctatcagaagcagaaggagcagctgcggcaacaactagaagcccctccaagccagagggatgggcactttctccaggaaagccggcgactctctgcccagtttgaaaatctcatggcagagagccgccaggacctggaggaggagtatgagcctcagttcctgcggctcctagagaggaaagaagctgggaccaaagctctgcagagaacccaggctgagatccaggaaatgaaggaggctctgagacccctgcaagcagaggcccggcagctccgcctgcaaaacaggaacctggaggaccagatcgcacttgtgaggcaaaaacgagatgaagaggtgcagcagtacagggaacagctggaggaaatggaagaacgccagaggcagttaagaaatggggtgcaactccagcaacagaagaacaaagagatggaacagctaaggctcagtcttgctgaagagctctctacttataagggctgtttagaaatatatggccaaatctgtaacccggaaacagcaaaaaacttcttagcaaaggatcactaagtaccctttggatgtactcttccaaccagacaagagtgccagaaacttggcaagcaattcatcctgtggaagttgcaaatactggctgacctgcttaaaaagattctagagttggccggaggcagaacatgtcaactctttgctggattctatttcatctgctgttgatactgatctcaatgcaccaaggaaaggaaagatgagcctcctgtcttccagcaacaaccctcacatatgcactgagtgaaggatgaatgtatggacacatctgggagtattttaaagaatgtatcttgccttgtgttgacccaaaccaaaaacatttttgaggggcacatgtggggtcaaaaagatagccaatttccattacatgggtttacaatttccattcttttgtgccacgagtgttagaatttaaatgaatacttttacaaagtctactttttgttcaaggatatgctgacccatatagtttactcttaaaattgtgtcaaggtatttctcactatactctaaaacaactagacttgaaaagaaaccatttgagatttgaatctaatggttaacgctattcagattttcccaaagatcttacctcatgaaagtagttctgggtcagaatgatctactcagttaaaaaacaacaacaacaaaaaactaagcgattgggaaaaaacaggaattttatctggttattgcatctggtgatagaggccttcaaagcctattatttctaacctaagtaaaggccccagtgaaaaacatactggggaaataaaacctctgagaaaaggttcaagcaccttttccaaatttaaatcttgccttaaattctctctaccacactgcctttgacactcttggaagtccatgtagttctctacagatagacttcaaagaaacgttaccttatcaaagactaatctgtgccacctctgattcagtgttttatgtctttcactttccctgggaaggagtaaagttcttttctacagctctgggactattacatttaattctgctcttgatagtcaaagaccatggacaacaactgtcatctgaaggactcttctagaagccagagactggtgtttgatggatgttttatactaaataaaacccatcagcatggggttatgtagaaaagcaatttattccattttaagcacttacacagttagtcatggagagtaacaggcctgctggtgaaacaggtcacccaaaatggagatggcatcaaactagtggtcaaggactaactcctaaaaaaaaaaagcaactcttatcaaggattaatttaatttttaaaacaaatacaagttattgattcactcttctcaacttgacagtctacctgtggtataactgtcaggtaaaaacatacatctttacaacttggtggtcccaagttaaaaaaaaaaaaaaaaaaaccaacaacaaaaaaaaaaacaccatttcacagacaggaaataaacaacatgaaaacagctcaagaaatacactaacgagcaaaaatatatgaatatatggggaaagaggaacgtgttgttttgacttaactgaagaaaccaagaggaaactggtctacgtatgaaaatgtgcatcctggaaagtcaggtgtcaagattttcgagtaggaatctatatgacttgaatctccccctatttcctgaataaaagtgacatctttcagtatttatacttc

SEQ ID NO: 1705 - protein, 314 aa, Homo sapiens; identical to SEQ ID NO: 1699

SEQ ID NO: 1706 - DNA, 1100 bp, Homo sapiens
tcctagaaaattagaaaaagcaacaatagttacttgtgtatccttttttcattacacaaaaagactgaatttggttagttctaagttggaagataaagatggtatgcacaggaggcccttgggagccctcagataactttctcattcttccagaatcaggctgggatgcattctgtaaattttccctgcctaggatgtatacctgaggaataaggtaaggaagatgtcagcaagtcagtctctggtttacctgctagctggcatggatccttaaggaagcaggagggagttgggaagagaggaaggggtgaagttggtatcttttaaagcgagagtgattttacctcagattttgaagaatactaaggaatccagttgttggggtacatgctattattagaaggatctagataatttgtcctctgagtcatacttgacattgtacctgtggcacatcaatccgcactgtttgatactctggctgaatctcagctttcaccaacattgtcaaaggaccttttttagtgcccagccatgcctaagagtgtgtcatctgaagagggaagcatctgcatactgctgtcctgattgctcagtcctcactacctaccagacccgttggtaaggtacaaaagtacatgcttggaaaagcagtctgcaccaccagtgataagctgtgacagagtggaacagcctcaatgaaatgaaggaaggattgctacagtggcattaaggatggtctcttaatcctgtgttaaccactagattaactttacaatcaactcaaaatccttcaaaggctttccactttctttagtggcattcagaccccctctagtttgacccctacctccaacttgaacctctgttactcttccgtatgaacattttcctctagccctggactactagtaccgaagtcactagtcacataggactcatttgaaatatgactagtctcaattgagatgtaatgtaagtgtaaaatacacagcagatttctaagacagcacacaaaatgtaaaatatgtcaaaaatatttgatactgattacatgttgaaatatatgtgttgggttaaataaaatgcattaaagttaa

SEQ ID NO: 1707 - protein, 35 aa, Homo sapiens
MVCTGGPWEPSDNFLILPESGWDAFCKFSLPRMYT

SEQ ID NO: 1708 - DNA, 2226 bp, Homo sapiens
cactgctctgccttacctctgtcttcttatttttcaaatgccttatacctaactcatagagatgtaaggactaaaggaattattttgtgtaaagaacttcaagtacatactagctattgttgatctatgaaatgtcccctcttttgcccaggctggggtagtcatgcctgttttcatcaggacagtgccttatcactacagctattacagtgcttataacattgaaatatgtttaattgatgccaagactgccacattttaacatctctgatcaggatgcatgttaaaatcaacagtgcttagattttacgaaatacattcattttgtctgttatgcttccttctggagtacaaactttttttaaggcggagtctttgtcgcccaggctggagtgcagtggcgcgatctcaacctccaccttgcgggttcaggcaattctgcctcagcccccgagtagctgggattacaggcatgcaccaccacgcccggctaattttttgtatttttagcgagacagggtttcaccgtgttagccaggatggtctcgatctcctgacctcatgatccactcgcctctgcctcccaaagtgctgggatcacaggcatgggccactgcacccggcctctggagtacaaactctttgagggcaggagcattacccccaccccgcaacacacacacacttttttttttcttttctgagacggaacaccgtcacaaaaaaaaaaaaaaaaaagtaagttgatgaaatagaactttagcaaacagtttaggaagccatttcagaaagaaaaattagggacctcagaccttgcttcctactttaatgatggtatagcaacaagagaagctattatactaccaagagtgtatcaggccagataaagtggctcacacctgtaatctcagcaactcgggaggctgaggcaggaagaccaagacttcctctcaatagagaaagattcatttgatagagattagatagacttctgaatattctttttaaaactttgtgtcataagattatctttggaaaacaatccttgggaagatgcacaaatcgtcaaatctgaaaccatcttaacctcttccttagagtagctttctaattattctccattgctctgcatctctagcccactttatatcctgccaccagtacttcttgtaatcccagcacattgggaggccgagacgggtggatcacgaggtcaggagttggagaccaacctggccaagatggtgaagccccatctctactaaaaatacaaaaattagcgaggcctggtggcgggcacctgtaatcccagctacttgggaggctgaggcaggagaatcacttgacccgggaggcggagatttcggtgagccaagatcatgccactgcactctagcctgagtgacagagcaagactccatctccaaagaaaaaaaaaaaaaaaagtagagaggcaggcagtggctcaagcctgtaatcccagcactttgggaggccgagccaggcagatcacctgaggtcaggagttcaagaccagctggctaacatggtaaaacttcatctctaccaaaaacacgaaaattagggccgggcgtggtgactcatgcctgtaatcccagcactttgggaggccgaggcaggcagactgcctgagctcaggagttcaagaccatcctgggcaatacggtgaaaccccgtccctactatacaaacaattggccgggctcagtggctcacacctataatcccagtactttgggaggccgaggcaggtggatcatgaggtcaggagatcaagaccatcctggctaacatagtgaaacactgtctctaataaaaatagaaaaaattagccagctatggtggcatgcacctgtagtcccagctactcgggaggctgaggcaggaaaatcgcttgaacccaggaggcagaggttgcagtgagcccagatcatgccactgcactccagcctgggtgacagagcgagactccttctcaaaaaacaaaaaaaaacaacaaaaaaaatttgccaggcgtggcactgtgcacctgtagtcccagctactcgggaggctgaggcaggagaactgcttgaacccgggaggtagaggttgcaatgagccgagatcacgctattgcactccagcctaggcaatagaagagactccgactaaaaaaaaattagccacgtccatggtgttaggcgcctgtaatcccagctactt

SEQ ID NO: 1709 - protein, 61 aa, Homo sapiens
MIHSPLPPKVLGSQAWATAPGLWSTNSLRAGALPPPRNTHTLFFFFSETEHRHKKKKKKVS

SEQ ID NO: 1710 - DNA, 1157 bp, Homo sapiens
cctttgagcagcccgcccaaccctgcctccaccctcccaggctggacagggaaggtgctccctggggcttcagaccccccttctgactccccctgcaacgggacctcacgaaaggaagggtggagagaaggaaaacaagagtagaggccaattctcctcttccaaagaactctggatccctaaatgaggcagaagccttgaacccagaagttactctatcttcagaggggtccttaaacctcgaagacattctctacctggaggacacaggtgaccttgatgagacactctatgtgcaagagactgagaaggcagaggaggccctgtatattgaggaggccatgcagccagatgaggctctgcatgtggaggagcctgggaatccagaggagacagtgtgtgtggaggaaaccacggagccagatcggatacagtttgtggaggggcccgtggagccaggaaagcccacaagcccagagcacgttgtttatgagggagagacagtcacaagggcggagaaatctaaccctgaggagagcctcagagccgagcagagccccagcatggaggagaacctgagcatagaggacctggaattgctagaggggcgtttccagcagtgtgtccaagctgtggcccagctggaagaggagagggatcagctcatccatgagcttgtattgctccgggaaccagccctgcaggaggtacagcaagtccatcaagacatcctggctgcctacaagctccatgcccaagcagagctggagagagatggcctaagggaggagatccggctggtcaagcagaagcttttcaaagtgacaaaggaatgtgtggcctaccaataccagctggagtgccgccagcaggacgtggctcagtttgccgatttccgggaagtgctgactacaagggcaacccagctctcagaggaactggcccagctccgggatgcctatcagaagcagaaggagcagctgcggcaacaactagaagcccctccaagccagagggatgggcactttctccaggaaagccggcgactctctgcccagtttgaaaatctcatggcagagagccgccaggacctggaggaggagtatgagcctcagttcctgcggctcctagagaggaaagaagctgggaccaaagct

SEQ ID NO: 1711 - protein, 271 aa, Homo sapiens
MQPDEALHVEEPGNPEETVCVEETTEPDRIQFVEGPVEPGKPTSPEHVVYEGETVTRAEKSNPEESLRAEQSPSMEENLSIEDLELLEGRFQQCVQAVAQLEEERDQLIHELVLLREPALQEVQQVHQDILAAYKLHAQAELERDGLREEIRLVKQKLFKVTKECVAYQYQLECRQQDVAQFADFREVLTTRATQLSEELAQLRDAYQKQKEQLRQQLEAPPSQRDGHFLQESRRLSAQFENLMAESRQDLEEEYEPQFLRLLERKEAGTK

SEQ ID NO: 1712 - DNA, 1539 bp, Homo sapiens
cggacacccccaaacactcgcgggagaggggtgctggctccctttgagcagcccgcccaaccctgcctccaccctcccaggctggacagggaaggtgctccctggggcttcagaccccccttctgactccccctgcaacgggacctcacgaaaggaagggtggagagaaggttcgggaagacgagggggctgggaggtttggaaagacagctccaggcccccgttcccacccccgccccaggctggtccgggaggggcagcctctccccgcccccaggtccgcgcggccgctccctcctcccccggcaggagccccggccaagtgggcgcgcccggcccggggccggccgggatccggtgtcggttgcagctggcagtgcggcgggcgcgggcgccggagcgaggggcccgcgggcccggctattaataacgcggccgccagcccggggtcgcgcagccatggccagcccggagccccggcgcggcggggacggcgccgcccaggccgcgaggaaaacaagagtagaggccaattctcctcttccaaagaactctggatccctaaatgaggcagaagccttgaacccagaagttactctatcttcagaggggtccttaaacctcgaagacattctctacctggaggacacaggtgaccttgatgagacactctatgtgcaagagactgagaaggcagaggaggccctgtatattgaggaggccatgcagccagatgaggctctgcatgtggaggagcctgggaatccagaggagacagtgtgtgtggaggaaaccacggagccagatcggatacagtttgtggaggggcccgtggagccaggaaagcccacaagcccagagcacgttgtttatgagggagagacagtcacaagggcggagaaatctaaccctgaggagagcctcagagccgagcagagccccagcatggaggagaacctgagcatagaggacctggaattgctagaggggcgtttccagcagtgtgtccaagctgtggcccagctggaagaggagagggatcagctcatccatgagcttgtattgctccgggaaccagccctgcaggaggtacagcaagtccatcaagacatcctggctgcctacaagctccatgcccaagcagagctggagagagatggcctaagggaggagatccggctggtcaagcagaagcttttcaaagtgacaaaggaatgtgtggcctaccaataccagctggagtgccgccagcaggacgtggctcagtttgccgatttccgggaagtgctgactacaagggcaacccagctctcagaggaactggcccagctccgggatgcctatcagaagcagaaggagcagctgcggcaacaactagaagcccctccaagccagagggatgggcactttctccaggaaagccggcgactctctgcccagtttgaaaatctcatggcagagagccgccaggacctggaggaggagtatgagcctcagttcctgcggctcctagagaggaaagaagctgggaccaaagct

SEQ ID NO: 1713 - protein, 359 aa, Homo sapiens
MASPEPRRGGDGAAQAARKTRVEANSPLPKNSGSLNEAEALNPEVTLSSEGSLNLEDILYLEDTGDLDETLYVQETEKAEEALYIEEAMQPDEALHVEEPGNPEETVCVEETTEPDRIQFVEGPVEPGKPTSPEHVVYEGETVTRAEKSNPEESLRAEQSPSMEENLSIEDLELLEGRFQQCVQAVAQLEEERDQLIHELVLLREPALQEVQQVHQDILAAYKLHAQAELERDGLREEIRLVKQKLFKVTKECVAYQYQLECRQQDVAQFADFREVLTTRATQLSEELAQLRDAYQKQKEQLRQQLEAPPSQRDGHFLQESRRLSAQFENLMAESRQDLEEEYEPQFLRLLERKEAGTK

SEQ ID NO: 1714 - DNA, 1468 bp, Homo sapiens
aagtggaaaaaggaatccgaaggaagaacgcctgaagcccaggtctgggaaggggcccagcagcttctctcttggggagaaagacgtcagtgctggtttgaccctcacactagtgggctgaggacgtggggggagggtctctgttgcccaggctggggtgcagagtggtgcagtcatggctcagcacagcctcgacctcccaggctcagagatggggtttcgccatgttgcccacgctggccttaaactcctggactcaagaggtcttggcctcccaaagtgctggattacagacatgagccaccgcacttgaccacggttatcttttttttttttttgagacggagtttcgctgttgttgcccaggctggagtgcaatggtgcaatctcgtctcactgcaacctctgcctctttgaagttcaagagattctcctgcctcagaaaacaagagtagaggccaattctcctcttccaaagaactctggatccctaaatgaggcagaagccttgaacccagaagttactctatcttcagaggggtccttaaacctcgaagacattctctacctggaggacacaggtgaccttgatgagacactctatgtgcaagagactgagaaggcagaggaggccctgtatattgaggaggccatgcagccagatgaggctctgcatgtggaggagcctgggaatccagaggagacagtgtgtgtggaggaaaccacggagccagatcggatacagtttgtggaggggcccgtggagccaggaaagcccacaagcccagagcacgttgtttatgagggagagacagtcacaagggcggagaaatctaaccctgaggagagcctcagagccgagcagagccccagcatggaggagaacctgagcatagaggacctggaattgctagaggggcgtttccagcagtgtgtccaagctgtggcccagctggaagaggagagggatcagctcatccatgagcttgtattgctccgggaaccagccctgcaggaggtacagcaagtccatcaagacatcctggctgcctacaagctccatgcccaagcagagctggagagagatggcctaagggaggagatccggctggtcaagcagaagcttttcaaagtgacaaaggaatgtgtggcctaccaataccagctggagtgccgccagcaggacgtggctcagtttgccgatttccgggaagtgctgactacaagggcaacccagctctcagaggaactggcccagctccgggatgcctatcagaagcagaaggagcagctgcggcaacaactagaagcccctccaagccagagggatgggcactttctccaggaaagccggcgactctctgcccagtttgaaaatctcatggcagagagccgccaggacctggaggaggagtatgagcctcagttcctgcggctcctagagaggaaagaagctgggaccaaagct

SEQ ID NO: 1715 - protein, 45 aa, Homo sapiens
MAQHSLDLPGSEMGFRHVAHAGLKLLDSRGLGLPKCWITDMSHRT

SEQ ID NO: 1716 - DNA, 1116 bp, Homo sapiens
agctaagtggaaaaaggaatccgaaggaagaacgcctgaagcccaggtctgggaaggggcccagcagcttctctcttggggagaaagacgaaaacaagagtagaggccaattctcctcttccaaagaactctggatccctaaatgaggcagaagccttgaacccagaagttactctatcttcagaggggtccttaaacctcgaagacattctctacctggaggacacaggtgaccttgatgagacactctatgtgcaagagactgagaaggcagaggaggccctgtatattgaggaggccatgcagccagatgaggctctgcatgtggaggagcctgggaatccagaggagacagtgtgtgtggaggaaaccacggagccagatcggatacagtttgtggaggggcccgtggagccaggaaagcccacaagcccagagcacgttgtttatgagggagagacagtcacaagggcggagaaatctaaccctgaggagagcctcagagccgagcagagccccagcatggaggagaacctgagcatagaggacctggaattgctagaggggcgtttccagcagtgtgtccaagctgtggcccagctggaagaggagagggatcagctcatccatgagcttgtattgctccgggaaccagccctgcaggaggtacagcaagtccatcaagacatcctggctgcctacaagctccatgcccaagcagagctggagagagatggcctaagggaggagatccggctggtcaagcagaagcttttcaaagtgacaaaggaatgtgtggcctaccaataccagctggagtgccgccagcaggacgtggctcagtttgccgatttccgggaagtgctgactacaagggcaacccagctctcagaggaactggcccagctccgggatgcctatcagaagcagaaggagcagctgcggcaacaactagaagcccctccaagccagagggatgggcactttctccaggaaagccggcgactctctgcccagtttgaaaatctcatggcagagagccgccaggacctggaggaggagtatgagcctcagttcctgcggctcctagagaggaaagaagctgggaccaaagct

SEQ ID NO: 1717 - protein, 271 aa, Homo sapiens; identical to SEQ ID NO: 1711

SEQ ID NO: 1718 - DNA, 395 bp, Homo sapiens
gctgtgtggggcagtctgggagaggagcgcctctgccactgtaacaactagcctttgctggactgcctcgcccactccagctggggtgcttcacttctgtgattgcctttaatgctccgaacagccctgggaagtagggccgatcacctccaattcacaggttcaaagtccctgggttggggacactgacggggctggacatggccagggattccaccaggggctttaagagtcatggaattgccgggcgctgtggctcacacctgtaatcccaggagtttgggaggctgaggcaggaggatcacttgagcccagaagcttgagaccagcctagacaacaacgtgagaccctgtctctacaaagaaataaaattagctgggtgtggtggtgcaca

SEQ ID NO: 1719 - protein, 38 aa, Homo sapiens
CSEQPWEVGPITSNSQVQSPWVGDTDGAGHGQGFHQGL

SEQ ID NO: 1720 - DNA, 1865 bp, Homo sapiens
gcggccgcccccggcatgggcaccgcgccgcagggggcctgacccgccgcccgctccgcccccgcctgccatggcggcccgcgcgccccccgccgcacctgcggccgaggagccggggaacccgggcggccccccgcgcaggaagaagtcccgctccggcgcgtccggcctccgccgcgccttcagctggctgcggggcaagcggcgcaagaagaaggcggcgggggccgagggcgccgaaccggccgccccccgggccaagaaggcggaggacaaggccaagagggccaagggcaaaggccgaggctctgccaaggctgagaatgacaaacatctaagtgtagggcctggccaggggccagggtctgcagtggatgagcaccaggacaacgtcttctttcccagtgggcgacccccccacctggaagagctgcacactcaggcccaggaggggctccgctccctacaacaccaagagaaacagaaactgaacaagggtggctgggaccatggagacacccagagtatccagtcctcccggacggggccggatgaagacaacatctccttctgcagtcagaccacatcctacgtggctgagagctccacagcagaggacgcgctctccatccgctcggagatgatccagcgcaaaggctccaccttccgaccccatgactcatttcccaaatctggaaagtcagggcggcgtcggcgggagcggcggagcactgtgctgggactcccgcagcatgtgcagaaggagcttggcctgaggaatgagcgtgaggcaccaggcacgccccgggctcctggtgcacgggatgccgtacgcatccccacagtggacggccgcccccgaggcacctcagggatgggggcccgggtgtccctgcaggcgctggaggcggaggcggaggctggcgctgagacagaggccatgctgcagcgccacattgaccgtgtctaccgggatgacacctttgttggccggtccacgggtacccgggccccaccattgacccggcccatgtccctagcagtgcctggattgacaggaggggcagggcctgcagagcccctgagcccggccatgtccatctccccccaggccacctacctgtcgaagttgattccacatgctgtgctgccgcctacagtggacgtggtggccctaggccgctgcagcctgcgcacactaagccgctgcagcctgcactcggccagcccagcctcagtccgctcgctggggcgcttctcctccgtctccagcccacagccccgcagccgccacccatcctcctccagtgacacctggagccactctcaatcctccgacaccattgtgtctgacggttccaccctctcctctaagggtggctctgagggccagccggagagctctacggctagcaatagcgtggtaccccctccccagggaggcagtgggaggggctctcccagtgggggcagcactgctgaggcctcagacacactcagcattcggagcagtgggcagttgtctggccggagtgtgtccctgcgtaagctgaagcggcctccaccccctccccgccggacccactccctccatcagcggggcttagcagtgcctgatgggccattagggttgccccctaagcctgagcgtaagcagcagccccagctgcctcggccacccaccactggtggctcagaaggggcgggggcagcaccctgtccacccaacccagccaacagctgggtacctggcttgtctccgggtggttcccggcgccccccacggtccccagaacggacactttcgccctccagtggatactcgagccaaagtggtactcccaccctccctcccaagggcctgg

SEQ ID NO: 1721 - protein, 597 aa, Homo sapiens
MAARAPPAAPAAEEPGNPGGPPRRKKSRSGASGLRRAFSWLRGKRRKKKAAGAEGAEPAAPRAKKAEDKAKRAKGKGRGSAKAENDKHLSVGPGQGPGSAVDEHQDNVFFPSGRPPHLEELHTQAQEGLRSLQHQEKQKLNKGGWDHGDTQSIQSSRTGPDEDNISFCSQTTSYVAESSTAEDALSIRSEMIQRKGSTFRPHDSFPKSGKSGRRRRERRSTVLGLPQHVQKELGLRNEREAPGTPRAPGARDAVRIPTVDGRPRGTSGMGARVSLQALEAEAEAGAETEAMLQRHIDRVYRDDTFVGRSTGTRAPPLTRPMSLAVPGLTGGAGPAEPLSPAMSISPQATYLSKLIPHAVLPPTVDVVALGRCSLRTLSRCSLHSASPASVRSLGRFSSVSSPQPRSRHPSSSSDTWSHSQSSDTIVSDGSTLSSKGGSEGQPESSTASNSVVPPPQGGSGRGSPSGGSTAEASDTLSIRSSGQLSGRSVSLRKLKRPPPPPRRTHSLHQRGLAVPDGPLGLPPKPERKQQPQLPRPPTTGGSEGAGAAPCPPNPANSWVPGLSPGGSRRPPRSPERTLSPSSGYSSQSGTPTLPPKG

SEQ ID NO: 1722 - DNA, 1759 bp, Homo sapiens
ccgcggtgcccgcccgcgagtctcgctgcctccctcccggggctgcgggcccggcggccgggctggctgggccgcgcttgggttcccgcgccggctcccgcacccgcaatggggaactcacaccacaagaggaaggcccccagcggtccccgggtccgcagcttctggcggttcgggcggtcggcgaagcggccggcaggctctgccaaggctgagaatgacaaacatctaagtgtagggcctggccaggggccagggtctgcagtggatgagcaccaggacaacgtcttctttcccagtgggcgacccccccacctggaagagctgcacactcaggcccaggaggggctccgctccctacaacaccaagagaaacagaaactgaacaagggtggctgggaccatggagacacccagagtatccagtcctcccggacggggccggatgaagacaacatctccttctgcagtcagaccacatcctacgtggctgagagctccacagcagaggacgcgctctccatccgctcggagatgatccagcgcaaaggctccaccttccgaccccatgactcatttcccaaatctggaaagtcagggcggcgtcggcgggagcggcggagcactgtgctgggactcccgcagcatgtgcagaaggagcttggcctgaggaatgagcgtgaggcaccaggcacgccccgggctcctggtgcacgggatgccgtacgcatccccacagtggacggccgcccccgaggcacctcagggatgggggcccgggtgtccctgcaggcgctggaggcggaggcggaggctggcgctgagacagaggccatgctgcagcgccacattgaccgtgtctaccgggatgacacctttgttggccggtccacgggtacccgggccccaccattgacccggcccatgtccctagcagtgcctggattgacaggaggggcagggcctgcagagcccctgagcccggccatgtccatctccccccaggccacctacctgtcgaagttgattccacatgctgtgctgccgcctacagtggacgtggtggccctaggccgctgcagcctgcgcacactaagccgctgcagcctgcactcggccagcccagcctcagtccgctcgctggggcgcttctcctccgtctccagcccacagccccgcagccgccacccatcctcctccagtgacacctggagccactctcaatcctccgacaccattgtgtctgacggttccaccctctcctctaagggtggctctgagggccagccggagagctctacggctagcaatagcgtggtaccccctccccagggaggcagtgggaggggctctcccagtgggggcagcactgctgaggcctcagacacactcagcattcggagcagtgggcagttgtctggccggagtgtgtccctgcgtaagctgaagcggcctccaccccctccccgccggacccactccctccatcagcggggcttagcagtgcctgatgggccattagggttgccccctaagcctgagcgtaagcagcagccccagctgcctcggccacccaccactggtggctcagaaggggcgggggcagcaccctgtccacccaacccagccaacagctgggtacctggcttgtctccgggtggttcccggcgccccccacggtccccagaacggacactttcgccctccagtggatactcgagccaaagtggtactcccaccctccctcccaagggcctgg

SEQ ID NO: 1723 - protein, 549 aa, Homo sapiens
MGNSHHKRKAPSGPRVRSFWRFGRSAKRPAGSAKAENDKHLSVGPGQGPGSAVDEHQDNVFFPSGRPPHLEELHTQAQEGLRSLQHQEKQKLNKGGWDHGDTQSIQSSRTGPDEDNISFCSQTTSYVAESSTAEDALSIRSEMIQRKGSTFRPHDSFPKSGKSGRRRRERRSTVLGLPQHVQKELGLRNEREAPGTPRAPGARDAVRIPTVDGRPRGTSGMGARVSLQALEAEAEAGAETEAMLQRHIDRVYRDDTFVGRSTGTRAPPLTRPMSLAVPGLTGGAGPAEPLSPAMSISPQATYLSKLIPHAVLPPTVDVVALGRCSLRTLSRCSLHSASPASVRSLGRFSSVSSPQPRSRHPSSSSDTWSHSQSSDTIVSDGSTLSSKGGSEGQPESSTASNSVVPPPQGGSGRGSPSGGSTAEASDTLSIRSSGQLSGRSVSLRKLKRPPPPPRRTHSLHQRGLAVPDGPLGLPPKPERKQQPQLPRPPTTGGSEGAGAAPCPPNPANSWVPGLSPGGSRRPPRSPERTLSPSSGYSSQSGTPTLPPKG

SEQ ID NO: 1724 - DNA, 991 bp, Homo sapiens
cggggctgcgggcccggcggccgggctggctgggccgcgcttgggttcccgcgccggctcccgcacccgcaatggggaactcacaccacaagaggaaggcccccagcggtccccgggtccgcagcttctggcggttcgggcggtcggcgaagcggccggcaggctctgccaaggctgagaatgacaaacatctaagtgtagggcctggccaggggccagggtctgcagtggatgagcaccaggacaacgtcttctttcccagtgggcgacccccccacctggaagagctgcacactcaggcccaggaggggctccgctccctacaacaccaagagaaacagaaactgaacaagggtggctgggaccatggagacacccagagtatccagtcctcccggacggggccggatgaagacaacatctccttctgcagtcagaccacatcctacgtggctgagagctccacagcagaggacgcgctctccatccgctcggagatgatccagcgcaaaggtggattcatgggcaggggagagggacagtgggctccattgggtcccagcatctgtagcttcttttcctccttatccagtgtttcaccaggctctctgattcaatgaattcgggaaacacagtaccctgtgtcctcttgcacattcgtgatacacactaactataaagcagttaagagttagaaaatcttggcggccgggtgcggtggctcacgcctgtaatcccagcactttgggaggtcgaggtgggcgggtcacgaggtcaggagatcgagaccatcctggctaacacggtgaatgaaaccccgtctctactaaaaatacaaaaaattagccttgcctgatggcgggtgcctgtagtcccagctacttgggaggctgaggcaggagaatggcgtgaacccaggaggtggagcttgcagtgagccgagattgcaccactgcactccagcctggtcgacagtgtgagactccatctc

SEQ ID NO: 1725 - protein, 182 aa, Homo sapiens
MGNSHHKRKAPSGPRVRSFWRFGRSAKRPAGSAKAENDKHLSVGPGQGPGSAVDEHQDNVFFPSGRPPHLEELHTQAQEGLRSLQHQEKQKLNKGGWDHGDTQSIQSSRTGPDEDNISFCSQTTSYVAESSTAEDALSIRSEMIQRKGGFMGRGEGQWAPLGPSICSFFSSLSSVSPGSLIQ

SEQ ID NO: 1726 - DNA, 573 bp, Homo sapiens
gtctggagccggtgctctgcggcggggcgggagggctcgcatccccatagtgctgggttacagtgaaggtacgccccgcgctctgctctggagaggcagggtgggatagggaacgtctcgagtggcgcccgcagtcatggtggtgttcgttggccgccgcctcccggcgctcctagggctgtttaagaagaagggctctgccaaggctgagaatgacaaacatctaagtgtagggcctggccaggggccagggtctgcagtggatgagcaccaggacaacgtcttctttcccagtgggcgacccccccacctggaagagctgcacactcaggcccaggaggggctccgctccctacaacaccaagagaaacagaaactgaacaagggtggctgggaccatggagacacccagagtatccagtcctcccggacggggccggatgaagacaacatctccttctgcagtcagaccacatcctacgtggctgagagctccacagcagaggacgcgctctccatccgctcggagatgatccagcgcaaagactcacagaaagagctggcctgaccacc

SEQ ID NO: 1727 - protein, 143 aa, Homo sapiens
MVVFVGRRLPALLGLFKKKGSAKAENDKHLSVGPGQGPGSAVDEHQDNVFFPSGRPPHLEELHTQAQEGLRSLQHQEKQKLNKGGWDHGDTQSIQSSRTGPDEDNISFCSQTTSYVAESSTAEDALSIRSEMIQRKDSQKELA

SEQ ID NO: 1728 - DNA, 5295 bp, Homo sapiens
ggctcgcatccccatagtgctgggttacagtgaaggtacgccccgcgctctgctctggagaggcagggtgggatagggaacgtctcgagtggcgcccgcagtcatggtggtgttcgttggccgccgcctcccggcgctcctagggctgtttaagaagaagggctctgccaaggctgagaatgacaaacatctaagtgtagggcctggccaggggccagggtctgcagtggatgagcaccaggacaacgtcttctttcccagtgggcgacccccccacctggaagagctgcacactcaggcccaggaggggctccgctccctacaacaccaagagaaacagaaactgaacaagggtggctgggaccatggagacacccagagtatccagtcctcccggacggggccggatgaagacaacatctccttctgcagtcagaccacatcctacgtggctgagagctccacagcagaggacgcgctctccatccgctcggagatgatccagcgcaaaggctccaccttccgaccccatgactcatttcccaaatctggaaagtcagggcggcgtcggcgggagcggcggagcactgtgctgggactcccgcagcatgtgcagaaggagcttggcctgaggaatgagcgtgaggcaccaggcacgccccgggctcctggtgcacgggatgccgtacgcatccccacagtggacggccgcccccgaggcacctcagggatgggggcccgggtgtccctgcaggcgctggaggcggaggcggaggctggcgctgagacagaggccatgctgcagcgccacattgaccgtgtctaccgggatgacacctttgttggccggtccacgggtacccgggccccaccattgacccggcccatgtccctagcagtgcctggattgacaggaggggcagggcctgcagagcccctgagcccggccatgtccatctccccccaggccacctacctgtcgaagttgattccacatgctgtgctgccgcctacagtggacgtggtggccctaggccgctgcagcctgcgcacactaagccgctgcagcctgcactcggccagcccagcctcagtccgctcgctggggcgcttctcctccgtctccagcccacagccccgcagccgccacccatcctcctccagtgacacctggagccactctcaatcctccgacaccattgtgtctgacggttccaccctctcctctaagggtggctctgagggccagccggagagctctacggctagcaatagcgtggtaccccctccccagggaggcagtgggaggggctctcccagtgggggcagcactgctgaggcctcagacacactcagcattcggagcagtgggcagttgtctggccggagtgtgtccctgcgtaagctgaagcggcctccaccccctccccgccggacccactccctccatcagcggggcttagcagtgcctgatgggccattagggttgccccctaagcctgagcgtaagcagcagccccagctgcctcggccacccaccactggtggctcagaaggggcgggggcagcaccctgtccacccaacccagccaacagctgggtacctggcttgtctccgggtggttcccggcgccccccacggtccccagaacggacactttcgccctccagtggatactcgagccaaagtggtactcccaccctccctcccaagggcctggcaggtccccctgcttccccaggcaaggcccagccccctaaaccagagcgtgtcacgtctcttcgctcccctggggcctccgtctcctcttccctcacgtctttatgttcctcctcctctgacccagccccctcagaccgctctgggccacagatattgacccccctgggtgacaggtttgtcatacctcctcaccccaaggtgcctgcccccttctccccacctccctccaagcccaggagccctaacccagctgcccctgctctagccgcccctgctgtggttcctgggcctgtttctaccactgacgccagtcctcagtcccctcccactccccagacaaccttgactccactgcaggagtctcctgtcatctccaaagaccagtcacccccaccttccccacccccatcttatcatccacccccaccacccactaagaagccagaggtggttgtggaggcaccatctgcctcagagactgctgaggagcccctccaagatcccaactggccccctcccccaccccctgcccctgaggagcaggacctgtccatggctgacttccccccaccagaggaggcttttttctctgtggccagccctgagcctgcaggcccttcaggctccccagagcttgtcagctccccggctgcttcgtcctcctcagctactgctttgcagattcagcccccgggtagcccagaccctcctccagctccgccagccccagctcctgctagttccgccccagggcatgtggccaagctccctcagaaggaaccggtgggctgtagcaagggtggtgggcctcccagggaggacgtaggtgcgcccctggtcacgccctcgctcctgcagatggtgcggctgcgctccgtgggtgctccaggaggggctcccaccccagcactggggccatcggccccccagaaaccactgcgaagggccctgtcagggcgggccagcccagtgcctgccccctcctcagggctccatgctgcggtccgactcaaggcctgcagcctggccgccagtgaaggcctctcaagtgctcagcccaacggaccgcctgaggcagagccacggcctccccagtcccctgcctcaacggccagtttcatcttctccaagggctctaggaagctgcagctggagcggcccgtgtcccctgagacccaggctgacctccagcggaatctggtggcagaactccggagcatctcagagcagcggccaccccaggccccaaagaagtcacctaaggctcccccacctgtggcccgcaagccgtctgtgggagtccccccacccgcctcccccagttaccctcgagctgagccccttactgctcctcccaccaatgggctccctcacacccaggacaggactaagagggagctggcggagaatggaggtgtcctgcagctggtgggcccagaggagaagatgggcctcccgggctcagactcacagaaagagctggcctgaccaccaggcacctcactggcactgctgacccatcccagaaacacaatctcagggacccgagcagctccaaggacgagaggatacagcagacacaacctaatagagagggcgcctgcagccttaacctccacggccttcgatacttatgcaagcctggtgttgctcctgtcctcagagtcatcctgcgctcatgccttttcccgaatgggttcacctctggcagttgccgcttcagtcttggccttagcctcatcttgaagtgggtagctggcgggagagggtggctgcgccccctgctggccctgaggctgcagagttgggagcaggacacctcacctgagtttcattttttttcatgtccaaaccatgcacatactatagtccagaatcaaagcacttttgaaaagtggctgcatggccatcctccagggcccaggaagttgcattccaagggcctgtttacatggcagcagaatccatccccggcagtcagcccatagcttgggaccagtctgtgccctcctgcccagtccagtttactcctcttggttcctgaaggtggccaagtcattgtgttcccacaggcttctctaggctgggggcaggtgtggggctgtggaattccaaagcacaaaaggtgcagaggggattggccttcctgtgcctcaactcaccaaccaccctcctgccttccagttctgccaggtgctccatgctggggacaagtaggagactgccagggcccaaagaaatgggtgagcagtagagtcatctcggggcacttggcagtgtcaagcacctgccccttgcctccttgaccacactggggtgggtgggcccccagcacttcagaggcaggagcctttgggctgagcaagcactgaggaggtggatggaagggagcatctggagggggggagcttccttgagcagtgggcccaggcctggccctccacacttcattctctgacctttctctctcctcatttcggtgcatgtcctttctgcagctgcctttcagcacaggtggttccactgggggcagctaacgctgagtgacaaggatgggaagccacaggtgcattttactcaagtcttctctagtcaatgaggggcacccagtgcttctagggcaggctgggtggtggtcccctaggtatcagcctctcttactgtactctccgggaatgttaacctttctattttcagcctgtgccacctgtctaggcaagctggcttccccattggcccctgtgggtccacagcagcgtggctgccccccagggccaccgcttctttcttgatcctctttccttaacagtgacttgggcttgagtctggcaaggaaccttgcttttagcttcaccaccaaggagagaggttgacatgacctccccgccccctcaccaaggctgggaacagaggggatgtggtgagagccaggttcctctggccctctccagggtgttttccactagtcactactgtcttctccttgtagctaatcaatcaatattcttcccttgcctgtgggcagtggagagtgctgctgggtgtacgctgcacctgcccactgagttggggaaagaggataatcagtgagcactgttctgctcagagctcctgatctaccccaccccctaggatccaggactgggtcaaagctgcatgaaaccaggccctggcagcaacctgggaatggctggaggtgggagagaacctgacttctctttccctctccctcctccaacattactggaactctatcctgttaggatcttctgagcttgtttccctgctgggtgggacagaggacaaaggagaagggagggtctagaagaggcagcccttctttgtcctctggggtaaatgagcttgacctagagtaaatggagagaccaaaagcctctgatttttaatttccataaaatgttagaagtatatatatacatatatatatttctttaaatttttgagtctttgatatgtctaaaaatccattccctctgccctgaagcctgagtgagacacatgaagaaaactgtgtttcatttaaagatgttaattaaatgattgaaacttgg

SEQ ID NO: 1729 - protein, 1035 aa, Homo sapiens
MVVFVGRRLPALLGLFKKKGSAKAENDKHLSVGPGQGPGSAVDEHQDNVFFPSGRPPHLEELHTQAQEGLRSLQHQEKQKLNKGGWDHGDTQSIQSSRTGPDEDNISFCSQTTSYVAESSTAEDALSIRSEMIQRKGSTFRPHDSFPKSGKSGRRRRERRSTVLGLPQHVQKELGLRNEREAPGTPRAPGARDAVRIPTVDGRPRGTSGMGARVSLQALEAEAEAGAETEAMLQRHIDRVYRDDTFVGRSTGTRAPPLTRPMSLAVPGLTGGAGPAEPLSPAMSISPQATYLSKLIPHAVLPPTVDVVALGRCSLRTLSRCSLHSASPASVRSLGRFSSVSSPQPRSRHPSSSSDTWSHSQSSDTIVSDGSTLSSKGGSEGQPESSTASNSVVPPPQGGSGRGSPSGGSTAEASDTLSIRSSGQLSGRSVSLRKLKRPPPPPRRTHSLHQRGLAVPDGPLGLPPKPERKQQPQLPRPPTTGGSEGAGAAPCPPNPANSWVPGLSPGGSRRPPRSPERTLSPSSGYSSQSGTPTLPPKGLAGPPASPGKAQPPKPERVTSLRSPGASVSSSLTSLCSSSSDPAPSDRSGPQILTPLGDRFVIPPHPKVPAPFSPPPSKPRSPNPAAPALAAPAVVPGPVSTTDASPQSPPTPQTTLTPLQESPVISKDQSPPPSPPPSYHPPPPPTKKPEVVVEAPSASETAEEPLQDPNWPPPPPPAPEEQDLSMADFPPPEEAFFSVASPEPAGPSGSPELVSSPAASSSSATALQIQPPGSPDPPPAPPAPAPASSAPGHVAKLPQKEPVGCSKGGGPPREDVGAPLVTPSLLQMVRLRSVGAPGGAPTPALGPSAPQKPLRRALSGRASPVPAPSSGLHAAVRLKACSLAASEGLSSAQPNGPPEAEPRPPQSPASTASFIFSKGSRKLQLERPVSPETQADLQRNLVAELRSISEQRPPQAPKKSPKAPPPVARKPSVGVPPPASPSYPRAEPLTAPPTNGLPHTQDRTKRELAENGGVLQLVGPEEKMGLPGSDSQKELA

SEQ ID NO: 1730 - DNA, 2912 bp, Homo sapiens
ctgacttcaaaatttctgaggagtgcatcgcacagtggaagcaaaccaacttcatgaccaagctgggctccatttcctgtaaatcgctgaaaggggggaacattagctagccagcccagcatcttccccccttcttccaccactgagtcatctgctgtctcttcaaactcggcaaggggcagcttaccctccccagaacccaggatcatcctgtctggctgcagtgagagaccaacccctaacaagggctgggccacagcagggagtccagccctaccttcttcccttggcagctggagaaatctggtttcaatataactcatttaaaaatttatgccacagtccttataattggaaaaatactggtgcccaggttttcttggagttatccaagcagctgcgcccctagctgggatctggtacctggactaggctaattacagcttctccccaacaggaaactgtgggatttgaaaaggaaagggaagggaaaacagagaacctagtggtctaccaagtggttggcaactttcccaatgtctgcttactctgaggcttggcactgggggccagggcctgccccagggctcctggaatttcccttgatccagctaggctgggacactccctaaatcagctgcgtgttgttagcatcaggcagaatgaatggcagagagtgattctgtcttcatagagggtggggtacttctccataaggcatctcagtcaaatccccatcactgtcataaattcaaataaaatgtctgaacaagggtgtctggatgtgagctggaccatctcaggagagaacacaagtgtgaggcagctgctggcccctcacctagtctggggttcctttaccctgtaatggggggtggggggtagaagatggacaagacaccttaacagtccctttggcagtactaggcagaagaggcccatacttgggtccaatgtgtgcagcaggcaaaacattttcccttctaaatgtgggcccagaccactgccctgtcccccccacattaagaagcagtagccacagccaagtttcaatcatttaattaacatctttaaatgaaacacagttttcttcatgtgtctcactcaggcttcagggcagagggaatggatttttagacatatcaaagactcaaaaatttaaagaaatatatatatgtatatatatacttctaacattttatggaaattaaaaatcagaggcttttggtctctccatttactctaggtcaagctcatttaccccagaggacaaagaagggctgcctcttctagaccctcccttctcctttgtcctctgtcccacccagcagggaaacaagctcagaagatcctaacaggatagagttccagtaatgttggaggagggagagggaaagagaagtcaggttctctcccacctccagccattcccaggttgctgccagggcctggtttcatgcagctttgacccagtcctggatcctagggggtggggtagatcaggagctctgagcagaacagtgctcactgattatcctctttccccaactcagtgggcaggtgcagcgtacacccagcagcactctccactgcccacaggcaagggaagaatattgattgattagctacaaggagaagacagtagtgactagtggaaaacaccctggagagggccagaggaacctggctctcaccacatcccctctgttcccagccttggtgagggggcggggaggtcatgtcaacctctctccttggtggtgaagctaaaagcaaggttccttgccagactcaagcccaagtcactgttaaggaaagaggatcaagaaagaagcggtggccctggggggcagccacgctgctgtggacccacaggggccaatggggaagccagcttgcctagacaggtggcacaggctgaaaatagaaaggttaacattcccggagagtacagtaagagaggctgatacctaggggaccaccacccagcctgccctagaagcactgggtgcccctcattgactagagaagacttgagtaaaatgcacctgtggcttcccatccttgtcactcagcgttagctgcccccagtggaaccacctgtgctgaaaggcagctgcagaaaggacatgcaccgaaatgaggagagagaaaggtcagagaatgaagtgtggagggccaggcctgggcccactgctcaaggaagctccccccctccagatgctcccttccatccacctcctcagtgcttgctcagcccaaaggctcctgcctctgaagtgctgggggcccacccaccccagtgtggtcaaggaggcaaggggcaggtgcttgacactgccaagtgccccgagatgactctactgctcacccatttctttgggccctggcagtctcctacttgtccccagcatggagcacctggcagaactggaaggcaggagggtggttggtgagttgaggcacaggaaggccaatcccctctgcaccttttgtgctttggaattccacagccccacacctgcccccagcctagagaagcctgtgggaacacaatgacttggccaccttcaggaaccaagaggagtaaactggactgggcaggagggcacagactggtcccaagctatgggctgactgccggggatggattctgctgccatgtaaacaggcccttggaatgcaacttcctgggccctggaggatggccatgcagccacttttcaaaagtgctttgattctggactatagtatgtgcatggtttggacatgaaaaaaaatgaaactcaggtgaggtgtcctgctcccaactctgcagcctcagggccagcagggggcgcagccaccctctcccgccagctacccacttcaagatgaggctaaggccaagactgaagcggcaactgccagag

SEQ ID NO: 1731 - protein, 108 aa, Homo sapiens
MHRNEERERSENEVWRARPGPTAQGSSPPPDAPFHPPPQCLLSPKAPASEVLGAHPPQCGQGGKGQVLDTAKCPEMTLLLTHFFGPWQSPTCPQHGAPGRTGRQEGGW

SEQ ID NO: 1732 - DNA, 2781 bp, Homo sapiens
caggctgacttcaaaatttctgaggagtgcatcgcacagtggaagcaaaccaacttcatgaccaagctgggctccatttcctgtaaatcgctgaaaggggggaacattagctagccagcccagcatcttccccccttcttccaccactgagtcatctgctgtctcttcagtctgctccatccatcacccatttacccatctctcaggacacggaagcagcgggtttggactctttattcggtgcagaactcggcaaggggcagcttaccctccccagaacccaggatcatcctgtctggctgcagtgagagaccaacccctaacaagggctgggccacagcagggagtccagccctaccttcttcccttggcagctggagaaatctggtttcaatataactcatttaaaaatttatgccacagtccttataattggaaaaatactggtgcccaggttttcttggagttatccaagcagctctaggctgggacactccctaaatcagctgcgtgttgttagcatcaggcagaatgaatggcagagagtgattctgtcttcatagagggtggggtacttctccataaggcatctcagtcaaatccccatcactgtcataaattcaaataaaatgtctgaacaagggtgtctggatgtgagctggaccatctcaggagagaacacaagtgtgaggcagctgctggcccctcacctagtctggggttcctttaccctgtaatggggggtggggggtagaagatggacaagacaccttaacagtccctttggcagtactaggcagaagaggcccatacttgggtccaatgtgtgcagcaggcaaaacattttcccttctaaatgtgggcccagaccactgccctgtcccccccacattaagaagcagtagccacagccaagtttcaatcatttaattaacatctttaaatgaaacacagttttcttcatgtgtctcactcaggcttcagggcagagggaatggatttttagacatatcaaagactcaaaaatttaaagaaatatatatatgtatatatatacttctaacattttatggaaattaaaaatcagaggcttttggtctctccatttactctaggtcaagctcatttaccccagaggacaaagaagggctgcctcttctagaccctcccttctcctttgtcctctgtcccacccagcagggaaacaagctcagaagatcctaacaggatagagttccagtaatgttggaggagggagagggaaagagaagtcaggttctctcccacctccagccattcccaggttgctgccagggcctggtttcatgcagctttgacccagtcctggatcctagggggtggggtagatcaggagctctgagcagaacagtgctcactgattatcctctttccccaactcagtgggcaggtgcagcgtacacccagcagcactctccactgcccacaggcaagggaagaatattgattgattagctacaaggagaagacagtagtgactagtggaaaacaccctggagagggccagaggaacctggctctcaccacatcccctctgttcccagccttggtgagggggcggggaggtcatgtcaacctctctccttggtggtgaagctaaaagcaaggttccttgccagactcaagcccaagtcactgttaaggaaagaggatcaagaaagaagcggtggccctggggggcagccacgctgctgtggacccacaggggccaatggggaagccagcttgcctagacaggtggcacaggctgaaaatagaaaggttaacattcccggagagtacagtaagagaggctgatacctaggggaccaccacccagcctgccctagaagcactgggtgcccctcattgactagagaagacttgagtaaaatgcacctgtggcttcccatccttgtcactcagcgttagctgcccccagtggaaccacctgtgctgaaaggcagctgcagaaaggacatgcaccgaaatgaggagagagaaaggtcagagaatgaagtgtggagggccaggcctgggcccactgctcaaggaagctccccccctccagatgctcccttccatccacctcctcagtgcttgctcagcccaaaggctcctgcctctgaagtgctgggggcccacccaccccagtgtggtcaaggaggcaaggggcaggtgcttgacactgccaagtgccccgagatgactctactgctcacccatttctttgggccctggcagtctcctacttgtccccagcatggagcacctggcagaactggaaggcaggagggtggttggtgagttgaggcacaggaaggccaatcccctctgcaccttttgtgctttggaattccacagccccacacctgcccccagcctagagaagcctgtgggaacacaatgacttggccaccttcaggaaccaagaggagtaaactggactgggcaggagggcacagactggtcccaagctatgggctgactgccggggatggattctgctgccatgtaaacaggcccttggaatgcaacttcctgggccctggaggatggccatgcagccacttttcaaaagtgctttgattctggactatagtatgtgcatggtttggacatgaaaaaaaatgaaactcaggtgaggtgtcctgctcccaactctgcagcctcagggccagcagggggcgcagccaccctctcccgccagctacccacttcaagatgaggctaaggccaagactgaagcggcaactgccagag

SEQ ID NO: 1733 - protein, 108 aa, Homo sapiens; identical to SEQ ID NO: 1731

SEQ ID NO: 1734 - DNA, 2638 bp, Homo sapiens
ccagatgcagacagcctgtatgtagagaagattgacgtgggggaagctgaaccacggactgtggtgagcggcctggtacagttcgtgcccaaggaggaactgcaggacaggctggtagtgcagctgcgcccctagctgggatctggtacctggactaggctaattacagcttctccccaacaggaaactgtgggatttgaaaaggaaagggaagggaaaacagagaacctagtggtctaccaagtggttggcaactttcccaatgtctgcttactctgaggcttggcactgggggccagggcctgccccagggctcctggaatttcccttgatccagctaggctgggacactccctaaatcagctgcgtgttgttagcatcaggcagaatgaatggcagagagtgattctgtcttcatagagggtggggtacttctccataaggcatctcagtcaaatccccatcactgtcataaattcaaataaaatgtctgaacaagggtgtctggatgtgagctggaccatctcaggagagaacacaagtgtgaggcagctgctggcccctcacctagtctggggttcctttaccctgtaatggggggtggggggtagaagatggacaagacaccttaacagtccctttggcagtactaggcagaagaggcccatacttgggtccaatgtgtgcagcaggcaaaacattttcccttctaaatgtgggcccagaccactgccctgtcccccccacattaagaagcagtagccacagccaagtttcaatcatttaattaacatctttaaatgaaacacagttttcttcatgtgtctcactcaggcttcagggcagagggaatggatttttagacatatcaaagactcaaaaatttaaagaaatatatatatgtatatatatacttctaacattttatggaaattaaaaatcagaggcttttggtctctccatttactctaggtcaagctcatttaccccagaggacaaagaagggctgcctcttctagaccctcccttctcctttgtcctctgtcccacccagcagggaaacaagctcagaagatcctaacaggatagagttccagtaatgttggaggagggagagggaaagagaagtcaggttctctcccacctccagccattcccaggttgctgccagggcctggtttcatgcagctttgacccagtcctggatcctagggggtggggtagatcaggagctctgagcagaacagtgctcactgattatcctctttccccaactcagtgggcaggtgcagcgtacacccagcagcactctccactgcccacaggcaagggaagaatattgattgattagctacaaggagaagacagtagtgactagtggaaaacaccctggagagggccagaggaacctggctctcaccacatcccctctgttcccagccttggtgagggggcggggaggtcatgtcaacctctctccttggtggtgaagctaaaagcaaggttccttgccagactcaagcccaagtcactgttaaggaaagaggatcaagaaagaagcggtggccctggggggcagccacgctgctgtggacccacaggggccaatggggaagccagcttgcctagacaggtggcacaggctgaaaatagaaaggttaacattcccggagagtacagtaagagaggctgatacctaggggaccaccacccagcctgccctagaagcactgggtgcccctcattgactagagaagacttgagtaaaatgcacctgtggcttcccatccttgtcactcagcgttagctgcccccagtggaaccacctgtgctgaaaggcagctgcagaaaggacatgcaccgaaatgaggagagagaaaggtcagagaatgaagtgtggagggccaggcctgggcccactgctcaaggaagctccccccctccagatgctcccttccatccacctcctcagtgcttgctcagcccaaaggctcctgcctctgaagtgctgggggcccacccaccccagtgtggtcaaggaggcaaggggcaggtgcttgacactgccaagtgccccgagatgactctactgctcacccatttctttgggccctggcagtctcctacttgtccccagcatggagcacctggcagaactggaaggcaggagggtggttggtgagttgaggcacaggaaggccaatcccctctgcaccttttgtgctttggaattccacagccccacacctgcccccagcctagagaagcctgtgggaacacaatgacttggccaccttcaggaaccaagaggagtaaactggactgggcaggagggcacagactggtcccaagctatgggctgactgccggggatggattctgctgccatgtaaacaggcccttggaatgcaacttcctgggccctggaggatggccatgcagccacttttcaaaagtgctttgattctggactatagtatgtgcatggtttggacatgaaaaaaaatgaaactcaggtgaggtgtcctgctcccaactctgcagcctcagggccagcagggggcgcagccaccctctcccgccagctacccacttcaagatgaggctaaggccaagactgaagcggcaactgccagag

SEQ ID NO: 1735 - protein, 108 aa, Homo sapiens; identical to SEQ ID NO: 1731

SEQ ID NO: 1736 - DNA, 4320 bp, Homo sapiens
ttcagaaagtggtggagggaagacttcctttttcccagagacagaaggttatgcacccagtggcctgggaccattgttctgggctttttttcccttcgacatggatttgcttctcactgtgtaccccaaccaccaaaaccaccctgagatcaatgctggtgctcctgcatcagatggcttagagatccttccacctcttaacacaagcatctaggtccactttactcaaatctggcctcagttgagagcagagtataccatcagagcccattctcctgtctgctgtctgggacgtggaaagaaagttagctctagggggtctttccaggggcctctgtaaggagtggatgctcctttccggaatccaagagttcaccaggctgcttctctaatggacgatgatcctcttcctcctgacgtctctccctggcagcacccagatgcagacagcctgtatgtagagaagattgacgtgggggaagctgaaccacggactgtggtgagcggcctggtacagttcgtgcccaaggaggaactgcaggacaggctggtagtggtgctgtgcaacctgaaaccccagaagatgagaggagtcgagtcccaaggcatgcttctgtgtgcttctatgtgagtgaggacttggagtggggcacaggacctggggaggccaggaagagtagggaatcagcccatatgatgtccttccacacaccaggtggaagctctgagaacacgtgcctcttccttgctgatgccaaaagttgatgcatgaaggacttatcgtacaagtactgttaatgaagcattttacctacagttaattttgttaaaatagaaatggagggctcaaaccagtacatacccaagtcttactactagtaaggagtggagcagggattcaaatcccagttttgatgtctataaagtcctcgctacgttattttatacttcctcccctagaaacacagattttggtatcttgacacacaattttggtatagcctgggttaatgtaaccctggtgatatgcagggatgtagcaagataagaggacctcctggggctctggtactgaggatgccctaaatcccatcagggcccctgtgtaaaggcccggattgctttggcctccacagtcactggaacccatccatagcctcactcttctcttgtcctgtgtcttcccagagaagggataaaccgccaggttgaacctctggaccctccggcaggctctgctcctggtgagcacgtgtttgtgaagggctatgaaaagggccaaccagatgaggagctcaagcccaagaagaaagtcttcgagaagttgcaggctgacttcaaaatttctgaggagtgcatcgcacagtggaagcaaaccaacttcatgaccaagctgggctccatttcctgtaaatcgctgaaaggggggaacattagctagccagcccagcatcttccccccttcttccaccactgagtcatctgctgtctcttcagtctgctccatccatcacccatttacccatctctcaggacacggaagcagcgggtttggactctttattcggtgcagaactcggcaaggggcagcttaccctccccagaacccaggatcatcctgtctggctgcagtgagagaccaacccctaacaagggctgggccacagcagggagtccagccctaccttcttcccttggcagctggagaaatctggtttcaatataactcatttaaaaatttatgccacagtccttataattggaaaaatactggtgcccaggttttcttggagttatccaagcagctgcgcccctagctgggatctggtacctggactaggctaattacagcttctccccaacaggaaactgtgggatttgaaaaggaaagggaagggaaaacagagaacctagtggtctaccaagtggttggcaactttcccaatgtctgcttactctgaggcttggcactgggggccagggcctgccccagggctcctggaatttcccttgatccagctaggctgggacactccctaaatcagctgcgtgttgttagcatcaggcagaatgaatggcagagagtgattctgtcttcatagagggtggggtacttctccataaggcatctcagtcaaatccccatcactgtcataaattcaaataaaatgtctgaacaagggtgtctggatgtgagctggaccatctcaggagagaacacaagtgtgaggcagctgctggcccctcacctagtctggggttcctttaccctgtaatggggggtggggggtagaagatggacaagacaccttaacagtccctttggcagtactaggcagaagaggcccatacttgggtccaatgtgtgcagcaggcaaaacattttcccttctaaatgtgggcccagaccactgccctgtcccccccacattaagaagcagtagccacagccaagtttcaatcatttaattaacatctttaaatgaaacacagttttcttcatgtgtctcactcaggcttcagggcagagggaatggatttttagacatatcaaagactcaaaaatttaaagaaatatatatatgtatatatatacttctaacattttatggaaattaaaaatcagaggcttttggtctctccatttactctaggtcaagctcatttaccccagaggacaaagaagggctgcctcttctagaccctcccttctcctttgtcctctgtcccacccagcagggaaacaagctcagaagatcctaacaggatagagttccagtaatgttggaggagggagagggaaagagaagtcaggttctctcccacctccagccattcccaggttgctgccagggcctggtttcatgcagctttgacccagtcctggatcctagggggtggggtagatcaggagctctgagcagaacagtgctcactgattatcctctttccccaactcagtgggcaggtgcagcgtacacccagcagcactctccactgcccacaggcaagggaagaatattgattgattagctacaaggagaagacagtagtgactagtggaaaacaccctggagagggccagaggaacctggctctcaccacatcccctctgttcccagccttggtgagggggcggggaggtcatgtcaacctctctccttggtggtgaagctaaaagcaaggttccttgccagactcaagcccaagtcactgttaaggaaagaggatcaagaaagaagcggtggccctggggggcagccacgctgctgtggacccacaggggccaatggggaagccagcttgcctagacaggtggcacaggctgaaaatagaaaggttaacattcccggagagtacagtaagagaggctgatacctaggggaccaccacccagcctgccctagaagcactgggtgcccctcattgactagagaagacttgagtaaaatgcacctgtggcttcccatccttgtcactcagcgttagctgcccccagtggaaccacctgtgctgaaaggcagctgcagaaaggacatgcaccgaaatgaggagagagaaaggtcagagaatgaagtgtggagggccaggcctgggcccactgctcaaggaagctccccccctccagatgctcccttccatccacctcctcagtgcttgctcagcccaaaggctcctgcctctgaagtgctgggggcccacccaccccagtgtggtcaaggaggcaaggggcaggtgcttgacactgccaagtgccccgagatgactctactgctcacccatttctttgggccctggcagtctcctacttgtccccagcatggagcacctggcagaactggaaggcaggagggtggttggtgagttgaggcacaggaaggccaatcccctctgcaccttttgtgctttggaattccacagccccacacctgcccccagcctagagaagcctgtgggaacacaatgacttggccaccttcaggaaccaagaggagtaaactggactgggcaggagggcacagactggtcccaagctatgggctgactgccggggatggattctgctgccatgtaaacaggcccttggaatgcaacttcctgggccctggaggatggccatgcagccacttttcaaaagtgctttgattctggactatagtatgtgcatggtttggacatgaaaaaaaatgaaactcaggtgaggtgtcctgctcccaactctgcagcctcagggccagcagggggcgcagccaccctctcccgccagctacccacttcaagatgaggctaaggccaagactgaagcggcaactgccagag

SEQ ID NO: 1737 - protein, 39 aa, Homo sapiens
MKRANQMRSSSPRRKSSRSCRLTSKFLRSASHSGSKPTS

SEQ ID NO: 1738 - DNA, 4866 bp, Homo sapiens
aagaactgaatttcagtttacatttaaatacccacacaaggctagtagccaccatattggacagcagcagccctagagcttttattaaaattaaatattcccaaggaaatgaagaagtagtatcagaaacaaaaatgttcgctttgttgtattaaaagtgttcattcctaagggatgtcccctcagaatatctagaagattctttcagaccagatttgagatataaaaaaggcagtcagctgggcgtggtggctcacacctgtaatcccagcactttgggaggctgaggcaggtggatcacgaggtcaggagttcaagaccagtctgggcaacatggtgaaaccccgtctctactaaaatacaaaaaattagctgggcgtggctgcatgcgcctgtagtcccagctactcaggaggctgaggcaggagaattgcttgagctcaggaggcagaggttgcaatgagctgagattgcgccactgcaccccagcctgggcgacggagcaagactccgtctcaaagaaaaggcagtcacaggacacaaggaataaaatggaattactgaactattaccatgtacgagcagcgttctcatcattttcacacccacattcagtgatttaaccctcatccccatcctgtgagatatagctgttgttagcttcactttataagtaacaaagccaacactggcccggcacgttggcccatgcctgtaatcctagcactttgggaggcagaagcaggcagattgcctgaacccaggagttcaagaccagcctgggtaacatagcaagaccctgtctctacaaaaagaaaagagaaaaagcagcagccaaagcttagaggggttatgtgcctagtttggagtcgcacacagctagctgggaatctaatctgggtctgtcgaactccaaagcccttcctctttcttcttactcagctgtctccctcaggttatctttaggccttgggttacctatgtgaatgtttctctgcttgtaaataccagttggtctgtgaccctactctaagcataaatggagggactagaagaattagactaacaaatacattcagctcctaaacaccctcaagttagtatagatttcagaatcaaaagacttggattttggacacgttagtctttctgaatgtattttcccttctcctacctgcctcacaagattatcacaaggatcaaataagactgttgggaaaaactcccttgatcctacttttttggattcaggtgtcctgtgccctgttctagactttatctcactaggtcttgttcgattctgcaggttgtacatcctggagacctgaagaattctgttgaagtcgcactgaacaagttgctggatccaatccgggaaaagtttaatacccctgccctgaaaaaactggccagcgctgcctacccagatccctcaaagcagaagccaatggccaaaggccctgccaagaattcagaaccagaggaggtcatcccatcccggctggatatccgtgtggggaaaatcatcactgtggagaagcacccagatgcagacagcctgtatgtagagaagattgacgtgggggaagctgaaccacggactgtggtgagcggcctggtacagttcgtgcccaaggaggaactgcaggacaggctggtagtggtgctgtgcaacctgaaaccccagaagatgagaggagtcgagtcccaaggcatgcttctgtgtgcttctatagaagggataaaccgccaggttgaacctctggaccctccggcaggctctgctcctggtgagcacgtgtttgtgaagggctatgaaaagggccaaccagatgaggagctcaagcccaagaagaaagtcttcgagaagttgcaggctgacttcaaaatttctgaggagtgcatcgcacagtggaagcaaaccaacttcatgaccaagctgggctccatttcctgtaaatcgctgaaaggggggaacattagctagccagcccagcatcttccccccttcttccaccactgagtcatctgctgtctcttcagtctgctccatccatcacccatttacccatctctcaggacacggaagcagcgggtttggactctttattcggtgcagaactcggcaaggggcagcttaccctccccagaacccaggatcatcctgtctggctgcagtgagagaccaacccctaacaagggctgggccacagcagggagtccagccctaccttcttcccttggcagctggagaaatctggtttcaatataactcatttaaaaatttatgccacagtccttataattggaaaaatactggtgcccaggttttcttggagttatccaagcagctgcgcccctagctgggatctggtacctggactaggctaattacagcttctccccaacaggaaactgtgggatttgaaaaggaaagggaagggaaaacagagaacctagtggtctaccaagtggttggcaactttcccaatgtctgcttactctgaggcttggcactgggggccagggcctgccccagggctcctggaatttcccttgatccagctaggctgggacactccctaaatcagctgcgtgttgttagcatcaggcagaatgaatggcagagagtgattctgtcttcatagagggtggggtacttctccataaggcatctcagtcaaatccccatcactgtcataaattcaaataaaatgtctgaacaagggtgtctggatgtgagctggaccatctcaggagagaacacaagtgtgaggcagctgctggcccctcacctagtctggggttcctttaccctgtaatggggggtggggggtagaagatggacaagacaccttaacagtccctttggcagtactaggcagaagaggcccatacttgggtccaatgtgtgcagcaggcaaaacattttcccttctaaatgtgggcccagaccactgccctgtcccccccacattaagaagcagtagccacagccaagtttcaatcatttaattaacatctttaaatgaaacacagttttcttcatgtgtctcactcaggcttcagggcagagggaatggatttttagacatatcaaagactcaaaaatttaaagaaatatatatatgtatatatatacttctaacattttatggaaattaaaaatcagaggcttttggtctctccatttactctaggtcaagctcatttaccccagaggacaaagaagggctgcctcttctagaccctcccttctcctttgtcctctgtcccacccagcagggaaacaagctcagaagatcctaacaggatagagttccagtaatgttggaggagggagagggaaagagaagtcaggttctctcccacctccagccattcccaggttgctgccagggcctggtttcatgcagctttgacccagtcctggatcctagggggtggggtagatcaggagctctgagcagaacagtgctcactgattatcctctttccccaactcagtgggcaggtgcagcgtacacccagcagcactctccactgcccacaggcaagggaagaatattgattgattagctacaaggagaagacagtagtgactagtggaaaacaccctggagagggccagaggaacctggctctcaccacatcccctctgttcccagccttggtgagggggcggggaggtcatgtcaacctctctccttggtggtgaagctaaaagcaaggttccttgccagactcaagcccaagtcactgttaaggaaagaggatcaagaaagaagcggtggccctggggggcagccacgctgctgtggacccacaggggccaatggggaagccagcttgcctagacaggtggcacaggctgaaaatagaaaggttaacattcccggagagtacagtaagagaggctgatacctaggggaccaccacccagcctgccctagaagcactgggtgcccctcattgactagagaagacttgagtaaaatgcacctgtggcttcccatccttgtcactcagcgttagctgcccccagtggaaccacctgtgctgaaaggcagctgcagaaaggacatgcaccgaaatgaggagagagaaaggtcagagaatgaagtgtggagggccaggcctgggcccactgctcaaggaagctccccccctccagatgctcccttccatccacctcctcagtgcttgctcagcccaaaggctcctgcctctgaagtgctgggggcccacccaccccagtgtggtcaaggaggcaaggggcaggtgcttgacactgccaagtgccccgagatgactctactgctcacccatttctttgggccctggcagtctcctacttgtccccagcatggagcacctggcagaactggaaggcaggagggtggttggtgagttgaggcacaggaaggccaatcccctctgcaccttttgtgctttggaattccacagccccacacctgcccccagcctagagaagcctgtgggaacacaatgacttggccaccttcaggaaccaagaggagtaaactggactgggcaggagggcacagactggtcccaagctatgggctgactgccggggatggattctgctgccatgtaaacaggcccttggaatgcaacttcctgggccctggaggatggccatgcagccacttttcaaaagtgctttgattctggactatagtatgtgcatggtttggacatgaaaaaaaatgaaactcaggtgaggtgtcctgctcccaactctgcagcctcagggccagcagggggcgcagccaccctctcccgccagctacccacttcaagatgaggctaaggccaagactgaagcggcaactgccagag

SEQ ID NO: 1739 - protein, 179 aa, Homo sapiens [sequence omitted]

SEQ ID NO: 1740 - DNA, 4191 bp, Homo sapiens
gaacaatggggttctgtccttcatcaagcatgtcctttttccccttaagtccggtaacactctctgttttcttcctagaggccaggctagaatagaaaagttcgtgctgtgatcatacttgtgatttgtcacagactcttccttcagggactggctgccctgattctctgctctgatttcttatatattaaagtatgaatgatgttgggatgtaatttaattgtccatatattcgttaccaggctaggttctgagggaatactggagtgggcagaggtgttagaagtaagggtgggggcagacatgttgaactagaggaatacaacaaaatagatataagccacaagccttcccctgaagcagctgagatgctagctgggtatacaatagtgccactcatccaatttaagaataataccatacaataaagttcagaatatatggcaaaaactacaaatagtcatgcatgtgggctaggaatagtcatgcatgtgagctaggaatgctgtcaatgagtttgttgacatggatccttttccttatagagtttgtgatcctacgagatgagaaatggggtggaaacaaaacctacacagcttacgtggacctggaaaaggactttgctgctgaggttgtacatcctggagacctgaagaattctgttgaagtcgcactgaacaagttgctggatccaatccgggaaaagtttaatacccctgccctgaaaaaactggccagcgctgcctacccagatccctcaaagcagaagccaatggccaaaggccctgccaagaattcagaaccagaggaggtcatcccatcccggctggatatccgtgtggggaaaatcatcactgtggagaagcacccagatgcagacagcctgtatgtagagaagattgacgtgggggaagctgaaccacggactgtggtgagcggcctggtacagttcgtgcccaaggaggaactgcaggacaggctggtagtggtgctgtgcaacctgaaaccccagaagatgagaggagtcgagtcccaaggcatgcttctgtgtgcttctatagaagggataaaccgccaggttgaacctctggaccctccggcaggctctgctcctggtgagcacgtgtttgtgaagggctatgaaaagggccaaccagatgaggagctcaagcccaagaagaaagtcttcgagaagttgcaggctgacttcaaaatttctgaggagtgcatcgcacagtggaagcaaaccaacttcatgaccaagctgggctccatttcctgtaaatcgctgaaaggggggaacattagctagccagcccagcatcttccccccttcttccaccactgagtcatctgctgtctcttcagtctgctccatccatcacccatttacccatctctcaggacacggaagcagcgggtttggactctttattcggtgcagaactcggcaaggggcagcttaccctccccagaacccaggatcatcctgtctggctgcagtgagagaccaacccctaacaagggctgggccacagcagggagtccagccctaccttcttcccttggcagctggagaaatctggtttcaatataactcatttaaaaatttatgccacagtccttataattggaaaaatactggtgcccaggttttcttggagttatccaagcagctgcgcccctagctgggatctggtacctggactaggctaattacagcttctccccaacaggaaactgtgggatttgaaaaggaaagggaagggaaaacagagaacctagtggtctaccaagtggttggcaactttcccaatgtctgcttactctgaggcttggcactgggggccagggcctgccccagggctcctggaatttcccttgatccagctaggctgggacactccctaaatcagctgcgtgttgttagcatcaggcagaatgaatggcagagagtgattctgtcttcatagagggtggggtacttctccataaggcatctcagtcaaatccccatcactgtcataaattcaaataaaatgtctgaacaagggtgtctggatgtgagctggaccatctcaggagagaacacaagtgtgaggcagctgctggcccctcacctagtctggggttcctttaccctgtaatggggggtggggggtagaagatggacaagacaccttaacagtccctttggcagtactaggcagaagaggcccatacttgggtccaatgtgtgcagcaggcaaaacattttcccttctaaatgtgggcccagaccactgccctgtcccccccacattaagaagcagtagccacagccaagtttcaatcatttaattaacatctttaaatgaaacacagttttcttcatgtgtctcactcaggcttcagggcagagggaatggatttttagacatatcaaagactcaaaaatttaaagaaatatatatatgtatatatatacttctaacattttatggaaattaaaaatcagaggcttttggtctctccatttactctaggtcaagctcatttaccccagaggacaaagaagggctgcctcttctagaccctcccttctcctttgtcctctgtcccacccagcagggaaacaagctcagaagatcctaacaggatagagttccagtaatgttggaggagggagagggaaagagaagtcaggttctctcccacctccagccattcccaggttgctgccagggcctggtttcatgcagctttgacccagtcctggatcctagggggtggggtagatcaggagctctgagcagaacagtgctcactgattatcctctttccccaactcagtgggcaggtgcagcgtacacccagcagcactctccactgcccacaggcaagggaagaatattgattgattagctacaaggagaagacagtagtgactagtggaaaacaccctggagagggccagaggaacctggctctcaccacatcccctctgttcccagccttggtgagggggcggggaggtcatgtcaacctctctccttggtggtgaagctaaaagcaaggttccttgccagactcaagcccaagtcactgttaaggaaagaggatcaagaaagaagcggtggccctggggggcagccacgctgctgtggacccacaggggccaatggggaagccagcttgcctagacaggtggcacaggctgaaaatagaaaggttaacattcccggagagtacagtaagagaggctgatacctaggggaccaccacccagcctgccctagaagcactgggtgcccctcattgactagagaagacttgagtaaaatgcacctgtggcttcccatccttgtcactcagcgttagctgcccccagtggaaccacctgtgctgaaaggcagctgcagaaaggacatgcaccgaaatgaggagagagaaaggtcagagaatgaagtgtggagggccaggcctgggcccactgctcaaggaagctccccccctccagatgctcccttccatccacctcctcagtgcttgctcagcccaaaggctcctgcctctgaagtgctgggggcccacccaccccagtgtggtcaaggaggcaaggggcaggtgcttgacactgccaagtgccccgagatgactctactgctcacccatttctttgggccctggcagtctcctacttgtccccagcatggagcacctggcagaactggaaggcaggagggtggttggtgagttgaggcacaggaaggccaatcccctctgcaccttttgtgctttggaattccacagccccacacctgcccccagcctagagaagcctgtgggaacacaatgacttggccaccttcaggaaccaagaggagtaaactggactgggcaggagggcacagactggtcccaagctatgggctgactgccggggatggattctgctgccatgtaaacaggcccttggaatgcaacttcctgggccctggaggatggccatgcagccacttttcaaaagtgctttgattctggactatagtatgtgcatggtttggacatgaaaaaaaatgaaactcaggtgaggtgtcctgctcccaactctgcagcctcagggccagcagggggcgcagccaccctctcccgccagctacccacttcaagatgaggctaaggccaagactgaagcggcaactgccagag

SEQ ID NO: 1741 - protein, 281 aa, Homo sapiens
MWARNSHACELGMLSMSLLTWILFLIEFVILRDEKWGGNKTYTAYVDLEKDFAAEVVHPGDLKNSVEVALNKLLDPIREKFNTPALKKLASAAYPDPSKQKPMAKGPAKNSEPEEVIPSRLDIRVGKIITVEKHPDADSLYVEKIDVGEAEPRTVVSGLVQFVPKEELQDRLVVVLCNLKPQKMRGVESQGMLLCASIEGINRQVEPLDPPAGSAPGEHVFVKGYEKGQPDEELKPKKKVFEKLQADFKISEECIAQWKQTNFMTKLGSISCKSLKGGNIS

SEQ ID NO: 1742 - DNA, 5395 bp, Homo sapiens
aaacccgcccctcagcaggcctgtgctgtgcgctcctctcccggggaccaccgtcctcagatctccccagggaatgggtcgtcctcttcctgcccccacccgcgagacgcggcagaaaagcccgcggctatcttcccgccagcaacagcctcccgccgagccggccgggacagaggcggcccccacccccactgggcaggggactgcagacggcgctccccgactctcaagacgaccagggagcttcccttttcctcagcggggtgaggggcatctgtcgcccgccgacttggaggtggaggggcagggacattccctcgccatcacctcaggagctagaacgcgcccttctcgcagcagggcgtgggcctcccaatccctccaaggggcggacggcgtgcgcaaccccctggagaagcaacaggcgcccccatccccctccaagccgggtaacgccgaccccctcgtccctcccgctcttcacctccggaagccgggccaaagcctgggcgaacgactgcgcctcactccgccccctgcgccattttatcgccccctccccgacctcccctaccccgagtcagccgggccaacaccagggggagggcaaaccagcagtgattggcaggaaaccgtcccgcctctaggagggttgtgccccgctcaggcgcctcagccccgccctccgcaccgcccaccgtgcccactggctccaccttttcccgtctcatcgacctgctcgactctctgctgctcctcactttttccggccgctgccggaggggtccaggccgagtaagcggagcgccgagcccagctgatgcaacctggctggactcgcgtgacagttcccggcacgcggcggcgacggtgacccaggaaggggctctggtgccgggctgagcgggggaagcaggggtagcggagccatgggggacgctcccagccctgaagagaaactgcaccttatcacccggaacctgcaggaggttctgggggaagagaagctgaaggagatactgaaggagcgggaacttaaaatttactggggaacggcaaccacgggcaaaccacatgtggcttactttgtgcccatgtcaaagattgcagacttcttaaaggcagggtgtgaggtaacaattctgtttgcggacctccacgcatacctggataacatgaaagccccatgggaacttctagaactccgagtcagttactatgagaatgtgatcaaagcaatgctggagagcattggtgtgcccttggagaagctcaagttcatcaaaggcactgattaccagctcagcaaagagtacacactagatgtgtacagactctcctccgtggtcacacagcacgattccaagaaggctggagctgaggtggtaaagcaggtggagcaccctttgctgagtggcctcttataccccggactgcaggctttggatgaagagtatttaaaagtagatgcccaatttggaggcattgatcagagaaagattttcacctttgcagagaagtacctccctgcacttggctattcaaaacgggtccatctgatgaatcctatggttccaggattaacaggcagcaaaatgagctcttcagaagaggagtccaagattgatctccttgatcggaaggaggatgtgaagaaaaaactgaagaaggccttctgtgagccaggaaatgtggagaacaatggggttctgtccttcatcaagcatgtcctttttccccttaagtccgagtttgtgatcctacgagatgagaaatggggtggaaacaaaacctacacagcttacgtggacctggaaaaggactttgctgctgaggttgtacatcctggagacctgaagaattctgttgaagtcgcactgaacaagttgctggatccaatccgggaaaagtttaatacccctgccctgaaaaaactggccagcgctgcctacccagatccctcaaagcagaagccaatggccaaaggccctgccaagaattcagaaccagaggaggtcatcccatcccggctggatatccgtgtggggaaaatcatcactgtggagaagcacccagatgcagacagcctgtatgtagagaagattgacgtgggggaagctgaaccacggactgtggtgagcggcctggtacagttcgtgcccaaggaggaactgcaggacaggctggtagtggtgctgtgcaacctgaaaccccagaagatgagaggagtcgagtcccaaggcatgcttctgtgtgcttctatagaagggataaaccgccaggttgaacctctggaccctccggcaggctctgctcctggtgagcacgtgtttgtgaagggctatgaaaagggccaaccagatgaggagctcaagcccaagaagaaagtcttcgagaagttgcaggctgacttcaaaatttctgaggagtgcatcgcacagtggaagcaaaccaacttcatgaccaagctgggctccatttcctgtaaatcgctgaaaggggggaacattagctagccagcccagcatcttccccccttcttccaccactgagtcatctgctgtctcttcagtctgctccatccatcacccatttacccatctctcaggacacggaagcagcgggtttggactctttattcggtgcagaactcggcaaggggcagcttaccctccccagaacccaggatcatcctgtctggctgcagtgagagaccaacccctaacaagggctgggccacagcagggagtccagccctaccttcttcccttggcagctggagaaatctggtttcaatataactcatttaaaaatttatgccacagtccttataattggaaaaatactggtgcccaggttttcttggagttatccaagcagctgcgcccctagctgggatctggtacctggactaggctaattacagcttctccccaacaggaaactgtgggatttgaaaaggaaagggaagggaaaacagagaacctagtggtctaccaagtggttggcaactttcccaatgtctgcttactctgaggcttggcactgggggccagggcctgccccagggctcctggaatttcccttgatccagctaggctgggacactccctaaatcagctgcgtgttgttagcatcaggcagaatgaatggcagagagtgattctgtcttcatagagggtggggtacttctccataaggcatctcagtcaaatccccatcactgtcataaattcaaataaaatgtctgaacaagggtgtctggatgtgagctggaccatctcaggagagaacacaagtgtgaggcagctgctggcccctcacctagtctggggttcctttaccctgtaatggggggtggggggtagaagatggacaagacaccttaacagtccctttggcagtactaggcagaagaggcccatacttgggtccaatgtgtgcagcaggcaaaacattttcccttctaaatgtgggcccagaccactgccctgtcccccccacattaagaagcagtagccacagccaagtttcaatcatttaattaacatctttaaatgaaacacagttttcttcatgtgtctcactcaggcttcagggcagagggaatggatttttagacatatcaaagactcaaaaatttaaagaaatatatatatgtatatatatacttctaacattttatggaaattaaaaatcagaggcttttggtctctccatttactctaggtcaagctcatttaccccagaggacaaagaagggctgcctcttctagaccctcccttctcctttgtcctctgtcccacccagcagggaaacaagctcagaagatcctaacaggatagagttccagtaatgttggaggagggagagggaaagagaagtcaggttctctcccacctccagccattcccaggttgctgccagggcctggtttcatgcagctttgacccagtcctggatcctagggggtggggtagatcaggagctctgagcagaacagtgctcactgattatcctctttccccaactcagtgggcaggtgcagcgtacacccagcagcactctccactgcccacaggcaagggaagaatattgattgattagctacaaggagaagacagtagtgactagtggaaaacaccctggagagggccagaggaacctggctctcaccacatcccctctgttcccagccttggtgagggggcggggaggtcatgtcaacctctctccttggtggtgaagctaaaagcaaggttccttgccagactcaagcccaagtcactgttaaggaaagaggatcaagaaagaagcggtggccctggggggcagccacgctgctgtggacccacaggggccaatggggaagccagcttgcctagacaggtggcacaggctgaaaatagaaaggttaacattcccggagagtacagtaagagaggctgatacctaggggaccaccacccagcctgccctagaagcactgggtgcccctcattgactagagaagacttgagtaaaatgcacctgtggcttcccatccttgtcactcagcgttagctgcccccagtggaaccacctgtgctgaaaggcagctgcagaaaggacatgcaccgaaatgaggagagagaaaggtcagagaatgaagtgtggagggccaggcctgggcccactgctcaaggaagctccccccctccagatgctcccttccatccacctcctcagtgcttgctcagcccaaaggctcctgcctctgaagtgctgggggcccacccaccccagtgtggtcaaggaggcaaggggcaggtgcttgacactgccaagtgccccgagatgactctactgctcacccatttctttgggccctggcagtctcctacttgtccccagcatggagcacctggcagaactggaaggcaggagggtggttggtgagttgaggcacaggaaggccaatcccctctgcaccttttgtgctttggaattccacagccccacacctgcccccagcctagagaagcctgtgggaacacaatgacttggccaccttcaggaaccaagaggagtaaactggactgggcaggagggcacagactggtcccaagctatgggctgactgccggggatggattctgctgccatgtaaacaggcccttggaatgcaacttcctgggccctggaggatggccatgcagccacttttcaaaagtgctttgattctggactatagtatgtgcatggtttggacatgaaaaaaaatgaaactcaggtgaggtgtcctgctcccaactctgcagcctcagggccagcagggggcgcagccaccctctcccgccagctacccacttcaagatgaggctaaggccaagactgaagcggcaactgccagag

SEQ ID NO: 1743 - protein, 528 aa, Homo sapiens; identical to SEQ ID NO: 72

SEQ ID NO: 1744 - DNA, 777 bp, Homo sapiens
ctgacttcaaaatttctgaggagtgcatcgcacagtggaagcaaaccaacttcatgaccaagctgggctccatttcctgtaaatcgctgaaaggggggaacattagctagccagcccagcatcttccccccttcttccaccactgagtcatctgctgtctcttcaaactcggcaaggggcagcttaccctccccagaacccaggatcatcctgtctggctgcagtgagagaccaacccctaacaagggctgggccacagcagggagtccagccctaccttcttcccttggcagctggagaaatctggtttcaatataactcatttaaaaatttatgccacagtccttataattggaaaaatactggtgcccaggttttcttggagttatccaagcagctgcgcccctagctgggatctggtacctggactaggctaattacagcttctccccaacaggaaactgtgggatttgaaaaggaaagggaagggaaaacagagaacctagtggtctaccaagtggttggcaactttcccaatgtctgcttactctgaggcttggcactgggggccagggcctgccccagggctcctggaatttcccttgatccagctaggctgggacactccctaaatcagctgcgtgttgttagcatcaggcagaatgaatggcagagagtgattctgtcttcatagagggtggggtacttctccataaggcatctcagtcaaatccccatcactgtcataaattcaaataaaatgtctgaacaagggtg

SEQ ID NO: 1745 - protein, 31 aa, Homo sapiens
MSAYSEAWHWGPGPAPGLLEFPLIQLGWDTP

SEQ ID NO: 1746 - DNA, 503 bp, Homo sapiens
ccagatgcagacagcctgtatgtagagaagattgacgtgggggaagctgaaccacggactgtggtgagcggcctggtacagttcgtgcccaaggaggaactgcaggacaggctggtagtgcagctgcgcccctagctgggatctggtacctggactaggctaattacagcttctccccaacaggaaactgtgggatttgaaaaggaaagggaagggaaaacagagaacctagtggtctaccaagtggttggcaactttcccaatgtctgcttactctgaggcttggcactgggggccagggcctgccccagggctcctggaatttcccttgatccagctaggctgggacactccctaaatcagctgcgtgttgttagcatcaggcagaatgaatggcagagagtgattctgtcttcatagagggtggggtacttctccataaggcatctcagtcaaatccccatcactgtcataaattcaaataaaatgtctgaacaagggtg

SEQ ID NO: 1747 - protein, 31 aa, Homo sapiens; identical to SEQ ID NO: 1745

SEQ ID NO: 1748 - DNA, 2185 bp, Homo sapiens
ttcagaaagtggtggagggaagacttcctttttcccagagacagaaggttatgcacccagtggcctgggaccattgttctgggctttttttcccttcgacatggatttgcttctcactgtgtaccccaaccaccaaaaccaccctgagatcaatgctggtgctcctgcatcagatggcttagagatccttccacctcttaacacaagcatctaggtccactttactcaaatctggcctcagttgagagcagagtataccatcagagcccattctcctgtctgctgtctgggacgtggaaagaaagttagctctagggggtctttccaggggcctctgtaaggagtggatgctcctttccggaatccaagagttcaccaggctgcttctctaatggacgatgatcctcttcctcctgacgtctctccctggcagcacccagatgcagacagcctgtatgtagagaagattgacgtgggggaagctgaaccacggactgtggtgagcggcctggtacagttcgtgcccaaggaggaactgcaggacaggctggtagtggtgctgtgcaacctgaaaccccagaagatgagaggagtcgagtcccaaggcatgcttctgtgtgcttctatgtgagtgaggacttggagtggggcacaggacctggggaggccaggaagagtagggaatcagcccatatgatgtccttccacacaccaggtggaagctctgagaacacgtgcctcttccttgctgatgccaaaagttgatgcatgaaggacttatcgtacaagtactgttaatgaagcattttacctacagttaattttgttaaaatagaaatggagggctcaaaccagtacatacccaagtcttactactagtaaggagtggagcagggattcaaatcccagttttgatgtctataaagtcctcgctacgttattttatacttcctcccctagaaacacagattttggtatcttgacacacaattttggtatagcctgggttaatgtaaccctggtgatatgcagggatgtagcaagataagaggacctcctggggctctggtactgaggatgccctaaatcccatcagggcccctgtgtaaaggcccggattgctttggcctccacagtcactggaacccatccatagcctcactcttctcttgtcctgtgtcttcccagagaagggataaaccgccaggttgaacctctggaccctccggcaggctctgctcctggtgagcacgtgtttgtgaagggctatgaaaagggccaaccagatgaggagctcaagcccaagaagaaagtcttcgagaagttgcaggctgacttcaaaatttctgaggagtgcatcgcacagtggaagcaaaccaacttcatgaccaagctgggctccatttcctgtaaatcgctgaaaggggggaacattagctagccagcccagcatcttccccccttcttccaccactgagtcatctgctgtctcttcagtctgctccatccatcacccatttacccatctctcaggacacggaagcagcgggtttggactctttattcggtgcagaactcggcaaggggcagcttaccctccccagaacccaggatcatcctgtctggctgcagtgagagaccaacccctaacaagggctgggccacagcagggagtccagccctaccttcttcccttggcagctggagaaatctggtttcaatataactcatttaaaaatttatgccacagtccttataattggaaaaatactggtgcccaggttttcttggagttatccaagcagctgcgcccctagctgggatctggtacctggactaggctaattacagcttctccccaacaggaaactgtgggatttgaaaaggaaagggaagggaaaacagagaacctagtggtctaccaagtggttggcaactttcccaatgtctgcttactctgaggcttggcactgggggccagggcctgccccagggctcctggaatttcccttgatccagctaggctgggacactccctaaatcagctgcgtgttgttagcatcaggcagaatgaatggcagagagtgattctgtcttcatagagggtggggtacttctccataaggcatctcagtcaaatccccatcactgtcataaattcaaataaaatgtctgaacaagggtg

SEQ ID NO: 1749 - protein, 39 aa, Homo sapiens; identical to SEQ ID NO: 1737

SEQ ID NO: 1750 - DNA, 2693 bp, Homo sapiens
gattctgcaggttgtacatcctggagacctgaagaattctgttgaagtcgcactgaacaagttgctggatccaatccgggaaaagtttaatacccctgccctgaaaaaactggccagcgctgcctacccagatccctcaaagcagagtaaggccagctggagaggggccgacatcatcaggagagagagcttgtcaatgagccttggaaaaatgcctgtcttaaattgagggcacaacaacccagggggtctgaagtgcaggaatgtcatgtcctactggctcctagaatggaacttgagtcattttgatttgggtttggttaacatcaggaagtgatcacatccttttgtaccggcattgctgagagctgctggtgtaagatgtatactttggtccttctagtctgtttgttaaatctgcctcttcattaaagatagtgaccggggccagacacagtggctcacacctgtaatcttaacactttggaaggctgaggcaggcggatcacttgagcccaaaagttagagaccaaaacccagtctctacccaaaaaaaaaaaaaaaaaaaattagccaggcatagtagcacatgcctgtagtcccagctacttgggaggctgaggtgagaggatcacctgagcatggggaagttgagactgcagtgagccatgatcgcaccactgcactccagcctgggcaacagagtgagactctatgtctcaaaaaaagaaaaatgatagaaattagattagacctattatacccaaccggtatatagggtatcgatagtttcttacacagctgttgggcagagcctgcagagcttagagaagcttatctttagattctcccagtttccttctatgtgcatgggcctggctcttagttggccatccacttgtgcgtaatgctaagatattggcattgatagctttgtgcgacccttccagaaaaaaactcagtaactcagtaaaattttttttttttttttctaaaagagacagagtctggctctgttgcccagcctggtcttgaagtcctgggcttaagcaatcctcccgtctcagcctcccaaagtgctagaattacaggtgtgagctaccacacctggccaagactcagtaaattctatgtggaatgcatgaatggaaatacctaaaggaggcaaagctactactgctccctccccgctagtctaataattgagggagagaacagatgaaaatcaggtatgtcatgtctgaaaggttgccaacccagtattaaagaagttacaactcagtgtttagactctggggattctacactaaatcttacctaatctcagtgtcttaacgtggtgggatcagcagctgacctgccacagggaagaattctacctcatggggttcttctcattcccagagccaatggccaaaggccctgccaagaattcagaaccagaggaggtcatcccatcccggctggatatccgtgtggggaaaatcatcactgtggagaagcacccagatgcagacagcctgtatgtagagaagattgacgtgggggaagctgaaccacggactgtggtgagcggcctggtacagttcgtgcccaaggaggaactgcaggacaggctggtagtggtgctgtgcaacctgaaaccccagaagatgagaggagtcgagtcccaaggcatgcttctgtgtgcttctatagaagggataaaccgccaggttgaacctctggaccctccggcaggctctgctcctggtgagcacgtgtttgtgaagggctatgaaaagggccaaccagatgaggagctcaagcccaagaagaaagtcttcgagaagttgcaggctgacttcaaaatttctgaggagtgcatcgcacagtggaagcaaaccaacttcatgaccaagctgggctccatttcctgtaaatcgctgaaaggggggaacattagctagccagcccagcatcttccccccttcttccaccactgagtcatctgctgtctcttcagtctgctccatccatcacccatttacccatctctcaggacacggaagcagcgggtttggactctttattcggtgcagaactcggcaaggggcagcttaccctccccagaacccaggatcatcctgtctggctgcagtgagagaccaacccctaacaagggctgggccacagcagggagtccagccctaccttcttcccttggcagctggagaaatctggtttcaatataactcatttaaaaatttatgccacagtccttataattggaaaaatactggtgcccaggttttcttggagttatccaagcagctgcgcccctagctgggatctggtacctggactaggctaattacagcttctccccaacaggaaactgtgggatttgaaaaggaaagggaagggaaaacagagaacctagtggtctaccaagtggttggcaactttcccaatgtctgcttactctgaggcttggcactgggggccagggcctgccccagggctcctggaatttcccttgatccagctaggctgggacactccctaaatcagctgcgtgttgttagcatcaggcagaatgaatggcagagagtgattctgtcttcatagagggtggggtacttctccataaggcatctcagtcaaatccccatcactgtcataaattcaaataaaatgtctgaacaagggtg

SEQ ID NO: 1751 - protein, 188 aa, Homo sapiens
MGFFSFPEPMAKGPAKNSEPEEVIPSRLDIRVGKIITVEKHPDADSLYVEKIDVGEAEPRTVVSGLVQFVPKEELQDRLVVVLCNLKPQKMRGVESQGMLLCASIEGINRQVEPLDPPAGSAPGEHVFVKGYEKGQPDEELKPKKKVFEKLQADFKISEECIAQWKQTNFMTKLGSISCKSLKGGNIS

SEQ ID NO: 1752 - DNA, 2731 bp, Homo sapiens
aagaactgaatttcagtttacatttaaatacccacacaaggctagtagccaccatattggacagcagcagccctagagcttttattaaaattaaatattcccaaggaaatgaagaagtagtatcagaaacaaaaatgttcgctttgttgtattaaaagtgttcattcctaagggatgtcccctcagaatatctagaagattctttcagaccagatttgagatataaaaaaggcagtcagctgggcgtggtggctcacacctgtaatcccagcactttgggaggctgaggcaggtggatcacgaggtcaggagttcaagaccagtctgggcaacatggtgaaaccccgtctctactaaaatacaaaaaattagctgggcgtggctgcatgcgcctgtagtcccagctactcaggaggctgaggcaggagaattgcttgagctcaggaggcagaggttgcaatgagctgagattgcgccactgcaccccagcctgggcgacggagcaagactccgtctcaaagaaaaggcagtcacaggacacaaggaataaaatggaattactgaactattaccatgtacgagcagcgttctcatcattttcacacccacattcagtgatttaaccctcatccccatcctgtgagatatagctgttgttagcttcactttataagtaacaaagccaacactggcccggcacgttggcccatgcctgtaatcctagcactttgggaggcagaagcaggcagattgcctgaacccaggagttcaagaccagcctgggtaacatagcaagaccctgtctctacaaaaagaaaagagaaaaagcagcagccaaagcttagaggggttatgtgcctagtttggagtcgcacacagctagctgggaatctaatctgggtctgtcgaactccaaagcccttcctctttcttcttactcagctgtctccctcaggttatctttaggccttgggttacctatgtgaatgtttctctgcttgtaaataccagttggtctgtgaccctactctaagcataaatggagggactagaagaattagactaacaaatacattcagctcctaaacaccctcaagttagtatagatttcagaatcaaaagacttggattttggacacgttagtctttctgaatgtattttcccttctcctacctgcctcacaagattatcacaaggatcaaataagactgttgggaaaaactcccttgatcctacttttttggattcaggtgtcctgtgccctgttctagactttatctcactaggtcttgttcgattctgcaggttgtacatcctggagacctgaagaattctgttgaagtcgcactgaacaagttgctggatccaatccgggaaaagtttaatacccctgccctgaaaaaactggccagcgctgcctacccagatccctcaaagcagaagccaatggccaaaggccctgccaagaattcagaaccagaggaggtcatcccatcccggctggatatccgtgtggggaaaatcatcactgtggagaagcacccagatgcagacagcctgtatgtagagaagattgacgtgggggaagctgaaccacggactgtggtgagcggcctggtacagttcgtgcccaaggaggaactgcaggacaggctggtagtggtgctgtgcaacctgaaaccccagaagatgagaggagtcgagtcccaaggcatgcttctgtgtgcttctatagaagggataaaccgccaggttgaacctctggaccctccggcaggctctgctcctggtgagcacgtgtttgtgaagggctatgaaaagggccaaccagatgaggagctcaagcccaagaagaaagtcttcgagaagttgcaggctgacttcaaaatttctgaggagtgcatcgcacagtggaagcaaaccaacttcatgaccaagctgggctccatttcctgtaaatcgctgaaaggggggaacattagctagccagcccagcatcttccccccttcttccaccactgagtcatctgctgtctcttcagtctgctccatccatcacccatttacccatctctcaggacacggaagcagcgggtttggactctttattcggtgcagaactcggcaaggggcagcttaccctccccagaacccaggatcatcctgtctggctgcagtgagagaccaacccctaacaagggctgggccacagcagggagtccagccctaccttcttcccttggcagctggagaaatctggtttcaatataactcatttaaaaatttatgccacagtccttataattggaaaaatactggtgcccaggttttcttggagttatccaagcagctgcgcccctagctgggatctggtacctggactaggctaattacagcttctccccaacaggaaactgtgggatttgaaaaggaaagggaagggaaaacagagaacctagtggtctaccaagtggttggcaactttcccaatgtctgcttactctgaggcttggcactgggggccagggcctgccccagggctcctggaatttcccttgatccagctaggctgggacactccctaaatcagctgcgtgttgttagcatcaggcagaatgaatggcagagagtgattctgtcttcatagagggtggggtacttctccataaggcatctcagtcaaatccccatcactgtcataaattcaaataaaatgtctgaacaagggtg

SEQ ID NO: 1753 - protein, 179 aa, Homo sapiens [sequence omitted]

SEQ ID NO: 1754 - DNA, 2056 bp, Homo sapiens
gaacaatggggttctgtccttcatcaagcatgtcctttttccccttaagtccggtaacactctctgttttcttcctagaggccaggctagaatagaaaagttcgtgctgtgatcatacttgtgatttgtcacagactcttccttcagggactggctgccctgattctctgctctgatttcttatatattaaagtatgaatgatgttgggatgtaatttaattgtccatatattcgttaccaggctaggttctgagggaatactggagtgggcagaggtgttagaagtaagggtgggggcagacatgttgaactagaggaatacaacaaaatagatataagccacaagccttcccctgaagcagctgagatgctagctgggtatacaatagtgccactcatccaatttaagaataataccatacaataaagttcagaatatatggcaaaaactacaaatagtcatgcatgtgggctaggaatagtcatgcatgtgagctaggaatgctgtcaatgagtttgttgacatggatccttttccttatagagtttgtgatcctacgagatgagaaatggggtggaaacaaaacctacacagcttacgtggacctggaaaaggactttgctgctgaggttgtacatcctggagacctgaagaattctgttgaagtcgcactgaacaagttgctggatccaatccgggaaaagtttaatacccctgccctgaaaaaactggccagcgctgcctacccagatccctcaaagcagaagccaatggccaaaggccctgccaagaattcagaaccagaggaggtcatcccatcccggctggatatccgtgtggggaaaatcatcactgtggagaagcacccagatgcagacagcctgtatgtagagaagattgacgtgggggaagctgaaccacggactgtggtgagcggcctggtacagttcgtgcccaaggaggaactgcaggacaggctggtagtggtgctgtgcaacctgaaaccccagaagatgagaggagtcgagtcccaaggcatgcttctgtgtgcttctatagaagggataaaccgccaggttgaacctctggaccctccggcaggctctgctcctggtgagcacgtgtttgtgaagggctatgaaaagggccaaccagatgaggagctcaagcccaagaagaaagtcttcgagaagttgcaggctgacttcaaaatttctgaggagtgcatcgcacagtggaagcaaaccaacttcatgaccaagctgggctccatttcctgtaaatcgctgaaaggggggaacattagctagccagcccagcatcttccccccttcttccaccactgagtcatctgctgtctcttcagtctgctccatccatcacccatttacccatctctcaggacacggaagcagcgggtttggactctttattcggtgcagaactcggcaaggggcagcttaccctccccagaacccaggatcatcctgtctggctgcagtgagagaccaacccctaacaagggctgggccacagcagggagtccagccctaccttcttcccttggcagctggagaaatctggtttcaatataactcatttaaaaatttatgccacagtccttataattggaaaaatactggtgcccaggttttcttggagttatccaagcagctgcgcccctagctgggatctggtacctggactaggctaattacagcttctccccaacaggaaactgtgggatttgaaaaggaaagggaagggaaaacagagaacctagtggtctaccaagtggttggcaactttcccaatgtctgcttactctgaggcttggcactgggggccagggcctgccccagggctcctggaatttcccttgatccagctaggctgggacactccctaaatcagctgcgtgttgttagcatcaggcagaatgaatggcagagagtgattctgtcttcatagagggtggggtacttctccataaggcatctcagtcaaatccccatcactgtcataaattcaaataaaatgtctgaacaagggtg

SEQ ID NO: 1755 - protein, 281 aa, Homo sapiens; identical to SEQ ID NO: 1741

SEQ ID NO: 1756 - DNA, 3260 bp, Homo sapiens
aaacccgcccctcagcaggcctgtgctgtgcgctcctctcccggggaccaccgtcctcagatctccccagggaatgggtcgtcctcttcctgcccccacccgcgagacgcggcagaaaagcccgcggctatcttcccgccagcaacagcctcccgccgagccggccgggacagaggcggcccccacccccactgggcaggggactgcagacggcgctccccgactctcaagacgaccagggagcttcccttttcctcagcggggtgaggggcatctgtcgcccgccgacttggaggtggaggggcagggacattccctcgccatcacctcaggagctagaacgcgcccttctcgcagcagggcgtgggcctcccaatccctccaaggggcggacggcgtgcgcaaccccctggagaagcaacaggcgcccccatccccctccaagccgggtaacgccgaccccctcgtccctcccgctcttcacctccggaagccgggccaaagcctgggcgaacgactgcgcctcactccgccccctgcgccattttatcgccccctccccgacctcccctaccccgagtcagccgggccaacaccagggggagggcaaaccagcagtgattggcaggaaaccgtcccgcctctaggagggttgtgccccgctcaggcgcctcagccccgccctccgcaccgcccaccgtgcccactggctccaccttttcccgtctcatcgacctgctcgactctctgctgctcctcactttttccggccgctgccggaggggtccaggccgagtaagcggagcgccgagcccagctgatgcaacctggctggactcgcgtgacagttcccggcacgcggcggcgacggtgacccaggaaggggctctggtgccgggctgagcgggggaagcaggggtagcggagccatgggggacgctcccagccctgaagagaaactgcaccttatcacccggaacctgcaggaggttctgggggaagagaagctgaaggagatactgaaggagcgggaacttaaaatttactggggaacggcaaccacgggcaaaccacatgtggcttactttgtgcccatgtcaaagattgcagacttcttaaaggcagggtgtgaggtaacaattctgtttgcggacctccacgcatacctggataacatgaaagccccatgggaacttctagaactccgagtcagttactatgagaatgtgatcaaagcaatgctggagagcattggtgtgcccttggagaagctcaagttcatcaaaggcactgattaccagctcagcaaagagtacacactagatgtgtacagactctcctccgtggtcacacagcacgattccaagaaggctggagctgaggtggtaaagcaggtggagcaccctttgctgagtggcctcttataccccggactgcaggctttggatgaagagtatttaaaagtagatgcccaatttggaggcattgatcagagaaagattttcacctttgcagagaagtacctccctgcacttggctattcaaaacgggtccatctgatgaatcctatggttccaggattaacaggcagcaaaatgagctcttcagaagaggagtccaagattgatctccttgatcggaaggaggatgtgaagaaaaaactgaagaaggccttctgtgagccaggaaatgtggagaacaatggggttctgtccttcatcaagcatgtcctttttccccttaagtccgagtttgtgatcctacgagatgagaaatggggtggaaacaaaacctacacagcttacgtggacctggaaaaggactttgctgctgaggttgtacatcctggagacctgaagaattctgttgaagtcgcactgaacaagttgctggatccaatccgggaaaagtttaatacccctgccctgaaaaaactggccagcgctgcctacccagatccctcaaagcagaagccaatggccaaaggccctgccaagaattcagaaccagaggaggtcatcccatcccggctggatatccgtgtggggaaaatcatcactgtggagaagcacccagatgcagacagcctgtatgtagagaagattgacgtgggggaagctgaaccacggactgtggtgagcggcctggtacagttcgtgcccaaggaggaactgcaggacaggctggtagtggtgctgtgcaacctgaaaccccagaagatgagaggagtcgagtcccaaggcatgcttctgtgtgcttctatagaagggataaaccgccaggttgaacctctggaccctccggcaggctctgctcctggtgagcacgtgtttgtgaagggctatgaaaagggccaaccagatgaggagctcaagcccaagaagaaagtcttcgagaagttgcaggctgacttcaaaatttctgaggagtgcatcgcacagtggaagcaaaccaacttcatgaccaagctgggctccatttcctgtaaatcgctgaaaggggggaacattagctagccagcccagcatcttccccccttcttccaccactgagtcatctgctgtctcttcagtctgctccatccatcacccatttacccatctctcaggacacggaagcagcgggtttggactctttattcggtgcagaactcggcaaggggcagcttaccctccccagaacccaggatcatcctgtctggctgcagtgagagaccaacccctaacaagggctgggccacagcagggagtccagccctaccttcttcccttggcagctggagaaatctggtttcaatataactcatttaaaaatttatgccacagtccttataattggaaaaatactggtgcccaggttttcttggagttatccaagcagctgcgcccctagctgggatctggtacctggactaggctaattacagcttctccccaacaggaaactgtgggatttgaaaaggaaagggaagggaaaacagagaacctagtggtctaccaagtggttggcaactttcccaatgtctgcttactctgaggcttggcactgggggccagggcctgccccagggctcctggaatttcccttgatccagctaggctgggacactccctaaatcagctgcgtgttgttagcatcaggcagaatgaatggcagagagtgattctgtcttcatagagggtggggtacttctccataaggcatctcagtcaaatccccatcactgtcataaattcaaataaaatgtctgaacaagggtg

SEQ ID NO: 1757 - protein, 528 aa, Homo sapiens; identical to SEQ ID NO: 72

SEQ ID NO: 1758 - DNA, 797 bp, Homo sapiens
atacttcctcccctagaaacacagattttggtatcttgacacacaattttggtatagcctgggttaatgtaaccctggtgatatgcagggatgtagcaagataagaggacctcctggggctctggtactgaggatgccctaaatcccatcagggcccctgtgtaaaggcccggattgctttggcctccacagtcactggaacccatccatagcctcactcttctcttgtcctgtgtcttcccagagaagggataaaccgccaggttgaacctctggaccctccggcaggctctgctcctggtgagcacgtgtttgtgaagggctatgaaaagggccaaccagatgaggagctcaagcccaagaagaaagtcttcgagaagttgcaggctgacttcaaaatttctgaggagtgcatcgcacagtggaagcaaaccaacttcatgaccaagctgggctccatttcctgtaaatcgctgaaaggggggaacattagctagccagcccagcatcttccccccttcttccaccactgagtcatctgctgtctcttcagtctgctccatccatcacccatttacccatctctcaggacacggaagcagcgggtttggactctttattcggtgcagaactcggcaaggggcagcttaccctccccagaacccaggatcatcctgtctggctgcagtgagagaccaacccctaacaagggctgggccacagcagggagtccagccctaccttcttcccttggcagctggagaaatctggtttcaatataactcatttaaaaattt

SEQ ID NO: 1759 - protein, 39 aa, Homo sapiens; identical to SEQ ID NO: 1737

SEQ ID NO: 1760 - DNA, 2287 bp, Homo sapiens
aagaactgaatttcagtttacatttaaatacccacacaaggctagtagccaccatattggacagcagcagccctagagcttttattaaaattaaatattcccaaggaaatgaagaagtagtatcagaaacaaaaatgttcgctttgttgtattaaaagtgttcattcctaagggatgtcccctcagaatatctagaagattctttcagaccagatttgagatataaaaaaggcagtcagctgggcgtggtggctcacacctgtaatcccagcactttgggaggctgaggcaggtggatcacgaggtcaggagttcaagaccagtctgggcaacatggtgaaaccccgtctctactaaaatacaaaaaattagctgggcgtggctgcatgcgcctgtagtcccagctactcaggaggctgaggcaggagaattgcttgagctcaggaggcagaggttgcaatgagctgagattgcgccactgcaccccagcctgggcgacggagcaagactccgtctcaaagaaaaggcagtcacaggacacaaggaataaaatggaattactgaactattaccatgtacgagcagcgttctcatcattttcacacccacattcagtgatttaaccctcatccccatcctgtgagatatagctgttgttagcttcactttataagtaacaaagccaacactggcccggcacgttggcccatgcctgtaatcctagcactttgggaggcagaagcaggcagattgcctgaacccaggagttcaagaccagcctgggtaacatagcaagaccctgtctctacaaaaagaaaagagaaaaagcagcagccaaagcttagaggggttatgtgcctagtttggagtcgcacacagctagctgggaatctaatctgggtctgtcgaactccaaagcccttcctctttcttcttactcagctgtctccctcaggttatctttaggccttgggttacctatgtgaatgtttctctgcttgtaaataccagttggtctgtgaccctactctaagcataaatggagggactagaagaattagactaacaaatacattcagctcctaaacaccctcaagttagtatagatttcagaatcaaaagacttggattttggacacgttagtctttctgaatgtattttcccttctcctacctgcctcacaagattatcacaaggatcaaataagactgttgggaaaaactcccttgatcctacttttttggattcaggtgtcctgtgccctgttctagactttatctcactaggtcttgttcgattctgcaggttgtacatcctggagacctgaagaattctgttgaagtcgcactgaacaagttgctggatccaatccgggaaaagtttaatacccctgccctgaaaaaactggccagcgctgcctacccagatccctcaaagcagaagccaatggccaaaggccctgccaagaattcagaaccagaggaggtcatcccatcccggctggatatccgtgtggggaaaatcatcactgtggagaagcacccagatgcagacagcctgtatgtagagaagattgacgtgggggaagctgaaccacggactgtggtgagcggcctggtacagttcgtgcccaaggaggaactgcaggacaggctggtagtggtgctgtgcaacctgaaaccccagaagatgagaggagtcgagtcccaaggcatgcttctgtgtgcttctatagaagggataaaccgccaggttgaacctctggaccctccggcaggctctgctcctggtgagcacgtgtttgtgaagggctatgaaaagggccaaccagatgaggagctcaagcccaagaagaaagtcttcgagaagttgcaggctgacttcaaaatttctgaggagtgcatcgcacagtggaagcaaaccaacttcatgaccaagctgggctccatttcctgtaaatcgctgaaaggggggaacattagctagccagcccagcatcttccccccttcttccaccactgagtcatctgctgtctcttcagtctgctccatccatcacccatttacccatctctcaggacacggaagcagcgggtttggactctttattcggtgcagaactcggcaaggggcagcttaccctccccagaacccaggatcatcctgtctggctgcagtgagagaccaacccctaacaagggctgggccacagcagggagtccagccctaccttcttcccttggcagctggagaaatctggtttcaatataactcatttaaaaattt

SEQ ID NO: 1761 - protein, 179 aa, Homo sapiens [sequence omitted]

SEQ ID NO: 1762 - DNA, 1612 bp, Homo sapiens
gaacaatggggttctgtccttcatcaagcatgtcctttttccccttaagtccggtaacactctctgttttcttcctagaggccaggctagaatagaaaagttcgtgctgtgatcatacttgtgatttgtcacagactcttccttcagggactggctgccctgattctctgctctgatttcttatatattaaagtatgaatgatgttgggatgtaatttaattgtccatatattcgttaccaggctaggttctgagggaatactggagtgggcagaggtgttagaagtaagggtgggggcagacatgttgaactagaggaatacaacaaaatagatataagccacaagccttcccctgaagcagctgagatgctagctgggtatacaatagtgccactcatccaatttaagaataataccatacaataaagttcagaatatatggcaaaaactacaaatagtcatgcatgtgggctaggaatagtcatgcatgtgagctaggaatgctgtcaatgagtttgttgacatggatccttttccttatagagtttgtgatcctacgagatgagaaatggggtggaaacaaaacctacacagcttacgtggacctggaaaaggactttgctgctgaggttgtacatcctggagacctgaagaattctgttgaagtcgcactgaacaagttgctggatccaatccgggaaaagtttaatacccctgccctgaaaaaactggccagcgctgcctacccagatccctcaaagcagaagccaatggccaaaggccctgccaagaattcagaaccagaggaggtcatcccatcccggctggatatccgtgtggggaaaatcatcactgtggagaagcacccagatgcagacagcctgtatgtagagaagattgacgtgggggaagctgaaccacggactgtggtgagcggcctggtacagttcgtgcccaaggaggaactgcaggacaggctggtagtggtgctgtgcaacctgaaaccccagaagatgagaggagtcgagtcccaaggcatgcttctgtgtgcttctatagaagggataaaccgccaggttgaacctctggaccctccggcaggctctgctcctggtgagcacgtgtttgtgaagggctatgaaaagggccaaccagatgaggagctcaagcccaagaagaaagtcttcgagaagttgcaggctgacttcaaaatttctgaggagtgcatcgcacagtggaagcaaaccaacttcatgaccaagctgggctccatttcctgtaaatcgctgaaaggggggaacattagctagccagcccagcatcttccccccttcttccaccactgagtcatctgctgtctcttcagtctgctccatccatcacccatttacccatctctcaggacacggaagcagcgggtttggactctttattcggtgcagaactcggcaaggggcagcttaccctccccagaacccaggatcatcctgtctggctgcagtgagagaccaacccctaacaagggctgggccacagcagggagtccagccctaccttcttcccttggcagctggagaaatctggtttcaatataactcatttaaaaattt

SEQ ID NO: 1763 - protein, 281 aa, Homo sapiens; identical to SEQ ID NO: 1741

SEQ ID NO: 1764 - DNA, 2816 bp, Homo sapiens
aaacccgcccctcagcaggcctgtgctgtgcgctcctctcccggggaccaccgtcctcagatctccccagggaatgggtcgtcctcttcctgcccccacccgcgagacgcggcagaaaagcccgcggctatcttcccgccagcaacagcctcccgccgagccggccgggacagaggcggcccccacccccactgggcaggggactgcagacggcgctccccgactctcaagacgaccagggagcttcccttttcctcagcggggtgaggggcatctgtcgcccgccgacttggaggtggaggggcagggacattccctcgccatcacctcaggagctagaacgcgcccttctcgcagcagggcgtgggcctcccaatccctccaaggggcggacggcgtgcgcaaccccctggagaagcaacaggcgcccccatccccctccaagccgggtaacgccgaccccctcgtccctcccgctcttcacctccggaagccgggccaaagcctgggcgaacgactgcgcctcactccgccccctgcgccattttatcgccccctccccgacctcccctaccccgagtcagccgggccaacaccagggggagggcaaaccagcagtgattggcaggaaaccgtcccgcctctaggagggttgtgccccgctcaggcgcctcagccccgccctccgcaccgcccaccgtgcccactggctccaccttttcccgtctcatcgacctgctcgactctctgctgctcctcactttttccggccgctgccggaggggtccaggccgagtaagcggagcgccgagcccagctgatgcaacctggctggactcgcgtgacagttcccggcacgcggcggcgacggtgacccaggaaggggctctggtgccgggctgagcgggggaagcaggggtagcggagccatgggggacgctcccagccctgaagagaaactgcaccttatcacccggaacctgcaggaggttctgggggaagagaagctgaaggagatactgaaggagcgggaacttaaaatttactggggaacggcaaccacgggcaaaccacatgtggcttactttgtgcccatgtcaaagattgcagacttcttaaaggcagggtgtgaggtaacaattctgtttgcggacctccacgcatacctggataacatgaaagccccatgggaacttctagaactccgagtcagttactatgagaatgtgatcaaagcaatgctggagagcattggtgtgcccttggagaagctcaagttcatcaaaggcactgattaccagctcagcaaagagtacacactagatgtgtacagactctcctccgtggtcacacagcacgattccaagaaggctggagctgaggtggtaaagcaggtggagcaccctttgctgagtggcctcttataccccggactgcaggctttggatgaagagtatttaaaagtagatgcccaatttggaggcattgatcagagaaagattttcacctttgcagagaagtacctccctgcacttggctattcaaaacgggtccatctgatgaatcctatggttccaggattaacaggcagcaaaatgagctcttcagaagaggagtccaagattgatctccttgatcggaaggaggatgtgaagaaaaaactgaagaaggccttctgtgagccaggaaatgtggagaacaatggggttctgtccttcatcaagcatgtcctttttccccttaagtccgagtttgtgatcctacgagatgagaaatggggtggaaacaaaacctacacagcttacgtggacctggaaaaggactttgctgctgaggttgtacatcctggagacctgaagaattctgttgaagtcgcactgaacaagttgctggatccaatccgggaaaagtttaatacccctgccctgaaaaaactggccagcgctgcctacccagatccctcaaagcagaagccaatggccaaaggccctgccaagaattcagaaccagaggaggtcatcccatcccggctggatatccgtgtggggaaaatcatcactgtggagaagcacccagatgcagacagcctgtatgtagagaagattgacgtgggggaagctgaaccacggactgtggtgagcggcctggtacagttcgtgcccaaggaggaactgcaggacaggctggtagtggtgctgtgcaacctgaaaccccagaagatgagaggagtcgagtcccaaggcatgcttctgtgtgcttctatagaagggataaaccgccaggttgaacctctggaccctccggcaggctctgctcctggtgagcacgtgtttgtgaagggctatgaaaagggccaaccagatgaggagctcaagcccaagaagaaagtcttcgagaagttgcaggctgacttcaaaatttctgaggagtgcatcgcacagtggaagcaaaccaacttcatgaccaagctgggctccatttcctgtaaatcgctgaaaggggggaacattagctagccagcccagcatcttccccccttcttccaccactgagtcatctgctgtctcttcagtctgctccatccatcacccatttacccatctctcaggacacggaagcagcgggtttggactctttattcggtgcagaactcggcaaggggcagcttaccctccccagaacccaggatcatcctgtctggctgcagtgagagaccaacccctaacaagggctgggccacagcagggagtccagccctaccttcttcccttggcagctggagaaatctggtttcaatataactcatttaaaaattt

SEQ ID NO: 1765 - protein, 528 aa, Homo sapiens; identical to SEQ ID NO: 72

SEQ ID NO: 1766 - DNA, 1059 bp, Homo sapiens
gaacaatggggttctgtccttcatcaagcatgtcctttttccccttaagtccggtaacactctctgttttcttcctagaggccaggctagaatagaaaagttcgtgctgtgatcatacttgtgatttgtcacagactcttccttcagggactggctgccctgattctctgctctgatttcttatatattaaagtatgaatgatgttgggatgtaatttaattgtccatatattcgttaccaggctaggttctgagggaatactggagtgggcagaggtgttagaagtaagggtgggggcagacatgttgaactagaggaatacaacaaaatagatataagccacaagccttcccctgaagcagctgagatgctagctgggtatacaatagtgccactcatccaatttaagaataataccatacaataaagttcagaatatatggcaaaaactacaaatagtcatgcatgtgggctaggaatagtcatgcatgtgagctaggaatgctgtcaatgagtttgttgacatggatccttttccttatagagtttgtgatcctacgagatgagaaatggggtggaaacaaaacctacacagcttacgtggacctggaaaaggactttgctgctgaggttgtacatcctggagacctgaagaattctgttgaagtcgcactgaacaagttgctggatccaatccgggaaaagtttaatacccctgccctgaaaaaactggccagcgctgcctacccagatccctcaaagcagaagccaatggccaaaggccctgccaagaattcagaaccagaggaggtcatcccatcccggctggatatccgtgtggggaaaatcatcactgtggagaagcacccagatgcagacagcctgtatgtagagaagattgacgtgggggaagctgaaccacggactgtggtgagcggcctggtacagttcgtgcccaaggaggaactgcaggacaggctggtagtggtgctgtgcaacctgaaaccccagaagatgagaggagtcgagtcccaaggcatgcttctgtgtgcttctat

SEQ ID NO: 1767 - protein, 196 aa, Homo sapiens
MWARNSHACELGMLSMSLLTWILFLIEFVILRDEKWGGNKTYTAYVDLEKDFAAEVVHPGDLKNSVEVALNKLLDPIREKFNTPALKKLASAAYPDPSKQKPMAKGPAKNSEPEEVIPSRLDIRVGKIITVEKHPDADSLYVEKIDVGEAEPRTVVSGLVQFVPKEELQDRLVVVLCNLKPQKMRGVESQGMLLCA

SEQ ID NO: 1768 - DNA, 1120 bp, Homo sapiens
tgggcaggggactgcagacggcgctccccgactctcaagacgaccagggagcttcccttttcctcagcggggtgaggggcatctgtcgcccgccgacttggaggtggaggggcagggacattccctcgccatcacctcaggagctagaacgcgcccttctcgcagcagggcgtgggcctcccaatccctccaaggggcggacggcgtgcgcaaccccctggagaagcaacaggcgcccccatccccctccaagccgggtaacgccgaccccctcgtccctcccgctcttcacctccggaagccgggccaaagcctgggcgaacgactgcgcctcactccgccccctgcgccattttatcgccccctccccgacctcccctaccccgagtcagccgggccaacaccagggggagggcaaaccagcagtgattggcaggaaaccgtcccgcctctaggagggttgtgccccgctcaggcgcctcagccccgccctccgcaccgcccaccgtgcccactggctccaccttttcccgtctcatcgacctgctcgactctctgctgctcctcactttttccggccgctgccggaggggtccaggccgagtaagcggagcgccgagcccagctgatgcaacctggctggactcgcgtgacagttcccggcacgcggcggcgacggtgacccaggaaggggctctggtgccgggctgagcgggggaagcaggggtagcggagccatgggggacgctcccagccctgaagagaaactgcaccttatcacccggaacctgcaggaggttctgggggaagagaagctgaaggagatactgaaggagcgggaacttaaaatttactggggaacggcaaccacgggcaaaccacatgtggcttactttgtgcccatgtcaaagattgcagacttcttaaaggcagggtgtgaggtaacaattctgtttgcggacctccacgcatacctggataacatgaaagccccatgggaacttctagaactccgagtcagttactatgagaattttgtgatcctacgagatgagaaatggggtggaaacaaaacctacacagcttacgtggacctggaaaaggactttgctgctgaggt

SEQ ID NO: 1769 - protein, 126 aa, Homo sapiens
MGDAPSPEEKLHLITRNLQEVLGEEKLKEILKERELKIYWGTATTGKPHVAYFVPMSKIADFLKAGCEVTILFADLHAYLDNMKAPWELLELRVSYYENFVILRDEKWGGNKTYTAYVDLEKDFAA

SEQ ID NO: 1770 - DNA, 953 bp, Homo sapiens
gctagattttcttttatactttggtttagaaaggggaggaggagcctagctgaagcaatcttacagaagtaaaacaggcaaaaaagttagaaagacaaatggttacgggaaaacaaacagttccgggcgcaggggctttaaatccatcacaaggtgatagacgcggaggctttgggtaccatcaaccagacacaaatgctggggcttagggtaatatcaactgggcaaattcctgggaactgcggctatagctttccacaatatcttatcagttatttgcgttctttgatgtgctgggagtcagcttgcacaagttaagtccttgaggaaggggggtgggtaagaggctgcaaggggctacaagtgaaggagccaaaatggagtttgtctggctctctcagctaagggagagtcaattcagattaaaacaaggtagggtatcacatctgcactgagaacatggctggacctccttgatggctctgagcctggatctccactgacacatgctgttgttttccttgtcacatggtaaaggatgagcaaggtgaggcactgacattaaactaactcttctgcttccacaataggaggttctgggggaagagaagctgaaggagatactgaaggagcgggaacttaaaatttactggggaacggcaaccacgggcaaaccacatgtggcttactttgtgcccatgtcaaagattgcagacttcttaaaggcagggtgtgaggtaacaattctgtttgcggacctccacgcatacctggataacatgaaagccccatgggaacttctagaactccgagtcagttactatgagaatgtgatcaaagcaatgctggagagcattggtgtgcccttggagaagctcaagttcatcaaaggcactgattaccagctcagcaaagagtacacactagatgtgtacagactctcctccgtggtc

SEQ ID NO: 1771 - protein, 84 aa, Homo sapiens
MSKIADFLKAGCEVTILFADLHAYLDNMKAPWELLELRVSYYENVIKAMLESIGVPLEKLKFIKGTDYQLSKEYTLDVYRLSSV

SEQ ID NO: 1772 - DNA, 498 bp, Homo sapiens
tgtggggccggggactcggcgctggcgcagctctgagagagcctgtagatctcactgctggtcggtcagtcaatcaagcagcccttccctgggttccccagaaatcacagtgggctcacctcttgcgtccagttgtcttgtgttggagccaaactttgaatccaggactcccattccacccccctattaagtgccagacgtggtgcttagtcgctggggatacgtcaagggcctgccagagcttgtctgaaggggatcagacgttaaaaatgacccattacggttcaagaggttctgggggaagagaagctgaaggagatactgaaggagcgggaacttaaaatttactggggaacggcaaccacgggcaaaccacatgtggcttactttgtgcccatgtcaaagattgcagacttcttaaaggcagggtgtgaggtaacaattctgtttgcggacctccacgcatacctggataacatgaaagccccatgggaactt

SEQ ID NO: 1773 - protein, 33 aa, Homo sapiens
MSKIADFLKAGCEVTILFADLHAYLDNMKAPWE

SEQ ID NO: 1774 - DNA, 773 bp, Homo sapiens
gctagattttcttttatactttggtttagaaaggggaggaggagcctagctgaagcaatcttacagaagtaaaacaggcaaaaaagttagaaagacaaatggttacgggaaaacaaacagttccgggcgcaggggctttaaatccatcacaaggtgatagacgcggaggctttgggtaccatcaaccagacacaaatgctggggcttagggtaatatcaactgggcaaattcctgggaactgcggctatagctttccacaatatcttatcagttatttgcgttctttgatgtgctgggagtcagcttgcacaagttaagtccttgaggaaggggggtgggtaagaggctgcaaggggctacaagtgaaggagccaaaatggagtttgtctggctctctcagctaagggagagtcaattcagattaaaacaaggtagggtatcacatctgcactgagaacatggctggacctccttgatggctctgagcctggatctccactgacacatgctgttgttttccttgtcacatggtaaaggatgagcaaggtgaggcactgacattaaactaactcttctgcttccacaataggaggttctgggggaagagaagctgaaggagatactgaaggagcgggaacttaaaatttactggggaacggcaaccacgggcaaaccacatgtggcttactttgtgcccatgtcaaagattgcagacttcttaaaggcagggtgtgaggtaacaattctgtttgcggacctccacgcatacctg

SEQ ID NO: 1775 - protein, 40 aa, Homo sapiens
MLGLRVISTGQIPGNCGYSFPQYLISYLRSLMCWESACTS

SEQ ID NO: 1776 - DNA, 4344 bp, Homo sapiens
gatgagacgggaaaaggtggagccagtgggcacggtgggcggtgcggagggcggggctgaggcgcctgagcggggcacaaccctcctagaggcgggacggtttcctgccaatcactgctggtttgccctccccctggtgttggcccggctgactcggggaaggtgggagtcaatcattttgacaagtctcctgaaaggaacagctagcaggaactgaaacctttttccatttggtctcgtggcaaaggcagagattgctccagcagctccacacaaaatgatgtgctcacgggtgccctctgaacagtcttctggtacctctctcttgcctaaagacggtgccccattttcttgggattccttggatgaggatggattggatgactccttgctggagctgtcagagggagaagaagatgatggtgatgtaaattacacagaggaagagattgatgcactgttgaaggaagatgacccatcatatgagcagtcttctggggaagatgatggtgggcatgttgagaagggagaaagagggagtcaaattctacttgatactccccgagagaaaaattcatcgtacagcctgggaccagtagctgagactcctgacctcttcaaactacctcagctaagtacatcaagtggtcatggaccagctcatactaaaccattaaacagacgctctgtactagaaaagaatcttataaaagtaactgttgcaccatttaatccaacagtttgtgatgctctgcttgataaggacgagactgattcgtccaaagatactgaaaaactctcttcccttggagaagagatgagagaagatggtcttagcccaaatgaaagcaaactttgtactgaatctgaagggatcagccccaataactctgcctggaatgggccccagctctcttcttcaaacaataactttcaacagactgtctctgataaaaatatgcctgacagtgagaaccctacgtctgtattctctcggatctcagaccattcagagactcctaatatggagttatcctgcagaaatggtggttcacacaagtcaagttgtgaaatgagatctctggttgtttccacctcatcaaacaaacaggatgttcttaacaaggattctgggaagatgaaaggccatgagagaagactaggcaaagtcattcctgttctacaaactaagaccaggactaatgttccgacgttttcacagtcaaatctagaacagcagaagcagctttatctcaggagtgtcattgctcatatagaagacccagaggacactaaccaaggtatctcgggggagctttgtgccttgatggatcaagttcatcatatgcagcactcaaaatggcagcatccttcggacctcaccacgcgaaactacgcccgccgacagaaacatctgcaaagatacagtctgactcagtgggttgacaggaacatgcgaagccaccatcggttccagcgtctcccagacttctcgtacagttaatttgtgtcatcccatcagcaatgaaggtccctatccagggtcctgcttggagcagcatttcatgttcttttgctgttttgtgctttgccgattttggattttatttttcacaaaatttttatttaaaaaactcgtcaccttttggaaatgcccattgccgacttgaatttttttgtatgaagtccctcctgattttgtgtgtgtgtgtctgtgtttaagcaagcgttcggttggtatagtttttttttgtttttttaatttaaattgaaggtagctgcctcctgaaagccagcattaagccagaacacccaggttcaagcaaaagacccacctctctgcagaggcaaagtctactttctggtacctcaaagaaatcattgttcaatcttccataaggaagagattctttaccaggctgtgagccagtgttagataacttgtgaatggatataagttacttttaacaacccctcttacttttttatttgaatcctctgaatacctgtcagtattttaaagttggcaatccaggacattataagtaggatggagcaggagaagaatcctattgaaaggacaaattaaaatagtaaatcctctcctctcccttctgtaggtactagctgccttgatttttttttgtgggtgggggggattttttcattccttattgaacttattttgcacaatagtgtttacaaatcttatacatcttactttgacagaagacttataataccttgtggtcttgagactggttgtctcctttgcctttcttcaaggattttcctttttctttttaccccccagtgaccactctgctctttaggattctagtggcagtattcttgtaacctgttagacgtggatatacctcttcaggatggcctccttgctgtctttattgaagagctgcccacccagagtcttgactctagggcaggctagtgctattgtggtgtcagttgatatttagtttcatttgctgaaccccaaatttgagtgttagttagggagcctccattctgtgggagagtgtggaaaggcactcttttttctccatattagttaacaagaggtgtctttaggccctggatgttaccatctcatttggtcaagcccctgatacctagtttcacatggatgctaacgtggatgtaatatagttgtgacagcctatgcacaaaagcattacctgatcttaaggtttggtattctaaccaaagttgacagactgtgcgtctgtcttaatggatgtcttaggagttggttattctctcttttttttttgagacggagtttcgctgttgttgcccaggctggagtgcaatggcgtatctccactcaccacaacctccgcctcctgggttcaagggattctcctgtcttagcctcctgagtagctgtgattacaggcatgcgccaccatgcctggctaatttcatattttttagtagagacaggatttctccatgttggtcaggctggtcttgaactcctgacctcaggtgatctgcccacctcggcctcctaaagtgctgggattacaggcatgagccactgcacctggccggttattctctctttacagatagctatagacatcattttaggaagtgttgcagtctggcatttgtgctattgttcattctctgtgaaggctgttcatagttgctatagcctgtgtttagttttgtgatttcatcaatcccatctttctgtgtgagtaatgcattctaaacatcctaccccactttagaaacggacgtggggaacgcttggtcatttaagccaacaataaatttaggtgaatgtccctaagtgtttactgtttttatccagtcaaggatttgcttttccttgaacatttgttttaaattctggggccaaaatgcaaaggagaagttctattcaaaggcagtagttgaaatctattattttagttagcctacttggcatttactacatcggtcacttctccaggctgccctaaattaggttgatggagtgagacatgccaaacatccacctttgggaccatagcatagttaaaattaaatgtagttggaatagctagcattgcagctacagtagggaactgtagtctagttccctacagaaaacccaaggagtgaagggacaggattttgcctaggcaaaaatctaagactcgtgccctcctggtacatggggttttaagactgaatgtgtaataggagcactgcctttgccaaatcaaatgagtgacaggttaactagaaaatgtgacaatcacatttcctcttagctcaaataattctgtttttccaaagctttagcagcttaattaaatctgttggactgggggaggagagagctgttctctagtggttaacatggtattctttaagaagaaaaaacaaagccaaagaaaactcattatctggcatgttcgccttaaagatggtactgggtagaatctggagttttcatctcttttcaaagctgcatatctcttatatttggtattggcctctaagtctaatattgcagttggaattcttgctgtattattttttaagcaagtgttaggtgcatttaactgctttcttcatccatgacgacattcccaccatgggggtcttgacaaagcagagtaaaaatatgctgtttacattgtttacttacaagtaaggagcctgaaataacctgtagtttcgaatgcaggccctgatttactggcgttgtcagtttcaattatgaaactgaagtttggtgcctcctctttatcatgttttttcccttgtagcagttgtgtttaatgtcattaaaaagaaataaaagttctttgtcagtgacat

SEQ ID NO: 1777 - protein, 408 aa, Homo sapiens; identical to SEQ ID NO: 76

SEQ ID NO: 1778 - DNA, 3636 bp, Homo sapiens
acaaccctcctagaggcgggacggtttcctgccaatcactgctggtttgccctccccctggtgttggcccggctgactcggggtaggggaggtcggggagggggcgataaaatggcgcagggggcggagtgaggcgcagtcgttcgcccaggctttggcccggcttccggaggaaggtgggagtcaatcattttgacaagtctcctgaaaggaacagctagcaggaactgaaacctttttccatttggtctcgtggcaaaggcagagattgctccagcagctccacacaaaatgatgtgctcacgggtgccctctgaacagtcttctggtacctctctcttgcctaaagacggtgccccattttcttgggattccttggatgaggatggattggatgactccttgctggagctgtcagagggagaagaagatgatggtgatgtaaattacacagaggaagagattgatgcactgttgaaggaagatgacccatcatatgagcagtcttctggggaagatgatggtgggcatgttgagaagggagaaagagggagtcaaattctacttgatactccccgagagaaaaattcatcgtacagcctgggaccagtagctgagactcctgacctcttcaaactacctcagctaagtacatcaagtggtcatggaccagctcatactaaaccattaaacagacgctctgtactagaaaagaatcttataaaagtaactgttgcaccatttaatccaacagtttgtgatgctctgcttgataaggacgagactgattcgtccaaagatactgaaaaactctcttcccttggagaagagatgagagaagatggtcttagcccaaatgaaagcaaactttgtactgaatctgaagggatcagccccaataactctgcctggaatgggccccagctctcttcttcaaacaataactttcaacagactgtctctgataaaaatatgcctgacagtgagaaccctacgtctgtattctctcggatctcagaccattcagagactcctaatatggagttatcctgcagaaatggtggttcacacaagtcaagttgtgaaatgagatctctggttgtttccacctcatcaaacaaacaggatgttcttaacaaggattctgggaagatgaaaggccatgagagaagactaggcaaagtcattcctgttctacaaactaagaccaggactaatgttccgacgttttcacagtcaaatctagaacagcagaagcagctttatctcaggagtgtcattgctcatatagaagacccagaggacactaaccaaggatgaatccctagaagtggaattgctgggcgcagtggctcatgcctgtaatcccagcactttgggaggctgaggcagatggatcatctgaggtcaggagttcaagaccagcctgactaacatgatgaaacctgtctctactaaaaatataaaaattagctgggcgtggtggtgggcgcctgtaatcccagctactcgggaggctgaggcaggagaatctcttgaacccaagaggcagaagttgtagtgagcgaagatcaggccattgcactccagcctgggcaacgagcaaaattccatctcaaaagaaaaaaatgttcattttctaaatatataatttcttctacagttattaactagcattcttttgtaaagattttctattactttactattactataacctcatggatttttttaaagaatcaatatgttgtaatcaattatagctactgttcttggtttttctttttgatgctcaatttgtctcaaatttgataaatgggagctccttcaagatgactcttgttcctattgacatgatcccattaatctttttttttaattgtggtaaaaaaaatacatctaacataaaattaccatcttaaccatttttaagtgcacaattcagtaatgttacatatattcacattgttgtgaaacatatctccagaacctcttcatcttgcaaatctaaaactctatacctacacaacagttccccctctctcccttcagtctctggtaaccaccattctactttctttttttttaaatatgactactttagataccttttataagtggaatcatacaatatttatctttttgtgactggcttatttcgtttagtataatgtcttcaagatttacccattgtggcatgtgacaggatttccttcctttttaaatatttttatttttattttttttctatttttctcaccactcaatttccttcctttttaaggctgaataatattccattgtatatatacacaccattttgtttaatccattcatctgtcagtagacatttgggttgcttccacttcttggctattgtgaattgtgccactatgaacatgggtctacagatatctctttaagaccctatttttaattcttctggatatatatgcagaagtgggattgctggaccatatggtaggtctgtttttaattttttgaggaacttcatactgtttttcatagcagttgcaccattttgcagtcctaccaacagtgcacaagagttctaatttttccccatccttgccagcacttatttttttgtgctttttttttttttttgaggctggagtctcgccctgtcatccaggctggagtgcagtggtacagtcttggctcactgcaacccctacctcccacattcaagtgattctcgtgcctcagcctcccaagtagctgggactacaggcgcactccaccacgtctggctaatttttgtattttagtagagatggggttttgccatgttggtcaggctggtctcgaactcctgagctcaagtgatctccccatctcggcctcccaaagtgctgggattgcaggtgtgaaccactgtgcctggcttgtgtttttgtttttgtttgtttttttttatagtagctatcctaaagggtgttaaatcagtattcattgtttttgtgtcccaactaagtattgttcactgaaaagccaagtagtatattatggcttcattttctttcttgaattgtttatttttgtagagttgttaattgcttcagtttctttcattaaattttttttttgggagagctttttcctagagccttctgttctactgctccaatttgcactgcttgttctttagccctgcaacagagctgtcatcccaggattttcctctgctgccctcctgggttgaatcctgtttcttggatcctatatcttcctctttcttatttttggttttagtagaggacatcctctgagaatatctaagaaagggtgcatagatgttttctttgtgtttacatatctgaacatgtctttattctatcctcatacttgattgatagtttgatataaaattctaaatttaaaatcaatttttgctcagaaatttgaagacatggccaggcgcagtggctcacgcctgtaatcccagcactttgggaggctgaggtgggcggatcccaaggtcaagagttcgagaccagtctggccaatatggtgaaaccccatctctactaaaaaaaaaacatacaaaaattagcctggtgtggtggcgggtgcctgtagtccagcctgggcaacaaaacaagactccatctc

SEQ ID NO: 1779 - protein, 342 aa, Homo sapiens
MMCSRVPSEQSSGTSLLPKDGAPFSWDSLDEDGLDDSLLELSEGEEDDGDVNYTEEEIDALLKEDDPSYEQSSGEDDGGHVEKGERGSQILLDTPREKNSSYSLGPVAETPDLFKLPQLSTSSGHGPAHTKPLNRRSVLEKNLIKVTVAPFNPTVCDALLDKDETDSSKDTEKLSSLGEEMREDGLSPNESKLCTESEGISPNNSAWNGPQLSSSNNNFQQTVSDKNMPDSENPTSVFSRISDHSETPNMELSCRNGGSHKSSCEMRSLVVSTSSNKQDVLNKDSGKMKGHERRLGKVIPVLQTKTRTNVPTFSQSNLEQQKQLYLRSVIAHIEDPEDTNQG

SEQ ID NO: 1780 - DNA, 1748 bp, Homo sapiens
acaaccctcctagaggcgggacggtttcctgccaatcactgctggtttgccctccccctggtgttggcccggctgactcggggtaggggaggtcggggagggggcgataaaatggcgcagggggcggagtgaggcgcagtcgttcgcccaggctttggcccggcttccggaggaaggtgggagtcaatcattttgacaagtctcctgaaaggaacagctagcaggaactgaaacctttttccatttggtctcgtggcaaaggcagagattgctccagcagctccacacaaaatgatgtgctcacgggtgccctctgaacagtcttctggtacctctctcttgcctaaagacggtgccccattttcttgggattccttggatgaggatggattggatgactccttgctggagctgtcagagggagaagaagatgatggtgatgtaaattacacagaggaagagattgatgcactgttgaaggaagatgacccatcatatgagcagtcttctggggaagatgatggtgggcatgttgagaagggagaaagagggagtcaaattctacttgatactccccgagagaaaaattcatcgtacagcctgggaccagtagctgagactcctgacctcttcaaactacctcagctaagtacatcaagtggtcatggaccagctcatactaaaccattaaacagacgctctgtactagaaaagaatcttataaaagtaactgttgcaccatttaatccaacagtttgtgatgctctgcttgataaggacgagactgattcgtccaaagatactgaaaaactctcttcccttggagaagagatgagagaagatggtcttagcccaaatgaaagcaaactttgtactgaatctgaagggatcagccccaataactctgcctggaatgggccccagctctcttcttcaaacaataactttcaacagactgtctctgataaaaatatgcctgacagtgagaaccctacgtctgtattctctcggatctcagaccattcagagactcctaatatggagttatcctgcagaaatggtggttcacacaagtcaagttgtgaaatgagatctctggttgtttccacctcatcaaacaaacaggatgttcttaacaaggattctgggaagatgaaaggccatgagagaagactaggcaaagtcattcctgttctacaaactaagaccaggactaatgttccgacgttttcacagtcaaatctagaacagcagaagcagctttatctcaggagtgtcattgctcatatagaagacccagaggacactaaccaaggatgaatccctagaagtggaattgctggacagggtttcaccaagttggccaggctgttctcgagctcttgacttcaagtgatcagccctcctcagcctcccaaagtgctgagattacgggtgtgagcccccgcgcctgactgagaattaacattttaatattgagtgttttgattaaagtcttctctaatttccttcataaatgttttgtagcttttgtacagtcttgcacatcttttatccaatttatcccggagtgtttcatattgtgatgcttttgtaaaatgatttagtttttaaaatttcagtatctgttcattgctattatatagaaatgtaattgatttttgtgtcttggtcttacattctataaccttcctaaattcttttattagttttagtaactttttaatagatttcatcaggttttccct

SEQ ID NO: 1781 - protein, 342 aa, Homo sapiens; identical to SEQ ID NO: 1779

SEQ ID NO: 1782 - DNA, 1683 bp, Homo sapiens
acaaccctcctagaggcgggacggtttcctgccaatcactgctggtttgccctccccctggtgttggcccggctgactcggggtaggggaggtcggggagggggcgataaaatggcgcagggggcggagtgaggcgcagtcgttcgcccaggctttggcccggcttccggaggaaggtgggagtcaatcattttgacaagtctcctgaaaggaacagctagcaggaactgaaacctttttccatttggtctcgtggcaaaggcagagattgctccagcagctccacacaaaatgatgtgctcacgggtgccctctgaacagtcttctggtacctctctcttgcctaaagacggtgccccattttcttgggattccttggatgaggatggattggatgactccttgctggagctgtcagagggagaagaagatgatggtgatgtaaattacacagaggaagagattgatgcactgttgaaggaagatgacccatcatatgagcagtcttctggggaagatgatggtgggcatgttgagaagggagaaagagggagtcaaattctacttgatactccccgagagaaaaattcatcgtacagcctgggaccagtagctgagactcctgacctcttcaaactacctcagctaagtacatcaagtggtcatggaccagctcatactaaaccattaaacagacgctctgtactagaaaagaatcttataaaagtaactgttgcaccatttaatccaacagtttgtgatgctctgcttgataaggacgagactgattcgtccaaagatactgaaaaactctcttcccttggagaagagatgagagaagatggtcttagcccaaatgaaagcaaactttgtactgaatctgaagggatcagccccaataactctgcctggaatgggccccagctctcttcttcaaacaataactttcaacagactgtctctgataaaaatatgcctgacagtgagaaccctacgtctgtattctctcggatctcagaccattcagagactcctaatatggagttatcctgcagaaatggtggttcacacaagtcaagttgtgaaatgagatctctggttgtttccacctcatcaaacaaacaggatgttcttaacaaggattctgggaagatgaaaggccatgagagaagactaggcaaagtcattcctgttctacaaactaagaccaggactaatgttccgacgttttcacagtcaaatctagaacagcagaagcagctttatctcaggagtgtcattgctcatatagaagacccagaggacactaaccaaggtatctcgggggagctttgtgccttgatggatcaagttcatcatatgcagcactcaaaatggcagcatccttcggacctcaccacgcgaaactacgcccgccgacagaaacatctgcaaagatacagtctgactcagtgggttgacaggaacatgcgaagccaccatcggttccagcgtctcccagacttctcgtacagttaatttgtgtcatcccatcagcaatgaaggtccctatccagggtcctgcttggagcagcatttcatgttcttttgctgttttgtgctttgccgattttggattttatttttcacaaaatttttatttaaaaaactcgtcaccttttggaaatgcccattgccgacttg

SEQ ID NO: 1783 - protein, 408 aa, Homo sapiens; identical to SEQ ID NO: 76

SEQ ID NO: 1784 - DNA, 4358 bp, Homo sapiens
acaaccctcctagaggcgggacggtttcctgccaatcactgctggtttgccctccccctggtgttggcccggctgactcggggtaggggaggtcggggagggggcgataaaatggcgcagggggcggagtgaggcgcagtcgttcgcccaggctttggcccggcttccggaggaaggtgggagtcaatcattttgacaagtctcctgaaaggaacagctagcaggaactgaaacctttttccatttggtctcgtggcaaaggcagagattgctccagcagctccacacaaaatgatgtgctcacgggtgccctctgaacagtcttctggtacctctctcttgcctaaagacggtgccccattttcttgggattccttggatgaggatggattggatgactccttgctggagctgtcagagggagaagaagatgatggtgatgtaaattacacagaggaagagattgatgcactgttgaaggaagatgacccatcatatgagcagtcttctggggaagatgatggtgggcatgttgagaagggagaaagagggagtcaaattctacttgatactccccgagagaaaaattcatcgtacagcctgggaccagtagctgagactcctgacctcttcaaactacctcagctaagtacatcaagtggtcatggaccagctcatactaaaccattaaacagacgctctgtactagaaaagaatcttataaaagtaactgttgcaccatttaatccaacagtttgtgatgctctgcttgataaggacgagactgattcgtccaaagatactgaaaaactctcttcccttggagaagagatgagagaagatggtcttagcccaaatgaaagcaaactttgtactgaatctgaagggatcagccccaataactctgcctggaatgggccccagctctcttcttcaaacaataactttcaacagactgtctctgataaaaatatgcctgacagtgagaaccctacgtctgtattctctcggatctcagaccattcagagactcctaatatggagttatcctgcagaaatggtggttcacacaagtcaagttgtgaaatgagatctctggttgtttccacctcatcaaacaaacaggatgttcttaacaaggattctgggaagatgaaaggccatgagagaagactaggcaaagtcattcctgttctacaaactaagaccaggactaatgttccgacgttttcacagtcaaatctagaacagcagaagcagctttatctcaggagtgtcattgctcatatagaagacccagaggacactaaccaaggtatctcgggggagctttgtgccttgatggatcaagttcatcatatgcagcactcaaaatggcagcatccttcggacctcaccacgcgaaactacgcccgccgacagaaacatctgcaaagatacagtctgactcagtgggttgacaggaacatgcgaagccaccatcggttccagcgtctcccagacttctcgtacagttaatttgtgtcatcccatcagcaatgaaggtccctatccagggtcctgcttggagcagcatttcatgttcttttgctgttttgtgctttgccgattttggattttatttttcacaaaatttttatttaaaaaactcgtcaccttttggaaatgcccattgccgacttgaatttttttgtatgaagtccctcctgattttgtgtgtgtgtgtctgtgtttaagcaagcgttcggttggtatagtttttttttgtttttttaatttaaattgaaggtagctgcctcctgaaagccagcattaagccagaacacccaggttcaagcaaaagacccacctctctgcagaggcaaagtctactttctggtacctcaaagaaatcattgttcaatcttccataaggaagagattctttaccaggctgtgagccagtgttagataacttgtgaatggatataagttacttttaacaacccctcttacttttttatttgaatcctctgaatacctgtcagtattttaaagttggcaatccaggacattataagtaggatggagcaggagaagaatcctattgaaaggacaaattaaaatagtaaatcctctcctctcccttctgtaggtactagctgccttgatttttttttgtgggtgggggggattttttcattccttattgaacttattttgcacaatagtgtttacaaatcttatacatcttactttgacagaagacttataataccttgtggtcttgagactggttgtctcctttgcctttcttcaaggattttcctttttctttttaccccccagtgaccactctgctctttaggattctagtggcagtattcttgtaacctgttagacgtggatatacctcttcaggatggcctccttgctgtctttattgaagagctgcccacccagagtcttgactctagggcaggctagtgctattgtggtgtcagttgatatttagtttcatttgctgaaccccaaatttgagtgttagttagggagcctccattctgtgggagagtgtggaaaggcactcttttttctccatattagttaacaagaggtgtctttaggccctggatgttaccatctcatttggtcaagcccctgatacctagtttcacatggatgctaacgtggatgtaatatagttgtgacagcctatgcacaaaagcattacctgatcttaaggtttggtattctaaccaaagttgacagactgtgcgtctgtcttaatggatgtcttaggagttggttattctctcttttttttttgagacggagtttcgctgttgttgcccaggctggagtgcaatggcgtatctccactcaccacaacctccgcctcctgggttcaagggattctcctgtcttagcctcctgagtagctgtgattacaggcatgcgccaccatgcctggctaatttcatattttttagtagagacaggatttctccatgttggtcaggctggtcttgaactcctgacctcaggtgatctgcccacctcggcctcctaaagtgctgggattacaggcatgagccactgcacctggccggttattctctctttacagatagctatagacatcattttaggaagtgttgcagtctggcatttgtgctattgttcattctctgtgaaggctgttcatagttgctatagcctgtgtttagttttgtgatttcatcaatcccatctttctgtgtgagtaatgcattctaaacatcctaccccactttagaaacggacgtggggaacgcttggtcatttaagccaacaataaatttaggtgaatgtccctaagtgtttactgtttttatccagtcaaggatttgcttttccttgaacatttgttttaaattctggggccaaaatgcaaaggagaagttctattcaaaggcagtagttgaaatctattattttagttagcctacttggcatttactacatcggtcacttctccaggctgccctaaattaggttgatggagtgagacatgccaaacatccacctttgggaccatagcatagttaaaattaaatgtagttggaatagctagcattgcagctacagtagggaactgtagtctagttccctacagaaaacccaaggagtgaagggacaggattttgcctaggcaaaaatctaagactcgtgccctcctggtacatggggttttaagactgaatgtgtaataggagcactgcctttgccaaatcaaatgagtgacaggttaactagaaaatgtgacaatcacatttcctcttagctcaaataattctgtttttccaaagctttagcagcttaattaaatctgttggactgggggaggagagagctgttctctagtggttaacatggtattctttaagaagaaaaaacaaagccaaagaaaactcattatctggcatgttcgccttaaagatggtactgggtagaatctggagttttcatctcttttcaaagctgcatatctcttatatttggtattggcctctaagtctaatattgcagttggaattcttgctgtattattttttaagcaagtgttaggtgcatttaactgctttcttcatccatgacgacattcccaccatgggggtcttgacaaagcagagtaaaaatatgctgtttacattgtttacttacaagtaaggagcctgaaataacctgtagtttcgaatgcaggccctgatttactggcgttgtcagtttcaattatgaaactgaagtttggtgcctcctctttatcatgttttttcccttgtagcagttgtgtttaatgtcattaaaaagaaataaaagttctttgtcagtgacat

SEQ ID NO: 1785 - protein, 408 aa, Homo sapiens; identical to SEQ ID NO: 76

SEQ ID NO: 1786 - DNA, 345 bp, Homo sapiens
gtcgttcgcccaggctttggcccggcttccggagggactccaagctctaccagacctgcctgaagtgttttaaagcacattttctttttgaaaagaaacctgttgctgcagcttagcgcatctgttctctgtgtccatgtgggaggagaatcctggcaccctcatctagtgaaatgttacctaaagcaaagatttgcagccctgggttgttttttccgtcctgcagtgtttttagttacttcgaaggaatttgcaaaactgttacagataatttcagttctttttgattttttgtaaatgttgtgcctattttttatggagtgataaagcctgctgagtgcgttt

SEQ ID NO: 1787 - protein, 37 aa, Homo sapiens
MLPKAKICSPGLFFPSCSVFSYFEGICKTVTDNFSSF

SEQ ID NO: 1788 - DNA, 417 bp, Homo sapiens
ggatgggggcgcctgttgcttctccagggggttgcgcacgccgtccgccccttggagggattgggaggcccacgccctgctgcgagaagggcgcgttctagctcctgagggactccaagctctaccagacctgcctgaagtgttttaaagcacattttctttttgaaaagaaacctgttgctgcagcttagcgcatctgttctctgtgtccatgtgggaggagaatcctggcaccctcatctagtgaaatgttacctaaagcaaagatttgcagccctgggttgttttttccgtcctgcagtgtttttagttacttcgaaggaatttgcaaaactgttacagataatttcagttctttttgattttttgtaaatgttgtgcctattttttatggagtgataaagcctgctgagtgcg

SEQ ID NO: 1789 - protein, 37 aa, Homo sapiens; identical to SEQ ID NO: 1787

SEQ ID NO: 1790 - DNA, 557 bp, Homo sapiens
ctcgcgtattgtttttttaataaagtaattgcagggggaaaagatctgaaatttttagattaaaatacacataagacattatcagccagtcacattgtatggaccttacttggatactgattattttttagccttaaaaaaaaatatgacataagataattggaaatctgaactgtatattttatgataaggaattcttgttatttacagatgaaatgatacaatgcctgggatttgcttcaaaacaatctggtaaaggtgggaagtggatggggcaagattagctatgagttgatagtcattggggttgagtgatgggtatgtggtggttcattatactattatgttacttatgtatatgttttactttctttataataagtacttttgaaaatgaggaacaaaactagtttgcttagttgcataatttttttttctttgaagatttctttggtgtgcttgactcagaaaatccaactttctggtattacaaaaaaaatcaagattaaaattaatacatcgagcaccttaaagcataatacagttgactttgtaat

SEQ ID NO: 1791 - protein, 53 aa, Homo sapiens [sequence omitted]

SEQ ID NO: 1792 - DNA, 13723 bp, Homo sapiens
agcgggattggagcgagtcatttccgagagcgcagcgcgcctctccccggccgggcggacacttggttcattccagccgcagaagctcagggctcccgcgtaccgggattttttccgagcagaaaaaagctccagagctctcctgacctcctttctcctcggcggcgagcggagcctctccctcggcgctgccggccgcgccatgccgcgctcgcggggacgggagctggggcgctgcggctgccccgcggggagggctcgcggcgaaaccgggatttcggcgcttgtgccgggcgccgggagccgctggggccgcccgccgccgccaacgccgccgcctctgctgctgttgctgggctgtgggttgctcagcgtctcggccgccgcgggccagaactgcacgttccaactgcacggtcccaatgggacagttgagagcccagggttcccatatggctaccccaattacgccaactgcacgtggaccatcaccgcggaagagcagcacagaatccagcttgtgttccagtcctttgccctggaagaggactttgatgtcctgtcggtgtttgatggtccaccccagccagagaatctgcgtacgaggctcacaggctttcagctgccagccaccattgttagtgcagccaccaccctctctctgcgcctcatcagcgactatgcagtcagtgcccaaggcttccacgccacctatgaagttctccccagccacacatgtgggaacccagggaggctgcccaatggcatccagcagggttcaaccttcaacctcggtgacaaggtccgctacagctgcaaccttggcttcttcctggagggccacgccgtgctcacctgccacgctggctctgagaacagcgccacgtgggacttccccctgccttcctgcagagctgatgatgcctgtggtgggaccctgcggggccagagtggcatcatctccagcccccacttcccctcggagtaccataacaatgccgactgcacatggaccatcctggctgagctgggggacaccatcgccctggtgtttattgacttccagctggaggatggttacgactttctggaagtcactgggacagaaggctcctccctctggttcaccggagccagcctcccagcccccgttatcagcagcaagaactggctgcgactgcacttcacatcggatggcaaccaccggcagcgcggattcagtgcccaataccaagtcaagaagcaaattgagttgaagtctcgaggtgtgaagctgatgcccagcaaagacaacagccagaagacgtctgtgttaactcaggttggtgtgtcccaaggacataatatgtgtccagaccctggcatacccgaaaggggcaaaagactaggctcggatttcaggttaggatccagcgtccagttcacctgcaacgagggctatgacctgcaagggtccaagcggatcacctgtatgaaagtgagcgacatgtttgcggcctggagcgaccacaggccagtctgccgagcccgcatgtgtgatgcccaccttcgaggcccctcgggcatcatcacctcccccaatttccccattcagtatgacaacaatgcacactgtgtgtggatcatcacagcactcaacccctccaaggtgatcaagctcgcctttgaggagtttgatttggagaggggctatgacaccctgacggtcggtgatggtggtcaggatggggaccagaagacagttctctacatcctgacaggtacatcggtcccggatctcattgtcagcaccaatcatcaaatgtggctcctcttccagactgatggcagtggcagttccctgggattcaaggcttcttatgaagagatcgagcagggcagttgcggtgaccctggcatacctgcatatggccggagggaaggctcccggtttcaccacggtgacacactcaagtttgagtgccagcccgcctttgagctggtgggacagaaggcaatcacatgccaaaagaataaccaatggtcggctaagaagccaggctgcgtgttctcctgcttcttcaacttcaccagcccgtctggggttgtcctgtctcccaactacccagaggactatggcaaccacctccactgtgtctggctcatcctggccaggcctgagagccgcatccacctggccttcaacgacattgacgtggagcctcagtttgatttcctggtcatcaaggatggggccaccgccgaggcgcccgtcctgggcaccttctcaggaaaccagcttccctcctccatcacaagcagtggccacgtggcccgtctcgagttccagactgaccactccacagggaagaggggcttcaacatcacttttaccaccttccgacacaacgagtgcccggatcctggcgttccagtaaatggcaaacggtttggggacagcctccagctgggcagctccatctccttcctctgtgatgaaggcttccttgggactcagggctcagagaccatcacctgcgtcctgaaggagggcagcgtggtctggaacagcgctgtgctgcggtgtgaagctccctgtggtggtcacctgacttcgcccagcggcaccatcctctctccgggctggcctggcttctacaaggatgccttgagctgtgcctgggtgattgaggcccagccaggctaccccatcaaaatcaccttcgacagattcaaaaccgaggtcaactatgacaccctggaagtacgcgatgggcggacttactcagcgcccttgatcggggtttaccacgggacccaggttccccagttcctcatcagcaccagcaactacctctacctcctcttctctaccgacaagagtcactcggacatcggcttccagctccgctatgagactataacactgcagtcagaccactgtctggatccaggaatcccagtaaatggacagcgtcatgggaatgacttctacgtgggcgcgctggtgaccttcagctgtgactcgggctacacattaagtgacggggagcctctggagtgtgagcccaacttccagtggagccgggccctgcccagttgtgaagctctctgtggtggcttcattcaaggctccagtgggaccatcttgtcgccagggttccctgacttctaccccaacaacttgaactgcacctggattatcgaaacatctcatggcaagggtgtgttcttcactttccacaccttccacctggaaagtggccatgactacctcctcatcactgagaacggcagcttcacccagcccctgaggcagctaactggatctcggctgccagctcccatcagcgctgggctctatggcaacttcactgcccaggtccgcttcatctctgatttctccatgtcatatgaaggattcaacatcaccttctcagagtacgacttggagccctgtgaggagcccgaggtcccagcctacagcatccggaagggcttgcagtttggcgtgggcgacaccttgaccttctcctgcttccccgggtaccgtctggagggcaccgcccgcatcacgtgcctggggggcagacggcgcctgtggagctcgcctctgccaaggtgtgttgctgagtgtgggaattcagtcacaggcactcagggtactttgctgtcccccaactttcctgtgaactacaataacaatcatgaatgcatctactccatccagacccagccagggaagggaattcagctgaaagccagggcattcgaactctccgaaggagatgtcctcaaggtttatgatggcaacaacaactccgcccgtttgctgggagtttttagccattctgagatgatgggggtgactttgaacagcacatccagcagtctgtggcttgatttcatcactgatgctgaaaacaccagcaagggctttgaactgcacttttccagctttgaactcatcaaatgtgaggacccaggaacccccaagtttggctacaaggttcatgatgaaggtcattttgcagggagctccgtgtccttcagctgtgaccctggatacagcctgcggggtagtgaggagctgctgtgtctgagtggagagcgccggacctgggaccggcctctgcccacctgtgtcgccgagtgtggagggacagtgagaggagaggtgtcggggcaggtgctgtcacccgggtatccagctccctatgaacacaatctcaactgcatctggaccatcgaagcagaggccggctgcaccattgggctacacttcctggtgtttgacacagaggaggttcacgacgtgctgcgcatctgggatgggcctgtggagagcggggttctgctgaaggagctgagtggcccggccctgcccaaggacctgcatagcaccttcaactcggtcgtcctgcagttcagcactgacttcttcaccagcaagcagggctttgccattcaattttcagtgtccacagcaacgtcctgcaatgaccctgggatcccgcagaatgggagtcggagtggtgacagttgggaagccggcgactccacagtgttccagtgtgaccctggctacgcgctgcagggaagtgcagagatcagctgtgtgaagatcgagaacaggttcttctggcagcccagcccgccaacatgcatcgctccctgcgggggagacctgacaggaccatctggagtcatcctctcaccaaattacccagaaccctacccgccaggcaaggagtgtgactggaaagtgaccgtctcaccagactacgtcatcgccctggtatttaacatctttaacctggagcctggctatgacttcctccatatctacgacggacgggactctctcagccctctcataggaagcttctatggctcccagctcccaggccgcattgaaagcagcagcaacagcctcttcctcgccttccgcagcgatgcatctgtgagcaatgctggcttcgtcattgactatacagaaaacccgcgggagtcatgttttgatcctggttccatcaagaacggcacacgggtggggtccgacctgaagctgggctcctccgtcacctactactgccacgggggctacgaagttgagggcacctcgaccctgagctgcatcctggggcctgatgggaagcccgtgtggaacaatccccggccagtctgcacagccccctgtgggggacagtatgtgggttcggacggagtggtcttgtcccccaactacccccagaactacaccagtggacagatctgcttgtattttgttactgtgcccaaggactatgtggtgtttggccagttcgccttctttcacacggccctcaacgacgtggtggaggttcacgacggccacagccagcactcgcggctcctcagctccctctcgggctcccatacaggagaatcactgcccttggccacctccaatcaagttctcattaagttcagcgccaaaggcctcgcaccagccagaggcttccactttgtctaccaagcggttcctcgaaccagcgccacgcagtgcagctctgtgccggaaccccgctatggcaagaggctgggcagtgacttctcggtgggggccatcgtccgcttcgaatgcaactccggctatgccctgcaggggtcgccagagatcgagtgcctccctgtgcctggggccttggcccaatggaatgtctcagcgcccacgtgtgtggtgccgtgtggaggcaacctcacagagcgcaggggcaccatcctgtcccctggcttcccagagccgtacctcaacagcctcaactgtgtgtggaagatcgtggtccccgaaggcgctggcatccagatccaagttgtcagttttgtgacagagcagaactgggactcgctggaagtatttgatggtgcagataacactgtaaccatgctggggagtttctcaggaacaaccgtgcctgcccttctgaacagcacctccaaccagctctaccttcatttctactcagatatcagcgtatctgcagctggcttccacttggagtacaaaacggtgggcctgagcagttgtccggaacctgctgtgcccagtaacggggtgaagactggcgagcgctacttggtgaatgatgtggtgtctttccagtgtgagccgggatatgccctccagggccacgcccacatctcctgcatgcccggaacagtgcggcgatggaactaccctcctccactctgtattgcacagtgtgggggaacagtggaggagatggagggggtgatcctgagccccggcttcccaggcaactaccccagtaacatggactgctcctggaaaatagcactgcccgtgggctttggagctcacatccagttcctgaacttctccaccgagcccaaccacgactacatagaaatccggaatggcccctatgagaccagccgcatgatgggaagattcagtggaagcgagcttccaagctccctcctctccacgtcccacgagaccaccgtgtatttccacagcgaccactcccagaatcggccaggattcaagctggagtatcaggcctatgaacttcaagagtgcccagacccagagccctttgccaatggcattgtgaggggagctggctacaacgtgggacaatcagtgaccttcgagtgcctcccggggtatcaattgactggccaccctgtcctcacgtgtcaacatggcaccaaccggaactgggaccaccccctgcccaagtgtgaagtcccttgtggcgggaacatcacttcttccaacggcactgtgtactccccggggttccctagcccgtactccagctcccaggactgtgtctggctgatcaccgtgcccattggccatggcgtccgcctcaacctcagcctgctgcagacagagccctctggagatttcatcaccatctgggatgggccacagcaaacagcaccacggctcggcgtcttcacccggagcatggccaagaaaacagtgcagagttcatccaaccaggtcctgctcaagttccaccgtgatgcagccacaggggggatcttcgccatagctttctccgcttatccactcaccaaatgccctcctcccaccatcctccccaacgccgaagtcgtcacagagaatgaagaattcaatataggtgacatcgtacgctacagatgcctccctggctttaccttagtggggaatgaaattctgacctgcaaacttggaacctacctgcagtttgaaggaccacccccgatatgtgaagtgcactgtccaacaaatgagcttctgacagactccacaggcgtgatcctgagccagagctaccctggaagctatccccagttccagacctgctcttggctggtgagagtggagcccgactataacatctccctcacagtggagtacttcctcagcgagaagcaatatgatgagtttgagatttttgatggtccatcaggacagagtcctctgctgaaagccctcagtgggaattactcagctcccctgattgtcaccagctcaagcaactctgtgtacctgcgttggtcatctgatcacgcctacaatcggaagggcttcaagatccgctattcagccccttactgcagcctgcccagggctccactccatggcttcatcctaggccagaccagcacccagcccgggggctccatccactttggctgcaacgccggctaccgcctggtgggacacagcatggccatctgtacccggcacccccagggctaccacctgtggagcgaagccatccctctctgtcaagctctttcctgtgggcttcctgaggcccccaagaatggaatggtgtttggcaaggagtacacagtgggaaccaaggccatgtacagctgcagtgaaggctaccacctccaggcaggcgctgaggccactgcagagtgtctggacacaggcctatggagcaaccgcaatgtcccaccacagtgtgtccctgtgacttgtcctgatgtcagtagcatcagcgtggagcatggccgatggaggcttatctttgagacacagtatcagttccaggcccagctgatgctcatctgtgaccctggctactactatactggccaaagggtcatccgctgtcaggccaatggcaaatggagcctcggggactctacgcccacctgccgaatcatctcctgtggagagctcccgattccccccaatggccaccgcatcggaacactgtctgtctacggggcaacagccatcttctcctgcaattccggatacacactggtgggctccagggtgcgtgagtgcatggccaatgggctctggagtggctctgaagtccgctgccttgccactcagaccaagctccactccattttctataagctcctcttcgatgtactctcttccccatccctcaccaaagctggacactgtgggactcctgagcccattgtcaacggacacatcaatggggagaactacagctaccggggcagtgtggtgtaccaatgcaatgctggcttccgcctgatcggcatgtctgtgcgcatctgccagcaggatcatcactggtcgggcaagacccctttctgtgtgccaattacctgtggacacccaggcaaccctgtcaacggcctcactcagggtaaccagtttaacctcaacgatgtggtcaagtttgtttgcaaccctgggtatatggctgagggggctgctaggtcccaatgcctggccagcgggcaatggagtgacatgctgcccacctgcagaatcatcaactgtacagatcctggacaccaagaaaatagtgttcgtcaggtccacgccagcggcccgcacaggttcagcttcggcaccactgtgtcttaccggtgcaaccacggcttctacctcctgggcaccccagtgctcagctgccagggagatggcacatgggaccgtccccgcccccagtgtctcttggtgtcctgtggccatccgggctccccgcctcactcccagatgtctggagacagttatactgtgggagcagtggtgcggtacagctgcatcggcaagcgtactctggtgggaaacagcacccgcatgtgtgggctggatggacactggactggctccctccctcactgctcaggaaccagcgtgggagtttgcggtgaccctgggatcccggctcatggcatccgtttgggggacagctttgatccaggcactgtgatgcgcttcagctgtgaagctggccacgtgctccggggatcgtcagagcgcacctgtcaagccaatggctcgtggagcggctcgcagcctgagtgtggagtgatctcttgtgggaaccctgggactccaagtaatgcccgagttgtgttcagtgatggcctggttttctccagctctatcgtctatgagtgccgggaaggatactacgccacaggcctgctcagccgtcactgctcggtcaatggtacctggacaggcagtgaccctgagtgcctcgtcataaactgtggtgaccctgggattccagccaatggccttcggctgggcaatgacttcaggtacaacaaaactgtgacatatcagtgtgtccctggctatatgatggagtcacatagagtatctgtgctgagctgcaccaaggaccggacatggaatggaaccaagcccgtctgcaaagctctcatgtgcaagccacctccgctcatccccaatgggaaggtggtggggtctgacttcatgtggggctcaagtgtgacttatgcctgcctggaggggtaccagctctccctgcccgcggtgttcacctgtgagggaaatgggtcctggaccggagagctgcctcagtgtttccctgtgttctgcggggatcctggtgtcccgtcccgtgggaggagagaggaccgaggcttctcctacaggtcatctgtctccttctcctgccatccccctctggtgctggtgggctctccacgcaggttttgccagtcagatgggacatggagtggcacccagcccagctgcatagatccgaccctgaccacgtgtgcggaccctggtgtgccacagtttgggatacagaacaattctcagggctaccaggttggaagcacagtcctcttccgttgtcaaaaaggctacctgcttcagggctccaccaccaggacctgcctcccaaacctgacctggagtggaaccccacctgactgtgtcccccaccactgcaggcagccagagacgccaacgcatgccaacgtcggggccctggatttgccctccatgggctacacgctcatctactcctgccaggagggcttctccctcaagggtggctccgagcaccgcacctgcaaggcggatggcagctggacaggcaagccgcccatctgcctggaggtccggcccagtgggagacccatcaacactgcccgggagccaccgctcacccaagccttgattcctggggatgtttttgccaagaattccctgtggaaaggggcctatgaataccaggggaagaagcagccagccatgctcagagtgactggcttccaagttgccaacagcaaggtcaatgccaccatgatcgaccacagtggcgtggagctgcacttggctggaacttacaagaaagaagattttcatctcctactccaggtgtaccagattacagggcctgtggagatctttatgaataagttcaaagatgatcactgggctttagatggccatgtctcgtcagagtcctccggagccaccttcatctaccaaggctctgtcaagggccaaggctttgggcagttcggctttcaaagactggacctcaggctgctggagtcagaccccgagtccattggccgccactttgcttccaacagcagctcagtggcagccgcgatcctggtgcctttcatcgccctcattattgcgggcttcgtgctctatctctacaagcacaggagaagacccaaagttcctttcaatggctatgctggccacgagaacaccaatgttcgggccacatttgagaacccaatgtacgaccgcaacatccagcccacagacatcatggccagcgaggcggagttcacagtcagcacagtgtgcacagcagtatagccacccggcctggccgccaccaccgccaccgagagccccgcctccagcagccgttccccagggggcaggaagtaggctcccctgagcacagtgcccagtgcccatcttcgttcgtctccttgcctgtgtctgctactgctgggactcaggccctcgccctgccgccatctatgccagttaccctggagaggactcctgccgtgtcctgaaaaggcagaaaaggaagaggggctgcagacagaggaagaaagtttatggatttaaaatagcaaagcaacttgtggatctgtgtgtgtgtgtgtgtgtatgggcctgatcacacacaaacacacacacctctccttcattcacgtcctatggaagagaccataaaggcttcaaaactagaagtgcgcatgaaggatgcttcatgccctgttccccacacagagaagagatgaagagggggaggtacggtcagctttcaaaacaatatgccccccgcccatcccatgtgtgaggacatggtgactcggtgactgtaacagtaggacacatcccatcatgcggtcagagtgcagaaacccggtcagcgtgcagaaaccagctgtctgctgatgaacggcccatctgcacagcggcagcaaggattaccccaagggcaggaaaaaagtctttggaaatagattgaaaatcagtttctttatttttttcaaacactgttttattgagttctaaacccagtggattaaaaagtcatttgggtcctgggaagcactgggaaagaagggagagccggggaggatagggcaggagtctggccaggagcccaaggtcaagtctggctgtcaactgacaaagagaagagaagacaagtctgtggcccagacaggatgccaagtctgggggcagcagcagggtccttgagagaacaggggagcaagcctgccccagtacccaaaaaacaatggctatcatgtactggggttattctctgtgcctgacactttacctgtagtatttctagtctgcacaataacaccaaaatgtaggatttgttattcccctttgacagatgagaaaacagaagcctgcaaaggtaaagacagagttaggaagtgtggagtcagaatgcaaacccagatcagtctgccccaaagtccactacaccagctgccagaaaccctgttctagaaggggcagctaagaagggaggagccgatgaatctctacagtagcactgtggccaggtctggaaagccaggcaagacacctgtgtgtcctatctgggttctgctgtctccgcgtaggcagcttcggggcaaggattcaactccccaggcctcccacggttggtgctggctccttggctcccagcagccgctgaccatagccagcaaaagacctggcaggtcctgaatcaaaacaacagagtggctgaaagtcacacctctccagctccttgcgagtgggtttgattgattttgacagctatatcatgcttgggtcgttcatgaattccatgagaattgttgggaagttcatgagtttaggaatcaaagtatagcatttagggccactttctctgtcctcgggaaggcccccacaagcttaagcccctgtatacgtgtgacatgctggcctcagagattcatgtcacatattgaaatagcaaatagaaatgtgcaggagcggagggacagcgacacctggttcttaagcaaattctagattggaacaattagaagatctgactgatgttaagagtggccagaggaaagtgagaggcgtccatttccagcagacacaatggaggctgacagaggcaggagcctacccctggccacaccacctctgggacacggcacccccctgggcctggagggagagggccaatccagacacactcacactctcatctctttccttggctggaaacaagtgcaggaagctcccctcccaatttcttatgctcccttcccccttacactcctctccttcgactgctcccttcccccttcttatgcccctctcagaccacccagcggatgcctattcccgccccccacccctcccctgcgtctccttgtaaagttccatgagatgctcgaggagcacctgctggtggggcacccagcactctgctgggcatcaccctccgcacccctgacatttctctccacctccagaggcttggaagggaacagggcagatgaggcccttcacccaccatctacgccatatacccatcaccatcccatgaggaaaaaaaaaaaagtaaaacaaagacaaaaaaaatcttttgtacagagatatatttttattatacaaagtttgtacagtaccaaaaaagaaaaaaaaaaaggtgtaaatttttttttcattattgtaggtaaacggtagtggaagccttttttgtaaatgtaataaaatgtataaatatggttttcagaaaacatcaagtgctgtaaatatgtaatctacacaccttcttggcttgtctgcagtatatacatttaatttatctgtctctgtatatgaggcttccccctggggtcctgcattatggtactttcctgaatttgaaagcaattttaaattttttgaattcaaataaaatataaatttttgcattggttttcttac

SEQ ID NO: 1793 - protein, 3631 aa, Homo sapiens
MPRSRGRELGRCGCPAGRARGETGISALVPGAGSRWGRPPPPTPPPLLLLLGCGLLSVSAAAGQNCTFQLHGPNGTVESPGFPYGYPNYANCTWTITAEEQHRIQLVFQSFALEEDFDVLSVFDGPPQPENLRTRLTGFQLPATIVSAATTLSLRLISDYAVSAQGFHATYEVLPSHTCGNPGRLPNGIQQGSTFNLGDKVRYSCNLGFFLEGHAVLTCHAGSENSATWDFPLPSCRADDACGGTLRGQSGIISSPHFPSEYHNNADCTWTILAELGDTIALVFIDFQLEDGYDFLEVTGTEGSSLWFTGASLPAPVISSKNWLRLHFTSDGNHRQRGFSAQYQVKKQIELKSRGVKLMPSKDNSQKTSVLTQVGVSQGHNMCPDPGIPERGKRLGSDFRLGSSVQFTCNEGYDLQGSKRITCMKVSDMFAAWSDHRPVCRARMCDAHLRGPSGIITSPNFPIQYDNNAHCVWIITALNPSKVIKLAFEEFDLERGYDTLTVGDGGQDGDQKTVLYILTGTSVPDLIVSTNHQMWLLFQTDGSGSSLGFKASYEEIEQGSCGDPGIPAYGRREGSRFHHGDTLKFECQPAFELVGQKAITCQKNNQWSAKKPGCVFSCFFNFTSPSGVVLSPNYPEDYGNHLHCVWLILARPESRIHLAFNDIDVEPQFDFLVIKDGATAEAPVLGTFSGNQLPSSITSSGHVARLEFQTDHSTGKRGFNITFTTFRHNECPDPGVPVNGKRFGDSLQLGSSISFLCDEGFLGTQGSETITCVLKEGSVVWNSAVLRCEAPCGGHLTSPSGTILSPGWPGFYKDALSCAWVIEAQPGYPIKITFDRFKTEVNYDTLEVRDGRTYSAPLIGVYHGTQVPQFLISTSNYLYLLFSTDKSHSDIGFQLRYETITLQSDHCLDPGIPVNGQRHGNDFYVGALVTFSCDSGYTLSDGEPLECEPNFQWSRALPSCEALCGGFIQGSSGTILSPGFPDFYPNNLNCTWIIETSHGKGVFFTFHTFHLESGHDYLLITENGSFTQPLRQLTGSRLPAPISAGLYGNFTAQVRFISDFSMSYEGFNITFSEYDLEPCEEPEVPAYSIRKGLQFGVGDTLTFSCFPGYRLEGTARITCLGGRRRLWSSPLPRCVAECGNSVTGTQGTLLSPNFPVNYNNNHECIYSIQTQPGKGIQLKARAFELSEGDVLKVYDGNNNSARLLGVFSHSEMMGVTLNSTSSSLWLDFITDAENTSKGFELHFSSFELIKCEDPGTPKFGYKVHDEGHFAGSSVSFSCDPGYSLRGSEELLCLSGERRTWDRPLPTCVAECGGTVRGEVSGQVLSPGYPAPYEHNLNCIWTIEAEAGCTIGLHFLVFDTEEVHDVLRIWDGPVESGVLLKELSGPALPKDLHSTFNSVVLQFSTDFFTSKQGFAIQFSVSTATSCNDPGIPQNGSRSGDSWEAGDSTVFQCDPGYALQGSAEISCVKIENRFFWQPSPPTCIAPCGGDLTGPSGVILSPNYPEPYPPGKECDWKVTVSPDYVIALVFNIFNLEPGYDFLHIYDGRDSLSPLIGSFYGSQLPGRIESSSNSLFLAFRSDASVSNAGFVIDYTENPRESCFDPGSIKNGTRVGSDLKLGSSVTYYCHGGYEVEGTSTLSCILGPDGKPVWNNPRPVCTAPCGGQYVGSDGVVLSPNYPQNYTSGQICLYFVTVPKDYVVFGQFAFFHTALNDVVEVHDGHSQHSRLLSSLSGSHTGESLPLATSNQVLIKFSAKGLAPARGFHFVYQAVPRTSATQCSSVPEPRYGKRLGSDFSVGAIVRFECNSGYALQGSPEIECLPVPGALAQWNVSAPTCVVPCGGNLTERRGTILSPGFPEPYLNSLNCVWKIVVPEGAGIQIQVVSFVTEQNWDSLEVFDGADNTVTMLGSFSGTTVPALLNSTSNQLYLHFYSDISVSAAGFHLEYKTVGLSSCPEPAVPSNGVKTGERYLVNDVVSFQCEPGYALQGHAHISCMPGTVRRWNYPPPLCIAQCGGTVEEMEGVILSPGFPGNYPSNMDCSWKIALPVGFGAHIQFLNFSTEPNHDYIEIRNGPYETSRMMGRFSGSELPSSLLSTSHETTVYFHSDHSQNRPGFKLEYQAYELQECPDPEPFANGIVRGAGYNVGQSVTFECLPGYQLTGHPVLTCQHGTNRNWDHPLPKCEVPCGGNITSSNGTVYSPGFPSPYSSSQDCVWLITVPIGHGVRLNLSLLQTEPSGDFITIWDGPQQTAPRLGVFTRSMAKKTVQSSSNQVLLKFHRDAATGGIFAIAFSAYPLTKCPPPTILPNAEVVTENEEFNIGDIVRYRCLPGFTLVGNEILTCKLGTYLQFEGPPPICEVHCPTNELLTDSTGVILSQSYPGSYPQFQTCSWLVRVEPDYNISLTVEYFLSEKQYDEFEIFDGPSGQSPLLKALSGNYSAPLIVTSSSNSVYLRWSSDHAYNRKGFKIRYSAPYCSLPRAPLHGFILGQTSTQPGGSIHFGCNAGYRLVGHSMAICTRHPQGYHLWSEAIPLCQALSCGLPEAPKNGMVFGKEYTVGTKAMYSCSEGYHLQAGAEATAECLDTGLWSNRNVPPQCVPVTCPDVSSISVEHGRWRLIFETQYQFQAQLMLICDPGYYYTGQRVIRCQANGKWSLGDSTPTCRIISCGELPIPPNGHRIGTLSVYGATAIFSCNSGYTLVGSRVRECMANGLWSGSEVRCLATQTKLHSIFYKLLFDVLSSPSLTKAGHCGTPEPIVNGHINGENYSYRGSVVYQCNAGFRLIGMSVRICQQDHHWSGKTPFCVPITCGHPGNPVNGLTQGNQFNLNDVVKFVCNPGYMAEGAARSQCLASGQWSDMLPTCRIINCTDPGHQENSVRQVHASGPHRFSFGTTVSYRCNHGFYLLGTPVLSCQGDGTWDRPRPQCLLVSCGHPGSPPHSQMSGDSYTVGAVVRYSCIGKRTLVGNSTRMCGLDGHWTGSLPHCSGTSVGVCGDPGIPAHGIRLGDSFDPGTVMRFSCEAGHVLRGSSERTCQANGSWSGSQPECGVISCGNPGTPSNARVVFSDGLVFSSSIVYECREGYYATGLLSRHCSVNGTWTGSDPECLVINCGDPGIPANGLRLGNDFRYNKTVTYQCVPGYMMESHRVSVLSCTKDRTWNGTKPVCKALMCKPPPLIPNGKVVGSDFMWGSSVTYACLEGYQLSLPAVFTCEGNGSWTGELPQCFPVFCGDPGVPSRGRREDRGFSYRSSVSFSCHPPLVLVGSPRRFCQSDGTWSGTQPSCIDPTLTTCADPGVPQFGIQNNSQGYQVGSTVLFRCQKGYLLQGSTTRTCLPNLTWSGTPPDCVPHHCRQPETPTHANVGALDLPSMGYTLIYSCQEGFSLKGGSEHRTCKADGSWTGKPPICLEVRPSGRPINTAREPPLTQALIPGDVFAKNSLWKGAYEYQGKKQPAMLRVTGFQVANSKVNATMIDHSGVELHLAGTYKKEDFHLLLQVYQITGPVEIFMNKFKDDHWALDGHVSSESSGATFIYQGSVKGQGFGQFGFQRLDLRLLESDPESIGRHFASNSSSVAAAILVPFIALIIAGFVLYLYKHRRRPKVPFNGYAGHENTNVRATFENPMYDRNIQPTDIMASEAEFTVSTVCTAV

SEQ ID NO: 1794 - DNA, 13118 bp, Homo sapiens
tcctgggatggggtaggaggctattgtgaatgaggctcataagcatcgcccccggccctagatggcaagttcaaagccaccacccaagatcagctggccagaactgcacgttccaactgcacggtcccaatgggacagttgagagcccagggttcccatatggctaccccaattacgccaactgcacgtggaccatcaccgcggaagagcagcacagaatccagcttgtgttccagtcctttgccctggaagaggactttgatgtcctgtcggtgtttgatggtccaccccagccagagaatctgcgtacgaggctcacaggctttcagctgccagccaccattgttagtgcagccaccaccctctctctgcgcctcatcagcgactatgcagtcagtgcccaaggcttccacgccacctatgaagttctccccagccacacatgtgggaacccagggaggctgcccaatggcatccagcagggttcaaccttcaacctcggtgacaaggtccgctacagctgcaaccttggcttcttcctggagggccacgccgtgctcacctgccacgctggctctgagaacagcgccacgtgggacttccccctgccttcctgcagagctgatgatgcctgtggtgggaccctgcggggccagagtggcatcatctccagcccccacttcccctcggagtaccataacaatgccgactgcacatggaccatcctggctgagctgggggacaccatcgccctggtgtttattgacttccagctggaggatggttacgactttctggaagtcactgggacagaaggctcctccctctggttcaccggagccagcctcccagcccccgttatcagcagcaagaactggctgcgactgcacttcacatcggatggcaaccaccggcagcgcggattcagtgcccaataccaagtcaagaagcaaattgagttgaagtctcgaggtgtgaagctgatgcccagcaaagacaacagccagaagacgtctgtgttaactcaggttggtgtgtcccaaggacataatatgtgtccagaccctggcatacccgaaaggggcaaaagactaggctcggatttcaggttaggatccagcgtccagttcacctgcaacgagggctatgacctgcaagggtccaagcggatcacctgtatgaaagtgagcgacatgtttgcggcctggagcgaccacaggccagtctgccgagcccgcatgtgtgatgcccaccttcgaggcccctcgggcatcatcacctcccccaatttccccattcagtatgacaacaatgcacactgtgtgtggatcatcacagcactcaacccctccaaggtgatcaagctcgcctttgaggagtttgatttggagaggggctatgacaccctgacggtcggtgatggtggtcaggatggggaccagaagacagttctctacatcctgacaggtacatcggtcccggatctcattgtcagcaccaatcatcaaatgtggctcctcttccagactgatggcagtggcagttccctgggattcaaggcttcttatgaagagatcgagcagggcagttgcggtgaccctggcatacctgcatatggccggagggaaggctcccggtttcaccacggtgacacactcaagtttgagtgccagcccgcctttgagctggtgggacagaaggcaatcacatgccaaaagaataaccaatggtcggctaagaagccaggctgcgtgttctcctgcttcttcaacttcaccagcccgtctggggttgtcctgtctcccaactacccagaggactatggcaaccacctccactgtgtctggctcatcctggccaggcctgagagccgcatccacctggccttcaacgacattgacgtggagcctcagtttgatttcctggtcatcaaggatggggccaccgccgaggcgcccgtcctgggcaccttctcaggaaaccagcttccctcctccatcacaagcagtggccacgtggcccgtctcgagttccagactgaccactccacagggaagaggggcttcaacatcacttttaccaccttccgacacaacgagtgcccggatcctggcgttccagtaaatggcaaacggtttggggacagcctccagctgggcagctccatctccttcctctgtgatgaaggcttccttgggactcagggctcagagaccatcacctgcgtcctgaaggagggcagcgtggtctggaacagcgctgtgctgcggtgtgaagctccctgtggtggtcacctgacttcgcccagcggcaccatcctctctccgggctggcctggcttctacaaggatgccttgagctgtgcctgggtgattgaggcccagccaggctaccccatcaaaatcaccttcgacagattcaaaaccgaggtcaactatgacaccctggaagtacgcgatgggcggacttactcagcgcccttgatcggggtttaccacgggacccaggttccccagttcctcatcagcaccagcaactacctctacctcctcttctctaccgacaagagtcactcggacatcggcttccagctccgctatgagactataacactgcagtcagaccactgtctggatccaggaatcccagtaaatggacagcgtcatgggaatgacttctacgtgggcgcgctggtgaccttcagctgtgactcgggctacacattaagtgacggggagcctctggagtgtgagcccaacttccagtggagccgggccctgcccagttgtgaagctctctgtggtggcttcattcaaggctccagtgggaccatcttgtcgccagggttccctgacttctaccccaacaacttgaactgcacctggattatcgaaacatctcatggcaagggtgtgttcttcactttccacaccttccacctggaaagtggccatgactacctcctcatcactgagaacggcagcttcacccagcccctgaggcagctaactggatctcggctgccagctcccatcagcgctgggctctatggcaacttcactgcccaggtccgcttcatctctgatttctccatgtcatatgaaggattcaacatcaccttctcagagtacgacttggagccctgtgaggagcccgaggtcccagcctacagcatccggaagggcttgcagtttggcgtgggcgacaccttgaccttctcctgcttccccgggtaccgtctggagggcaccgcccgcatcacgtgcctggggggcagacggcgcctgtggagctcgcctctgccaaggtgtgttgctgagtgtgggaattcagtcacaggcactcagggtactttgctgtcccccaactttcctgtgaactacaataacaatcatgaatgcatctactccatccagacccagccagggaagggaattcagctgaaagccagggcattcgaactctccgaaggagatgtcctcaaggtttatgatggcaacaacaactccgcccgtttgctgggagtttttagccattctgagatgatgggggtgactttgaacagcacatccagcagtctgtggcttgatttcatcactgatgctgaaaacaccagcaagggctttgaactgcacttttccagctttgaactcatcaaatgtgaggacccaggaacccccaagtttggctacaaggttcatgatgaaggtcattttgcagggagctccgtgtccttcagctgtgaccctggatacagcctgcggggtagtgaggagctgctgtgtctgagtggagagcgccggacctgggaccggcctctgcccacctgtgtcgccgagtgtggagggacagtgagaggagaggtgtcggggcaggtgctgtcacccgggtatccagctccctatgaacacaatctcaactgcatctggaccatcgaagcagaggccggctgcaccattgggctacacttcctggtgtttgacacagaggaggttcacgacgtgctgcgcatctgggatgggcctgtggagagcggggttctgctgaaggagctgagtggcccggccctgcccaaggacctgcatagcaccttcaactcggtcgtcctgcagttcagcactgacttcttcaccagcaagcagggctttgccattcaattttcagtgtccacagcaacgtcctgcaatgaccctgggatcccgcagaatgggagtcggagtggtgacagttgggaagccggcgactccacagtgttccagtgtgaccctggctacgcgctgcagggaagtgcagagatcagctgtgtgaagatcgagaacaggttcttctggcagcccagcccgccaacatgcatcgctccctgcgggggagacctgacaggaccatctggagtcatcctctcaccaaattacccagaaccctacccgccaggcaaggagtgtgactggaaagtgaccgtctcaccagactacgtcatcgccctggtatttaacatctttaacctggagcctggctatgacttcctccatatctacgacggacgggactctctcagccctctcataggaagcttctatggctcccagctcccaggccgcattgaaagcagcagcaacagcctcttcctcgccttccgcagcgatgcatctgtgagcaatgctggcttcgtcattgactatacagaaaacccgcgggagtcatgttttgatcctggttccatcaagaacggcacacgggtggggtccgacctgaagctgggctcctccgtcacctactactgccacgggggctacgaagttgagggcacctcgaccctgagctgcatcctggggcctgatgggaagcccgtgtggaacaatccccggccagtctgcacagccccctgtgggggacagtatgtgggttcggacggagtggtcttgtcccccaactacccccagaactacaccagtggacagatctgcttgtattttgttactgtgcccaaggactatgtggtgtttggccagttcgccttctttcacacggccctcaacgacgtggtggaggttcacgacggccacagccagcactcgcggctcctcagctccctctcgggctcccatacaggagaatcactgcccttggccacctccaatcaagttctcattaagttcagcgccaaaggcctcgcaccagccagaggcttccactttgtctaccaagcggttcctcgaaccagcgccacgcagtgcagctctgtgccggaaccccgctatggcaagaggctgggcagtgacttctcggtgggggccatcgtccgcttcgaatgcaactccggctatgccctgcaggggtcgccagagatcgagtgcctccctgtgcctggggccttggcccaatggaatgtctcagcgcccacgtgtgtggtgccgtgtggaggcaacctcacagagcgcaggggcaccatcctgtcccctggcttcccagagccgtacctcaacagcctcaactgtgtgtggaagatcgtggtccccgaaggcgctggcatccagatccaagttgtcagttttgtgacagagcagaactgggactcgctggaagtatttgatggtgcagataacactgtaaccatgctggggagtttctcaggaacaaccgtgcctgcccttctgaacagcacctccaaccagctctaccttcatttctactcagatatcagcgtatctgcagctggcttccacttggagtacaaaacggtgggcctgagcagttgtccggaacctgctgtgcccagtaacggggtgaagactggcgagcgctacttggtgaatgatgtggtgtctttccagtgtgagccgggatatgccctccagggccacgcccacatctcctgcatgcccggaacagtgcggcgatggaactaccctcctccactctgtattgcacagtgtgggggaacagtggaggagatggagggggtgatcctgagccccggcttcccaggcaactaccccagtaacatggactgctcctggaaaatagcactgcccgtgggctttggagctcacatccagttcctgaacttctccaccgagcccaaccacgactacatagaaatccggaatggcccctatgagaccagccgcatgatgggaagattcagtggaagcgagcttccaagctccctcctctccacgtcccacgagaccaccgtgtatttccacagcgaccactcccagaatcggccaggattcaagctggagtatcaggatttgacttactcccaccagatttcttccttcctgagaggttttgatctctcggagttggaaagaaccaactcaactcctcccgtcgccgcttcctatgtctgggatcttgatcctggttgtgaagcctatgaacttcaagagtgcccagacccagagccctttgccaatggcattgtgaggggagctggctacaacgtgggacaatcagtgaccttcgagtgcctcccggggtatcaattgactggccaccctgtcctcacgtgtcaacatggcaccaaccggaactgggaccaccccctgcccaagtgtgaagtcccttgtggcgggaacatcacttcttccaacggcactgtgtactccccggggttccctagcccgtactccagctcccaggactgtgtctggctgatcaccgtgcccattggccatggcgtccgcctcaacctcagcctgctgcagacagagccctctggagatttcatcaccatctgggatgggccacagcaaacagcaccacggctcggcgtcttcacccggagcatggccaagaaaacagtgcagagttcatccaaccaggtcctgctcaagttccaccgtgatgcagccacaggggggatcttcgccatagctttctccgcttatccactcaccaaatgccctcctcccaccatcctccccaacgccgaagtcgtcacagagaatgaagaattcaatataggtgacatcgtacgctacagatgcctccctggctttaccttagtggggaatgaaattctgacctgcaaacttggaacctacctgcagtttgaaggaccacccccgatatgtgaagtgcactgtccaacaaatgagcttctgacagactccacaggcgtgatcctgagccagagctaccctggaagctatccccagttccagacctgctcttggctggtgagagtggagcccgactataacatctccctcacagtggagtacttcctcagcgagaagcaatatgatgagtttgagatttttgatggtccatcaggacagagtcctctgctgaaagccctcagtgggaattactcagctcccctgattgtcaccagctcaagcaactctgtgtacctgcgttggtcatctgatcacgcctacaatcggaagggcttcaagatccgctattcagccccttactgcagcctgcccagggctccactccatggcttcatcctaggccagaccagcacccagcccgggggctccatccactttggctgcaacgccggctaccgcctggtgggacacagcatggccatctgtacccggcacccccagggctaccacctgtggagcgaagccatccctctctgtcaagctctttcctgtgggcttcctgaggcccccaagaatggaatggtgtttggcaaggagtacacagtgggaaccaaggccatgtacagctgcagtgaaggctaccacctccaggcaggcgctgaggccactgcagagtgtctggacacaggcctatggagcaaccgcaatgtcccaccacagtgtgtccctgtgacttgtcctgatgtcagtagcatcagcgtggagcatggccgatggaggcttatctttgagacacagtatcagttccaggcccagctgatgctcatctgtgaccctggctactactatactggccaaagggtcatccgctgtcaggccaatggcaaatggagcctcggggactctacgcccacctgccgaatcatctcctgtggagagctcccgattccccccaatggccaccgcatcggaacactgtctgtctacggggcaacagccatcttctcctgcaattccggatacacactggtgggctccagggtgcgtgagtgcatggccaatgggctctggagtggctctgaagtccgctgccttgctggacactgtgggactcctgagcccattgtcaacggacacatcaatggggagaactacagctaccggggcagtgtggtgtaccaatgcaatgctggcttccgcctgatcggcatgtctgtgcgcatctgccagcaggatcatcactggtcgggcaagacccctttctgtgtgctggtgtcctgtggccatccgggctccccgcctcactcccagatgtctggagacagttatactgtgggagcagtggtgcggtacagctgcatcggcaagcgtactctggtgggaaacagcacccgcatgtgtgggctggatggacactggactggctccctccctcactgctcaggaaccagcgtgggagtttgcggtgaccctgggatcccggctcatggcatccgtttgggggacagctttgatccaggcactgtgatgcgcttcagctgtgaagctggccacgtgctccggggatcgtcagagcgcacctgtcaagccaatggctcgtggagcggctcgcagcctgagtgtggagtgatctcttgtgggaaccctgggactccaagtaatgcccgagttgtgttcagtgatggcctggttttctccagctctatcgtctatgagtgccgggaaggatactacgccacaggcctgctcagccgtcactgctcggtcaatggtacctggacaggcagtgaccctgagtgcctcgtcataaactgtggtgaccctgggattccagccaatggccttcggctgggcaatgacttcaggtacaacaaaactgtgacatatcagtgtgtccctggctatatgatggagtcacatagagtatctgtgctgagctgcaccaaggaccggacatggaatggaaccaagcccgtctgcaaagctctcatgtgcaagccacctccgctcatccccaatgggaaggtggtggggtctgacttcatgtggggctcaagtgtgacttatgcctgcctggaggggtaccagctctccctgcccgcggtgttcacctgtgagggaaatgggtcctggaccggagagctgcctcagtgtttccctgtgttctgcggggatcctggtgtcccgtcccgtgggaggagagaggaccgaggcttctcctacaggtcatctgtctccttctcctgccatccccctctggtgctggtgggctctccacgcaggttttgccagtcagatgggacatggagtggcacccagcccagctgcatagatccgaccctgaccacgtgtgcggaccctggtgtgccacagtttgggatacagaacaattctcagggctaccaggttggaagcacagtcctcttccgttgtcaaaaaggctacctgcttcagggctccaccaccaggacctgcctcccaaacctgacctggagtggaaccccacctgactgtgtcccccaccactgcaggcagccagagacgccaacgcatgccaacgtcggggccctggatttgccctccatgggctacacgctcatctactcctgccaggagggcttctccctcaagggtggctccgagcaccgcacctgcaaggcggatggcagctggacaggcaagccgcccatctgcctggaggtccggcccagtgggagacccatcaacactgcccgggagccaccgctcacccaagccttgattcctggggatgtttttgccaagaattccctgtggaaaggggcctatgaataccaggggaagaagcagccagccatgctcagagtgactggcttccaagttgccaacagcaaggtcaatgccaccatgatcgaccacagtggcgtggagctgcacttggctggaacttacaagaaagaagattttcatctcctactccaggtgtaccagattacagggcctgtggagatctttatgaataagttcaaagatgatcactgggctttagatggccatgtctcgtcagagtcctccggagccaccttcatctaccaaggctctgtcaagggccaaggctttgggcagttcggctttcaaagactggacctcaggctgctggagtcagaccccgagtccattggccgccactttgcttccaacagcagctcagtggcagccgcgatcctggtgcctttcatcgccctcattattgcgggcttcgtgctctatctctacaagcacaggagaagacccaaagttcctttcaatggctatgctggccacgagaacaccaatgttcgggccacatttgagaacccaatgtacgaccgcaacatccagcccacagacatcatggccagcgaggcggagttcacagtcagcacagtgtgcacagcagtatagccacccggcctggccgccaccaccgccaccgagagccccgcctccagcagccgttccccagggggcaggaagtaggctcccctgagcacagtgcccagtgcccatcttcgttcgtctccttgcctgtgtctgctactgctgggactcaggccctcgccctgccgccatctatgccagttaccctggagaggactcctgccgtgtcctgaaaaggcagaaaaggaagaggggctgcagacagaggaagaaagtttatggatttaaaatagcaaagcaacttgtggatctgtgtgtgtgtgtgtgtgtatgggcctgatcacacacaaacacacacacctctccttcattcacgtcctatggaagagaccataaaggcttcaaaactagaagtgcgcatgaaggatgcttcatgccctgttccccacacagagaagagatgaagagggggaggtacggtcagctttcaaaacaatatgccccccgcccatcccatgtgtgaggacatggtgactcggtgactgtaacagtaggacacatcccatcatgcggtcagagtgcagaaacccggtcagcgtgcagaaaccagctgtctgctgatgaacggcccatctgcacagcggcagcaaggattaccccaagggcaggaaaaaagtctttggaaatagattgaaaatcagtttctttatttttttcaaacactgttttattgagttctaaacccagtggattaaaaagtcatttgggtcctgggaagcactgggaaagaagggagagccggggaggatagggcaggagtctggccaggagcccaaggtcaagtctggctgtcaactgacaaagagaagagaagacaagtctgtggcccagacaggatgccaagtctgggggcagcagcagggtccttgagagaacaggggagcaagcctgccccagtacccaaaaaacaatggctatcatgtactggggttattctctgtgcctgacactttacctgtagtatttctagtctgcacaataacaccaaaatgtaggatttgttattcccctttgacagatgagaaaacagaagcctgcaaaggtaaagacagagttaggaagtgtggagtcagaatgcaaacccagatcagtctgccccaaagtccactacaccagctgccagaaaccctgttctagaaggggcagctaagaagggaggagccgatgaatctctacagtagcactgtggccaggtctggaaagccaggcaagacacctgtgtgtcctatctgggttctgctgtctccgcgtaggcagcttcggggcaaggattcaactccccaggcctcccacggttggtgctggctccttggctcccagcagccgctgaccatagccagcaaaagacctggcaggtcctgaatcaaaacaacagagtggctgaaagtcacacctctccagctccttgcgagtgggtttgattgattttgacagctatatcatgcttgggtcgttcatgaattccatgagaattgttgggaagttcatgagtttaggaatcaaagtatagcatttagggccactttctctgtcctcgggaaggcccccacaagcttaagcccctgtatacgtgtgacatgctggcctcagagattcatgtcacatattgaaatagcaaatagaaatgtgcaggagcggagggacagcgacacctggttcttaagcaaattctagattggaacaattagaagatctgactgatgttaagagtggccagaggaaagtgagaggcgtccatttccagcagacacaatggaggctgacagaggcaggagcctacccctggccacaccacctctgggacacggcacccccctgggcctggagggagagggccaatccagacacactcacactctcatctctttccttggctggaaacaagtgcaggaagctcccctcccaatttcttatgctcccttcccccttacactcctctccttcgactgctcccttcccccttcttatgcccctctcagaccacccagcggatgcctattcccgccccccacccctcccctgcgtctccttgtaaagttccatgagatgctcgaggagcacctgctggtggggcacccagcactctgctgggcatcaccctccgcacccctgacatttctctccacctccagaggcttggaagggaacagggcagatgaggcccttcacccaccatctacgccatatacccatcaccatcccatgaggaaaaaaaaaaaagtaaaacaaagacaaaaaaaatcttttgtacagagatatatttttattatacaaagtttgtacagtaccaaaaaagaaaaaaaaaaaggtgtaaatttttttttcattattgtaggtaaacggtagtggaagccttttttgtaaatgtaataaaatgtataaatatggttttcagaaaacatcaagtgctgtaaatatgtaatctacacaccttcttggcttgtctgcagtatatacatttaatttatctgtctctgtatatgaggcttccccctggggtcctgcattatggtactttcctgaatttgaaagcaattttaaattttttgaattcaaataaaatataaatttttgcattggttttcttac

SEQ ID NO: 1795 - protein, 3487 aa, Homo sapiens; identical to SEQ ID NO: 78

SEQ ID NO: 1796 - DNA, 4379 bp, Homo sapiens
gagagacagacaaacagcacaagagacagaaacaaagcaggcagcaccataggtagggaagtattttttttttaagtttgagaggcatttctgtagacagtccaacaactggacagacacgcaggcaccttggcaggtagacaggcaaacgacttgtcatctttgtcaggttcttcagagctgtgagttgctttctggatgcagctgatgggggttaatctatggttattgtgattctctttccagctgagtgtgggaattcagtcacaggcactcagggtactttgctgtcccccaactttcctgtgaactacaataacaatcatgaatgcatctactccatccagacccagccagggaagggaattcagctgaaagccagggcattcgaactctccgaaggagatgtcctcaaggtttatgatggcaacaacaactccgcccgtttgctgggagtttttagccattctgagatgatgggggtgactttgaacagcacatccagcagtctgtggcttgatttcatcactgatgctgaaaacaccagcaagggctttgaactgcacttttccagctttgaactcatcaaatgtgaggacccaggaacccccaagtttggctacaaggttcatgatgaaggtcattttgcagggagctccgtgtccttcagctgtgaccctggatacagcctgcggggtagtgaggagctgctgtgtctgagtggagagcgccggacctgggaccggcctctgcccacctgtgtcgccgagtgtggagggacagtgagaggagaggtgtcggggcaggtgctgtcacccgggtatccagctccctatgaacacaatctcaactgcatctggaccatcgaagcagaggccggctgcaccattgggctacacttcctggtgtttgacacagaggaggttcacgacgtgctgcgcatctgggatgggcctgtggagagcggggttctgctgaaggagctgagtggcccggccctgcccaaggacctgcatagcaccttcaactcggtcgtcctgcagttcagcactgacttcttcaccagcaagcagggctttgccattcaattttcagtgtccacagcaacgtcctgcaatgaccctgggatcccgcagaatgggagtcggagtggtgacagttgggaagccggcgactccacagtgttccagtgtgaccctggctacgcgctgcagggaagtgcagagatcagctgtgtgaagatcgagaacaggttcttctggcagcccagcccgccaacatgcatcgctccctgcgggggagacctgacaggaccatctggagtcatcctctcaccaaattacccagaaccctacccgccaggcaaggagtgtgactggaaagtgaccgtctcaccagactacgtcatcgccctggtatttaacatctttaacctggagcctggctatgacttcctccatatctacgacggacgggactctctcagccctctcataggaagcttctatggctcccagctcccaggccgcattgaaagcagcagcaacagcctcttcctcgccttccgcagcgatgcatctgtgagcaatgctggcttcgtcattgactatacagaaaacccgcgggagtcatgttttgatcctggttccatcaagaacggcacacgggtggggtccgacctgaagctgggctcctccgtcacctactactgccacgggggctacgaagttgagggcacctcgaccctgagctgcatcctggggcctgatgggaagcccgtgtggaacaatccccggccagtctgcacagccccctgtgggggacagtatgtgggttcggacggagtggtcttgtcccccaactacccccagaactacaccagtggacagatctgcttgtattttgttactgtgcccaaggactatgtggtgtttggccagttcgccttctttcacacggccctcaacgacgtggtggaggttcacgacggccacagccagcactcgcggctcctcagctccctctcgggctcccatacaggagaatcactgcccttggccacctccaatcaagttctcattaagttcagcgccaaaggcctcgcaccagccagaggcttccactttgtctaccaagcggttcctcgaaccagcgccacgcagtgcagctctgtgccggaaccccgctatggcaagaggctgggcagtgacttctcggtgggggccatcgtccgcttcgaatgcaactccggctatgccctgcaggggtcgccagagatcgagtgcctccctgtgcctggggccttggcccaatggaatgtctcagcgcccacgtgtgtggtgccgtgtggaggcaacctcacagagcgcaggggcaccatcctgtcccctggcttcccagagccgtacctcaacagcctcaactgtgtgtggaagatcgtggtccccgaaggcgctggcatccagatccaagttgtcagttttgtgacagagcagaactgggactcgctggaagtatttgatggtgcagataacactgtaaccatgctggggagtttctcaggaacaaccgtgcctgcccttctgaacagcacctccaaccagctctaccttcatttctactcagatatcagcgtatctgcagctggcttccacttggagtacaaaacggtgggcctgagcagttgtccggaacctgctgtgcccagtaacggggtgaagactggcgagcgctacttggtgaatgatgtggtgtctttccagtgtgagccgggatatgccctccagggccacgcccacatctcctgcatgcccggaacagtgcggcgatggaactaccctcctccactctgtattgcacagtgtgggggaacagtggaggagatggagggggtgatcctgagccccggcttcccaggcaactaccccagtaacatggactgctcctggaaaatagcactgcccgtgggctttggagctcacatccagttcctgaacttctccaccgagcccaaccacgactacatagaaatccggaatggcccctatgagaccagccgcatgatgggaagattcagtggaagcgagcttccaagctccctcctctccacgtcccacgagaccaccgtgtatttccacagcgaccactcccagaatcggccaggattcaagctggagtatcaggcctatgaacttcaagagtgcccagacccagagccctttgccaatggcattgtgaggggagctggctacaacgtgggacaatcagtgaccttcgagtgcctcccggggtatcaattgactggccaccctgtcctcacgtgtcaacatggcaccaaccggaactgggaccaccccctgcccaagtgtgaagtcccttgtggcgggaacatcacttcttccaacggcactgtgtactccccggggttccctagcccgtactccagctcccaggactgtgtctggctgatcaccgtgcccattggccatggcgtccgcctcaacctcagcctgctgcagacagagccctctggagatttcatcaccatctgggatgggccacagcaaacagcaccacggctcggcgtcttcacccggagcatggccaagaaaacagtgcagagttcatccaaccaggtcctgctcaagttccaccgtgatgcagccacaggggggatcttcgccatagctttctccgggcacttggcagctgtttgtacattgtgacacccctccacgcacacatctgccccccagccacagaagcttggaccagaggtggacacctgagctgactgcagcaggggcaatcagatgttctctcttgggaagttgaaataggacccaagagattctacttttgcctggacccatctcctgaaaagataaaaatccaagtgcaatggattgctgctcttctactttccatgtggaccaaaaagtagaacaatcctatgtgcagaaagagaatgattgagaagtggaaaaatttccttggtttctgatggcccttcagttcctcgtcctctacctttgtgaagtctggctgcaaacccacccttgggttctctcttctctgagaggcttttttgcttattctagcctgaattgatttatttacatccaaaggttcccaaggaatacaacaacctaggacccagcaatcctacttctgggaattatgcaaagatatgtgcatgaagatattgcttgatatgttataacagggaaattagaaataatctaaatgtaaaaatagtaagagattaggtattataaatttaaagtgtatactcagagagagagagatagggaaagatacagtcattacaaatcattcatgtatgaacctgggcaacatagtgagactctgcctctacc

SEQ ID NO: 1797 - protein, 1167 aa, Homo sapiens
MVIVILFPAECGNSVTGTQGTLLSPNFPVNYNNNHECIYSIQTQPGKGIQLKARAFELSEGDVLKVYDGNNNSARLLGVFSHSEMMGVTLNSTSSSLWLDFITDAENTSKGFELHFSSFELIKCEDPGTPKFGYKVHDEGHFAGSSVSFSCDPGYSLRGSEELLCLSGERRTWDRPLPTCVAECGGTVRGEVSGQVLSPGYPAPYEHNLNCIWTIEAEAGCTIGLHFLVFDTEEVHDVLRIWDGPVESGVLLKELSGPALPKDLHSTFNSVVLQFSTDFFTSKQGFAIQFSVSTATSCNDPGIPQNGSRSGDSWEAGDSTVFQCDPGYALQGSAEISCVKIENRFFWQPSPPTCIAPCGGDLTGPSGVILSPNYPEPYPPGKECDWKVTVSPDYVIALVFNIFNLEPGYDFLHIYDGRDSLSPLIGSFYGSQLPGRIESSSNSLFLAFRSDASVSNAGFVIDYTENPRESCFDPGSIKNGTRVGSDLKLGSSVTYYCHGGYEVEGTSTLSCILGPDGKPVWNNPRPVCTAPCGGQYVGSDGVVLSPNYPQNYTSGQICLYFVTVPKDYVVFGQFAFFHTALNDVVEVHDGHSQHSRLLSSLSGSHTGESLPLATSNQVLIKFSAKGLAPARGFHFVYQAVPRTSATQCSSVPEPRYGKRLGSDFSVGAIVRFECNSGYALQGSPEIECLPVPGALAQWNVSAPTCVVPCGGNLTERRGTILSPGFPEPYLNSLNCVWKIVVPEGAGIQIQVVSFVTEQNWDSLEVFDGADNTVTMLGSFSGTTVPALLNSTSNQLYLHFYSDISVSAAGFHLEYKTVGLSSCPEPAVPSNGVKTGERYLVNDVVSFQCEPGYALQGHAHISCMPGTVRRWNYPPPLCIAQCGGTVEEMEGVILSPGFPGNYPSNMDCSWKIALPVGFGAHIQFLNFSTEPNHDYIEIRNGPYETSRMMGRFSGSELPSSLLSTSHETTVYFHSDHSQNRPGFKLEYQAYELQECPDPEPFANGIVRGAGYNVGQSVTFECLPGYQLTGHPVLTCQHGTNRNWDHPLPKCEVPCGGNITSSNGTVYSPGFPSPYSSSQDCVWLITVPIGHGVRLNLSLLQTEPSGDFITIWDGPQQTAPRLGVFTRSMAKKTVQSSSNQVLLKFHRDAATGGIFAIAFSGHLAAVCTL

SEQ ID NO: 1798 - DNA, 592 bp, Homo sapiens
ggacaggcagctagcctcccctggggcaggcagggaccagaagagccccagagggtcttgtagaacagaggcggaggaggagaggacagaaaggacagggagacaaccaaggaggccctgaagagactgaatgggagagtgtgactgctccctgcaaatcctccccatgtctggactgaggaaatagctcgaagcaccatccgtctcctggtggagcagcagcagcgtccagaggctgggggctgaggctccttgtttccaacaagctcctaggtgatggatgctgctggcaggtgcaccacactgagttgcaagactcgtccctccaggcacccccttcacaggttcagcatcctcgctgccatctcctcacaaatgcgggaagggagccaccaccccaggctgggctaactcgcatgaggacaccactaacattgtctgcgttccatttacgttagacaggcaggtctacaatgtttgaagtttacagatttcttggatatagcagtgaaaggtttgtattttttatctgtaaggaaaaattgtgaagtttacatcattgcaaaataaacagaactgtgacttctgtttc

SEQ ID NO: 1799 - protein, 44 aa, Homo sapiens
MDAAGRCTTLSCKTRPSRHPLHRFSILAAISSQMREGSHHPRLG

SEQ ID NO: 1800 - DNA, 638 bp, Homo sapiens
caggccaaggaatgcctgcagcccgggattcctcctaagccgtgttccatctgtgtgggaccccactggaaatcggactgtgtaactcacctggcagccactcccagatcccctggaactctggcccaaggctctctgactgactccttcttggcttagcagcggaagactgatgctgcccgatggccttggaagccccgtagaccatcacggatgctgagcttcgggtaactctcactgtggaagggtttgaatcaccttacaagctctcctgacatccttgactttatctgctgctctgttccacactcacagaagcttcttactgagaggagggcaaccctagcccaagagttccagaaagacaagaaggccaatggatctggggtacgtgtgctgagaagacacaggacccggcttagggcctgaatcctgggcagaatgtgcatcacctccaagctgtgaattccacacgctataaaagatgcttatgaaccactagttatgactcaaaacaggacaggtgtatttgtacataagttggttttatgtcaagaatattagggaaaggattatccttctggtctttggggcagaataagctgaaagcaggctggggaatctaattcccttggctc

SEQ ID NO: 1801 - protein, 65 aa, Homo sapiens [sequence omitted]

SEQ ID NO: 1802 - DNA, 790 bp, Homo sapiens
gcttttgccgcctgtacccttcctggagcaacccgtgcttttgaaaaatgaccatgccgaaggggaactaacactcccagcctggtgcgggtcttgtcaatctgatttttaaatgatggaggaggaggtttgaggacaaagctcatggtggcattaccactatcagggacgctgcaaagatcaagtgaaaaggggaaaaggctcttctcaatgtgagcacattcacaggctctgagaacagagaggtatttaaagtgaactggaacaaacctgcaacatccggtgcgttctgccttcaaaaatagctgccagttagaaagggttatttacatattgatttcatgctaactttgtaatggaatgtgctgcctgcctgcctgcctgagacctaacaactgtcatcataattttttctaaaaatacagtcagagaaaaacactcattgaaccctccactggaaagtagctgcaaaagaccccctgatcccaaacctgcttgacagaccacagccaagggcagggacactcaacaactgtaaacgaggaacatttcacagcggcagctggcccctctcttcttccaaccagccaatattttttgtctttctagaaaacctgtcttgttcaaaggcctgatggagctgattcggttgtgatcctgggcatatggatggcatatttgctgcgagctagccggcccccgctgctgcggacaaatctttcattcatgaacaggagcttgttaggccaactccggactctaaagccacttaattaaattgtggaaagtc

SEQ ID NO: 1803 - protein, 35 aa, Homo sapiens
MAYLLRASRPPLLRTNLSFMNRSLLGQLRTLKPLN

SEQ ID NO: 1804 - DNA, 5708 bp, Homo sapiens
ataaggtatgaaagatgtggcctgcagagagccggcactatctctactgctgctgctgctgctactgctgctgttgctaccgctgcctctgctgccaccgccactactgctgccagcggagccgctaggagtgagcatcccctctccgggatacccagctccgcggcgtctcccgcgcgccctggccccacacggacctgccagccccagggaacaaaagcggagcccgctcgccctctactgcagccggaggatgagtcgagagggctgagcggagagtgtggtcctcggcggctggagctatttccttggcttctctccatgacgattcctgactcgtggccccggcaatcttgggaagacatcatccagcttcttcagtccagaccctgggcaccccccttttgccaggatcgtccccacccagcctggacacattgactgaactgttttctaggacactgcactcagcaagacatggtggtgagccctgactctcagtcttcatgattgaagaactcttttgtacaacacaaagcactcaaaaagagtgaatgaaatgtgcagctcagagtgtcatttctgaagggaggagtctttctcttggagaagagtcctcaatgagcctggccgaggcccgggatctgtgtgaagtggactaaggattaagtaggatgtcaactgagacagaacttcaagtagctgtgaaaaccagcgccaagaaagactccagaaagaaaggtcaggatcgcagtgaagccactttgataaagaggtttaaaggtgaaggggtccggtacaaagccaaattgatcgggattgatgaagtttccgcagctcggggagacaagttatgtcaagattccatgatgaaactcaagggcgttgttgctggcgctcgttccaaaggagaacacaaacagaaaatctttttaaccatctcctttggaggaatcaaaatctttgatgagaagacaggggcccttcagcatcatcatgctgttcatgaaatatcctacattgcaaaggacattacagatcaccgggcctttggatatgtttgtgggaaggaagggaatcacagatttgtggccataaaaacagcccaggcggctgaacctgttattctggacttgagagatctctttcaactcatttatgaattgaagcaaagagaagaattagaaaaaaaggcacaaaaggataagcagtgtgaacaagctgtgtaccagacaatattggaagaggatgttgaagatcctgtgtaccagtacattgtgtttgaggctggacacgagccaatccgtgatcccgaaacggaagaaaacatttatcaggttcccaccagccaaaagaaggaaggtgtttatgatgtgccaaaaagtcaacctgtaagtgctgtgacccaattagaactttttggggacatgtccacaccccctgatataacctctccccccactcctgcaactccaggtgatgcctttatcccatcttcatctcagacccttccagcgagtgcagatgtgtttagttctgtacctttcggcactgctgctgtaccctcaggttacgttgcaatgggcgctgtcctcccgtccttctggggtcagcagcccctcgtccaacagcagatggtcatgggtgcccagccaccagtcgctcaggtgatgccgggggctcagcccatcgcatggggccagccgggtctctttcctgccactcagcagccctggccaactgtggccgggcagtttccgccagccgccttcatgcccacacaaactgttatgcctttgccagctgccatgttccaaggtcccctcaccccccttgccaccgtcccaggcacgagtgactccaccaggtcaagtccacagaccgacaagcccaggcagaaaatgggcaaagaaacgtttaaggatttccagatggcccagcctccgcccgtgccctcccgcaaacccgaccagccctccctcacctgtacctcagaggccttctccagttacttcaacaaagtcggggtggcacaggatacagacgactgtgatgactttgacatctcccagttgaatttgacccctgtgacttctaccacaccatcgaccaactcacctccaaccccagcccctagacagagctctccatccaaatcatctgcatcccatgccagtgatcctaccacagatgacatctttgaagagggctttgaaagtcccagcaaaagcgaagagcaagaagctcctgatggatcacaggcctcatccaacagtgatccatttggtgagcccagtggggagcccagtggtgataatataagtccacaggccggtagctagatagcgcaggtctgggagccagagcctctgtacgcgcagatcaacagacctaagaaatagcatcgatgcgagctcgtggtgggtgctcaagactggcatggacatcagcatcacgacaggctctcttgtattctttcacctcttcccacaagaaattcatgattgcccaatggaactcgctcagaagagggaactaagcatttttggcaaccaatggcagatatctatggcagcacacaaaaaaagtatagaaagatccacccaacattaaatcagaaatcaagcaaatgcttacccaacaaatatttgagccctcatagctgggtttaagatgactcagtgtgcaaaattattaattccctttttatttctctacctgttgaccactgttgagacaccaaatttggagtgacaggcatcagaggattacaacagggttggaactgacttctttaagcaaaagcaaagggtcttctgtgaccacaatatcgtcatccatatgccttttcacataggatgatgtgttttttgtcactccatggggcctggtctgccattttcccccctttcctttttttgtcatgtttgaaaattaataggtgtacaaatttttgtattgcttttgactttttttagatatgggtgaagaaatctaactggggagaaaaaaagcctcagtgaaatgaattaacttgaaattacaagacaaataagtggttgattattcattatgatcacgaatgttgccaaaacagtcctttagctattctgcatcctggtgaagaaagacagctttcagtacgaaccttcattctgtgagtaggaaaagacatcagatcccattgatgagaaagatgaaaaatgcatctgatttcttaagaagctctaaactctaagtacaataaaatgatattttttatttttccgatatcttgctgctgtgttgctatgcagacaagtgtcttctccacgtgccattttcaaagaaaagtcatttgccaaataattctggtacaattctggtaatgtggttttggatcttaaaaaccaactttctaatggaacaatggtggcataaatattcagaataacaaactgattctgtggtccaaatggttcatctctatctctttttgtacatcagaaaattcaaatgggatttttattttataacttgaaaaaaaaaccttaccattaaactctttaaatatttaagggaaatggctttaaggagttctaatgaaaaaaaattgtcttttttttgtaaatataaatgttaatgaaaatgatttttaataatgccattacactgtagagaaggtagcagattgagtgcaaggtgtgacaaacttgatggatggggctcactttccagacgttattctggagcatatggtaggaagctggagtgcagggacagctggcaggagcagttggccaatcagcagctagtgaacgggaagggagcacgtgactccatcatctagcctttccacgagagtccccaccctacgtgcaacacaagaaaaagacaattcacattctgaagaattcagattctgaaactctcccacctccccactcccacctacccccgatataaatcactggactgtttgtacgtgaaacagaagaggctaagcttcctttttttacacttatgagacaaaaagtgcagtgtttggttcgtatgtttagcacatgattttcataaagaatctatatatttttgccctacagagaattgttatacaggtcaagtgtgttttcctgatgttcctatgcagttacagtatgttgaaagtgttttaacactaagaagaaaactttaaagattcatgtgattaattggatttgaggataattattattatttggtttttagatttgaaaagtagaatttccattgagacaattgatttgaataggcctgcatttgattcttcatatcaatagaaactaaaatgatttgggagattcatttgaaaaatgattgtatacttgttcacaaagcgaaaagtgatacatgaaggtaatggttatcatttaaagcccacattttacactatcaggtcacaggagtctaatttttttttcagttagataaactgaccaaacgtctattcaagaatatatgtcaatatcatcctaatgtggaaggtccgaagaaccagaaaagtgagaagggccgtttacctccctctgtagctatcacctgttggtccacagagtttcttgagaaatgagcaaacattttatgattaggtaaccctttcacatgaacgggaagatgggaaaggtggaatgaccataagagttggcctgagaccagtttgttttctggggatttggtaagataggcagttcccatgggaaattgcttaaattgctttgttgcctatgatttgattctaaacaagtggtgctatcttctccctcaatatggctgtcttgagtttgtcttgcagtatcacaccattataccaattctttgggttgcttctgacacattcaaagtgaactctggctgatgttgctgtttcaggtataccatctggagttaatttcctagcagaaggtgaaagtccaggagaattgtcctctttcattgaacatgattgaaaatgtaactggctctgaacttcaagaagatagatgcccaagtgatgcattaaagtaagggaaataaagtcaagtttttcaactgccatccatattctcattggcagaattctgatttttttccaagcactgtttggtgagcctggaagcaccgtatcctgtcccaggagtacagtgaaatttccaagcaagagctgaggtgccaataccaaaagaccatggggagtctgcacggttctggttagatcaatagaaaatccatgtgtacaactgttaattcctcatcctccactagcactaaatttgtcactttaaattttgaaaccagggaaacaccacctgtcattctgtccccattctccatagctcttcaatctttacatgccgcaagacttttttgatagctcgtactcatcccagtgtctcctgaaaccccatcatgtaatgtactgggcaccttcttttaaacaaatgtttactctgtgggtttggttcatttcaatttctgcgttctgacacatatttttttaataaagatgagaaagagaaaatgactgttgcagtacctttctagacctactttaactttacctcagatgacagtttgttaacatatatggacacattatttttaactttatgtacaatgcattcaacagaacagcaaaatttttagaaattttccattaatttctgtaacacaccatgtaaaactgttacaaataaacatgtttgagaacaaca

SEQ ID NO: 1805 - protein, 555 aa, Homo sapiens; identical to SEQ ID NO: 80

SEQ ID NO: 1806 - DNA, 2580 bp, Homo sapiens; identical to SEQ ID NO: 79

SEQ ID NO: 1807 - protein, 555 aa, Homo sapiens; identical to SEQ ID NO: 80

SEQ ID NO: 1808 - DNA, 2256 bp, Homo sapiens
agtgatgtataaggtatgaaagatgtggcctgcagagagccggcactatctctactgctgctgctgctgctactgctgctgttgctaccgctgcctctgctgccaccgccactactgctgccagcggagccgctaggagtgagcatcccctctccgggatacccagctccgcggcgtctcccgcgcgccctggccccacacggacctgccagccccagggaacaaaagcggagcccgctcgccctctactgcagccggaggatgagtcgagagggctgagcggagagtgtggtcctcggcggctggaggaaattgtgggtttcttggaaggctctggatatctgtgacagacctcagggacacagataatttgaaaattgcatgctatttccttggcttctctccatgacgattcctgactcgtggccccggcaatcttgggaagacatcatccagcttcttcagtccagaccctgggcaccccccttttgccaggatcgtccccacccagcctggacacattgactgaactgttttctaggacactgcactcagcaagacatggtggtgagccctgactctcagtcttcatgattgaagaactcttttgtacaacacaaagcactcaaaaagagtgaatgaaatgtgcagctcagagtgtcatttctgaagggaggagtctttctcttggagaagagtcctcaatgagcctggccgaggcccgggatctgtgtgaagtggactaaggattaagtaggatgtcaactgagacagaacttcaagtagctgtgaaaaccagcgccaagaaagactccagaaagaaaggtcaggatcgcagtgaagccactttgataaagaggtttaaaggtgaaggggtccggtacaaagccaaattgatcgggattgatgaagtttccgcagctcggggagacaagttatgtcaagattccatgatgaaactcaaggtgctatgcaaacgttttcttttcaatactttgtgtttaatgtgaatgaggaaaagaagtgattaccatcataattgtaaataactttattcatttattggtaaattacttggcttactgttgaatcaccatattttttcattcggaagatatttcaatcattcagcaaatgtttgttgagcacctactatgtggaaatattttggtaggcccaggtttacaatttttgagtgtatcacattttattccattttattttcattttgcaactcctgcaaaaataaaagcaaaaaattatcaaattgttttgtcacccacattttatgaattttgccatcttgttatttttgaataaataatatatatttttgccatatggtaagagatgttaagataaaagttgattttattcattcttacagtttctacaaatgtaccccaagcactttaagataatatccttaaagtaaaatgtaattatattttgggatttggggatatcatgaagagatttctgattttaaatgctataaagaagccttttctctgaggaatctaagaaagaaattagattttttttttctttttttttttttgagaaggagtctcactctatcgcctaggctggagtgcagtggcgcaatctcggctcactgcaacttccgcctcctgggttcaagcaattctcctgcctcagcctcctgagtagctgggattacaggtgcacactaccaggcctggctaatttttgtatttttagtagagacggggtttcaccatgttggtcaggctggtctcgaactcctgacctcatgatccgtccgcctcggcctcccaaagtgctgggattacaggcgtgagccactgtgcccggccagaaattagaaattttttaaatatacaaaataaattattttattaaacatccttaaaagcatacaaaaataacacttttctcagattctgatgtccatatattgtttcttttaaaaagttataaaatattgaaaaaataaatggtttagcaagaagtatacaaatatcatatgtatttcaaacatatattatttatttttctgattacagagttcacttatgtgcattatggaatattttgaaaatacagaaaaatgtaaggaagaaaactgaaataatccacaatcccacaaagacaatcagtgtcaatatttttgtgtataatttacaagttctttttgtggttttacatatataatatatgaattatacacatatatgtaataaaattggaattaaaatttatacagtttcc

SEQ ID NO: 1809 - protein, 83 aa, Homo sapiens
MSTETELQVAVKTSAKKDSRKKGQDRSEATLIKRFKGEGVRYKAKLIGIDEVSAARGDKLCQDSMMKLKVLCKRFLFNTLCLM

SEQ ID NO: 1810 - DNA, 583 bp, Homo sapiens
atgaaagatgtggcctgcagagagccggcactatctctactgctgctgctgctgctactgctgctgttgctaccgctgcctctgctgccaccgccactactgctgccagcggagccgctaggagtgagcatcccctctccgggatacccagctccgcggcgtctcccgcgcgccctggccccacacggacctgccagccccagggaacaaaagcggagcccgctcgccctctactgcagccggaggatgagtcgagagggctgagcggagagtgtggtcctcggcggctggagctatttccttggcttctctccatgacgattcctgactcgtggccccggcaatcttgggaagacatcatccagcttcttcagtccagaccctgggcaccccccttttgccaggatcgtccccacccagcctggacacattgactgaactgttttctaggacactgcactcagcaagacatggtggtgagccctgactctcagtcttcatgattgaagaactcttttgtacaacacaaaggaagcctccagccacacaccagatcacgagggttagaggtcccagcctgtca

SEQ ID NO: 1811 - protein, 87 aa, Homo sapiens [sequence omitted]

SEQ ID NO: 1812 - DNA, 587 bp, Homo sapiens
agtgatgtataaggtatgaaagatgtggcctgcagagagccggcactatctctactgctgctgctgctgctactgctgctgttgctaccgctgcctctgctgccaccgccactactgctgccagcggagccgctaggagtgagcatcccctctccgggatacccagctccgcggcgtctcccgcgcgccctggccccacacggacctgccagccccagggaacaaaagcggagcccgctcgccctctactgcagccggaggatgagtcgagagggctgagcggagagtgtggtcctcggcggctggagctatttccttggcttctctccatgacgattcctgactcgtggccccggcaatcttgggaagacatcatccagcttcttcagtccagaccctgggcaccccccttttgccaggatcgtccccacccagcctggacacattgactgaactgttttctaggacactgctcttggattgttttactggattctttggattggtttcaattttctcctgaatctcattgagcttccttgtcatccagattctgaactctatgtctgtcatttcagtctgattga

SEQ ID NO: 1813 - protein, 87 aa, Homo sapiens [sequence omitted]

SEQ ID NO: 1814 - DNA, 459 bp, Homo sapiens
tctctctggtccgtgcctccaagatgacaaagaaaagaaggaacaatggtcgtgccaaaaagggccgcggccacgtgcagcctattcgctgcactaactgtgcccgatgcgtgcccaaggacaaggccattaagacattcgtcattcgaaacatagtgaaggccgcagcagtcagggacatttctgaagcgagcgtcttcgatgcctatgtgcttcccaagctgtatgtgaagctacattactgtgtgagttgtgcaattcacagcaaagtagtcaggaatcgatctcgtgaagcccgcaaggaccgaacacccccatcccgatttagacctgcgggtgctgccccacgtcccccaccaaagcccatgtaaggagctgagttcttaaagactgaagacaggctattctctggagaaaaataaaatggaaattgtacttaaaaaaaaaaaaaaaagaatg

SEQ ID NO: 1815 - protein, 115 aa, Homo sapiens
MTKKRRNNGRAKKGRGHVQPIRCTNCARCVPKDKAIKTFVIRNIVKAAAVRDISEASVFDAYVLPKLYVKLHYCVSCAIHSKVVRNRSREARKDRTPPSRFRPAGAAPRPPPKPM

SEQ ID NO: 1816 - DNA, 618 bp, Homo sapiens
aggaaggatggcaaaggagccaaagatcaggcgagtccaggccaaggagtccgcacatctctcataggcagtaggggctcacccaccgaatgaagtggttggatctgcagtttaagaagaaaaccaaaagccaactctttccaacaggcttctctgctggctctctaaggtgatgccaaccaaacatggaggttgccttaaagcattaacctgagtctgaagaatgaacacatggaaatgatgctcatgatgaggttaataatcacacaaaaagaataattctgagattagcaatttacaactacctttgggcatgcctgctggccccagggaaggagagaggagaatccaagaaggtcctggaaagttaccagaaaggatgagtttcgaggcagttgcatgtaaatgtggcttagccaatgggaaaggaagggatatgtgtcctggtacaggtatttgagaaatgtacagtccatctgttaaggtgtgctcaacccccaaccattgtccacacttcagtgacttaatcagtagagaccccaaattcatgtccagtgactttgacatcttcgagctgaaggactgatctctcattttttcaataacactttatgactt

SEQ ID NO: 1817 - protein, 48 aa, Homo sapiens
MPAGPREGERRIQEGPGKLPERMSFEAVACKCGLANGKGRDMCPGTGI

SEQ ID NO: 1818 - DNA, 630 bp, Homo sapiens
agcgttccctggggcctagccaaccgcgggcagggctgggcaaggcgggaggagcgcggacccaagatcggctacgctgcgtctgctcaggctgcgagttcccggctctggggactcaccttgcggagcttacccaggcggactctccgcagcccctgatgggtgtgtgtgtcagaccgtttactaaacaccaggactgttgtaggcgactcagccgtgttgaaccatgaaaggacctcaggaatgaaacccacacacagcaaagcaacaaagtgaaagaagcgtggattcctaatgcaggaggcactgaaccaatcaatacccactgccctccagacctccacatgaaagaaaaaaactgctgtcctgtgaagaagacactccccagatgccagcaacttgatattggacttcctgcctttagaaacattcctttaagcctctctgaaacttgaccctctggcaggaacaggtgccattacatacagacactctctctcttccaaattcaccctgtcatatcaaagggaaaactgaagtggtccactgtagacctgacagatgatcacaaacaggaaaccagcaatcagaagtgcctactgagctccctaccctgaccatcacctacag

SEQ ID NO: 1819 - protein, 36 aa, Homo sapiens
MKEKNCCPVKKTLPRCQQLDIGLPAFRNIPLSLSET

SEQ ID NO: 1820 - DNA, 1038 bp, Homo sapiens
gcgtctgctcaggctgcgagttcccggctctggggactcaccttgcggagcttacccaggcggactctccgcagcccctgatgggtgtgtgtgtcagaccgtttactaaacaccaggactgttgtaggcgactaacattatgaagaacaaatgtggtaagacatatgaaaatgctttgtaaagtgttagatgcttaatacacagaagacattgcttccagatctgtttcaacgtaccccaagaatggaataagtggaatatgctggtttcatgcactgtggcaagggggtctcatcttggctagacttgaataagtggatttgttgcctggcctctgtggatggctctttctctgggcttttgtgtatttgattttttatttgctccagcagccgtgttgaaccatgaaaggacctcaggaatgaaacccacacacagcaaagcaacaaagtgaaagaagcgtggattcctaatgcaggaggcactgaaccaatcaatacccactgccctccagacctccacatgaaagaaaaaaactgctgtcctgtgtaagacacttttattttgtgtttctattgtatgaggtcaaacctaataacagatatattacactctaacagatacattacattgtatagtagaattctcagacagcaaccttataaggtgatagatgcagaaacaggcccaaagagtaaaaataatttgttcagagttttccagccaagtggcgaaggtgagattcttacctgggtttgtctgaaaccaattttcactatctttttcagttatgatacactgcctattacgaatgaatgaatccttttttttttttccatttacttccatttgattcatttattccagggagtgacactttttctgtaaaggaccgatagtaaatattttagactttgtgagcaatacagtctctgttgcaactactcaactttgtaatgtaaaagcagccatagacaatagtaaatgagtaggtatgactatgtttcaataaaactttacttacacaagcaggcaatg

SEQ ID NO: 1821 - protein, 79 aa, Homo sapiens [sequence omitted]

SEQ ID NO: 1822 - DNA, 553 bp, Homo sapiens
gtgggattggccgtcgcctgcccaccccgcggctgcagcgttccctggggcctagccaaccgcgggcagggctgggcaaggcgggaggagcgcggacccaagatcggctacgctgcgtctgctcaggctgcgagttcccggctctggggactcaccttgcggagcttacccaggcggactctccgcagcccctgatgggtgtgtgtgtcagaccgtttactaaacaccaggactgttgtaggcgactaaaagaaaactgagatccaggaaagggaagtgattttccaaagacacacctgtgaaaggtgaggagaacagcccagtgaggctgaggccacacaattaaccccagtctttgcactacaactctaccagggatcctggtttggctcattttctttcttctgcaccatgattgttcaccttttcattaccagcaacatacccaaagacctagctatagactcgttggaatctgttacttagcagctgtgtgaatcaagtgttcaataggaataataagatgtattcatcttaccttttcagaacatta

SEQ ID NO: 1823 - protein, 64 aa, Homo sapiens
VGLAVACPPRGCSVPWGLANRGQGWARREERGPKIGYAASAQAASSRLWGLTLRSLPRRTLRSP

SEQ ID NO: 1824 - DNA, 563 bp, Homo sapiens
ggccgcgctttacaggggccgcgctttacaggggccgcgctttacaggggccgcgctttacaggggccgcgctttacaggggccgcgctttacaggggccgcgctttacaggggccgcgctttacaggggccgcgccggcgggggcgggatcgcgcgcaaggcggggctgtagccgccccgggaccgccctgctcaggcgccgtggggttcggcgcggctacgtgcagaatccgtctagctaaaatgtaatttcagattggacaagtactagagggagtcaaaagtgaggaacccaagcctgagcacgtgggccagccccatggggaatctgtcttgtcatcggggctggctggagtagagacaagtctggatgctggctggccaggtggaggaactgcaatgtctggtggagaacagaaaccagagaggtactatgtgggtgtggacgttggaacaggcagtgtccgtgcagctctggtggaccagagtggggtcctgttggcttttgcagaccagccaattaagaattgggagccccagttcaaccaccatgagcagtcct

SEQ ID NO: 1825 - protein, 63 aa, Homo sapiens
MLAGQVEELQCLVENRNQRGTMWVWTLEQAVSVQLWWTRVGSCWLLQTSQLRIGSPSSTTMSS

SEQ ID NO: 1826 - DNA, 775 bp, Homo sapiens
ggccgcgctttacaggggccgcgctttacaggggccgcgctttacaggggccgcgctttacaggggccgcgctttacaggggccgcgctttacaggggccgcgctttacaggggccgcgctttacaggggccgcgccggcgggggcgggatcgcgcgcaaggcggggctgtagccgccccgggaccgccctgctcaggcgccgtggggttcggcgcggctacgtgcagaatccgtctagctaaaatgtaatttcagattggacaagtactaaagttgtacaagggattgatttaaaccaaattcgaggacttgggtttgatgccacgtgttctctggttgttttggataagcagtttcacccattaccagtcaaccaggaaggggattcccatcgaaacgtcatcatgtggctggaccatcgagcagtcagtcaagttaacaggatcaatgagaccaagcacagtgtcctccagtacgtcgggggggtgatgtctgtggaaatgcaggccccgaaacttctgtggctgaaagagaacttgagagagatttgctgggataaggcgggacatttctttgatctcccggacttcttatcgtggaaggcaacaggtgtcacagcacggtctctctgctccctggtgtgtaagtggacatattcagcagagaaaggctgggacgacagtttctggaaaatgattggtttggaagactttgttgcagataattacagcaaaataggtaaaagaataaaacatctgtagagtgattatgtgc

SEQ ID NO: 1827 - protein, 118 aa, Homo sapiens
MWLDHRAVSQVNRINETKHSVLQYVGGVMSVEMQAPKLLWLKENLREICWDKAGHFFDLPDFLSWKATGVTARSLCSLVCKWTYSAEKGWDDSFWKMIGLEDFVADNYSKIGKRIKHL

SEQ ID NO: 1828 - DNA, 1799 bp, Homo sapiens
gctggtgcgcaggctcttagcgcgcacgcccagaaagaggcttctccaacccggcccggcccttccttcccctttcccgcagtcgttgcctcctcctcccctgcctcctcctccccttcctcctcctggccgcttagtctcacacccgccgggccgttgttcccgagacgttgttgagtcccctgtgtcctcttctggaaagttgtacaagggattgatttaaaccaaattcgaggacttgggtttgatgccacgtgttctctggttgttttggataagcagtttcacccattaccagtcaaccaggaaggggattcccatcgaaacgtcatcatgtggctggaccatcgagcagtcagtcaagttaacaggatcaatgagaccaagcacagtgtcctccagtacgtcgggggggtgatgtctgtggaaatgcaggccccgaaacttctgtggctgaaagagaacttgagagagatttgctgggataaggcgggacatttctttgatctcccggacttcttatcgtggaaggcaacaggtgtcacagcacggtctctctgctccctggtgtgtaagtggacatattcagcagagaaaggctgggacgacagtttctggaaaatgattggtttggaagactttgttgcagataattacagcaaaataggaaaccaagtgctacctcctggagcttctcttggaaatgggctcacaccagaggcagcaagagaccttggccttctccctgggattgcggtcgcagcttcactcattgatgcccatgcaggaggactaggagtgattggggcagatgtgagagggcacggcctcatctgtgaggggcagccagtgacgtcacggctggctgtcatctgtggaacgtcttcttgtcacatggggatcagcaaagacccgatttttgtaccaggcgtctgggggccttatttctcagccatggtacctgggttctggctgaatgaaggtggtcagagcgttactggaaaattgatagaccacatggtacaaggccatgctgcttttccagaactacaagtaaaggccacagccagatgccagagtatatatgcatatttgaacagtcacctggatctgattaagaaggctcagcctgtgggtttccttactgttgatttacatgtttggccagatttccatggcaaccggtctcccttagcagatctgacactaaagggcatggtcaccggattgaaactgtctcaggaccttgatgatcttgccattctctacctggccacagttcaagccattgctttggggactcgcttcattatagaagccatggaggcagcagggcactcaatcagtactcttttcctatgtggaggcctcagcaagaatcccctttttgtgcaaatgcatgcggacattactggcatgcctgtggtcctgtcgcaagaggtggagtccgttcttgtgggtgctgctgttctgggtgcctgtgcctcaggggatttcgcttctgtacaggaagcaatggcaaaaatgagcaaagttgggaaagttgtgttcccgagactacaggataaaaaatactatgataagaaataccaagtattcctgaagctggttgaacaccagaaggagtatttggcgatcatgaatgatgactgaacagggcttgcaggtgctgatgccagaagcttctgtgccattgcattaaagacttgtcatttgatccatgttcaagacccttgaggtattgtttcatcatttctgtattgtctttcaataaagaaaacaaacatgtgcaaccagaa

SEQ ID NO: 1829 - protein, 439 aa, Homo sapiens
MWLDHRAVSQVNRINETKHSVLQYVGGVMSVEMQAPKLLWLKENLREICWDKAGHFFDLPDFLSWKATGVTARSLCSLVCKWTYSAEKGWDDSFWKMIGLEDFVADNYSKIGNQVLPPGASLGNGLTPEAARDLGLLPGIAVAASLIDAHAGGLGVIGADVRGHGLICEGQPVTSRLAVICGTSSCHMGISKDPIFVPGVWGPYFSAMVPGFWLNEGGQSVTGKLIDHMVQGHAAFPELQVKATARCQSIYAYLNSHLDLIKKAQPVGFLTVDLHVWPDFHGNRSPLADLTLKGMVTGLKLSQDLDDLAILYLATVQAIALGTRFIIEAMEAAGHSISTLFLCGGLSKNPLFVQMHADITGMPVVLSQEVESVLVGAAVLGACASGDFASVQEAMAKMSKVGKVVFPRLQDKKYYDKKYQVFLKLVEHQKEYLAIMNDD

SEQ ID NO: 1830 - DNA, 2058 bp, Homo sapiens
cccagaaagaggcttctccaacccggcccggcccttccttcccctttcccgcagtcgttgcctcctcctcccctgcctcctcctccccttcctcctcctggccgcttagtctcacacccgccgggccgttgttcccgagacgttgttgagtcccctgtgtcctcttctgggtggaggaactgcaatgtctggtggagaacagaaaccagagaggtactatgtgggtgtggacgttggaacaggcagtgtccgtgcagctctggtggaccagagtggggtcctgttggcttttgcagaccagccaattaagaattgggagccccagttcaaccaccatgagcagtcctccgaggacatctgggctgcgtgctgtgttgtcacaaagaaagttgtacaagggattgatttaaaccaaattcgaggacttgggtttgatgccacgtgttctctggttgttttggataagcagtttcacccattaccagtcaaccaggaaggggattcccatcgaaacgtcatcatgtggctggaccatcgagcagtcagtcaagttaacaggatcaatgagaccaagcacagtgtcctccagtacgtcgggggggtgatgtctgtggaaatgcaggccccgaaacttctgtggctgaaagagaacttgagagagatttgctgggataaggcgggacatttctttgatctcccggacttcttatcgtggaaggcaacaggtgtcacagcacggtctctctgctccctggtgtgtaagtggacatattcagcagagaaaggctgggacgacagtttctggaaaatgattggtttggaagactttgttgcagataattacagcaaaataggaaaccaagtgctacctcctggagcttctcttggaaatgggctcacaccagaggcagcaagagaccttggccttctccctgggattgcggtcgcagcttcactcattgatgcccatgcaggaggactaggagtgattggggcagatgtgagagggcacggcctcatctgtgaggggcagccagtgacgtcacggctggctgtcatctgtggaacgtcttcttgtcacatggggatcagcaaagacccgatttttgtaccaggcgtctgggggccttatttctcagccatggtacctgggttctggctgaatgaaggtggtcagagcgttactggaaaattgatagaccacatggtacaaggccatgctgcttttccagaactacaagtaaaggccacagccagatgccagagtatatatgcatatttgaacagtcacctggatctgattaagaaggctcagcctgtgggtttccttactgttgatttacatgtttggccagatttccatggcaaccggtctcccttagcagatctgacactaaagggcatgagaaccactggatatctgtatattccggctttggcagcgttgcactctcccagttctctactctcccctcaggtcaccggattgaaactgtctcaggaccttgatgatcttgccattctctacctggccacagttcaagccattgctttggggactcgcttcattatagaagccatggaggcagcagggcactcaatcagtactcttttcctatgtggaggcctcagcaagaatcccctttttgtgcaaatgcatgcggacattactggcatgcctgtggtcctgtcgcaagaggtggagtccgttcttgtgggtgctgctgttctgggtgcctgtgcctcaggggatttcgcttctgtacaggaagcaatggcaaaaatgagcaaagttgggaaagttgtgttcccgagactacaggataaaaaatactatgataagaaataccaagtattcctgaagctggttgaacaccagaaggagtatttggcgatcatgaatgatgactgaacagggcttgcaggtgctgatgccagaagcttctgtgccattgcattaaagacttgtcatttgatccatgttcaagacccttgaggtattgtttcatcatttctgtattgtctttcaataaagaaaacaaacatgtgcaaccagaa

SEQ ID NO: 1831 - protein, 575 aa, Homo sapiens
MSGGEQKPERYYVGVDVGTGSVRAALVDQSGVLLAFADQPIKNWEPQFNHHEQSSEDIWAACCVVTKKVVQGIDLNQIRGLGFDATCSLVVLDKQFHPLPVNQEGDSHRNVIMWLDHRAVSQVNRINETKHSVLQYVGGVMSVEMQAPKLLWLKENLREICWDKAGHFFDLPDFLSWKATGVTARSLCSLVCKWTYSAEKGWDDSFWKMIGLEDFVADNYSKIGNQVLPPGASLGNGLTPEAARDLGLLPGIAVAASLIDAHAGGLGVIGADVRGHGLICEGQPVTSRLAVICGTSSCHMGISKDPIFVPGVWGPYFSAMVPGFWLNEGGQSVTGKLIDHMVQGHAAFPELQVKATARCQSIYAYLNSHLDLIKKAQPVGFLTVDLHVWPDFHGNRSPLADLTLKGMRTTGYLYIPALAALHSPSSLLSPQVTGLKLSQDLDDLAILYLATVQAIALGTRFIIEAMEAAGHSISTLFLCGGLSKNPLFVQMHADITGMPVVLSQEVESVLVGAAVLGACASGDFASVQEAMAKMSKVGKVVFPRLQDKKYYDKKYQVFLKLVEHQKEYLAIMNDD

SEQ ID NO: 1832 - DNA, 1947 bp, Homo sapiens
agaaagaggcttctccaacccggcccggcccttccttcccctttcccgcagtcgttgcctcctcctcccctgcctcctcctccccttcctcctcctggccgcttagtctcacacccgccgggccgttgttcccgagacgttgttgagtcccctgtgtcctcttctgggtggaggaactgcaatgtctggtggagaacagaaaccagagaggtactatgtgggtgtggacgttggaacaggcagtgtccgtgcagctctggtggaccagagtggggtcctgttggcttttgcagaccagccaattaagaattgggagccccagttcaaccaccatgagcagtcctccgaggacatctgggctgcgtgctgtgttgtcacaaaggggattcccatcgaaacgtcatcatgtggctggaccatcgagcagtcagtcaagttaacaggatcaatgagaccaagcacagtgtcctccagtacgtcgggggggtgatgtctgtggaaatgcaggccccgaaacttctgtggctgaaagagaacttgagagagatttgctgggataaggcgggacatttctttgatctcccggacttcttatcgtggaaggcaacaggtgtcacagcacggtctctctgctccctggtgtgtaagtggacatattcagcagagaaaggctgggacgacagtttctggaaaatgattggtttggaagactttgttgcagataattacagcaaaataggaaaccaagtgctacctcctggagcttctcttggaaatgggctcacaccagaggcagcaagagaccttggccttctccctgggattgcggtcgcagcttcactcattgatgcccatgcaggaggactaggagtgattggggcagatgtgagagggcacggcctcatctgtgaggggcagccagtgacgtcacggctggctgtcatctgtggaacgtcttcttgtcacatggggatcagcaaagacccgatttttgtaccaggcgtctgggggccttatttctcagccatggtacctgggttctggctgaatgaaggtggtcagagcgttactggaaaattgatagaccacatggtacaaggccatgctgcttttccagaactacaagtaaaggccacagccaggtaactgctgtctctgttccctctaaaattttccttgtgtgactgtattgagagaattcacgttgggcagttgggtgattttcagatcctacagacaatgaaaatgcctgttagtgcttgaaagatagtcacctggatgatccagaagatagatgtattaattctttaaatgaggtaagagaacttagagaacctagagataccccaagaatatacccagggactatagataagaaactctgatgtagaagaaggaccatggattctggagtcaaaacttcttagtttcacatcccagccatactccttaatagatacaggaccttgagctagttacttaacctctttatgcctgtctcttcatctgtaaaactgaagataataactgatatggagtgatttctagaatattttgaagcaagctgagtgcaaaaaaaatttacgatatactccctttcatgtaaaaagaaagacataggaaaatacatgtgtatctgttcatttttgcaaaagaaatataggaagtggccaggtgcggtggctcactcctgtaaccccagcaccttgggaggccgaggcgggcagatcacgagttcagagatcgagaccagcctggccaacatggtgaaaccccatctctactaaaaatacaaaagttagccgggcatggtgatgtatgcctataatcccagttacttgggaggttgaggcaggagaattgctcaaacccgggaggtggaggttgcagtgagcagagatcgtgccactgcactccagcctgggcaataaagtgagactccgtctc

SEQ ID NO: 1833 - protein, 246 aa, Homo sapiens
MWLDHRAVSQVNRINETKHSVLQYVGGVMSVEMQAPKLLWLKENLREICWDKAGHFFDLPDFLSWKATGVTARSLCSLVCKWTYSAEKGWDDSFWKMIGLEDFVADNYSKIGNQVLPPGASLGNGLTPEAARDLGLLPGIAVAASLIDAHAGGLGVIGADVRGHGLICEGQPVTSRLAVICGTSSCHMGISKDPIFVPGVWGPYFSAMVPGFWLNEGGQSVTGKLIDHMVQGHAAFPELQVKATAR

SEQ ID NO: 1834 - DNA, 1983 bp, Homo sapiens
agaaagaggcttctccaacccggcccggcccttccttcccctttcccgcagtcgttgcctcctcctcccctgcctcctcctccccttcctcctcctggccgcttagtctcacacccgccgggccgttgttcccgagacgttgttgagtcccctgtgtcctcttctgggtggaggaactgcaatgtctggtggagaacagaaaccagagaggtactatgtgggtgtggacgttggaacaggcagtgtccgtgcagctctggtggaccagagtggggtcctgttggcttttgcagaccagccaattaagaattgggagccccagttcaaccaccatgagcagtcctccgaggacatctgggctgcgtgctgtgttgtcacaaagaaagttgtacaagggattgatttaaaccaaattcgaggacttgggtttgatgccacgtgttctctggttgttttggataagcagtttcacccattaccagtcaaccaggaaggggattcccatcgaaacgtcatcatgtggctggaccatcgagcagtcagtcaagttaacaggatcaatgagaccaagcacagtgtcctccagtacgtcgggggggtgatgtctgtggaaatgcaggccccgaaacttctgtggctgaaagagaacttgagagagatttgctgggataaggcgggacatttctttgatctcccggacttcttatcgtggaaggcaacaggtgtcacagcacggtctctctgctccctggtgtgtaagtggacatattcagcagagaaaggctgggacgacagtttctggaaaatgattggtttggaagactttgttgcagataattacagcaaaataggaaaccaagtgctacctcctggagcttctcttggaaatgggctcacaccagaggcagcaagagaccttggccttctccctgggattgcggtcgcagcttcactcattgatgcccatgcaggaggactaggagtgattggggcagatgtgagagggcacggcctcatctgtgaggggcagccagtgacgtcacggctggctgtcatctgtggaacgtcttcttgtcacatggggatcagcaaagacccgatttttgtaccaggcgtctgggggccttatttctcagccatggtacctgggttctggctgaatgaaggtggtcagagcgttactggaaaattgatagaccacatggtacaaggccatgctgcttttccagaactacaagtaaaggccacagccagatgccagagtatatatgcatatttgaacagtcacctggatctgattaagaaggctcagcctgtgggtttccttactgttgatttacatgtttggccagatttccatggcaaccggtctcccttagcagatctgacactaaagggcatggtcaccggattgaaactgtctcaggaccttgatgatcttgccattctctacctggccacagttcaagccattgctttggggactcgcttcattatagaagccatggaggcagcagggcactcaatcagtactcttttcctatgtggaggcctcagcaagaatcccctttttgtgcaaatgcatgcggacattactggcatgcctgtggtcctgtcgcaagaggtggagtccgttcttgtgggtgctgctgttctgggtgcctgtgcctcaggggatttcgcttctgtacaggaagcaatggcaaaaatgagcaaagttgggaaagttgtgttcccgagactacaggataaaaaatactatgataagaaataccaagtattcctgaagctggttgaacaccagaaggagtatttggcgatcatgaatgatgactgaacagggcttgcaggtgctgatgccagaagcttctgtgccattgcattaaagacttgtcatttgatccatgttcaagacccttgaggtattgtttcatcatttctgtattgtctttcaataaagaaaacaaacatgtgcaaccagaa

SEQ ID NO: 1835 - protein, 551 aa, Homo sapiens
MSGGEQKPERYYVGVDVGTGSVRAALVDQSGVLLAFADQPIKNWEPQFNHHEQSSEDIWAACCVVTKKVVQGIDLNQIRGLGFDATCSLVVLDKQFHPLPVNQEGDSHRNVIMWLDHRAVSQVNRINETKHSVLQYVGGVMSVEMQAPKLLWLKENLREICWDKAGHFFDLPDFLSWKATGVTARSLCSLVCKWTYSAEKGWDDSFWKMIGLEDFVADNYSKIGNQVLPPGASLGNGLTPEAARDLGLLPGIAVAASLIDAHAGGLGVIGADVRGHGLICEGQPVTSRLAVICGTSSCHMGISKDPIFVPGVWGPYFSAMVPGFWLNEGGQSVTGKLIDHMVQGHAAFPELQVKATARCQSIYAYLNSHLDLIKKAQPVGFLTVDLHVWPDFHGNRSPLADLTLKGMVTGLKLSQDLDDLAILYLATVQAIALGTRFIIEAMEAAGHSISTLFLCGGLSKNPLFVQMHADITGMPVVLSQEVESVLVGAAVLGACASGDFASVQEAMAKMSKVGKVVFPRLQDKKYYDKKYQVFLKLVEHQKEYLAIMNDD

SEQ ID NO: 1836 - DNA, 471 bp, Homo sapiens
aaagaggcttctccaacccggcccggcccttccttcccctttcccgcagtcgttgcctcctcctcccctgcctcctcctccccttcctcctcctggccgcttagtctcacacccgccgggccgttgttcccgagacgttgttgagtcccctgtgtcctcttctgggagctagataagggcctggttccacttctcagtattcagggaatggattccctgcttactcccttccttcctttggatgccacaaaatgagcacttgactgaaaatatgcttatacgcgtttttacagactacgccaagccacagcaaatccctgattgcagtataactaactaaataaattgcacaggacttgtgtacatcaactcccagcaaagtccaaagatcaaagttgaaagaggatactgaattccttcccagatttctgggacactgcttctgtgcactgtcaccaaataaatcctgga

SEQ ID NO: 1837 - protein, 32 aa, Homo sapiens
MPQNEHLTENMLIRVFTDYAKPQQIPDCSITN

SEQ ID NO: 1838 - DNA, 2509 bp, Homo sapiens
agaggcttctccaacccggcccggcccttccttcccctttcccgcagtcgttgcctcctcctcccctgcctcctcctccccttcctcctcctggccgcttagtctcacacccgccgggccgttgttcccgagacgttgttgagtcccctgtgtcctcttctggactacgccaagccacaggtggaggaactgcaatgtctggtggagaacagaaaccagagaggtactatgtgggtgtggacgttggaacaggcagtgtccgtgcagctctggtggaccagagtggggtcctgttggcttttgcagaccagccaattaagaattgggagccccagttcaaccaccatgagcagtcctccgaggacatctgggctgcgtgctgtgttgtcacaaagaaagttgtacaagggattgatttaaaccaaattcgaggacttgggtttgatgccacgtgttctctggttgttttggataagcagtttcacccattaccagtcaaccaggaaggggattcccatcgaaacgtcatcatgtggctggaccatcgagcagtcagtcaagttaacaggatcaatgagaccaagcacagtgtcctccagtacgtcgggggggtgatgtctgtggaaatgcaggccccgaaacttctgtggctgaaagagaacttgagagagatttgctgggataaggcgggacatttctttgatctcccggacttcttatcgtggaaggcaacaggtgtcacagcacggtctctctgctccctggtgtgtaagtggacatattcagcagagaaaggctgggacgacagtttctggaaaatgattggtttggaagactttgttgcagataattacagcaaaataggaaaccaagtgctacctcctggagcttctcttggaaatgggctcacaccagaggcagcaagagaccttggccttctccctgggattgcggtcgcagcttcactcattgatgcccatgcaggaggactaggagtgattggggcagatgtgagagggcacggcctcatctgtgaggggcagccagtgacgtcacggctggctgtcatctgtggaacgtcttcttgtcacatggggatcagcaaagacccgatttttgtaccaggcgtctgggggccttatttctcagccatggtacctgggttctggctgaatgaaggtggtcagagcgttactggaaaattgatagaccacatggtacaaggccatgctgcttttccagaactacaagtaaaggccacagccagatgccagagtatatatgcatatttgaacagtcacctggatctgattaagaaggctcagcctgtgggtttccttactgttgatttacatgtttggccagatttccatggcaaccggtctcccttagcagatctgacactaaagggcatggtcaccggattgaaactgtctcaggaccttgatgatcttgccattctctacctggccacagttcaagccattgctttggggactcgcttcattatagaagccatggaggcagcagggcactcaatcagtactcttttcctatgtggaggcctcagcaagaatcccctttttgtgcaaatgcatgcggacattactggcatgcctgtggtcctgtcgcaagaggtggagtccgttcttgtgggtgctgctgttctgggtgcctgtgcctcaggggatttcgcttctgtacagtgggggaaatagatagctcagttgtggacgatagcagcaatgggaagcagtatttgagaagaaatcagactctcttcttccagtcttttgcaagacagctgtccccaaagggatgaatccattacctttcaccagagttgagttcgttttccatttcatctttctgcttaaagagaaagccctttaaaagcgcagcgcatacattgagtgcgtgtacttaatttttaatatgtgtgtgcccacagccaagagaacagagaaccttaaataataatgaaactgaattgtacatgtcgtatgttttatgtggcactgattcctaaatatgctcctagcagccaggtattatttaatacatccccattaatcaagctgccaaatctaaatgaaaaccatgtttaaatatgtttaataagattatagcttttggttgaatatcaaactaacatagctacatttttccttccagccagctctcatttactgtcttacatttttactctgaaagcttttgtactatcaaaccaatcttgattataaaacaaattataccacaaacttttagtatcgtgagcttcagctgagtccctcagtgtaaatgttaggagaaagaacagttctgagattttttttctggctaaaaaatgatatttttcttcttcttggggtgagcctttgagtttaaaaggaaattaaaaattcaattagagatactaaattgtttgtagcttctgtattaaatgatgtctgccttttgcatagttattgaaagtgtttcatattaaatgtactttttctttttg

SEQ ID NO: 1839 - protein, 507 aa, Homo sapiens
MSGGEQKPERYYVGVDVGTGSVRAALVDQSGVLLAFADQPIKNWEPQFNHHEQSSEDIWAACCVVTKKVVQGIDLNQIRGLGFDATCSLVVLDKQFHPLPVNQEGDSHRNVIMWLDHRAVSQVNRINETKHSVLQYVGGVMSVEMQAPKLLWLKENLREICWDKAGHFFDLPDFLSWKATGVTARSLCSLVCKWTYSAEKGWDDSFWKMIGLEDFVADNYSKIGNQVLPPGASLGNGLTPEAARDLGLLPGIAVAASLIDAHAGGLGVIGADVRGHGLICEGQPVTSRLAVICGTSSCHMGISKDPIFVPGVWGPYFSAMVPGFWLNEGGQSVTGKLIDHMVQGHAAFPELQVKATARCQSIYAYLNSHLDLIKKAQPVGFLTVDLHVWPDFHGNRSPLADLTLKGMVTGLKLSQDLDDLAILYLATVQAIALGTRFIIEAMEAAGHSISTLFLCGGLSKNPLFVQMHADITGMPVVLSQEVESVLVGAAVLGACASGDFASVQWGK

SEQ ID NO: 1840 - DNA, 1642 bp, Homo sapiens
atgatcgcatggagaatggattttgttgctttatctgatattgtcctcagctcctcctgaatttgccgagatcttacagcagtcagtaaggtggaggaactgcaatgtctggtggagaacagaaaccagagaggtactatgtgggtgtggacgttggaacaggcagtgtccgtgcagctctggtggaccagagtggggtcctgttggcttttgcagaccagccaattaagaattgggagccccagttcaaccaccatgagcagtcctccgaggacatctgggctgcgtgctgtgttgtcacaaagaacttgagagagatttgctgggataaggcgggacatttctttgatctcccggacttcttatcgtggaaggcaacaggtgtcacagcacggtctctctgctccctggtgtgtaagtggacatattcagcagagaaaggctgggacgacagtttctggaaaatgattggtttggaagactttgttgcagataattacagcaaaataggaaaccaagtgctacctcctggagcttctcttggaaatgggctcacaccagaggcagcaagagaccttggccttctccctgggattgcggtcgcagcttcactcattgatgcccatgcaggaggactaggagtgattggggcagatgtgagagggcacggcctcatctgtgaggggcagccagtgacgtcacggctggctgtcatctgtggaacgtcttcttgtcacatggggatcagcaaagacccgatttttgtaccaggcgtctgggggccttatttctcagccatggtacctgggttctggctgaatgaaggtggtcagagcgttactggaaaattgatagaccacatggtacaaggccatgctgcttttccagaactacaagtaaaggccacagccagatgccagagtatatatgcatatttgaacagtcacctggatctgattaagaaggctcagcctgtgggtttccttactgttgatttacatgtttggccagatttccatggcaaccggtctcccttagcagatctgacactaaagggcatggtcaccggattgaaactgtctcaggaccttgatgatcttgccattctctacctggccacagttcaagccattgctttggggactcgcttcattatagaagccatggaggcagcagggcactcaatcagtactcttttcctatgtggaggcctcagcaagaatcccctttttgtgcaaatgcatgcggacattactggcatgcctgtggtcctgtcgcaagaggtggagtccgttcttgtgggtgctgctgttctgggtgcctgtgcctcaggggatttcgcttctgtacaggaagcaatggcaaaaatgagcaaagttgggaaagttgtgttcccgagactacaggataaaaaatactatgataagaaataccaagtattcctgaagctggttgaacaccagaaggagtatttggcgatcatgaatgatgactgaacagggcttgcaggtgctgatgccagaagcttctgtgccattgcattaaagacttgtcatttgatccatgttcaagacccttgaggtattgtttcatcatttctgtattgtctttcaataaagaaaacaaacatgtgcaaccagaa

SEQ ID NO: 1841 - protein, 463 aa, Homo sapiens
MSGGEQKPERYYVGVDVGTGSVRAALVDQSGVLLAFADQPIKNWEPQFNHHEQSSEDIWAACCVVTKNLREICWDKAGHFFDLPDFLSWKATGVTARSLCSLVCKWTYSAEKGWDDSFWKMIGLEDFVADNYSKIGNQVLPPGASLGNGLTPEAARDLGLLPGIAVAASLIDAHAGGLGVIGADVRGHGLICEGQPVTSRLAVICGTSSCHMGISKDPIFVPGVWGPYFSAMVPGFWLNEGGQSVTGKLIDHMVQGHAAFPELQVKATARCQSIYAYLNSHLDLIKKAQPVGFLTVDLHVWPDFHGNRSPLADLTLKGMVTGLKLSQDLDDLAILYLATVQAIALGTRFIIEAMEAAGHSISTLFLCGGLSKNPLFVQMHADITGMPVVLSQEVESVLVGAAVLGACASGDFASVQEAMAKMSKVGKVVFPRLQDKKYYDKKYQVFLKLVEHQKEYLAIMNDD

SEQ ID NO: 1842 - DNA, 712 bp, Homo sapiens
gctttcaagacctgatgctttgttttgaacaggttgatacatctaggagtgaaatacatcaccgctttccctgctcccgccgccattaaaattgtgtttggcatctgaccaccaagatacagatatttcctagactgttttgcagctaggtacttagaagtttttctaagttatttaaacttctcaccacacaaaatctggatttgtatctgtcacgtagtaattgcttgataaatcatttctctttcctctggagaaaaatatctgctttctttaaaataaatgttccatccatgcagctaagcagctaaggacacgaacagccactgatacaggccaactcatcagtagattattgagatttcatactaggacctttcattggctgaacaaagacaaagacagaaatcaaggaaggtcaaagaagcagtcagttttctggcacccaaagttgttggagaagggtacagagtcggtaaataagtcatatgacagacaggcagtattttcttattttaataacaagtttaaaaatcccacttcttgtacttaccttctgtctgacgtcatcagtattttaaaatgccaactgggatcaagttcaacactgcattactgaagaatccagattatctacatttcaagtgccaaatgaaagaaagaacccagaaaataaaacaatatgatgataacagtaaaattttttaaaatg

SEQ ID NO: 1843 - protein, 41 aa, Homo sapiens
MPTGIKFNTALLKNPDYLHFKCQMKERTQKIKQYDDNSKIF

SEQ ID NO: 1844 - DNA, 1567 bp, Homo sapiens
ccttgtcctgcccagatcttgtcccttctagtactggccttccccattcctgggggcccccgcccctccgacccccgccgaccggcgctggactacaactcccggcgtgccgcgcgcgtccggccggctgcaccggggctttgcgcgtggcggccgccgagctccgcgcggggcaaacctcccggcgcggccatgcggggagttgctgaagtaaaggaaccctgcagccttcccatgctatctgttgacatggaaaacaaggaaaatggctctgtcggtgtaaaaaattccatggaaaatgggagaccacctgatcctgcagactgggccgtgatggatgtcgtcaattatttccgaaccgtgggatttgaggagcaagctagtgcttttcaggaacaggaaattgatggaaaatccctgctattgatgacaagaaatgatgtgttgacaggacttcagttaaaattggggcctgctctgaaaatctacgaatatcatgtaaaacctctgcagacaaagcatttaaagaacaactcttcatagtacagtcaaattggggtcttcgacctcaaaaaatacataatgacataatttagtttcatgtaatgaaactttgtaaacagaatacatacatgtgtatatgtaaagaatttcaatcaaatgaaacgttatcctattggatagactaggcaattcatcagctcacctgaaatcagccaggaggagcaaggacaagatgcgcacagggtggttttcctcatggattttgtcaaatagatgatctttgacacgattagacactcctccccacaaaggctttgaaatcataaggattttcctcatctctttatagctttcccaaaatcttttaaaaaagaatttaattaaatgacagtcttttggttacagacttaggatgagtaaaaacaagaaaatttggggagggggagaaagaagaaagggattgctgtctcccttgaattcctctgttccttagagcttgtgttacttggacggaattgccaacacccttttttatagagggttctccacttgaccttattaaggttttattgggatatgctgcagtgtttgaaatgaacatgcatcatggccccttcaggagcagaatcatagctctgaaaagagaagctccgttgtgtactgaggatatccatccatattcagctagctttcaaatggggtaacgatattttctgcatagattttcttttaaattggttctttgtttctgaagaaagaattttttttaacttcatggttttatttataataatttgtttctgaagaaatttgccgagagttacaggtcaaaaagccttgttactagtacagaatatttttatatatattccttcatgatggtgtaattttttttaattgtcctatgctttgttcggttcctgggttaagtacttgtttttaagagcttggaaaaagtgggcttgctacatctctgttcaaagagacatttgttcaatctctgtgtgtcaacgccttgttgaattggtgctttgtggttgcaataaagcattgcttcagttta

SEQ ID NO: 1845 - protein, 116 aa, Homo sapiens; identical to SEQ ID NO: 85

SEQ ID NO: 1846 - DNA, 1452 bp, Homo sapiens
cacactcacatactttatgctacatactacacacacaactttttatcagcagaggattgatggcaaacagtttgttggagggagtgtttgctgaagtaaaggaaccctgcagccttcccatgctatctgttgacatggaaaacaaggaaaatggctctgtcggtgtaaaaaattccatggaaaatgggagaccacctgatcctgcagactgggccgtgatggatgtcgtcaattatttccgaaccgtgggatttgaggagcaagctagtgcttttcaggaacaggaaattgatggaaaatccctgctattgatgacaagaaatgatgtgttgacaggacttcagttaaaattggggcctgctctgaaaatctacgaatatcatgtaaaacctctgcagacaaagcatttaaagaacaactcttcatagtacagtcaaattggggtcttcgacctcaaaaaatacataatgacataatttagtttcatgtaatgaaactttgtaaacagaatacatacatgtgtatatgtaaagaatttcaatcaaatgaaacgttatcctattggatagactaggcaattcatcagctcacctgaaatcagccaggaggagcaaggacaagatgcgcacagggtggttttcctcatggattttgtcaaatagatgatctttgacacgattagacactcctccccacaaaggctttgaaatcataaggattttcctcatctctttatagctttcccaaaatcttttaaaaaagaatttaattaaatgacagtcttttggttacagacttaggatgagtaaaaacaagaaaatttggggagggggagaaagaagaaagggattgctgtctcccttgaattcctctgttccttagagcttgtgttacttggacggaattgccaacacccttttttatagagggttctccacttgaccttattaaggttttattgggatatgctgcagtgtttgaaatgaacatgcatcatggccccttcaggagcagaatcatagctctgaaaagagaagctccgttgtgtactgaggatatccatccatattcagctagctttcaaatggggtaacgatattttctgcatagattttcttttaaattggttctttgtttctgaagaaagaattttttttaacttcatggttttatttataataatttgtttctgaagaaatttgccgagagttacaggtcaaaaagccttgttactagtacagaatatttttatatatattccttcatgatggtgtaattttttttaattgtcctatgctttgttcggttcctgggttaagtacttgtttttaagagcttggaaaaagtgggcttgctacatctctgttcaaagagacatttgttcaatctctgtgtgtcaacgccttgttgaattggtgctttgtggttgcaataaagcattgcttcagttta

SEQ ID NO: 1847 - protein, 122 aa, Homo sapiens
MANSLLEGVFAEVKEPCSLPMLSVDMENKENGSVGVKNSMENGRPPDPADWAVMDVVNYFRTVGFEEQASAFQEQEIDGKSLLLMTRNDVLTGLQLKLGPALKIYEYHVKPLQTKHLKNNSS

SEQ ID NO: 1848 - DNA, 1506 bp, Homo sapiens
agcctggttttatttcactgtgtcaaattgtacctccttattgaattcctttgccagcctactttgtgaaagaaaacattggggtttctttggctgttcttgataagcctataaaaaatgatattttttagttgcttatagttgctgaagtaaaggaaccctgcagccttcccatgctatctgttgacatggaaaacaaggaaaatggctctgtcggtgtaaaaaattccatggaaaatgggagaccacctgatcctgcagactgggccgtgatggatgtcgtcaattatttccgaaccgtgggatttgaggagcaagctagtgcttttcaggaacaggaaattgatggaaaatccctgctattgatgacaagaaatgatgtgttgacaggacttcagttaaaattggggcctgctctgaaaatctacgaatatcatgtaaaacctctgcagacaaagcatttaaagaacaactcttcatagtacagtcaaattggggtcttcgacctcaaaaaatacataatgacataatttagtttcatgtaatgaaactttgtaaacagaatacatacatgtgtatatgtaaagaatttcaatcaaatgaaacgttatcctattggatagactaggcaattcatcagctcacctgaaatcagccaggaggagcaaggacaagatgcgcacagggtggttttcctcatggattttgtcaaatagatgatctttgacacgattagacactcctccccacaaaggctttgaaatcataaggattttcctcatctctttatagctttcccaaaatcttttaaaaaagaatttaattaaatgacagtcttttggttacagacttaggatgagtaaaaacaagaaaatttggggagggggagaaagaagaaagggattgctgtctcccttgaattcctctgttccttagagcttgtgttacttggacggaattgccaacacccttttttatagagggttctccacttgaccttattaaggttttattgggatatgctgcagtgtttgaaatgaacatgcatcatggccccttcaggagcagaatcatagctctgaaaagagaagctccgttgtgtactgaggatatccatccatattcagctagctttcaaatggggtaacgatattttctgcatagattttcttttaaattggttctttgtttctgaagaaagaattttttttaacttcatggttttatttataataatttgtttctgaagaaatttgccgagagttacaggtcaaaaagccttgttactagtacagaatatttttatatatattccttcatgatggtgtaattttttttaattgtcctatgctttgttcggttcctgggttaagtacttgtttttaagagcttggaaaaagtgggcttgctacatctctgttcaaagagacatttgttcaatctctgtgtgtcaacgccttgttgaattggtgctttgtggttgcaataaagcattgcttcagttta

SEQ ID NO: 1849 - protein, 102 aa, Homo sapiens
MLSVDMENKENGSVGVKNSMENGRPPDPADWAVMDVVNYFRTVGFEEQASAFQEQEIDGKSLLLMTRNDVLTGLQLKLGPALKIYEYHVKPLQTKHLKNNSS

SEQ ID NO: 1850 - DNA, 1660 bp, Homo sapiens
tactttgtgaaagaaaacattggggtttctttggctgttcttgataagcctataaaaaatgatattttttagttgcttataggtaggttttctttttactcttccacagaaaagaaaataatagtaataataataagacaatgtagtgtggtgttgcagagtatcattgtgagtgttttgttttgttttctgagatgcttagaaaatggtgaatgtgtaacagtttccaactgaagtgaaatcatattctgttagcatggagcagcagcactatcttcctgtctactctctaacgttgctgaagtaaaggaaccctgcagccttcccatgctatctgttgacatggaaaacaaggaaaatggctctgtcggtgtaaaaaattccatggaaaatgggagaccacctgatcctgcagactgggccgtgatggatgtcgtcaattatttccgaaccgtgggatttgaggagcaagctagtgcttttcaggaacaggaaattgatggaaaatccctgctattgatgacaagaaatgatgtgttgacaggacttcagttaaaattggggcctgctctgaaaatctacgaatatcatgtaaaacctctgcagacaaagcatttaaagaacaactcttcatagtacagtcaaattggggtcttcgacctcaaaaaatacataatgacataatttagtttcatgtaatgaaactttgtaaacagaatacatacatgtgtatatgtaaagaatttcaatcaaatgaaacgttatcctattggatagactaggcaattcatcagctcacctgaaatcagccaggaggagcaaggacaagatgcgcacagggtggttttcctcatggattttgtcaaatagatgatctttgacacgattagacactcctccccacaaaggctttgaaatcataaggattttcctcatctctttatagctttcccaaaatcttttaaaaaagaatttaattaaatgacagtcttttggttacagacttaggatgagtaaaaacaagaaaatttggggagggggagaaagaagaaagggattgctgtctcccttgaattcctctgttccttagagcttgtgttacttggacggaattgccaacacccttttttatagagggttctccacttgaccttattaaggttttattgggatatgctgcagtgtttgaaatgaacatgcatcatggccccttcaggagcagaatcatagctctgaaaagagaagctccgttgtgtactgaggatatccatccatattcagctagctttcaaatggggtaacgatattttctgcatagattttcttttaaattggttctttgtttctgaagaaagaattttttttaacttcatggttttatttataataatttgtttctgaagaaatttgccgagagttacaggtcaaaaagccttgttactagtacagaatatttttatatatattccttcatgatggtgtaattttttttaattgtcctatgctttgttcggttcctgggttaagtacttgtttttaagagcttggaaaaagtgggcttgctacatctctgttcaaagagacatttgttcaatctctgtgtgtcaacgccttgttgaattggtgctttgtggttgcaataaagcattgcttcagttta

SEQ ID NO: 1851 - protein, 102 aa, Homo sapiens; identical to SEQ ID NO: 1849

SEQ ID NO: 1852 - DNA, 1405 bp, Homo sapiens
ctcacagacgggtttttgaggctttcgttgagaatgtgagttgctgaagtaaaggaaccctgcagccttcccatgctatctgttgacatggaaaacaaggaaaatggctctgtcggtgtaaaaaattccatggaaaatgggagaccacctgatcctgcagactgggccgtgatggatgtcgtcaattatttccgaaccgtgggatttgaggagcaagctagtgcttttcaggaacaggaaattgatggaaaatccctgctattgatgacaagaaatgatgtgttgacaggacttcagttaaaattggggcctgctctgaaaatctacgaatatcatgtaaaacctctgcagacaaagcatttaaagaacaactcttcatagtacagtcaaattggggtcttcgacctcaaaaaatacataatgacataatttagtttcatgtaatgaaactttgtaaacagaatacatacatgtgtatatgtaaagaatttcaatcaaatgaaacgttatcctattggatagactaggcaattcatcagctcacctgaaatcagccaggaggagcaaggacaagatgcgcacagggtggttttcctcatggattttgtcaaatagatgatctttgacacgattagacactcctccccacaaaggctttgaaatcataaggattttcctcatctctttatagctttcccaaaatcttttaaaaaagaatttaattaaatgacagtcttttggttacagacttaggatgagtaaaaacaagaaaatttggggagggggagaaagaagaaagggattgctgtctcccttgaattcctctgttccttagagcttgtgttacttggacggaattgccaacacccttttttatagagggttctccacttgaccttattaaggttttattgggatatgctgcagtgtttgaaatgaacatgcatcatggccccttcaggagcagaatcatagctctgaaaagagaagctccgttgtgtactgaggatatccatccatattcagctagctttcaaatggggtaacgatattttctgcatagattttcttttaaattggttctttgtttctgaagaaagaattttttttaacttcatggttttatttataataatttgtttctgaagaaatttgccgagagttacaggtcaaaaagccttgttactagtacagaatatttttatatatattccttcatgatggtgtaattttttttaattgtcctatgctttgttcggttcctgggttaagtacttgtttttaagagcttggaaaaagtgggcttgctacatctctgttcaaagagacatttgttcaatctctgtgtgtcaacgccttgttgaattggtgctttgtggttgcaataaagcattgcttcagttta

SEQ ID NO: 1853 - protein, 102 aa, Homo sapiens; identical to SEQ ID NO: 1849

SEQ ID NO: 1854 - DNA, 1433 bp, Homo sapiens
ctttaggtttaatcacatctctccaatcgccgagggaactggagatttaaacaaacatacgtgaactgttgctgaagtaaaggaaccctgcagccttcccatgctatctgttgacatggaaaacaaggaaaatggctctgtcggtgtaaaaaattccatggaaaatgggagaccacctgatcctgcagactgggccgtgatggatgtcgtcaattatttccgaaccgtgggatttgaggagcaagctagtgcttttcaggaacaggaaattgatggaaaatccctgctattgatgacaagaaatgatgtgttgacaggacttcagttaaaattggggcctgctctgaaaatctacgaatatcatgtaaaacctctgcagacaaagcatttaaagaacaactcttcatagtacagtcaaattggggtcttcgacctcaaaaaatacataatgacataatttagtttcatgtaatgaaactttgtaaacagaatacatacatgtgtatatgtaaagaatttcaatcaaatgaaacgttatcctattggatagactaggcaattcatcagctcacctgaaatcagccaggaggagcaaggacaagatgcgcacagggtggttttcctcatggattttgtcaaatagatgatctttgacacgattagacactcctccccacaaaggctttgaaatcataaggattttcctcatctctttatagctttcccaaaatcttttaaaaaagaatttaattaaatgacagtcttttggttacagacttaggatgagtaaaaacaagaaaatttggggagggggagaaagaagaaagggattgctgtctcccttgaattcctctgttccttagagcttgtgttacttggacggaattgccaacacccttttttatagagggttctccacttgaccttattaaggttttattgggatatgctgcagtgtttgaaatgaacatgcatcatggccccttcaggagcagaatcatagctctgaaaagagaagctccgttgtgtactgaggatatccatccatattcagctagctttcaaatggggtaacgatattttctgcatagattttcttttaaattggttctttgtttctgaagaaagaattttttttaacttcatggttttatttataataatttgtttctgaagaaatttgccgagagttacaggtcaaaaagccttgttactagtacagaatatttttatatatattccttcatgatggtgtaattttttttaattgtcctatgctttgttcggttcctgggttaagtacttgtttttaagagcttggaaaaagtgggcttgctacatctctgttcaaagagacatttgttcaatctctgtgtgtcaacgccttgttgaattggtgctttgtggttgcaataaagcattgcttcagttta

SEQ ID NO: 1855 - protein, 102 aa, Homo sapiens; identical to SEQ ID NO: 1849

SEQ ID NO: 1856 - DNA, 362 bp, Homo sapiens
gtgatggatgtcgtcaattatttccgaaccgtgggatttgaggagcaagctagtgcttttcaggaacaggataaagttactgacagagataaatacctagaatgcacaccaatcgagagctggagtggtcaaatcaaagggctgctgctatgataaggcctacttctgcctgcctaccctcagaaacaggatctcactatgttgcccaggctggagcatagtggttattcacaggcgtgatcccactactgatcagtacaggagtttcatctctttttgataaagaagactgaggatcccacacaggtgcacactgttttgtgctatagatgtacaactaataaaacaaatccttgtcaata

SEQ ID NO: 1857 - protein, 49 aa, Homo sapiens
MDVVNYFRTVGFEEQASAFQEQDKVTDRDKYLECTPIESWSGQIKGLLL

SEQ ID NO: 1858 - DNA, 1461 bp, Homo sapiens
atggtgaattactacaaagtactaggtgtgcctcaaaatgcttcctcccctgatattaagaaggcttatcaccagttggctctgcaggtacacccagacaagaacccagggaacaaagaggcatctgaggagaaattcaaacaagtagcaagaggcctatgaggtcttgtctgatgccaggaaatgaaatgagtatgacaagtccagaaggaaccgaaccaaaagggaaacagaggagatggcagagacaaaaaacatttggaggaggaactatgcattctcaggattctcaggaaattgatggaaaatccctgctattgatgacaagaaatgatgtgttgacaggacttcagttaaaattggggcctgctctgaaaatctacgaatatcatgtaaaacctctgcagacaaagcatttaaagaacaactcttcatagtacagtcaaattggggtcttcgacctcaaaaaatacataatgacataatttagtttcatgtaatgaaactttgtaaacagaatacatacatgtgtatatgtaaagaatttcaatcaaatgaaacgttatcctattggatagactaggcaattcatcagctcacctgaaatcagccaggaggagcaaggacaagatgcgcacagggtggttttcctcatggattttgtcaaatagatgatctttgacacgattagacactcctccccacaaaggctttgaaatcataaggattttcctcatctctttatagctttcccaaaatcttttaaaaaagaatttaattaaatgacagtcttttggttacagacttaggatgagtaaaaacaagaaaatttggggagggggagaaagaagaaagggattgctgtctcccttgaattcctctgttccttagagcttgtgttacttggacggaattgccaacacccttttttatagagggttctccacttgaccttattaaggttttattgggatatgctgcagtgtttgaaatgaacatgcatcatggccccttcaggagcagaatcatagctctgaaaagagaagctccgttgtgtactgaggatatccatccatattcagctagctttcaaatggggtaacgatattttctgcatagattttcttttaaattggttctttgtttctgaagaaagaattttttttaacttcatggttttatttataataatttgtttctgaagaaatttgccgagagttacaggtcaaaaagccttgttactagtacagaatatttttatatatattccttcatgatggtgtaattttttttaattgtcctatgctttgttcggttcctgggttaagtacttgtttttaagagcttggaaaaagtgggcttgctacatctctgttcaaagagacatttgttcaatctctgtgtgtcaacgccttgttgaattggtgctttgtggttgcaataaagcattgcttcagttta

SEQ ID NO: 1859 - protein, 92 aa, Homo sapiens
MRSCLMPGNEMSMTSPEGTEPKGKQRRWQRQKTFGGGTMHSQDSQEIDGKSLLLMTRNDVLTGLQLKLGPALKIYEYHVKPLQTKHLKNNSS

SEQ ID NO: 1860 - DNA, 1764 bp, Homo sapiens
atggtgaattactacaaagtactaggtgtgcctcaaaatgcttcctcccctgatattaagaaggcttatcaccagttggctctgcaggtacacccagacaagaacccagggaacaaagaggcatctgaggagaaattcaaacaagtagcaagaggcctatgaggtcttgtctgatgccaggaaatgaaatgagtatgacaagtccagaaggaaccgaaccaaaagggaaacagaggagatggcagagacaaaaaacatttggaggaggaactatgcattctcaggattctcaggtgatgatttttcccttggccttgtgggtaaagccaggagattccactcctccatctttgatgtggctcccatattggacacaggattttccacttttttatctctgggctccagagcaagtacctctacctctgagacatttgaaccctttgtaagcagcagactgagaaacttcagactggtcaccatttgtagccagacagtaaatggcaagagagttgttacaaagaaagtgctagaagatgtgagggggaagaatgaagcagaaaaagactgtttcatgagattcctccacatcattggaaattgatggaaaatccctgctattgatgacaagaaatgatgtgttgacaggacttcagttaaaattggggcctgctctgaaaatctacgaatatcatgtaaaacctctgcagacaaagcatttaaagaacaactcttcatagtacagtcaaattggggtcttcgacctcaaaaaatacataatgacataatttagtttcatgtaatgaaactttgtaaacagaatacatacatgtgtatatgtaaagaatttcaatcaaatgaaacgttatcctattggatagactaggcaattcatcagctcacctgaaatcagccaggaggagcaaggacaagatgcgcacagggtggttttcctcatggattttgtcaaatagatgatctttgacacgattagacactcctccccacaaaggctttgaaatcataaggattttcctcatctctttatagctttcccaaaatcttttaaaaaagaatttaattaaatgacagtcttttggttacagacttaggatgagtaaaaacaagaaaatttggggagggggagaaagaagaaagggattgctgtctcccttgaattcctctgttccttagagcttgtgttacttggacggaattgccaacacccttttttatagagggttctccacttgaccttattaaggttttattgggatatgctgcagtgtttgaaatgaacatgcatcatggccccttcaggagcagaatcatagctctgaaaagagaagctccgttgtgtactgaggatatccatccatattcagctagctttcaaatggggtaacgatattttctgcatagattttcttttaaattggttctttgtttctgaagaaagaattttttttaacttcatggttttatttataataatttgtttctgaagaaatttgccgagagttacaggtcaaaaagccttgttactagtacagaatatttttatatatattccttcatgatggtgtaattttttttaattgtcctatgctttgttcggttcctgggttaagtacttgtttttaagagcttggaaaaagtgggcttgctacatctctgttcaaagagacatttgttcaatctctgtgtgtcaacgccttgttgaattggtgctttgtggttgcaataaagcattgcttcagttta

SEQ ID NO: 1861 - protein, 121 aa, Homo sapiens
MAETKNIWRRNYAFSGFSGDDFSLGLVGKARRFHSSIFDVAPILDTGFSTFLSLGSRASTSTSETFEPFVSSRLRNFRLVTICSQTVNGKRVVTKKVLEDVRGKNEAEKDCFMRFLHIIGN

SEQ ID NO: 1862 - DNA, 531 bp, Homo sapiens
aagcagagcagcaagatgggacaccattcgggaccttgtcatggagaaatctgctgggccctatgacaaaggtgaatacttgacctctgtgcagaagaccctctgtgatatccaggtgctctccctgagccgagttcctgcgatagaagatatggaaatcagcctgccaaacattcactacttcaacatagacatgtccaaaatgggtctgatcaacaaggaagaggtaagaggcccacatagaaaagctgtcattggcctccgggtcaggcaagagatgggaggtgttcagagcagcaaaccctacaagatgttggaggccattcacaagcaagcgcctgcttggaaaataacgtgggataagaacaatgaaataatttgatgaggaaagtgttgtgctacattgaatactcacgtcacaaaatgtgcttctacattatgtaacttacatggtcaaatgactggtacattttattcctgtgctaatttgtcaattctgttccaagaggaaagagtctaacatgacttttc

SEQ ID NO: 1863 - protein, 113 aa, Homo sapiens
MEKSAGPYDKGEYLTSVQKTLCDIQVLSLSRVPAIEDMEISLPNIHYFNIDMSKMGLINKEEVRGPHRKAVIGLRVRQEMGGVQSSKPYKMLEAIHKQAPAWKITWDKNNEII

SEQ ID NO: 1864 - DNA, 661 bp, Homo sapiens
tcttacagcattggacaatgactcatggatgaggaaattgactcatctctcaactattgccagaataataaggcattaccatgcttgaagtaactttagtggaggacatacacattttcctgtttagtcttgctgccattagacaatccatatggaaaaattactggtacagtcaagaggaagttgtcttcaagactgtgacattgtggccaccaataggagtccactctcagctgaggaattccttaagtcatttgtgatgctggagatgatagcatgtagccatgcaaaatttcacactagtatattgatttatagtgttcactttcctccaatatgaaacagtttatttcttctacacctagctcagcaaggcattctgtggattaccttattagtaattataacaggctttatggctataatttactttaaaaatgctgagcagtattagaacagttataaatcaatatttctttttggttatcttatgccttcctatcttggagaagctttagaatcaattcattaagaaaataatcatgaattaatgagtgtgtcacatcaattaatttgtgcacaggtttaagaaacaaatattgttttcatcctactgatgcttctaagtaatgcagaaaatgaaataaaattatattgaaaa

SEQ ID NO: 1865 - protein, 59 aa, Homo sapiens
MLEVTLVEDIHIFLFSLAAIRQSIWKNYWYSQEEVVFKTVTLWPPIGVHSQLRNSLSHL

SEQ ID NO: 1866 - DNA, 1269 bp, Homo sapiens
atggggaaagtgtcctgctgtggcatgaaataaatgaaacagaaaatgatggcaagactgctaagaacatcctttgctttgctcttccttggcctctttggggtgctgggggcagcaacaatttcatgcagaaatgaagaagggaaagctgtggactggtttactttttataagttacctaaaagacaaaacaaggaaagtggagagactgggttagagtacctgtacctagactctacaactagaagctggaggaagagtgagcaactaatgaatgacaccaagagtgttttgggaaggacattacaacagctatatgaagcatatgcctctaagagtaacaacacagcctatctaatatacaatgatggagtccctaaacctgtgaattacagcagaaagtatggacacaccaaaggtttactgctgtggaacagagttcaagggttctggctgattcattccatccctcagtttcctccaattccggaagaaggctatgattatccacccacagggagacgaaatggacaaagtggcatctgcataactttcaagtacaaccagtatgaggcaatagattctcagctcttggtctgcaaccccaacgtctatagctgctccatcccagccacctttcaccaggagctcattcacatgccccagctgtgcaccagggccagctcatcagagattcctggcaggctcctcaccacacttcagtcggcccagggacaaaaattcctccattttgcaaagtcggattcttttcttgacgacatctttgcagcctggatggctcaacggctgaagacacacttgttaacagaaacctggcagcgaaaaagacaagagcttccttcaaactgctcccttccttaccatgtctacaatataaaagcaattaaattatcacgacactcttatttcagttcttatcaagatcatgccaagtggtgtatttcccaaaagggcaccaaaaatcgctggacatgtattggagacctaaatcggagtccacaccaagccttcagaagtggaggattcatttgtacccagaattggcaaatttaccaagcatttcaaggattagtattatactatgaaagctgtaagtaaacttggtgaaaggacacaggtactatcattgaaaaccttgacaatgggtcttcttccattacaccttctttatattttaaaggcctgtgaatatacttataacctgcatatcacaaaataaaacatttttctctcatgtttaccatttaa

SEQ ID NO: 1867 - protein, 361 aa, Homo sapiens
MKQKMMARLLRTSFALLFLGLFGVLGAATISCRNEEGKAVDWFTFYKLPKRQNKESGETGLEYLYLDSTTRSWRKSEQLMNDTKSVLGRTLQQLYEAYASKSNNTAYLIYNDGVPKPVNYSRKYGHTKGLLLWNRVQGFWLIHSIPQFPPIPEEGYDYPPTGRRNGQSGICITFKYNQYEAIDSQLLVCNPNVYSCSIPATFHQELIHMPQLCTRASSSEIPGRLLTTLQSAQGQKFLHFAKSDSFLDDIFAAWMAQRLKTHLLTETWQRKRQELPSNCSLPYHVYNIKAIKLSRHSYFSSYQDHAKWCISQKGTKNRWTCIGDLNRSPHQAFRSGGFICTQNWQIYQAFQGLVLYYESCK

SEQ ID NO: 1868 - DNA, 1146 bp, Homo sapiens
taaaaatcatgcacagttaaaaatggactttctttcccctgtctttcatgtcacaggcttcatattgatggggaagctgcctattaggggaatagatgacttctcatgtgtattaatgaaagcaatgtattgcaggctgggtagctggtagaaatgttgtgggcgtttgtaagtggaagatttacgccattataaccctaatatattcctgcagagtaacaacacagcctatctaatatacaatgatggagtccctaaacctgtgaattacagcagaaagtatggacacaccaaaggtttactgctgtggaacagagttcaagggttctggctgattcattccatccctcagtttcctccaattccggaagaaggctatgattatccacccacagggagacgaaatggacaaagtggcatctgcataactttcaagtacaaccagtatgaggcaatagattctcagctcttggtctgcaaccccaacgtctatagctgctccatcccagccacctttcaccaggagctcattcacatgccccagctgtgcaccagggccagctcatcagagattcctggcaggctcctcaccacacttcagtcggcccagggacaaaaattcctccattttgcaaagtcggattcttttcttgacgacatctttgcagcctggatggctcaacggctgaagacacacttgttaacagaaacctggcagcgaaaaagacaagagcttccttcaaactgctcccttccttaccatgtctacaatataaaagcaattaaattatcacgacactcttatttcagttcttatcaagatcatgccaagtggtgtatttcccaaaagggcaccaaaaatcgctggacatgtattggagacctaaatcggagtccacaccaagccttcagaagtggaggattcatttgtacccagaattggcaaatttaccaagcatttcaaggattagtattatactatgaaagctgtaagtaaacttggtgaaaggacacaggtactatcattgaaaaccttgacaatgggtcttcttccattacaccttctttatattttaaaggcctgtgaatatacttataacctgcatatcacaaaataaaacatttttctctcatgtttaccattta

SEQ ID NO: 1869 - protein, 153 aa, Homo sapiens; identical to SEQ ID NO: 89

SEQ ID NO: 1870 - DNA, 1303 bp, Homo sapiens
agaaggctatttccgtttccgtacggaagcaaaggagccaagaccatggcgaaagccggggataagagcagcagcagcgggaagaaaagtctaaaacggaaagccgctgccgaagaacttcaggaggctgcaggcgctggggatggggcgacggaaaacggggtccaacccccgaaagcggctgcctttccgccaggctttagcatttcggagattaaaaacaaacagcggcgacacttaatgttcacgcggtggaaacagcagcagcggaaggaaaagttggcagctaagaaaaaacttaaaaaagaaagagaggctcttggcgataaggctccaccaaagcctgtacccaagaccattgacaaccagcgagtgtatgatgaaaccacagtagaccctaatgatgaagaggtcgcttatgatgaagctacagatgaatttgcttcttacttcaacaaacagacttctcccaagattctcatcacaacatcagatagacctcatgggagaacagtacgactctgtgaacagctctccacagttataccaaactcacatgtttattacagaagaggactggctctgaaaaaaattattccacagtgcatcgcaagagatttcacagacctgattgttattaatgaagatcgtaaaaccccaaatggacttattttgagtcacttgccaaatggcccaactgctcattttaaaatgagcagtgttcgtcttcgtaaagaaattaagagaagaggcaaggaccccacagaacacatacctgaaataattctgaataattttacaacacggctgggtcattcaattggacgtatgtttgcatctctctttcctcataatcctcaatttatcggaaggcaggttgccacattccacaatcaacgggattacatattcttcagatttcacagatacatattcaggagtgaaaagaaagtgggaattcaggaacttggaccacgttttaccttaaaattaaggtctcttcagaaaggaacctttgattctaaatatggagagtatgaatgggtccataagccccgggaaatggatacaagtagaagaaaattccatttataaagtactgagagaatgatattggattttgctgaacaggcctatcttgaactttggtaaattatttttgacagaatactcttttcaaaatggcatttgctgatttcataaacctttcacgtctggacgaattaccaaatgccatgaattgccactgtgtgtttatgtagaaaatacaaataaaagttattttgatggcttaggtttcctt

SEQ ID NO: 1871 - protein, 349 aa, Homo sapiens; identical to SEQ ID NO: 91

SEQ ID NO: 1872 - DNA, 3476 bp, Homo sapiens
agaaggctatttccgtttccgtacggaagcaaaggagccaagaccatggcgaaagccggggataagagcagcagcagcgggaagaaaagtctaaaacggaaagccgctgccgaagaacttcaggaggctgcaggcgctggggatggggcgacggaaaacggggtccaacccccgaaagcggctgcctttccgccaggctttagcatttcggagattaaaaacaaacagcggcgacacttaatgttcacgcggtggaaacagcagcagcggaaggaaaagttggcagctaagaaaaaacttaaaaaagaaagagaggctcttggcgataaggctccaccaaagcctgtacccaagaccattgacaaccagcgagtgtatgatgaaaccacagtagaccctaatgatgaagaggtcgcttatgatgaagctacagatgaatttgcttcttacttcaacaaacagacttctcccaagattctcatcacaacatcagatagacctcatgggagaacagtacgactctgtgaacagctctccacagttataccaaactcacatgtttattacagaagaggactggctctgaaaaaaattattccacagtgcatcgcaagagatttcacagacctgattgttattaatgaagatcgtaaaaccccaaatggacttattttgagtcacttgccaaatggcccaactgctcattttaaaatgagcagtgttcgtcttcgtaaagaaattaagagaagaggcaaggaccccacagaacacatacctgaaataattctgaataattttacaacacggctgggtcattcaattggacgtatgtttgcatctctctttcctcataatcctcaatttatcggaaggcaggttgccacattccacaatcaacgggattacatattcttcagatttcacagatacatattcaggagtgaaaagaaagtgggaattcaggaacttggaccacgttttaccttaaaattaaggtctcttcagaaaggaacctttgattctaaatatggagagtatgaatgggtccataagccccgggaaatggatacaagtagaagaaaattccatttataaagtactgagagaatgatattggattttgctgaacaggcctatcttgaactttggtaaattatttttgacagaatactcttttcaaaatggcatttgctgatttcataaacctttcacgtctggacgaattaccaaatgccatgaattgccactgtgtgtttatgtagaaaatacaaataaaagttattttgatggcttaggtttccttaaacttagttctcttgtttttgggtaactgtgaataattaagttggaatcaagattcagattaactttcctatttgcatagaacacatgagaggaataaaatggttggtaaatattggctaacccttgatttttataccagattaaccttggattcccagtgtctggcacagttttaatagcttaaatggaggccaggtttctggatgttttaacattctcttaagccttcagaagggtaaaaaatttaaagcaaaatgatctaccagggtttaaagcaaagttgcaaattactgaagctaatctttgcttcctgattttgaggtttttggttttttgtgcccacgttgtggggagctcttttttacctcattacatggtgctgtagtactccattcaggcactgaaacaaagttaaccctataagtaactcatggatggaaacccgtagaacttaacagcctcctcctgaccttaaaagaataaaggttcacagtttacctttaattccctagcagtcttgccagatgtatggcataaagtcatgtgagaagagtaggtggaaaaaactgtacaaacttaaccccttcaggtgttcagaacagattaatataccatgtatttaataccaataataatgcaaaataaaagtttcatactaagttttattgtatgctgctgccagtgtatataaaacaattacccttgtgaaatagaaattcatgaaaattcagagaggtagatgttaaggactgacgaaagtagaagtttgtatattatggcacatgtgttacagggataagcttttgtacaggcttcaaatgtagctctcttgaatattcactggatcataaggagtggtttgggaaacctaagatggggaaaaaaaaaaaaaggtgagttagggtaaagtatcaaagaacatagtttttaatttttttcatgaataacttaaaagaagcaggatgggaaatgcctatggtccagtaacagtaaaatctttcccttaattttcacaaccactctgatgtataagtcattcctgttttataaacagacttacagattaacttgctaagattactgccaaaatacattctgtatataataaaaaaggttaataaaactctcttaaatcaaaaatccaaacatccttagaaaaatgagcaagactatatttagcagggcagtttggcagtatctagtgaagtaaaggatgcaaccacacttctagttacctagataaacccagacatagagaaacatgtacaaggatactgactgtattagtattttaacagcaaagaactgaaacagcctaaatataactccgtaggagaatggataaacgaaggtttctacatatgatggaatacaaagctattataagttatgccttaaaaaataagttatgttttcaaaccataatatttcagtttaatagagtataaactaaaagatttaaaaaatgaaaacattaaattgaaaaacagtgtactaaaaaattaaaacatgagcatactaactttaggattagttattgatatggaaaggtacaaaagtgttaatctgagatagtctgtgacaaaaatgttgaaaaggcataaacagaatgctgtgaaaaatgtttaatctcacctaaaatagtgacagaaaagactaaggtttgttaggactcaaggaaaaaacattctcatgtttctagtggaaggccaaagtattatattggcaggggatatcaagtacaacgttgtaaaaatgttaaacgttcactcctttttacttctagaaacttaatagaggtactaagtatatatagatgttcaccaaaatcttcacctcactgtaacctcaaattttggaaacttaaatattcagtgaagtataattccatcatagtttagtacaaccattaaatatcttgtttacaaagagtatttaatgaaataaattcatttaaaaaaggcagaatgaaaaacggcgaatactgtcaataagcctgtcgtcttatctgcatttttttgtgcatacatgttctactgattaacagtttttaatcctgtgttattctattttgttttgtgtaaaagaggaaaaatttcaaaagctggaatctcaaaaaaaatagtaaaatttcctcttaaaaggaaatacagggccgggcacggtggctc

SEQ ID NO: 1873 - protein, 349 aa, Homo sapiens; identical to SEQ ID NO: 91

SEQ ID NO: 1874 - DNA, 724 bp, Homo sapiens
acggaagcaaaggagccaagaccatggcgaaagccggggataagagcagcagcagcgggaagaaaagtctaaaacggaaagccgctgccgaagaacttcaggaggctgcaggcgctggggatggggcgacggaaaacggggtccaacccccgaaagcggctgcctttccgccaggctttagcatttcggagattaaaaacaaacagcggcgacacttaatgttcacgcggtggaaacagcagcagcggaaggaaaagttggcagctaagaaaaaacttaaaaaagaaagagaggctcttggcgataaggctccaccaaagcctgtacccaagaccattgacaaccagcgagtgtatgatgaaaccacagtagaccctaatgatgaagaggtaatgttagaagtcttaaattagtttgaatgatcacatataattgataaattatatgtttttttgttgatatttaaagtgctggctggccaagttgcataatggactgattcagctaaaatgttggcatattatcttattatttggtgaagactatttcataattgaatttcccaataatgctatagaaaaattctataaaaattctaggtaaacttttacatttgtcatataatccctgaatggtattttggagggttttgtttttgtttttgtttttgattttgttgagacagagtcttgctctgtcgcccatgctggagtgcagtggtgtg

SEQ ID NO: 1875 - protein, 129 aa, Homo sapiens
MAKAGDKSSSSGKKSLKRKAAAEELQEAAGAGDGATENGVQPPKAAAFPPGFSISEIKNKQRRHLMFTRWKQQQRKEKLAAKKKLKKEREALGDKAPPKPVPKTIDNQRVYDETTVDPNDEEVMLEVLN

SEQ ID NO: 1876 - DNA, 830 bp, Homo sapiens
acggaagcaaaggagccaagaccatggcgaaagccggggataagagcagcagcagcgggaagaaaagtctaaaacggaaagccgctgccgaagaacttcaggaggctgcaggcgctggggatggggcgacggaaaacggggtccaacccccgaaagcggctgcctttccgccaggctttagcatttcggagattaaaaacaaacagcggcgacacttaatgttcacgcggtggaaacagcagcagcggaaggaaaagttggcagctaagaaaaaacttaaaaaagaaagagaggctcttggcgataaggctccaccaaagcctgtacccaagaccattgacaaccagcgagtgtatgatgaaaccacagtagaccctaatgatgaagaggtcgcttatgatgaagctacagatgaatttgcttcttacttcaacaaacagacttctcccaagattctcatcacaacatcagatagacctcatgggagaacagtacgactctgtgaacagctctccacagttataccaaactcacatgtttattacagaagaggactggctctgaaaaaaattattccacagtgcatcgcaagagatttcacagacctgattgttattaatgaagatcgtaaaaccccaagtatcctttttttttttaaggaggttttcctgtcctctccctcaccccccttaaaaatatatttaaaagaataaggaaatattgcctataactttcagaaaataatttttttatcagaaaattgtatctctttccaagagtctataaactgatttttcctttgtattcaccaaacatttatcaggcacatg

SEQ ID NO: 1877 - protein, 229 aa, Homo sapiens
MAKAGDKSSSSGKKSLKRKAAAEELQEAAGAGDGATENGVQPPKAAAFPPGFSISEIKNKQRRHLMFTRWKQQQRKEKLAAKKKLKKEREALGDKAPPKPVPKTIDNQRVYDETTVDPNDEEVAYDEATDEFASYFNKQTSPKILITTSDRPHGRTVRLCEQLSTVIPNSHVYYRRGLALKKIIPQCIARDFTDLIVINEDRKTPSILFFFKEVFLSSPSPPLKIYLKE

SEQ ID NO: 1878 - DNA, 1367 bp, Homo sapiens
tttctttagacatgttgctaaatgtggtttaacgttgtgtatctgttttatcaatgactgggctaggtgatttttttgtgagatttttaaactagcacaatcttacttttaacctttatgtgtgagtacaattgatagaacttaccataagtgcttgacaaactgtcataggtaggtcaggacatttttgagagtgagaaggggcactaataggccaggattacagggtttcaacctcctggatggtgattgttacagtgccttaggggctagcagcttgttccagttttagagtctttgtctcagctttcctcactgtttggaatgctgtttctcactgatggttatttggctggatctcttgtcattgagatctcagcttcaatgtcacctcagacaccttcccttaggtgggcacccagtcaccatctaaaagattattcattttactacagagcaccttgtctgtcattttctctgaactgttagctccataacaacagggctctggctgttcttatgtattcttagtgcctgtaagtatatgcggcacatagtggtgcttgaaaattgtgaaagcgagttacattggaccccacctacactttaaacagaaaattaacaggtttcccaggcagctgcagacttgaaacagttctgtctgcagaatgctcaacatgaccctctgctgactggagtatcttcaagtacaaatcccttcagaccccagaaagtctgttcctttttgtagtaaaatgaatctttcaaaggtttcccaaaccactccttatgatccagtgaatattcaagagagctacatttgaagcctgtacaaaagcttatccctgtaacacatgtgccataatatacaaacttctactttcgtcagtccttaacatctacctctctgaattttcatgaatttctatttcacaagggtaattgttttatatacactggcagcagcatacaataaaacttagtatgaaacttttattttgcattattattggtattaaatacatggtatattaatctgttctgaacacctgaaggggttaagtttgtacagttttttccacctactcttctcacatgactttatgccatacatctggcaagactgctagggaattaaaggtaaactgtgaacctttattcttttaaggtcaggaggaggctgttaagttctacgggtttccatccatgagttacttatagggttaactttgtttcagtgcctgaatggagtactacagcaccatgtaatgaggtaaaaaagagctccccacaacgtgggcacaaaaaaccaaaaacctcaaaatcaggaagcaaagattagcttcagtaatttgcaactttgcttt

SEQ ID NO: 1879 - protein, 54 aa, Homo sapiens
MLFLTDGYLAGSLVIEISASMSPQTPSLRWAPSHHLKDYSFYYRAPCLSFSLNC

SEQ ID NO: 1880 - DNA, 1310 bp, Homo sapiens
acttccctcaacccttcccacaaactgggaggaaaactgagacctcctggtcacccgccgccgggccttttagaaactcccacaagctctgccttccctccctggtcctcttcagaccccctcttagttcttcgcggctaacggtaagctctctccttacctctccctaatcggcccctctggagaggaaaagaaaacttaagagtcgggtcgcgctagcctccagcagccgccgcgcccaccgactgctccgccccttctcctccccctcctccaggctcgcgctcggggccgggtgtggagctggaacagagggctggcaaggcgcgcatgcgcaccgagggtggagccgctgagcacagaaccggaaacttagagacaaagttcggagccccgcccccgccgcgcgccgctgagttgtctggccccgccgacccacggcccacgacccaccgacccacgaatcggcccggccgtcgcgtgcaccatgtctggctcctccagcgtcgccgctatgaagaaagtggttcaacagctccggctggaggccggactcaaccgcgtaaaagtttcccaggcagctgcagacttgaaacagttctgtctgcagaatgctcaacatgaccctctgctgactggagtatcttcaagtacaaatcccttcagaccccagaaagtctgttcctttttgtagtaaaatgaatctttcaaaggtttcccaaaccactccttatgatccagtgaatattcaagagagctacatttgaagcctgtacaaaagcttatccctgtaacacatgtgccataatatacaaacttctactttcgtcagtccttaacatctacctctctgaattttcatgaatttctatttcacaagggtaattgttttatatacactggcagcagcatacaataaaacttagtatgaaacttttattttgcattattattggtattaaatacatggtatattaatctgttctgaacacctgaaggggttaagtttgtacagttttttccacctactcttctcacatgactttatgccatacatctggcaagactgctagggaattaaaggtaaactgtgaacctttattcttttaaggtcaggaggaggctgttaagttctacgggtttccatccatgagttacttatagggttaactttgtttcagtgcctgaatggagtactacagcaccatgtaatgaggtaaaaaagagctccccacaacgtgggcacaaaaaaccaaaaacctcaaaatcaggaagcaaagattagcttcagtaatttgcaactttgcttt

SEQ ID NO: 1881 - protein, 97 aa, Homo sapiens
MRTEGGAAEHRTGNLETKFGAPPPPRAAELSGPADPRPTTHRPTNRPGRRVHHVWLLQRRRYEESGSTAPAGGRTQPRKSFPGSCRLETVLSAECST

SEQ ID NO: 1882 - DNA, 1193 bp, Homo sapiens
acccagtatctcccctcacttccctcaacccttcccacaaactgggaggaaaactgagacctcctggtcacccgccgccgggccttttagaaactcccacaagctctgccttccctccctggtcctcttcagaccccctcttagttcttcgcggctaacggctcgcgctcggggccgggtgtggagctggaacagagggctggcaaggcgcgcatgcgcaccgagggtggagccgctgagcacagaaccggaaacttagagacaaagttcggagccccgcccccgccgcgcgccgctgagttgtctggccccgccgacccacggcccacgacccaccgacccacgaatcggcccggccgtcgcgtgcaccatgtctggctcctccagcgtcgccgctatgaagaaagtggttcaacagctccggctggaggccggactcaaccgcgtaaaagtttcccaggcagctgcagacttgaaacagttctgtctgcagaatgctcaacatgaccctctgctgactggagtatcttcaagtacaaatcccttcagaccccagaaagtctgttcctttttgtagtaaaatgaatctttcaaaggtttcccaaaccactccttatgatccagtgaatattcaagagagctacatttgaagcctgtacaaaagcttatccctgtaacacatgtgccataatatacaaacttctactttcgtcagtccttaacatctacctctctgaattttcatgaatttctatttcacaagggtaattgttttatatacactggcagcagcatacaataaaacttagtatgaaacttttattttgcattattattggtattaaatacatggtatattaatctgttctgaacacctgaaggggttaagtttgtacagttttttccacctactcttctcacatgactttatgccatacatctggcaagactgctagggaattaaaggtaaactgtgaacctttattcttttaaggtcaggaggaggctgttaagttctacgggtttccatccatgagttacttatagggttaactttgtttcagtgcctgaatggagtactacagcaccatgtaatgaggtaaaaaagagctccccacaacgtgggcacaaaaaaccaaaaacctcaaaatcaggaagcaaagattagcttcagtaatttgcaactttgcttt

SEQ ID NO: 1883 - protein, 97 aa, Homo sapiens; identical to SEQ ID NO: 1881

SEQ ID NO: 1884 - DNA, 1002 bp, Homo sapiens
tttctttagacatgttgctaaatgtggtttaacgttgtgtatctgttttatcaatgactgggctaggtgatttttttgtgagatttttaaactagcacaatcttacttttaacctttatgtgtgagtacaattgatagaacttaccataagtgcttgacaaactgtcataggtaggtcaggacatttttgagagtgagaaggggcactaataggccaggattacagggtttcaacctcctggatggtgattgttacagtgccttaggggctagcagcttgttccagttttagagtctttgtctcagctttcctcactgtttggaatgctgtttctcactgatggttatttggctggatctcttgtcattgagatctcagcttcaatgtcacctcagacaccttcccttaggtgggcacccagtcaccatctaaaagattattcattttactacagagcaccttgtctgtcattttctctgaactgttagctccataacaacagggctctggctgttcttatgtattcttagtgcctgtaagtatatgcggcacatagtggtgcttgaaaattgtgaaagcgagttacattggaccccacctacactttaaacagaaaattaacaggtttcccaggcagctgcagacttgaaacagttctgtctgcagaatgctcaacatgaccctctgctgactggagtatcttcaagtacaaatcccttcagaccccagaaagtctgttcctttttgtagtaaaatgaatctttcaaaggtttcccaaaccactccttatgatccagtgaatattcaagagagctacatttgaagcctgtacaaaagcttatccctgtaacacatgtgccataatatacaaacttctactttcgtcagtccttaacatctacctctctgaattttcatgaatttctatttcacaagggtaattgttttatatacactggcagcagcatacaataaaacttagtatgaaacttttattttgc

SEQ ID NO: 1885 - protein, 54 aa, Homo sapiens; identical to SEQ ID NO: 1879

SEQ ID NO: 1886 - DNA, 945 bp, Homo sapiens
acttccctcaacccttcccacaaactgggaggaaaactgagacctcctggtcacccgccgccgggccttttagaaactcccacaagctctgccttccctccctggtcctcttcagaccccctcttagttcttcgcggctaacggtaagctctctccttacctctccctaatcggcccctctggagaggaaaagaaaacttaagagtcgggtcgcgctagcctccagcagccgccgcgcccaccgactgctccgccccttctcctccccctcctccaggctcgcgctcggggccgggtgtggagctggaacagagggctggcaaggcgcgcatgcgcaccgagggtggagccgctgagcacagaaccggaaacttagagacaaagttcggagccccgcccccgccgcgcgccgctgagttgtctggccccgccgacccacggcccacgacccaccgacccacgaatcggcccggccgtcgcgtgcaccatgtctggctcctccagcgtcgccgctatgaagaaagtggttcaacagctccggctggaggccggactcaaccgcgtaaaagtttcccaggcagctgcagacttgaaacagttctgtctgcagaatgctcaacatgaccctctgctgactggagtatcttcaagtacaaatcccttcagaccccagaaagtctgttcctttttgtagtaaaatgaatctttcaaaggtttcccaaaccactccttatgatccagtgaatattcaagagagctacatttgaagcctgtacaaaagcttatccctgtaacacatgtgccataatatacaaacttctactttcgtcagtccttaacatctacctctctgaattttcatgaatttctatttcacaagggtaattgttttatatacactggcagcagcatacaataaaacttagtatgaaacttttattttgc

SEQ ID NO: 1887 - protein, 97 aa, Homo sapiens; identical to SEQ ID NO: 1881

SEQ ID NO: 1888 - DNA, 828 bp, Homo sapiens
acccagtatctcccctcacttccctcaacccttcccacaaactgggaggaaaactgagacctcctggtcacccgccgccgggccttttagaaactcccacaagctctgccttccctccctggtcctcttcagaccccctcttagttcttcgcggctaacggctcgcgctcggggccgggtgtggagctggaacagagggctggcaaggcgcgcatgcgcaccgagggtggagccgctgagcacagaaccggaaacttagagacaaagttcggagccccgcccccgccgcgcgccgctgagttgtctggccccgccgacccacggcccacgacccaccgacccacgaatcggcccggccgtcgcgtgcaccatgtctggctcctccagcgtcgccgctatgaagaaagtggttcaacagctccggctggaggccggactcaaccgcgtaaaagtttcccaggcagctgcagacttgaaacagttctgtctgcagaatgctcaacatgaccctctgctgactggagtatcttcaagtacaaatcccttcagaccccagaaagtctgttcctttttgtagtaaaatgaatctttcaaaggtttcccaaaccactccttatgatccagtgaatattcaagagagctacatttgaagcctgtacaaaagcttatccctgtaacacatgtgccataatatacaaacttctactttcgtcagtccttaacatctacctctctgaattttcatgaatttctatttcacaagggtaattgttttatatacactggcagcagcatacaataaaacttagtatgaaacttttattttgc

SEQ ID NO: 1889 - protein, 97 aa, Homo sapiens; identical to SEQ ID NO: 1881

SEQ ID NO: 1890 - DNA, 1324 bp, Homo sapiens
cgagcgcgagcctggaggagggggaggagaaggggcggagcagtcggtgggcgcggcggctgctggaggctagcgcgacccgactcttaagttttcttttcctctccagaggggccgattagggagagagaccagaaatgagtggaatgctatcttaagccaaaaaaaactattataatttttatttagtactacttaaatgaagaaagataaaaaaagaaacaaaattccaattgataattatcccattcagacattagtgaatatgtcactcaatccaagtcgaccttcctcatcagagttggtggaacttcatgttttttatgtccctgaaggatcatggaactataagctaaataccatttcaacagaagttgttaacaaattcatttcagctggatttctaaggcaatatctcctcaacttactttacgagccctgagggagcgtcttggtgagttcctgggtgaagatgctattgcagaaaaatttttatttctgaaatgcattggaaataatttagctgtggtgaaggaaaagcaagaatcagaactgaaactcaaatcatttgctcctccatatgctcttcaaccagaattatatttgcttcctgtaatggaccatttaggaaatgtttattcaccatcaacagttattttagatgagcggcagactaataatggtgttaatgaggctgatggaacaatccacagaccaattagtgtaactttgttcaaggaggaacttggaagagatcccagtttgttagaaaacactttgaaagagcttcctaacaagaatcaggaagaaggtgattttaaactggaatgggaaaaagaaagaggctattatagtacattttagcagtcaagtctgtaagcaaaccctgagcaaacctagccttacaaatataggcagtttaaaaagaaagctacaattccacttggggatttctaaaaaaatatttttgccagatgggaggaaaagaaaacaatttaagtactatgttaaaataaaaacaaaatcaaaatagttacagcacttaaatgaacattaccacctttacttcttttttaataaaatagttttagataaaagtaaagctacaggggaagagaaaggaaaggtgactgcataaaactttggtattactcagagaccagagggatcaggaaaacagtatcaaaccaagacagacaacaacaacaaaaaaactttaatgttggggaacatacgtatttcagagaattttaaattttttatctgattacacctatcaatttactaataattactaataactcaattcttcaaaagtgatagg

SEQ ID NO: 1891 - protein, 80 aa, Homo sapiens
MKKDKKRNKIPIDNYPIQTLVNMSLNPSRPSSSELVELHVFYVPEGSWNYKLNTISTEVVNKFISAGFLRQYLLNLLYEP

SEQ ID NO: 1892 - DNA, 1537 bp, Homo sapiens
cgagcgcgagcctggaggagggggaggagaaggggcggagcagtcggtgggcgcggcggctgctggaggctagcgcgacccgactcttaagttttcttttcctctccagaggggccgattagggagagagaccagaaatgagtggaatgctatcttaagccaaaaaaaactattataatttttatttagtactacttaaatgaagaaagataaaaaaagaaacaaaattccaattgataattatcccattcagacattagtgaatatgtcactcaatccaagtcgaccttcctcatcagagttggtggaacttcatgttttttatgtccctgaaggatcatggaactataagctaaataccatttcaacagaagttgttaacaaattcatttcagctggatttctaaggcaatatctcctcaacttactttacgagccctgagggagcgtcttggtgagttcctgggtgaagatgctattgcagaaaaatttttatttctgaaatgcattggaaataatttagctgtggtgaaggaaaagcaagaatcagaactgaaactcaaatcatttgctcctccatatgctcttcaaccagaattatatttgcttcctgtaatggaccatttaggaaatgtttattcaccatcaacagttattttagatgagcggcagactaataatggtgttaatgaggctgatggaacaatccacagaccaattagtgtaactttgttcaaggaggaacttggaagagatcccagtttgttagaaaacactttgaaagagcttcctaacaagaatcaggaagaagctgggggaaaagccactgcagaaaaaagccaaattgcaaaaaatcaaattggaaattctgagttgccaggatcattggaagattcaaataatgattgctttggcactaaaaaaagtgtctttgggaaaatgaagatgatacagctatcagtagaagacaggacaatcagacagctgaaaaagagtacatcaccctaccagatcacccttcacttccttgtcaacctgttctttcttcaggaataactgatatatctttattacaaactgaaagagagaagattatcaaacaaatgaaacaagtaaaggaagaaagaaggtatctggaaagaaatagagaagaactagtaaaaacggttgaaaagctatttgaacaaagcaaattaaaacgatatcatgcctacaatggttggaagaaaaaatacttggaaacaaagaaagtcacagcatcaatggaggaggttttaacaaaacttcgagaagatttggaactctactataaaaaactgctcatgcaacttgaagccagggagatcaagatgagaccaaagaatctggcaaacatcacagactccaagaattacctaataatccagatcactgaggtacagcatgcaattgaccagcttaagagaaaactagatactgacaaaatgaaactcatagtagaagttaagatgagaaaacaagcagtttcagatttacgaacattgaaaactgaactggc

SEQ ID NO: 1893 - protein, 146 aa, Homo sapiens
MDHLGNVYSPSTVILDERQTNNGVNEADGTIHRPISVTLFKEELGRDPSLLENTLKELPNKNQEEAGGKATAEKSQIAKNQIGNSELPGSLEDSNNDCFGTKKSVFGKMKMIQLSVEDRTIRQLKKSTSPYQITLHFLVNLFFLQE

SEQ ID NO: 1894 - DNA, 563 bp, Homo sapiens
gcctggaggagggggaggagaaggggcggagcagtcggtgggcgcggcggctgctggaggctagcgcgacccgactcttaagttttcttttcctctccagaggggccgattagggagaggagattgtgaagaagccaaggtgctggctgaagattacacctgtctgctcggttacccatttactctggagaattaatgcttattgtactttttaaaataaaacttatttttgtgtttccggaaagtttgctctttagtatttccgttgtaatttattacctcctgcttgaaattgagtaccaaaggagtttttaggagagagggtagggtctaaccaaacaaaataggctcagccagtaggtctttctttcatccacggaaatatgtgtgttatgtcacagcactaagggcagatgtttcctatttcttttcgggtagtcaatctccgaatgcgctgatgttttccattaatgttaataattttatcattaatggatttcaaattttttattagggaagcatgtgtaattgcactggtcaacaaaatctaatttatttactca

SEQ ID NO: 1895 - protein, 39 aa, Homo sapiens [sequence omitted]

SEQ ID NO: 1896 - DNA, 374 bp, Homo sapiens
cctctccagaggggccgattagggagaggcgtgtctctctgtgacccgagtttggccaacaggcattttcagttccacccccaacccccagccccgctgacccgaggcggagagcaggcgcggaggtcgctgtcgcgtacccagcggagccgggcgggcggggagcaggggcgctgattcgctggagaagggatcttctcgaggtttgactttactggcttcttagctcttgaatcggtttttctgaaggagattgtgaagaagccaaggtgctggctgaagattacacctgtctgctcggttacccatttactctggagaattaatgcttattgtactttttaaaataaaacttatttttgtgtttccggaaa

SEQ ID NO: 1897 - protein, 58 aa, Homo sapiens
PLQRGRLGRGVSLCDPSLANRHFQFHPQPPAPLTRGGEQARRSLSRTQRSRAGGEQGR

SEQ ID NO: 1898 - DNA, 609 bp, Homo sapiens
aaaattagccaggtgtggtggtgcacgcctgtaatcccagctactcgggaggctgaggctggagaatcgcttgaacccgagaggcggaggttgcagtgagctgagatcacgccactgcactctagcctggacaacagagtcagactctgtctaaaaaaaataaaataaaaataaaattcctataatttaacttttttattgttgtagaacatattacataacaaactgtaccatttaaaatatttttaaatggtacagttcagtggcacaacattcacactgttgtgaaaccatcaccaccacccatctccagaacttatttatcttctcaaactgaaactctatacccattaaacagtaactccccattaacattatttactttacctcacagaatcatctgtacttacgattgcactatacttactttcagtttgtaataaagatatatcagttattcctgaagaaagaacaggttgacaaggaagtgaagggtgataaaacaatgaaacagatctatttaaaattataattttagaaaacatccttgaaataaaacaatttctgatttctgattttcatattgaaagggcccactgtgtacctaga

SEQ ID NO: 1899 - protein, 72 aa, Homo sapiens
QTVPFKIFLNGTVQWHNIHTVVKPSPPPISRTYLSSQTETLYPLNSNSPLTLFTLPHRIICTYDCTILTFSL

SEQ ID NO: 1900 - DNA, 1493 bp, Homo sapiens
acagctgaaaaagagtacatcaccctaccagatcacccttcacttccttgtcaacctgttctttcttcaggaataactgatatatctttattacaaactgaaacctacaatggttggaagaaaaaatacttggaaacaaagaaagtcacagcatcaatggaggaggttttaacaaaacttcgagaagatttggaactctactataaaaaactgctcatgcaacttgaagccagggagatcaagatgagaccaaagaatctggcaaacatcacagactccaagatgagaaaacaagcagtttcagatttacgaacattgaaaactgaactggcacagaaaaaaaaaataatacatctctacaatctcaattagttgctagaagtgtgcctggctaggaggtctacagaagattttgtttatgatgaatcagccaagtcaaaagggagcattggctgctgcaatacattctgaccagatctgactttgttcatcataagacatcacaaagaggaagtcacaagcatctgcgattccagtataattatagcatcttctgtctatgttctttggagaccaagctacatcaaaggttacctgtggaaaaaaatcttactattttatgtaatatgatcacgtgtgcatattacgtcagatttttaaaattatatatattttttaccttatactacacaaggaaaaggaactgcttacagtatatgaatgtagggtttgacacacatagaacttgaaccattctaagaaatattttttgcttacacttgactgagtcagacatatatttggacatacaatgaccaggagcaagacactatatagaagatggccttcaaactcaaaatgtcttcaaacgctaggctggtacctcagctgattaaaagaagcaggtataatgacaacagggtatggtgatgcccctgagcaactagagagtaaaggcacactaaaagaattcaaatacaaaagtttttaaaatattgtgcaggttaaatatgtcacctgttggcacaacctgactgggttgggagtttcagcctgattcacaatcaccttatatggtagatttggcccaatattacagttaagacaatagtggtgtcttacggcctacaggtatagattaatcaagtcaaaatgttgaataaatcatttaaatgatcttattttacggaaatattcaaataaatgttgagtattatctttcttttttgggggggatggagtcttgctctgtcacccagggtggagtgcagtggcgcaatctcagctcactgcaacctctgcctcctgggttcaagtgattctcctgcctcagcctcccacatagctgggattacaggcatgcgccaccacgcccagctaatttttttgtatttttagtagagacagggttttgccatgttgcccaggctggtctcaaactcctgacctcagctgatctgccgatctcagcctcccaaagtgcttacaggcgt

SEQ ID NO: 1901 - protein, 71 aa, Homo sapiens
MEEVLTKLREDLELYYKKLLMQLEAREIKMRPKNLANITDSKMRKQAVSDLRTLKTELAQKKKIIHLYNLN

SEQ ID NO: 1902 - DNA, 1651 bp, Homo sapiens
acagagatgaacatcttttgtcaaaccattaagagttagaaagatgatctgtatcaacagatctagtttcttgcatttttattatgttgctatatacttttgttatccgtatactaaaaaaaaagaataaataaatgttttgattgtttgaatttgaaaaatacacacgaatgtcctcagtatccaggaacataaaggcaagaagcaagtcaacttacctattaaatattcctctattagatgtttcaacactataatttaattgggaaaaattgctttcagaattttattatgccatatttcccttcattatagtaaaatatatgctcacgaatcaatgctgatttttaaaatatgtataatctgaagtggaaattgtttgcttagagtttttaaaaacctagtctttgaaaagcagtttgtgctatacttttcccccaaccctccaataaatcttaaatttaaaacctacaatgtagtgtctcccctttaggttcatcaaactgatgaaaataatttttctgcttcctgactccatatagtatttatgttctctgaggtacttgaactaaatctttggacagtgagtgagaattaaaaagaatccagaagattaaatgtattcacaaaatagaagaatgtaacagtaatattttgaattgagacagggtctcgctatgttgtccagatgggtctccaactcctgggctcaagcactcctcctgccttggcttcctaaagagctgggattacaggcatgagctgcattgtgcttttaatgatctaaagacactgattagcttctcaactagttctctttctaaaagatcaattttatacaaataagttttctaaatgtaataaagtctgttttctttctccagggaattaagaacaacattgtgctgcccttattagttcctaattacagattaaaaatctgtatctttgaactctagatttacataaatcctggcttccctgcacattttgcccctgtaaattggaatacatgatgattgaaccatctgttatgagaatattacatttcctatttacacaattgtttgtgacagagtaaaaaccattttcatagtatatgttggatcactgttgtcttcatatttctaaaataaatgaattaaaaaatttaaattcttagatgcttatctctatcatagctcagaatgcaacttcaatacccccattcttttatatttccagatttcttttaattaagatataatgaacaaattaagttaaatgaagtctgtattttcatgcaaatatattagtattcattaatatacatttattctttgcaaatagattttagttatattagctcttaaattgttaaataaattattattgaattttattattaaattattaaaatgaaaattataaaattagcactgtaaaataatatgtaaaggacttggaatgttaaaaataaccattcatcattttgctttatattacatctaatatttcctgaaacattttgtaatacccacatggaaagtggagaaagagaaaccttgtgctttttataaaacattgccaaggagaataatggttaaacaaatctgttcaaatacatatttaaatttttttacaaataaaagttttaaattaacatacctaa

SEQ ID NO: 1903 - protein, 60 aa, Homo sapiens
DRVSLCCPDGSPTPGLKHSSCLGFLKSWDYRHELHCAFNDLKTLISFSTSSLSKRSILYK

SEQ ID NO: 1904 - DNA, 3365 bp, Homo sapiens
gctgctatgtcccggccgcagcttcgacgctggcgcctcgtctctagcccgccgagcggcgtcccgggtctagcgctgctggcgctgctggcgctgctggcgctgcggctcgcggccgggaccgactgcccatgcccggagcctgagctctgccgcccgattcgccaccatccagatttcgaggtcagcgccttcctctgctcctctaggtctgggcttcagggcacgaagagaagttagggtagaacggagccctaaggagaggtgccgtgggcgccgaaaccagctttgaccactcgatgagggccttcctgtttacggatccttcaatttatagatgaggaagctcgggctcagagaagttgagtaactcctcaggcctcacagcctgtaagtgcctgcgtaggcaggcgagagttcaaaccagatctgcctcctaaggcaagctcctttcattcccctgctgtgcctctgcggaagcactctgggtgtaaaaagcaaacaaggtctttgtgtttgatgttggacagaaaacttggaaatcttatgattggtcacagattacaactgtggcaacatttggaaaatatgactcagaacttatgtgctacgctcattcaaaaggagccagagtagtacttaaaggagatgtatccttaaaggatatcattgatcctgctttcagagcatcctggatagctcaaaaacttaatttggccaaaacacaatatatggatggaattaatatagatatagagcaagaagttaattgtttatcacctgaatatgatgcattaactgctttagtcaaagaaactacagactctttccatcgtgaaattgagggatcacaggtaacctttgatgtagcttggtctccaaagaacatagacagaagatgctataattatactggaatcgcagatgcttgtgacttcctctttgtgatgtcttatgatgaacaaagtcagatctggtcagaatgtattgcagcagccaatgctccctataatcagacattaactggatataatgactacatcaagatgagcattaatcctaagaaacttgtaatgggtgttccttggtatggttatgattatacctgcctgaatctgtctgaggatcatgtttgtaccattgcaaaagtccctttccggggggctccttgtagtgacgctgcaggacgtcaggtgccctacaaaacgatcatgaagcaaataaatagttctatttctggaaacctatgggataaagatcagcgggctccttattataactataaagatcctgctggccactttcatcaagtatggtatgataaccctcagagtatttctttaaaggcaacatatatacaaaactatcgcttacggggcattggcatgtggaatgcaaactgtcttgactactctggagatgctgtagccaaacagcaaactgaagaaatgtgggaagtcttaaagccaaagctgttacagagatgaacatcttttgtcaaaccattaagagttagaaagatgatctgtatcaacagatctagtttcttgcatttttattatgttgctatatacttttgttatccgtatactaaaaaaaaagaataaataaatgttttgattgtttgaatttgaaaaatacacacgaatgtcctcagtatccaggaacataaaggcaagaagcaagtcaacttacctattaaatattcctctattagatgtttcaacactataatttaattgggaaaaattgctttcagaattttattatgccatatttcccttcattatagtaaaatatatgctcacgaatcaatgctgatttttaaaatatgtataatctgaagtggaaattgtttgcttagagtttttaaaaacctagtctttgaaaagcagtttgtgctatacttttcccccaaccctccaataaatcttaaatttaaaacctacaatgtagtgtctcccctttaggttcatcaaactgatgaaaataatttttctgcttcctgactccatatagtatttatgttctctgaggtacttgaactaaatctttggacagtgagtgagaattaaaaagaatccagaagattaaatgtattcacaaaatagaagaatgtaacagtaatattttgaattggtaagttagaactacctaatattttccaactacattatttttatgaggctcatttgtaaaatttttaataataggaataacttgcagttgaacttgattctgttcactgtcacacttctaattattcatttcttcatttatggacatatataatttatttcttggctagcttgcttacatggttaaatttttctttctacatctgcaatgtatcttttttatttttattttttgtagagacagggtctcgctatgttgtccagatgggtctccaactcctgggctcaagcactcctcctgccttggcttcctaaagagctgggattacaggcatgagctgcattgtgcttttaatgatctaaagacactgattagcttctcaactagttctctttctaaaagatcaattttatacaaataagttttctaaatgtaataaagtctgttttctttctccagggaattaagaacaacattgtgctgcccttattagttcctaattacagattaaaaatctgtatctttgaactctagatttacataaatcctggcttccctgcacattttgcccctgtaaattggaatacatgatgattgaaccatctgttatgagaatattacatttcctatttacacaattgtttgtgacagagtaaaaaccattttcatagtatatgttggatcactgttgtcttcatatttctaaaataaatgaattaaaaaatttaaattcttagatgcttatctctatcatagctcagaatgcaacttcaatacccccattcttttatatttccagatttcttttaattaagatataatgaacaaattaagttaaatgaagtctgtattttcatgcaaatatattagtattcattaatatacatttattctttgcaaatagattttagttatattagctcttaaattgttaaataaattattattgaattttattattaaattattaaaatgaaaattataaaattagcactgtaaaataatatgtaaaggacttggaatgttaaaaataaccattcatcattttgctttatattacatctaatatttcctgaaacattttgtaatacccacatggaaagtggagaaagagaaaccttgtgctttttataaaacattgccaaggagaataatggttaaacaaatctgttcaaatacatatttaaatttttttacaaataaaagttttaaattaacatacctaa

SEQ ID NO: 1905 - protein, 294 aa, Homo sapiens
MCYAHSKGARVVLKGDVSLKDIIDPAFRASWIAQKLNLAKTQYMDGINIDIEQEVNCLSPEYDALTALVKETTDSFHREIEGSQVTFDVAWSPKNIDRRCYNYTGIADACDFLFVMSYDEQSQIWSECIAAANAPYNQTLTGYNDYIKMSINPKKLVMGVPWYGYDYTCLNLSEDHVCTIAKVPFRGAPCSDAAGRQVPYKTIMKQINSSISGNLWDKDQRAPYYNYKDPAGHFHQVWYDNPQSISLKATYIQNYRLRGIGMWNANCLDYSGDAVAKQQTEEMWEVLKPKLLQR

SEQ ID NO: 1906 - DNA, 3165 bp, Homo sapiens
gctagacctgctgctatgtcccggccgcagcttcgacgctggcgcctcgtctctagcccgccgagcggcgtcccgggtctagcgctgctggcgctgctggcgctgctggcgctgcggctcgcggccgggaccgactgcccatgcccggagcctgagctctgccgcccgattcgccaccatccagatttcgaggtcagcgccttcctctgctcctctaggtctgggcttcagggcacgaagagaagttagggtagaacggagccctaaggagaggtgccgtgggcgccgaaaccagctttgaccactcgatgagggccttcctgtttacggatccttcaatttatagatgaggaagctcgggctcagagaagttgagtaactcctcaggcctcacagcctgtaagtgcctgcgtaggcaggcgagagttcaaaccagatctgcctcctaaggcaagctcctttcattcccctgctgtgcctctgcggaagcactctgggtgtaaaaagcaaacaaggtctttgtgtttgatgttggacagaaaacttggaaatcttatgattggtcacagattacaactgtggcaacatttggaaaatatgactcagaacttatgtgctacgctcattcaaaaggagccagagtagtacttaaaggtaacctttgatgtagcttggtctccaaagaacatagacagaagatgctataattatactggaatcgcagatgcttgtgacttcctctttgtgatgtcttatgatgaacaaagtcagatctggtcagaatgtattgcagcagccaatgctccctataatcagacattaactggatataatgactacatcaagatgagcattaatcctaagaaacttgtaatgggtgttccttggtatggttatgattatacctgcctgaatctgtctgaggatcatgtttgtaccattgcaaaagtccctttccggggggctccttgtagtgacgctgcaggacgtcaggtgccctacaaaacgatcatgaagcaaataaatagttctatttctggaaacctatgggataaagatcagcgggctccttattataactataaagatcctgctggccactttcatcaagtatggtatgataaccctcagagtatttctttaaaggcaacatatatacaaaactatcgcttacggggcattggcatgtggaatgcaaactgtcttgactactctggagatgctgtagccaaacagcaaactgaagaaatgtgggaagtcttaaagccaaagctgttacagagatgaacatcttttgtcaaaccattaagagttagaaagatgatctgtatcaacagatctagtttcttgcatttttattatgttgctatatacttttgttatccgtatactaaaaaaaaagaataaataaatgttttgattgtttgaatttgaaaaatacacacgaatgtcctcagtatccaggaacataaaggcaagaagcaagtcaacttacctattaaatattcctctattagatgtttcaacactataatttaattgggaaaaattgctttcagaattttattatgccatatttcccttcattatagtaaaatatatgctcacgaatcaatgctgatttttaaaatatgtataatctgaagtggaaattgtttgcttagagtttttaaaaacctagtctttgaaaagcagtttgtgctatacttttcccccaaccctccaataaatcttaaatttaaaacctacaatgtagtgtctcccctttaggttcatcaaactgatgaaaataatttttctgcttcctgactccatatagtatttatgttctctgaggtacttgaactaaatctttggacagtgagtgagaattaaaaagaatccagaagattaaatgtattcacaaaatagaagaatgtaacagtaatattttgaattggtaagttagaactacctaatattttccaactacattatttttatgaggctcatttgtaaaatttttaataataggaataacttgcagttgaacttgattctgttcactgtcacacttctaattattcatttcttcatttatggacatatataatttatttcttggctagcttgcttacatggttaaatttttctttctacatctgcaatgtatcttttttatttttattttttgtagagacagggtctcgctatgttgtccagatgggtctccaactcctgggctcaagcactcctcctgccttggcttcctaaagagctgggattacaggcatgagctgcattgtgcttttaatgatctaaagacactgattagcttctcaactagttctctttctaaaagatcaattttatacaaataagttttctaaatgtaataaagtctgttttctttctccagggaattaagaacaacattgtgctgcccttattagttcctaattacagattaaaaatctgtatctttgaactctagatttacataaatcctggcttccctgcacattttgcccctgtaaattggaatacatgatgattgaaccatctgttatgagaatattacatttcctatttacacaattgtttgtgacagagtaaaaaccattttcatagtatatgttggatcactgttgtcttcatatttctaaaataaatgaattaaaaaatttaaattcttagatgcttatctctatcatagctcagaatgcaacttcaatacccccattcttttatatttccagatttcttttaattaagatataatgaacaaattaagttaaatgaagtctgtattttcatgcaaatatattagtattcattaatatacatttattctttgcaaatagattttagttatattagctcttaaattgttaaataaattattattgaattttattattaaattattaaaatgaaaattataaaattagcactgtaaaataatatgtaaaggacttggaatgttaaaaataaccattcatcattttgctttatattacatctaatatttcctgaaacattttgtaatacccacatggaaagtggagaaagagaaaccttgtgctttttataaaacattgccaaggagaataatggttaaacaaatctgttcaaatacatatttaaatttttttacaaataaaagttttaaattaacatacctaa

SEQ ID NO: 1907 - protein, 179 aa, Homo sapiens
MSYDEQSQIWSECIAAANAPYNQTLTGYNDYIKMSINPKKLVMGVPWYGYDYTCLNLSEDHVCTIAKVPFRGAPCSDAAGRQVPYKTIMKQINSSISGNLWDKDQRAPYYNYKDPAGHFHQVWYDNPQSISLKATYIQNYRLRGIGMWNANCLDYSGDAVAKQQTEEMWEVLKPKLLQR

SEQ ID NO: 1908 - DNA, 3091 bp, Homo sapiens
aggccccgcccacccaggcggtaggaacccactccggcccgctagacctgctgctatgtcccggccgcagcttcgacgctggcgcctcgtctctagcccgccgagcggcgtcccgggtctagcgctgctggcgctgctggcgctgctggcgctgcggctcgcggccgggaccgactgcccatgcccggagcctgagctctgccgcccgattcgccaccatccagatttcgaggtctttgtgtttgatgttggacagaaaacttggaaatcttatgattggtcacagattacaactgtggcaacatttggaaaatatgactcagaacttatgtgctacgctcattcaaaaggagccagagtagtacttaaaggagatgtatccttaaaggatatcattgatcctgctttcagagcatcctggatagctcaaaaacttaatttggccaaaacacaatatatggatggaattaatatagatatagagcaagaagttaattgtttatcacctgaatatgatgcattaactgctttagtcaaagaaactacagactctttccatcgtgaaattgagggatcacaggtaacctttgatgtagcttggtctccaaagaacatagacagaagatgctataattatactggaatcgcagatgcttgtgacttcctctttgtgatgtcttatgatgaacaaagtcagatctggtcagaatgtattgcagcagccaatgctccctataatcagacattaactggatataatgactacatcaagatgagcattaatcctaagaaacttgtaatgggtgttccttggtatggttatgattatacctgcctgaatctgtctgaggatcatgtttgtaccattgcaaaagtccctttccggggggctccttgtagtgacgctgcaggacgtcaggtgccctacaaaacgatcatgaagcaaataaatagttctatttctggaaacctatgggataaagatcagcgggctccttattataactataaagatcctgctggccactttcatcaagtatggtatgataaccctcagagtatttctttaaaggcaacatatatacaaaactatcgcttacggggcattggcatgtggaatgcaaactgtcttgactactctggagatgctgtagccaaacagcaaactgaagaaatgtgggaagtcttaaagccaaagctgttacagagatgaacatcttttgtcaaaccattaagagttagaaagatgatctgtatcaacagatctagtttcttgcatttttattatgttgctatatacttttgttatccgtatactaaaaaaaaagaataaataaatgttttgattgtttgaatttgaaaaatacacacgaatgtcctcagtatccaggaacataaaggcaagaagcaagtcaacttacctattaaatattcctctattagatgtttcaacactataatttaattgggaaaaattgctttcagaattttattatgccatatttcccttcattatagtaaaatatatgctcacgaatcaatgctgatttttaaaatatgtataatctgaagtggaaattgtttgcttagagtttttaaaaacctagtctttgaaaagcagtttgtgctatacttttcccccaaccctccaataaatcttaaatttaaaacctacaatgtagtgtctcccctttaggttcatcaaactgatgaaaataatttttctgcttcctgactccatatagtatttatgttctctgaggtacttgaactaaatctttggacagtgagtgagaattaaaaagaatccagaagattaaatgtattcacaaaatagaagaatgtaacagtaatattttgaattggtaagttagaactacctaatattttccaactacattatttttatgaggctcatttgtaaaatttttaataataggaataacttgcagttgaacttgattctgttcactgtcacacttctaattattcatttcttcatttatggacatatataatttatttcttggctagcttgcttacatggttaaatttttctttctacatctgcaatgtatcttttttatttttattttttgtagagacagggtctcgctatgttgtccagatgggtctccaactcctgggctcaagcactcctcctgccttggcttcctaaagagctgggattacaggcatgagctgcattgtgcttttaatgatctaaagacactgattagcttctcaactagttctctttctaaaagatcaattttatacaaataagttttctaaatgtaataaagtctgttttctttctccagggaattaagaacaacattgtgctgcccttattagttcctaattacagattaaaaatctgtatctttgaactctagatttacataaatcctggcttccctgcacattttgcccctgtaaattggaatacatgatgattgaaccatctgttatgagaatattacatttcctatttacacaattgtttgtgacagagtaaaaaccattttcatagtatatgttggatcactgttgtcttcatatttctaaaataaatgaattaaaaaatttaaattcttagatgcttatctctatcatagctcagaatgcaacttcaatacccccattcttttatatttccagatttcttttaattaagatataatgaacaaattaagttaaatgaagtctgtattttcatgcaaatatattagtattcattaatatacatttattctttgcaaatagattttagttatattagctcttaaattgttaaataaattattattgaattttattattaaattattaaaatgaaaattataaaattagcactgtaaaataatatgtaaaggacttggaatgttaaaaataaccattcatcattttgctttatattacatctaatatttcctgaaacattttgtaatacccacatggaaagtggagaaagagaaaccttgtgctttttataaaacattgccaaggagaataatggttaaacaaatctgttcaaatacatatttaaatttttttacaaataaaagttttaaattaacatacctaa

SEQ ID NO: 1909 - protein, 385 aa, Homo sapiens; identical to SEQ ID NO: 95

SEQ ID NO: 1910 - DNA, 2892 bp, Homo sapiens
gacgcgcagcaggccccgcccacccaggcggtaggaacccactccggcccgctagacctgctgctatgtcccggccgcagcttcgacgctggcgcctcgtctctagcccgccgagcggcgtcccgggtctagcgctgctggcgctgctggcgctgctggcgctgcggctcgcggccgggaccgactgcccatgcccggagcctgagctctgccgcccgattcgccaccatccagatttcgaggtctttgtgtttgatgttggacagaaaacttggaaatcttatgattggtcacagattacaactgtggcaacatttggaaaatatgactcagaacttatgtgctacgctcattcaaaaggagccagagtagtacttaaaggtaacctttgatgtagcttggtctccaaagaacatagacagaagatgctataattatactggaatcgcagatgcttgtgacttcctctttgtgatgtcttatgatgaacaaagtcagatctggtcagaatgtattgcagcagccaatgctccctataatcagacattaactggatataatgactacatcaagatgagcattaatcctaagaaacttgtaatgggtgttccttggtatggttatgattatacctgcctgaatctgtctgaggatcatgtttgtaccattgcaaaagtccctttccggggggctccttgtagtgacgctgcaggacgtcaggtgccctacaaaacgatcatgaagcaaataaatagttctatttctggaaacctatgggataaagatcagcgggctccttattataactataaagatcctgctggccactttcatcaagtatggtatgataaccctcagagtatttctttaaaggcaacatatatacaaaactatcgcttacggggcattggcatgtggaatgcaaactgtcttgactactctggagatgctgtagccaaacagcaaactgaagaaatgtgggaagtcttaaagccaaagctgttacagagatgaacatcttttgtcaaaccattaagagttagaaagatgatctgtatcaacagatctagtttcttgcatttttattatgttgctatatacttttgttatccgtatactaaaaaaaaagaataaataaatgttttgattgtttgaatttgaaaaatacacacgaatgtcctcagtatccaggaacataaaggcaagaagcaagtcaacttacctattaaatattcctctattagatgtttcaacactataatttaattgggaaaaattgctttcagaattttattatgccatatttcccttcattatagtaaaatatatgctcacgaatcaatgctgatttttaaaatatgtataatctgaagtggaaattgtttgcttagagtttttaaaaacctagtctttgaaaagcagtttgtgctatacttttcccccaaccctccaataaatcttaaatttaaaacctacaatgtagtgtctcccctttaggttcatcaaactgatgaaaataatttttctgcttcctgactccatatagtatttatgttctctgaggtacttgaactaaatctttggacagtgagtgagaattaaaaagaatccagaagattaaatgtattcacaaaatagaagaatgtaacagtaatattttgaattggtaagttagaactacctaatattttccaactacattatttttatgaggctcatttgtaaaatttttaataataggaataacttgcagttgaacttgattctgttcactgtcacacttctaattattcatttcttcatttatggacatatataatttatttcttggctagcttgcttacatggttaaatttttctttctacatctgcaatgtatcttttttatttttattttttgtagagacagggtctcgctatgttgtccagatgggtctccaactcctgggctcaagcactcctcctgccttggcttcctaaagagctgggattacaggcatgagctgcattgtgcttttaatgatctaaagacactgattagcttctcaactagttctctttctaaaagatcaattttatacaaataagttttctaaatgtaataaagtctgttttctttctccagggaattaagaacaacattgtgctgcccttattagttcctaattacagattaaaaatctgtatctttgaactctagatttacataaatcctggcttccctgcacattttgcccctgtaaattggaatacatgatgattgaaccatctgttatgagaatattacatttcctatttacacaattgtttgtgacagagtaaaaaccattttcatagtatatgttggatcactgttgtcttcatatttctaaaataaatgaattaaaaaatttaaattcttagatgcttatctctatcatagctcagaatgcaacttcaatacccccattcttttatatttccagatttcttttaattaagatataatgaacaaattaagttaaatgaagtctgtattttcatgcaaatatattagtattcattaatatacatttattctttgcaaatagattttagttatattagctcttaaattgttaaataaattattattgaattttattattaaattattaaaatgaaaattataaaattagcactgtaaaataatatgtaaaggacttggaatgttaaaaataaccattcatcattttgctttatattacatctaatatttcctgaaacattttgtaatacccacatggaaagtggagaaagagaaaccttgtgctttttataaaacattgccaaggagaataatggttaaacaaatctgttcaaatacatatttaaatttttttacaaataaaagttttaaattaacatacctaa

SEQ ID NO: 1911 - protein, 179 aa, Homo sapiens; identical to SEQ ID NO: 1907

SEQ ID NO: 1912 - DNA, 1633 bp, Homo sapiens
gctgctatgtcccggccgcagcttcgacgctggcgcctcgtctctagcccgccgagcggcgtcccgggtctagcgctgctggcgctgctggcgctgctggcgctgcggctcgcggccgggaccgactgcccatgcccggagcctgagctctgccgcccgattcgccaccatccagatttcgaggtcagcgccttcctctgctcctctaggtctgggcttcagggcacgaagagaagttagggtagaacggagccctaaggagaggtgccgtgggcgccgaaaccagctttgaccactcgatgagggccttcctgtttacggatccttcaatttatagatgaggaagctcgggctcagagaagttgagtaactcctcaggcctcacagcctgtaagtgcctgcgtaggcaggcgagagttcaaaccagatctgcctcctaaggcaagctcctttcattcccctgctgtgcctctgcggaagcactctgggtgtaaaaagcaaacaaggtctttgtgtttgatgttggacagaaaacttggaaatcttatgattggtcacagattacaactgtggcaacatttggaaaatatgactcagaacttatgtgctacgctcattcaaaaggagccagagtagtacttaaaggagatgtatccttaaaggatatcattgatcctgctttcagagcatcctggatagctcaaaaacttaatttggccaaaacacaatatatggatggaattaatatagatatagagcaagaagttaattgtttatcacctgaatatgatgcattaactgctttagtcaaagaaactacagactctttccatcgtgaaattgagggatcacaggtaacctttgatgtagcttggtctccaaagaacatagacagaagatgctataattatactggaatcgcagatgcttgtgacttcctctttgtgatgtcttatgatgaacaaagtcagatctggtcagaatgtattgcagcagccaatgctccctataatcagacattaactggatataatgactacatcaagatgagcattaatcctaagaaacttgtaatgggtgttccttggtatggttatgattatacctgcctgaatctgtctgaggatcatgtttgtaccattgcaaaagtccctttccggggggctccttgtagtgacgctgcaggacgtcaggtgccctacaaaacgatcatgaagcaaataaatagttctatttctggaaacctatgggataaagatcagcgggctccttattataactataaagatcctgctggccactttcatcaagtatggtatgataaccctcagagtatttctttaaaggcaacatatatacaaaactatcgcttacggggcattggcatgtggaatgcaaactgtcttgactactctggagatgctgtagccaaacagcaaactgaagaaatgtgggaagtcttaaagccaaagctgttacagagatgaacatcttttgtcaaaccattaagagttagaaagatgatctgtatcaacagatctagtttcttgcatttttattatgttgctatatacttttgttatccgtatactaaaaaaaaagaataaataaatgttttgattgtttgaatttg

SEQ ID NO: 1913 - protein, 294 aa, Homo sapiens; identical to SEQ ID NO: 1905

SEQ ID NO: 1914 - DNA, 1994 bp, Homo sapiens
gagaattactctggattgtaagcaaatatctctggaagaaagggaaaactaagtcagagcagaaggagaattgaaatggtgatgaggactgtggaagatgaaggcttggaactgagaccccctggaaaagacaggcacttgaaagcctattgcctcaaagaaaagaaggatgtatcctctatccagcaagcctttttcaataaaatcattatgtactccacctgcaacaaggaaagaaaacaaagttccgtgaataactaaatcatcataatgaagcaaaacgataagcagaaagcaagagtgttttgaaagcattgatcacaatagccaagaaatgaagcaatccagtatccatcgataaatggatggataaagaaaatgtggtacatacatacaacggaatattattcagccttaacaatgaaggacatccggacacatgctacaacatgaatggactttgaagacattatgttaaaagcaataagcaaatcacaatagacaaatactatatgacatatgattccacttatatcaggtacttagagtagtcacattcataaagacagaaagtagaatggtggtttctccggggaagggaaagagagactagggagctgttgtttaatttgtgaaatcaaaagaattttgaagattgcttgcataacattgtgaatatatgaacactactgaactatgtgctttaaaatggttaagttagtaatgaactatatgcttaaaaatggttaagatagtaaattctgttattttactgatgtttttttctctttcaagttttattttagaatcaaggggaacatacacaggtttgttacaaaagtatattgtttgatgctgaggtttgaggtatgattgaatctgtcaccccattagtcagcacagtactgaataggtagttcttcggccttcacgacagtttttttaaaagtacacaaacaattgtaggtatttaatttgttactgtgcacatgaatatactaaacaggaaaaggtcactaagctgtggatatacacattgtttacagttcaatgagaattggcttctgttggctagcaataaatgtcaaactgttcaacattgattaatcatgaaggaatattgcttaacaaagaataaaatatctttctgaggttacaagcaacaactagctttctctgacttactgattgacatgatgcaaaatgccttcccagcctcagcatctgacttatatgatattctagtcacttacaaagatgacaactgtattagtccactttcatgctgctgataaagacatacctaagaccggccaacttacaaaagaaagagctttattggacttacagttccatgtggctggagaagccactcagtggcagaaggacaagatttcaggcacatctcacatggtggaagacgagagaagagagcttgtgtagggaaactcctgtttttaaaaccatcaaatctcttgagacttattcactaccacgagagcagcatggaaaagacctgctcccatgattcaattacctcccactgggtccctctcacaacacatggaaattcaagatgacatttgagtggggacacagccaaaccatatcaacaacagtcttccagatactaggtaaagaaaatctgacccagtttgttaaggtatgtttactcctttatcttaccttattggaggtaagataaaagataggtaagatcttaccttaagatcaggaagggtggttcatataataccagtatggcttccaattggtatacccttgtggatctgagggaagaaataagaatgtctgccccataagaagctaggagacagattttggagtccctgagtccctgagaccctgacttggttacaacagccagagagaactgtgggaatccctgagatggcagcctcatcttaaagggtgattactagagataataagggggagaagccttggtgagcatcctggaccattttggttcc

SEQ ID NO: 1915 - protein, 61 aa, Homo sapiens
MVMRTVEDEGLELRPPGKDRHLKAYCLKEKKDVSSIQQAFFNKIIMYSTCNKERKQSSVNN

SEQ ID NO: 1916 - DNA, 1728 bp, Homo sapiens
agagtgacattgtttgccaaaatcccaggcagcatggacctcagtcttctctgggtacttctgcccctagtcaccatggcctggggccagtatggcgattatggatacccataccagcagtatcatgactacagcgatgatgggtgggtgaatttgaaccggcaaggcttcagctaccagtgtccccaggggcaggtgatagtggccgtgaggagcatcttcagcaagaaggaaggttctgacagacaatggaactacgcctgcatgcccacgccacagagcctcggggaacccacggagtgctggtgggaggagatcaacagggctggcatggaatggtaccagacgtgctccaacaatgggctggtggcaggattccagagccgctacttcgagtcagtgctggatcgggagtggcagttttactgttgtcgctacagcaagaggtgcccatattcctgctggctaacaacagaatatccaggtcactatggtgaggaaatggacatgatttcctacaattatgattactatatccgaggagcaacaaccactttctctgcagtggaaagggatcgccagtggaagttcataatgtgccggatgactgaatacgactgtgaatttgcaaatgtttagatttgccacataccaaatctgggtgaaaggaaaggggccggggacaggagggtgtccacatatgttaacatcagttggatctcctatagaagtttctgctgctctctttccttctccctgagctggtaactgcaatgccaacttcctgggcctttctgactagtatcacacttctaataaaatccacaattaaaccatgtttctcacttttcacatgtttcatagcaactgctttatatgactgatgatggcttccttgcacaccacatatacagtgcgcatgcttacagccgggcttctggagcaccagctgcagcctggctactgctttttactgcagaatgaactgcaagttcagcatagtggaggggagaggcagaactggaggagaggtgcagtgaaggttctctacagctaagcctgtttgaatgatacgtaggttccccaccaaaagcaggctttctgccctgagggacatcttcccactcccctgctccacatgagccatgcatgcttagcaatccaagtgcagagctctttgctccaggagtgaggagactgggaggtgaaatggggaaatggaagggtttggaggcagagctgaaaacagggttggaaggatttcctgaattagaagacaaacgttagcatacccagtaaggaaaatgagtgcaggggccaggggaacccgtgaggatcactctcaaatgagattaaaaacaaggaagcagagaatggtcagagaatgggattcagattgggaacttgtggggatgagagtgaccaggttgaactgggaagtggaaaaaggagtttgagtcactggcacctagaagcctgcccacgattcctaggaaggctggcagacaccctggaaccctggggagctactggcaaactctcctggattgggcctgatttttttggtgggaaaggctgccctggggatcaactttccttctgtgtgtggctcaggagttcttctgcagagatggcgctatctttcctcctcctgtgatgtcctgctcccaaccatttgtactcttcattacaaaagaaataaaaatattaacgttcactatgctgaaa

SEQ ID NO: 1917 - protein, 201 aa, Homo sapiens; identical to SEQ ID NO: 97

SEQ ID NO: 1918 - DNA, 515 bp, Homo sapiens
cagcaggggtgagctgaccaccagtgatgaacagaggcctccacacagccagtgacctaattagtcaccttcaagggtgacctgaactcacagatttgtcggttcttgggaaactgcataaagatgtcttctaagagcaaagtgagattaagtgtcccttcagttcccagatcctccaaatgttctctgctgctgtttccccagcagcgattcttcctgccatgtcctttctcactgacattcattttctgactctccctcccacagggatcgccagtggaagttcataatgtgccggatgactgaatacgactgtgaatttgcaaatgtttagatttgccacataccaaatctgggtgaaaggaaaggggccggggacaggagggtgtccacatatgttaacatcagttggatctcctatagaagtttctgctgctctctttccttctcctgtgatgtcctgctcccaaccatttgtactcttcattacaaaagaaataaaaatattaacgttc

SEQ ID NO: 1919 - protein, 62 aa, Homo sapiens
MFRFATYQIWVKGKGPGTGGCPHMLTSVGSPIEVSAALFPSPVMSCSQPFVLFITKEIKILT

SEQ ID NO: 1920 - DNA, 850 bp, Homo sapiens
agagtgacattgtttgccaaaatcccaggcagcatggacctcagtcttctctgggtacttctgcccctagtcaccatggcctggggccagtatggcgattatggatacccataccagcagtatcatgactacagcgatgatgggtgggtgaatttgaaccggcaaggcttcagctaccagtgtccccaggggcaggtgatagtggccgtgaggagcatcttcagcaagaaggaaggttctgacagacaatggaactacgcctgcatgcccacgccacagagcctcggggaacccacggagtgctggtgggaggagatcaacagggctggcatggaatggtaccagacgtgctccaacaatgggctggtggcaggattccagagccgctacttcgagtcagtgctggatcgggagtggcagttttactgttgtcgctacagcaagaggtgcccatattcctgctggctaacaacagaatatccaggtcactatggtgaggaaatggacatgatttcctacaattatgattactatatccgaggagcaacaaccactttctctgcagtggaaagggatcgccagtggaagttcataatgtgccggatgactgaatacgactgtgaatttgcaaatgtttagatttgccacataccaaatctgggtgaaaggaaaggggccggggacaggagggtgtccacatatgttaacatcagttggatctcctatagaagtttctgctgctctctttccttctccctgagctggtaactgcaatgccaacttcctgggcctttctgactagtatcacacttctaataaaatccacaattaaaccatgtttctcactttt

SEQ ID NO: 1921 - protein, 201 aa, Homo sapiens; identical to SEQ ID NO: 97

SEQ ID NO: 1922 - DNA, 606 bp, Homo sapiens
tgaaggttagaaataataatgggcatctctgctgcatttctgactttaaaagaatagattctaaggctcacaattaacagtgcatacctcctgggaacatgttaccaaaagttagaaggccaaattccctcagcctctatccagcatcacaaataacttcaatgagaaccataggaacatcgagtgtcctgtgaatctgagaactgcaatgggccctaggggctcttccatccaggcttatcatgattcaggagaagaaattgaggaccgaagacatcaaatataataagctaatggaggaactgaggctacttgcctggctccagtgctctttcctttgcctcaaaatctttacaggtcagccatctatcatgtgtagaataagcaaactgaattaacattggaaatattaaaagaacagaggttgcgtggatattggttggaacagagaagaagttttcacaaggaattaaagtaacaccagctgctcactgctctgacttaaaccatacagcaactccagaaacatggggggtgttgttgagtggcaaggtaagctcaagaatgctaaatgtgtctgaaggcaaaggggattatttgtcattg

SEQ ID NO: 1923 - protein, 51 aa, Homo sapiens
MIQEKKLRTEDIKYNKLMEELRLLAWLQCSFLCLKIFTGQPSIMCRISKLN

SEQ ID NO: 1924 - DNA, 1129 bp, Homo sapiens
acatttcacagatggcacagagtggggaagtcagtgacccaaggtggcaagccagctcttgctgatggtgaggagcctcattatcttaagacaacacacagtggagatgtgctttacgtaattggcctgccctgtgaaaacccctggctgttttttcagataaggagactgaagcatctagagttggagtaatttccacaagatcacagagctgaaaccacaggaagaggccaatatggacttctctactactttatttcccctgagcctggtcagcttcttccaaggagattactgggaggaagcttctaggatttctggacattggattccctgctggtttccccacctgattattgaaattgatttctggagttcaggaaaaagcaagtcatcatatatcaacctattatgtgtgttaggctgtttgcattatcacatttaatccatttgacgctgtgaaggagcaggtagtgttatctgactcaagtctgtccttcaattaatctcaccacctccaggattcctttatgctctttgtcaagaactctggtagagcaaagaaaatggggatagtttgtcacgttcaaaaatcgtattgaccaagactatcctctctctctctctcttttttttgagacagagtctcactctgtcaccaggctggagtgcagtggtgtaatctcagctcactgcaacctccgcctcctgggttcaagtgattctcctgcctcagccttccgagtagctgggactacaggtgcatgccaccatgcccagctaatttttgtatttttagtagaatcagggtttcaccatgttggccaggatggtctcgatctcctgacctcgtgatctgcccgccttggcctcccaaagtgctgggactacaggcatgagccactgtgcctggctgataatcctcttttaagaagaaggggtatatatttacctagggaattccctagaggagaagaggcagaaaggcataaaaggagtatagtaaactgaaatcaagacatctaaatctaagacctggctccattactgtacccctttggaactttgggtaaattcttaattctttctgggtctcaattttctcttttaataaaacaaagatttggag

SEQ ID NO: 1925 - protein, 69 aa, Homo sapiens
MDFSTTLFPLSLVSFFQGDYWEEASRISGHWIPCWFPHLIIEIDFWSSGKSKSSYINLLCVLGCLHYHI

SEQ ID NO: 1926 - DNA, 780 bp, Homo sapiens
gcttggagaagaggaggaggctgaaaagaaggcaaagagtgaagatagagaaacaagatggaagtgggggagaaaaacagggatgagagaatgccatggtggtgctgagaaggaaaggagagacttttctgcttgtaaagggcagaagatggcagaatccagtgacgcaggggcatctggctccagaaataataggtcacttggcacccacttcttcaaaacaactcgtagaggtaccaccttggttgtcttggataaaatctggaataattatctgggttaccaggagagacccttgttcttttcgcttactttctccaaaacatatgaagcctctctctctgtgctgaaccacctggaactggaggtgtgatgagttatagagatgaaaatgcatatggaattatcatgcaaattaccaataaagagaatcactggtcagaatccctatattttggagaagaaaaattttgaaaaccagtcagaattcaatcaactgcagttgggagaaagacagcgagtagcttgagagagatgagaaactatcaaaaagaagttcctgacatggcaacagtgtatcatccaatgaatcaatcgcctcacccaacactgtaacacttcctggcctattgactcagagcatgaggaaaccaaagtgaccagggattaaaagctatctctggagaagatgatgtcagcaagatggcagaatagaaaaatccaggtcctggttccaccacagaaacatgaagtaaacaacaaaggaatggcttaatagcc

SEQ ID NO: 1927 - protein, 96 aa, Homo sapiens
MRECHGGAEKERRDFSACKGQKMAESSDAGASGSRNNRSLGTHFFKTTRRGTTLVVLDKIWNNYLGYQERPLFFSLTFSKTYEASLSVLNHLELEV

SEQ ID NO: 1928 - DNA, 520 bp, Homo sapiens
ctgatgtcaattcttattacagttctttaagatttctgttttatcaaaggatctcactttcttcccacctcattctacaatgtagtagtattctaacactcatgcacatcaaggtacttgtgggagagaatatcctcctaaggaagactatgttttcatttaacaacaaataggccaggtgcagtagcttataccagtaatccctttagaacgccaaggtaggaggatcgcttgaggccaggagtttgagaccagcctaacatacaaggacctttgattctgcaaaagataaaaagcattagctgggcatggtggtgctcacctatagtcctagctatccaggatgctgaggcaaaaggatcatttgagcaaaggagttcaaggttacaatgagctgtgatcgcatcactgcattccagtatgggtgacagttcttgctcacaagaacctgtctttataaaacaaatgaacaacttaacaacaaatacttgttaacagatatttaatttactatgtgcca

SEQ ID NO: 1929 - protein, 47 aa, Homo sapiens
DQPNIQGPLILQKIKSISWAWWCSPIVLAIQDAEAKGSFEQRSSRLQ

SEQ ID NO: 1930 - DNA, 658 bp, Homo sapiens
cttagatcttaagccactgctgatcttcttagaaccacacaccgcaggtgcttccctgtggaaactgcaaatgtttactctgtcttccacctttgaatgacttagaacatgttgtggctaaggttcattcgttatcaacattcagaaactgccatttccttttctacctgcaaagcctaataataactttttaaactattgcttcctttgcatattcaccatacatcctgctttcagatgtggaatctaaaaccttgctgagaaactgcctccaatgttgctcccttaactttcactgtggaaaactctgaaggaagttggccgcaccatttaatggaagcatgaggaactagtctctttcctttagatatgtatgaaaatggctccactgtgactcagcagatggctccactgtgactcagcagatctccaggattttcctgtgtagtttctgttttggctttcatctggtgggaactgactgctacaggaccgaggcttttaaatcaaacccaaataacaaaatgtatttagagctgaaaaaggtggtgccatcaggctggggtggggatgaggaagtgattcattaccccagttggaatgtaaattcaatgagtttaattactagtggtgtcaaaaaaggattttcactgatagc

SEQ ID NO: 1931 - protein, 43 aa, Homo sapiens
MYLELKKVVPSGWGGDEEVIHYPSWNVNSMSLITSGVKKGFSL

SEQ ID NO: 1932 - DNA, 2008 bp, Homo sapiens
catgacattgcatccttcacccatcacttgtgaatttttgttttccacagctctcatttctccaaaaatgtgtttgagccacttggaaaatatgcctttaagccattcaagaactcaaggagctcagagatcatcctggaagctgtggctcttttgctcaatagttatgttgctatttctttgctccttcagttggctaatctttatttttctccaattagagactgctaaggagccctgtatggctaagtttggaccattaccctcaaaatggcaaatggcatcttctgaacctccttgcgtgaataaggtgtctgactggaagctggagatacttcagaatggcttatatttaatttatggccaagtggctcccaatgcaaactacaatgatgtagctccttttgaggtgcggctgtataaaaacaaagacatgatacaaactctaacaaacaaatctaaaatccaaaatgtaggagggacttatgaattgcatgttggggacaccatagacttgatattcaactctgagcatcaggttctaaaaaataatacatactggggtatcattttactagcaaatccccaattcatctcctagagacttgatttgatctcctcattcccttcagcacatgtagaggtgccagtgggtggattggagggagaagatattcaatttctagagtttgtctgtctacaaaaatcaacacaaacagaactcctctgcacgtgaattttcatctatcatgcctatctgaaagagactcaggggaagagccaaagacttttggttggatctgcagagatacttcattaatccatgataaaacaaatatggatgacagaggacatgtgcttttcaaagaatctttatctaattcttgaattcatgagtggaaaaatggagttctattcccatggaagatttacctggtatgcaaaaaggatctggggcagtagcctggctttgttctcatattcttgggctgctgtaattcattcttctcatactcccatcttctgagaccctcccaataaaaagtagactgataggatggccacagatatgcctaccataccctactttagatatggtggtgttagaagataaagaacaatctgagaactattggaatagaggtacaagtggcataaaatggaatgtacgctatctggaaatttctcttggttttatcttcctcaggatgcagggtgctttaaaaagccttatcaaaggagtcattccgaaccctcacgtagagctttgtgagaccttactgttggtgtgtgtgtctaaacattgctaattgtaaagaaagagtaaccattagtaatcattaggtttaaccccagaatggtattatcattactggattatgtcatgtaatgatttagtatttttagctagctttccacagtttgcaaagtgctttcgtaaaacagttagcaattctatgaagttaattgggcaggcatttgggggaaaattttagtgatgagaatgtgatagcatagcatagccaactttcctcaactcataggacaagtgactacaagaggcaatgggtagtcccctgcattgcactgtctcagctttagaattgttatttctgctatcgtgttataagactctaaaacttagcgaattcacttttcaggaagcatattcccctttagcccaaggtgagcagagtgaagctacaacagatctttcctttaccagcacactttttttttttttcctgcctgaatcagggagatccaggatgctgttcaggccttatcccaaccaaattcccctcttcactttgcagggcccatcttagtcaaatgtgctaacttctaaaataataaatagcactaattcaaaatttttggactcttaaattagctacttgcaggttcttgttgaaaggtatataatattacattgtaaacaaatttaaaatatttatggatatttgtgaaaagctgcattatgttaaataatattacatgtaaagct

SEQ ID NO: 1933 - protein, 199 aa, Homo sapiens; identical to SEQ ID NO: 99

SEQ ID NO: 1934 - DNA, 963 bp, Homo sapiens; identical to SEQ ID NO: 100

SEQ ID NO: 1935 - protein, 320 aa, Homo sapiens; identical to SEQ ID NO: 101

SEQ ID NO: 1936 - DNA, 567 bp, Homo sapiens
agcctaaaatgagccatcatggtagaaaatcaggtccctcatccaattttcagccctgagtcagacctagaagctctgaaatttaaaaaaaaaaaaaaaagcattttaccagttaggaagaatcttgtaatattttgcaagtatttacgaaagtacagcactttttcaaatagataattggttctacaaatcttataattctgctagaggatgaagtctttgccgattttttcaacacatttctttccctcccggtttttggtcagacaccattttatactgttgaaaattcacagtggagcttgtggccagaaataccttgtaacttgattgccaaatacaaagggttattgacctggttggaaaaatgccgattacctttcttctgtaaaacaaacttgtgtttccattacattctctgtcaggagttcatcagtttcattaagtccccagaaggagccaagatgatgagatggaaaaaggcagaccagtggctactccagaaatgcattggcggggtcagagggatgtggcgcttctattcctacctcacaggcagtgcaggtg

SEQ ID NO: 1937 - protein, 52 aa, Homo sapiens
MVENQVPHPIFSPESDLEALKFKKKKKSILPVRKNLVIFCKYLRKYSTFSNR

SEQ ID NO: 1938 - DNA, 532 bp, Homo sapiens
aaaatgagccatcatggtagaaaatcaggtccctcatccaattttcagccctgagtcagacctagaagctctgaaatttaaaaaaaaaaaaaaaagcattttaccagttaggaagaatcttgtaatattttgcaagtatttacgagataattggttctacaaatcttataattctgctagaggatgaagtctttgccgattttttcaacacatttctttccctcccggtttttggtcagacaccattttatactgttgaaaattcacagtggagcttgtggccagaaataccttgtaacttgattgccaaatacaaagggttattgacctggttggaaaaatgccgattacctttcttctgtaaaacaaacttgtgtttccattacattctctgtcaggagttcatcagtttcattaagtccccagaaggagccaagatgatgagatggaaaaaggcagaccagtggctactccagaaatgcattggcggggtcagagggatgtggcgcttctattcctacctcacaggcag

SEQ ID NO: 1939 - protein, 57 aa, Homo sapiens
MVENQVPHPIFSPESDLEALKFKKKKKSILPVRKNLVIFCKYLRDNWFYKSYNSARG

SEQ ID NO: 1940 - DNA, 589 bp, Homo sapiens
aattctgcccctaacaaattactgtgtcaggaagagcatggcaacatgagcagtgctgagataattggttctacaaatcttataattctgctagaggatgaagtctttgccgattttttcaacacatttctttccctcccggtttttggtcagacaccattttatactgttgaaaattcacagtggagcttgtggccagaaataccttgtaacttgattgccaaatacaaagggttattgacctggttggaaaaatgccgattacctttcttctgtaaaacaaacttgtgtttccattacattctctgtcaggagttcatcagtttcattaagtccccagaaggagaagccagagtgagcctcttaaaaagtaattggtggtggtgctggagggactcccaggaagatgatgaaataggaagcactaggaatctgtttcctcatctagacaacaattgtactggcagaatctgtatgatccaagatgatgagatggaaaaaggcagaccagtggctactccagaaatgcattggcggggtcagagggatgtggcgcttctattcctacctcacaggcagtgcaggtggg

SEQ ID NO: 1941 - protein, 180 aa, Homo sapiens
MSSAEIIGSTNLIILLEDEVFADFFNTFLSLPVFGQTPFYTVENSQWSLWPEIPCNLIAKYKGLLTWLEKCRLPFFCKTNLCFHYILCQEFISFIKSPEGEARVSLLKSNWWWCWRDSQEDDEIGSTRNLFPHLDNNCTGRICMIQDDEMEKGRPVATPEMHWRGQRDVALLFLPHRQCR

SEQ ID NO: 1942 - DNA, 554 bp, Homo sapiens
aaattactgtgtcaggaagagcatggcaacatgagcagtgctgagataattggttctacaaatcttataattctgctagaggatgaagtctttgccgattttttcaacacatttctttccctcccggtttttggtcagacaccattttatactgttgaaaattcacagtggagcttgtggccagaaataccttgtaacttgattgccaaatacaaagggttattgacctggttggaaaaatgccgattacctttcttctgtaaaacaaacttgtgtttccattacattctctgtcaggagttcatcagtttcattaagtccccagaaggagccaagatgatgagatggaaaaaggcagaccagtggctactccagaaatgcattggcggggtcagagggatgtggcgcttctattcctacctcacaggcagtgcaggtgaagaattggtggatttctggatccttgctgagaacatcctgagcatagatgagatggacctggaagtgagagactactacctgtccctcctcctcatgctgagggccactcatct

SEQ ID NO: 1943 - protein, 173 aa, Homo sapiens
MSSAEIIGSTNLIILLEDEVFADFFNTFLSLPVFGQTPFYTVENSQWSLWPEIPCNLIAKYKGLLTWLEKCRLPFFCKTNLCFHYILCQEFISFIKSPEGAKMMRWKKADQWLLQKCIGGVRGMWRFYSYLTGSAGEELVDFWILAENILSIDEMDLEVRDYYLSLLLMLRAT

SEQ ID NO: 1944 - DNA, 726 bp, Homo sapiens
aggaagagcatggcaacatgagcagtgctgagataattggttctacaaatcttataattctgctagaggatgaagtctttgccgattttttcaacacatttctttccctcccggtttttggtcagacaccattttatactgttgaaaattcacagtggagcttgtggccagaaataccttgtaacttgattgccaaatacaaagggttattgacctggttggaaaaatgccgattacctttcttctgtaaaacaaacttgtgtttccattacattctctgtcaggagttcatcagtttcattaagtccccagaaggagaagccagagtgagcctcttaaaaagtaattggtggtggtgctggagggactcccaggaagatgatgaaataggaagcactaggaatctgtttcctcatctagacaacaattgtactggcagaatctgtatgatatgctcagtccctggtatgatgagtttctagatgaagaggactactggtttctcctttttacgagtcaaccaaagatcagcatggtccctgttgttctaaagctaaacctctcaaggaaaaggactcagtgcataagatgactttgacacagaacaggttcatcagctccagacagcataaaagagaatttataggcaaagaagagaacattcttctttataagaggattcagcagtctctagagttaagccaggctttggctgacatgaaggaa

SEQ ID NO: 1945 - protein, 154 aa, Homo sapiens
MSSAEIIGSTNLIILLEDEVFADFFNTFLSLPVFGQTPFYTVENSQWSLWPEIPCNLIAKYKGLLTWLEKCRLPFFCKTNLCFHYILCQEFISFIKSPEGEARVSLLKSNWWWCWRDSQEDDEIGSTRNLFPHLDNNCTGRICMICSVPGMMSF

SEQ ID NO: 1946 - DNA, 555 bp, Homo sapiens
acactaacatcagatgcaacctaggcaagggttctcttatgttctgctctgggaagcatttgaagtatttcagttgtgagtaccactccagccaatgagagaaccagatggagagaaggccatgtgaggaatgggttgaagaattgcctggtgactagccagtggggttggagagataattggttctacaaatcttataattctgctagaggatgaagtctttgccgattttttcaacacatttctttccctcccggtttttggtcagacaccattttatactgttgaaaattcacagtggagcttgtggccagaaataccttgtaacttgattgccaaatacaaagggttattgacctggttggaaaaatgccgattacctttcttctgtaaaacaaacttgtgtttccattacattctctgtcaggagttcatcagtttcattaagtccccagaaggagccaagatgatgagatggaaaaaggcagaccagtggctactccagaaatgcattggcggggtcagagggatgtggcgcttctattcctacctcac

SEQ ID NO: 1947 - protein, 39 aa, Homo sapiens
MKSLPIFSTHFFPSRFLVRHHFILLKIHSGACGQKYLVT

SEQ ID NO: 1948 - DNA, 566 bp, Homo sapiens
aatgggggtctggcagtgtgcaaggctgggagaggggtcaggggaagagttcattctccctctcttatggtggaattttcctggcagccaagatgatgagatggaaaaaggcagaccagtggctactccagaaatgcattggcggggtcagagggatgtggcgcttctattcctacctcacaggcagtgcaggtgaagaattggtggatttctggatccttgctgagaacatcctgagcatagatgagatggacctggaagtgagagactactacctgtccctcctcctcatgctgagggccactcatctgcaggagggctccagggtggtaaccctctgtaacatgaacatcagaaaccccaccttctttccatcttctatgtatcagagaggctagtggcaaccccaacccttaaccaggaaatccctcctgaacctctccatctggcatcccaaccaatcaaccactaggagggagatcctgagccacatgcagaaagtggctctgttcaaactccagagctattggcttcccaacttttacacccacaccaagatgaccatg

SEQ ID NO: 1949 - protein, 101 aa, Homo sapiens
MMRWKKADQWLLQKCIGGVRGMWRFYSYLTGSAGEELVDFWILAENILSIDEMDLEVRDYYLSLLLMLRATHLQEGSRVVTLCNMNIRNPTFFPSSMYQRG

SEQ ID NO: 1950 - DNA, 2063 bp, Homo sapiens
agatgctcagtccctggtatgatgagtttctagatgaagaggactactggtttctcctttttacgacataactaaaatgtcctttgaggagctttgctacaagaacccaaagatggccatacagaagatcagtgatgactacaaaatatactgtgagaaagcacctaaaatagattttaaaatggaaattatcaaggaaacaaagacagtttcacgctcaaataggaaaatgtccttgctcaaaagaactcttgtaaggaagccatcaatgagacccagaaacttgacagaagtcctcttaaatacacagcacttggagttcttcagggagttcctcaaggaacggaaggctaaaatcccattgcaatttctcacagctgtacagaagatcagtatagagaccaatgaaaagatttgcaagtctctcatagaaaatgtaatcaagactttcttccaaggccaactctctcctgaagaaatgctgcagtgtgatgcccctattatcaaagaaatcgcttccatgcgtcatgtcaccacaagcacactgttaacgctccagggacatgttatgaaatctatagaagaaaagtggtttaaagattatcaagacctgttcccacctcaccatcaggaggtggaagtgcaaagtgaagtacaaatttcgtctaggaagccctcaaagatagtgtcaacttacctacaggaatcccagaagaaaggctggatgagaatgatcagctttatcaggagtttttgcaagtaccgcagatttatgttgaatcctagtaagcgccaggaatttgaagactatcttcaccaggaaatgcaaaatagcaaggaaaatttcaccacagcacacaacacatcgggacgttcagctccaccctccacaaatgtccggagtgcagaccaagagaatggagaaataacccttgtaaagcgtcgtatatttggccacaggattatcactgtcaactttgcgatcaatgatctatatttcttttctgaaatggagaaatttaatgatctggtcagttcagcccacatgctgcaggtcaaccgggcatataatgagaatgatgtgatcctaatgcggtccaaaatgaacattatccaaaaactcttcctgaattctgacatccctccaaagctgagggtgaatgtccctgagttccagaaggatgccatccttgctgccatcacagagggctacctagatcggagcgtcttccatggggctatcatgtctgtcttccccgttgttatgtacttctggaaaaggttttgtttctggaaggcaacccgctcttacttacagtatagggggaagaagttcaaggacagaaaaagccctcctaaatctacggacaagtatcctttctcgagtggaggagacaatgccatcttaaggttcaccttgctcagaggtattgagtggttgcagcctcaacgggaagcaataagttcagttcaaaattcttcatcaagcaaacttactcagccaagactcgtggtatctgccatgcagctgcatcccgtccagggacaaaaattatcctacatcaaaaaagagaagtaatcaagcgagacccccagcagagataaatcatctcttagaggcctcctaacactgacagaaacttttctggtcaaaaatgaaaggtcctggtaccatcttccccagaaacgatcaagaagggcaatgggttgacagcccagatatggcaggaccagactgcaatgggaatctcatacagcccattcagactaaagggtgatggaaagaagcagaggaaagcagaaacagcaagagtgactgagacctgctgtcatctatatagaagcctttctgatacatgtcagagagtgacatgaagtctcccctctttatacacacgtatgaaaatacatctatccctcattttgagagcctccaactgatccaagtgtcatccggaggaggaggtggcccgtatgtgcaggacctcagggtgccagccctcacccatacacctccagggctgcaggtcattagccagaataaaggatgtccacattcacaa

SEQ ID NO: 1951 - protein, 500 aa, Homo sapiens
MSFEELCYKNPKMAIQKISDDYKIYCEKAPKIDFKMEIIKETKTVSRSNRKMSLLKRTLVRKPSMRPRNLTEVLLNTQHLEFFREFLKERKAKIPLQFLTAVQKISIETNEKICKSLIENVIKTFFQGQLSPEEMLQCDAPIIKEIASMRHVTTSTLLTLQGHVMKSIEEKWFKDYQDLFPPHHQEVEVQSEVQISSRKPSKIVSTYLQESQKKGWMRMISFIRSFCKYRRFMLNPSKRQEFEDYLHQEMQNSKENFTTAHNTSGRSAPPSTNVRSADQENGEITLVKRRIFGHRIITVNFAINDLYFFSEMEKFNDLVSSAHMLQVNRAYNENDVILMRSKMNIIQKLFLNSDIPPKLRVNVPEFQKDAILAAITEGYLDRSVFHGAIMSVFPVVMYFWKRFCFWKATRSYLQYRGKKFKDRKSPPKSTDKYPFSSGGDNAILRFTLLRGIEWLQPQREAISSVQNSSSSKLTQPRLVVSAMQLHPVQGQKLSYIKKEK

SEQ ID NO: 1952 - DNA, 5095 bp, Homo sapiens
gtatatgaatctttgaacccagactttggacaactaaactctatctctgtttttccttacttcacagacataactaaaatgtcctttgaggagctttgctacaagaacccaaagatggccatacagaagatcagtgatgactacaaaatatactgtgagaaagcacctaaaatagattttaaaatggaaattatcaaggaaacaaagacagtttcacgctcaaataggaaaatgtccttgctcaaaagaactcttgtaaggaagccatcaatgagacccagaaacttgacagaagtcctcttaaatacacagcacttggagttcttcagggagttcctcaaggaacggaaggctaaaatcccattgcaatttctcacagctgtacagaagatcagtatagagaccaatgaaaagatttgcaagtctctcatagaaaatgtaatcaagactttcttccaaggccaactctctcctgaagaaatgctgcagtgtgatgcccctattatcaaagaaatcgcttccatgcgtcatgtcaccacaagcacactgttaacgctccagggacatgttatgaaatctatagaagaaaagtggtttaaagattatcaagacctgttcccacctcaccatcaggaggtggaagtgcaaagtgaagtacaaatttcgtctaggaagccctcaaagatagtgtcaacttacctacaggaatcccagaagaaaggctggatgagaatgatcagctttatcaggagtttttgcaagtaccgcagatttatgttgaatcctagtaagcgccaggaatttgaagactatcttcaccaggaaatgcaaaatagcaaggaaaatttcaccacagcacacaacacatcgggacgttcagctccaccctccacaaatgtccggagtgcagaccaagagaatggagaaataacccttgtaaagcgtcgtatatttggccacaggattatcactgtcaactttgcgatcaatgatctatatttcttttctgaaatggagaaatttaatgatctggtcagttcagcccacatgctgcaggtcaaccgggcatataatgagaatgatgtgatcctaatgcggtccaaaatgaacattatccaaaaactcttcctgaattctgacatccctccaaagctgagggtgaatgtccctgagttccagaaggatgccatccttgctgccatcacagagggctacctagatcggagcgtcttccatggggctatcatgtctgtcttccccgttgttatgtacttctggaaaaggtaactgtttctccttattcagtgactgttaggtcaggaaaacacacttagtttggagagagttttctgccttcctctagcactctgtttcgtagtttccagtttctagggggaactaagatggtgttttcaaaatcctattcacctcactccatccctcacacagaacaccaaacactgaatccacagatggaaggcagagtaagactgagagccaaacgcctggtttcccacccctcctctttctatgcttgcttggagcaagaatgtgaggttttcttaggcctgggtttctcacaagaaggtaagagtgaaccacagccccttggggagaaattctgtcaagactaacacaactgcttgtgcttaagaagctacatgaagaaagtaagccagaagtgttttgctctgttatgcccaaatccccagaattaccactgagggagcacagttgctagatactccaattatcaagaggagctagacattgaaatgtgtatttcatctctcccaaggttaaagtggcaaatatggcaactaacaaaactaaaacatggtgaagaaactgtgaaggccaaaaaccaaaaatgaaacaagcaaaatatatgcagatattttgtggccaaatgcaatctgtggcccacttgtttctaacctgtcctgtggagatttggcctgagccttcccagctggttatttattcctgtggtctgccagagttccagctcatatcttccacatggtgaatggcagtgccttgggtggtagtgaccagaggacacctggctgaaatgttcccagacaaagctaatcaggacacttagattatcatgtgacttggactcttagaagttcccatcttccaccaaaaaaaaaagttactttattaaaatagaagtgtgaaattgcttaccaatctctcacctttattttaaaatccttgagataataaactatttaatacagaaccaagagaagtacaaaaatctaagttcaagacaagcaatttaaccttttgaacatcaaatgttgtctagaacttaactctagttctcctagcaaggactaagtagatattcacccagagacttttggagggattgggaacctctgggaaatatatgcttctcttgaatgagccagtgtttagctgtctcccatgtgcttagaaaaatgagacatgctttagggattctttggattcctgttcctcctgcagtttctttacttactttcctacatacttacaaagaaatttatgtcttggtctctcatcaccataaataatgcatgtgcggcatactgggaggtccactggggaaggagacccagttcagcaagtgaaatgggaaaagcctattgagatagaacagactgtccctcaaggagaggggaggagggcagcaggcaaaaccaccagatccaaagtgccatagaaaataaattcagtcttagccaagattgacctccaagggatccaatccaaggactggttgaaggtagggataacaaggggcttggggccaggaaggaagagatgatggggaatattgcacaggcttctagagaacataaaggtcataaagagtacataaatctgagttcacaagagaaaccaggtctattccagggaagggcccgctgggaatagagtgaggtggtcaaggctgtcagtaagtggcagggtggaaactaggattaggacctgagcaaaagcccttcagacactctggccataccaggtggggttagatagggatgtcagagtctgatgctggggtgcaccccaggggttaacctcaccccaggcctcaggatagtaggccctttacaggctccattcactgatggttccagaaagaagccccaacaaactgcccatgccaggcccgcgctggagccaggtctggacaaagaggaggcctcagaacaaaggccactggcaggtagaaccccaaggccaggatgctttcctcttctctgttggacacccacattctctgaggactggcccggccctgtttcccctgtgctcggtgctccagccccctccactgggggttccctcctatgaccagaagccattcttcccacaggttttgtttctggaaggcaacccgctcttacttacagtatagggggaagaagttcaaggacagaaaaagccctcctaaatctacggacaagtatcctttctcgagtggaggagacaatgccatcttaaggttcaccttgctcagaggtattgagtggttgcagcctcaacgggaagcaataagttcagttcaaaattcttcatcaagcaaacttactcagccaagactcgtggtatctgccatgcagctgcatcccgtccaggggtaggcatgagctggaaatcctcttcttcagtccagagctgctatgtccaagcatgcaataggagatggtataaactttccagagactagcctcataccctgcctctccttggcatgcagaacctagaaactgagcttgctgcctctggtgggaagttaaagaggtgtttctctgtgggggtcctttctcacctccaactaggacaggcacttttaagaagttggagtctctgacccacttttcagtagaacaatactgctgtggaagtgtcccagatgatctttgatttttaatgatcttttattgccagcttcctaaatattccaggctgctcagggcagggtgcataaggtgggaaagaaagaagatctgttcttctgcttggcaggatattggcaataagaacagaagggacttgagtctgttaaaatctgcttcagcctaactcacttctgcacaagcttccaagtgaaactgatgctaagttagggctctgggagaatccccaggggtcatgaaaaccatagctgaggagtgccaaagagttatttgaaggccaaggtggtagacagcagcctctgaatgacaggcttggtgtccttgccagccaagtcacttctcaggcctgtttccagacttgtccttccaacagggacttgaagctgcccaggaattatttgcccgtcccagtgcccagaagacaaaccagatactttgaagctctttacactggaaaagcaatgcatggcttcagagtttataaggccttggggaagaaggtgagactaagaatgtgagaagccctattctgaagcctgaaggtttcagttttggctattgccattcctaaaggaaatgacagtgacaaaccaacagagaatgcaacctcaattactgcatcataattgtgataactggctgttttctctcccttcagacaaaaattatcctacatcaaaaaagagaagtaatcaagcgagacccccagcagagataaatcatctcttagaggcctcctaacactgacagaaacttttctggtcaaaaatgaaaggtcctggtaccatcttccccagaaacgatcaagaagggcaatgggttgacagcccagatatggcaggaccagactgcaatgggaatctcatacagcccattcagactaaagggtgatggaaagaagcagaggaaagcagaaacagcaagagtgactgagacctgctgtcatctatatagaagcctttctgatacatgtcagagagtgacatgaagtctcccctctttatacacacgtatgaaaatacatctatccctcattttgagagcctccaactgatccaagtgtcatccggaggaggaggtggcccgtatgtgcaggacctcagggtgccagccctcacccatacacctccagggctgcaggtcattagccagaataaaggatgtccacattc

SEQ ID NO: 1953 - protein, 402 aa, Homo sapiens
MSFEELCYKNPKMAIQKISDDYKIYCEKAPKIDFKMEIIKETKTVSRSNRKMSLLKRTLVRKPSMRPRNLTEVLLNTQHLEFFREFLKERKAKIPLQFLTAVQKISIETNEKICKSLIENVIKTFFQGQLSPEEMLQCDAPIIKEIASMRHVTTSTLLTLQGHVMKSIEEKWFKDYQDLFPPHHQEVEVQSEVQISSRKPSKIVSTYLQESQKKGWMRMISFIRSFCKYRRFMLNPSKRQEFEDYLHQEMQNSKENFTTAHNTSGRSAPPSTNVRSADQENGEITLVKRRIFGHRIITVNFAINDLYFFSEMEKFNDLVSSAHMLQVNRAYNENDVILMRSKMNIIQKLFLNSDIPPKLRVNVPEFQKDAILAAITEGYLDRSVFHGAIMSVFPVVMYFWKR

SEQ ID NO: 1954 - DNA, 614 bp, Homo sapiens
ctggtctcgaactcccgacctcaggtgatctgactgcctcagtctcccaaagtgctgggattacagattttaaaatggaaattatcaaggaaacaaagacagtttcacgctcaaataggaaaatgtccttgctcaaaagaactcttgtaaggaagccatcaatgagacccagaaacttgacagaagtcctcttaaatacacagcacttggagttcttcagggagttcctcaaggaacggaaggctaaaatcccattgcaatttctcacagctgtacagaagatcagtatagagaccaatgaaaagatttgcaagtctctcatagaaaatgtaatcaagactttcttccaaggccaactctctcctgaagaaatgctgcagtgtgatgcccctattatcaaagaaatcgcttccatgcgtcatgtcaccacaagcacactgttaacgctccagggacatgttatgaaatctatagaagaaaagtgaagaaaggctggatgagaatgatcagctttatcaggagtttttgcaagtaccgcagatttatgttgaatcctagtaagcgccaggaatttgaagactatcttcaccaggaaatgcaaaatagcaaggaaa

SEQ ID NO: 1955 - protein, 136 aa, Homo sapiens
MEIIKETKTVSRSNRKMSLLKRTLVRKPSMRPRNLTEVLLNTQHLEFFREFLKERKAKIPLQFLTAVQKISIETNEKICKSLIENVIKTFFQGQLSPEEMLQCDAPIIKEIASMRHVTTSTLLTLQGHVMKSIEEK

SEQ ID NO: 1956 - DNA, 2686 bp, Homo sapiens
taatttttggacagagacgagacaggcttagagatattgactgaggactaaagagtccctggctttgatttctggttgctgaattgtgctctagaaagcactactgcttaccctaagtccaactaagagtttgaggtgtcagcttcagcaatcaccaagcaagcctttctgtgaattttatgcagttttccatcagagttctggctagaatttgtactatgctttggtttgttgattttttttcttactctttttttttctttttgtcttttagtagaaacttctcagaagatgtgctggggtggagagagtcgttcgacctgctgctgagcagtaaaagtgagtaggagccttttgtgtctgtctctgggtggcacatgtgtactcatgtgctttggagccagccccaggactgctgagagcctgggcagaataatagtagtagtaataataataataatgatcccctagtgtgccagcctctattcaacatataaaggcaggtcattgttcaagaaaattatgttctaaaaatagagccattaattgcaattgctttcctttcttcttgtattccctgctgtccctccagctgacctatttcctcttctttcccgcaaccccagatggagtggctgccttccacgctttcctgaagacagagttcagtgaggagaacctggagttctggctggcctgtgaggagttcaagaagatccgatcagctaccaagctggcctccagggcacaccagatctttgaggagttcatttgcagtgaggcccctaaagaggtcaacattgaccatgagacccacgagctgacgaggatgaacctgcagactgccacagccacatgctttgatgcggctcaggggaagacacgtaccctgatggagaaggactcctacccacgcttcctgaagtcgcctgcttaccgggacctggctgcccaagcctcagccgcctctgccactctgtccagctgcagcctggacgagccctcacacacctgagtctccacggcagtgaggaagccagccgggaagagaggttgagtcacccatccccgaggtggctgcccctgtgtgggaggcaggttctgcaaagcaagtgcaagaggacaaaaaaaaaaaaaaaaaaaaaaaaaatgcgctccagcagcctgtttgggaagcagcagtctctccttcagatactgtgggactcatgctggagaggagccgcccacttccaggacctgtgaataagggctaatgatgagggttggtggggctctctgtggggcaaaaaggtggtatgggggttagcactggctctcgttctcaccggagaaggaagtgttctagtgtggtttaggaaacatgtggataaagggaaccatgaaaatgagaggaggaaagacatccagatcagctgttttgcctgttgctcagttgactctgattgcatcctgttttcctaattcccagactgttctgggcacggaagggaccctggatgtggagtcttcccctttggccctcctcactggcctctgggctagcccagagtcccttagcttgtacctcgtaacactcctgtgtgtctgtccagccttgcagtcatgtcaaggccagcaagctgatgtgactcttgccccatgcgagatatttatacctcaaacactggcctgtgagccctttccaagtcagtggagagccctgaaaggaggctcacttgaatccagctcagtgctctgggtggccccctgcaggtggcccctgaccctgcgttgcagcagggtccacctgtgagcaggcccgccctggggcctcttcctggatgtgccctctctgagttctgtgctgtctcttggaggcagggcccaggagaacaaagtgtggaggcctcggggagtggcttttccagctctcatgccccgcagtgtggaacaaggcagaaaaggatcctaggaaataagtctcttggcggtccctgagagtcctgctgaaatccagccagtgttttttgtggtatgagaacaggcaaaaagagatgccccgagatagaaggggagccttgtgtttctttcctgcagacgtgagatgaacactggagtgggcagaggtggcccaggaccatggcacccttagagtgcagaagctggggggagaggctgcttcgaagggcaggactggggataatcagaacctgcctgtcacctcagggcatcactgaacaaacatttcctgatggcaactcctgcggcagagcccaggctggggaagtgaactacccagggcagcccctttgtggcccaggataatcaacactgttctctctgtaccatgagctcctccaggagattatttaagtgtattgtatcattggttttctgtgattgtcataacattgtttttgttattgttggtgctgttgttatttattattgtaatttcagtttgcctctactggagaatctcagcaggggtttcagcctgactgtctccctttctctaccagactctacctctgaatgtgctgggaacctcttggagcctgtcaggaactcctcactgtttaaatatttatttattgtgacaaatggagctggtttcctagatatgaatgatgtttgcaatccccattttcctgtttcagcatgttatattcttataaaataaaagcaaaagtcaaatatgaca

SEQ ID NO: 1957 - protein, 143 aa, Homo sapiens [sequence omitted]

SEQ ID NO: 1958 - DNA, 2436 bp, Homo sapiens
gtacaaaacaaatctttgagagtcaggggaattgaaataatttttggacagagacgagacaggcttagagatattgactgaggactaaagagtccctggctttgatttctggttgctgaattgtgctctagaaagcactactgcttaccctaagtccaactaagagtttgaggtgtcagcttcagcaatcaccaagcaagcctttctgtgaattttatgcagttttccatcagagttctggctagaatttgtactatgctttggtttgttgattttttttcttactctttttttttctttttgtcttttagtagaaacttctcagaagatgtgctggggtggagagagtcgttcgacctgctgctgagcagtaaaaatggagtggctgccttccacgctttcctgaagacagagttcagtgaggagaacctggagttctggctggcctgtgaggagttcaagaagatccgatcagctaccaagctggcctccagggcacaccagatctttgaggagttcatttgcagtgaggcccctaaagaggtcaacattgaccatgagacccacgagctgacgaggatgaacctgcagactgccacagccacatgctttgatgcggctcaggggaagacacgtaccctgatggagaaggactcctacccacgcttcctgaagtcgcctgcttaccgggacctggctgcccaagcctcagccgcctctgccactctgtccagctgcagcctggacgagccctcacacacctgagtctccacggcagtgaggaagccagccgggaagagaggttgagtcacccatccccgaggtggctgcccctgtgtgggaggcaggttctgcaaagcaagtgcaagaggacaaaaaaaaaaaaaaaaaaaaaaaaaatgcgctccagcagcctgtttgggaagcagcagtctctccttcagatactgtgggactcatgctggagaggagccgcccacttccaggacctgtgaataagggctaatgatgagggttggtggggctctctgtggggcaaaaaggtggtatgggggttagcactggctctcgttctcaccggagaaggaagtgttctagtgtggtttaggaaacatgtggataaagggaaccatgaaaatgagaggaggaaagacatccagatcagctgttttgcctgttgctcagttgactctgattgcatcctgttttcctaattcccagactgttctgggcacggaagggaccctggatgtggagtcttcccctttggccctcctcactggcctctgggctagcccagagtcccttagcttgtacctcgtaacactcctgtgtgtctgtccagccttgcagtcatgtcaaggccagcaagctgatgtgactcttgccccatgcgagatatttatacctcaaacactggcctgtgagccctttccaagtcagtggagagccctgaaaggaggctcacttgaatccagctcagtgctctgggtggccccctgcaggtggcccctgaccctgcgttgcagcagggtccacctgtgagcaggcccgccctggggcctcttcctggatgtgccctctctgagttctgtgctgtctcttggaggcagggcccaggagaacaaagtgtggaggcctcggggagtggcttttccagctctcatgccccgcagtgtggaacaaggcagaaaaggatcctaggaaataagtctcttggcggtccctgagagtcctgctgaaatccagccagtgttttttgtggtatgagaacaggcaaaaagagatgccccgagatagaaggggagccttgtgtttctttcctgcagacgtgagatgaacactggagtgggcagaggtggcccaggaccatggcacccttagagtgcagaagctggggggagaggctgcttcgaagggcaggactggggataatcagaacctgcctgtcacctcagggcatcactgaacaaacatttcctgatggcaactcctgcggcagagcccaggctggggaagtgaactacccagggcagcccctttgtggcccaggataatcaacactgttctctctgtaccatgagctcctccaggagattatttaagtgtattgtatcattggttttctgtgattgtcataacattgtttttgttattgttggtgctgttgttatttattattgtaatttcagtttgcctctactggagaatctcagcaggggtttcagcctgactgtctccctttctctaccagactctacctctgaatgtgctgggaacctcttggagcctgtcaggaactcctcactgtttaaatatttatttattgtgacaaatggagctggtttcctagatatgaatgatgtttgcaatccccattttcctgtttcagcatgttatattcttataaaataaaagcaaaagtcaaatatgaca

SEQ ID NO: 1959 - protein, 182 aa, Homo sapiens
MQFSIRVLARICTMLWFVDFFSYSFFFFLSFSRNFSEDVLGWRESFDLLLSSKNGVAAFHAFLKTEFSEENLEFWLACEEFKKIRSATKLASRAHQIFEEFICSEAPKEVNIDHETHELTRMNLQTATATCFDAAQGKTRTLMEKDSYPRFLKSPAYRDLAAQASAASATLSSCSLDEPSHT

SEQ ID NO: 1960 - DNA, 2936 bp, Homo sapiens
ataaaatggagatgatgatgaagagcttacttagccccgtgtccatcatggtaagagcctcgtaaagggtacttatcagtataatcagatgctgttttgcccaggtttgcaccctgtgcgcctgtcctcaggacccagcaggctcagacttgcctgcgatcaaagaaagccctgtgtgcctcccagacccaccacccccgtgcaaactctctcaacacgacaccgctgcgtgactttcctgctgttactagaggtcggcaggtacttttccctaggaaactgggtgtgcacgtctcatccccgtgccaattctcttgccgcttttccttccacacgcggcgtcctctgggcggagggtgcagctccgcgtgctccagctgccgcgaaagttgcacccggcccagtctggctgcgggccccgcctccgccttctcagcgcccagccccaccctccgattggtcagcagtgcccagccccgccccgctcctccgaggggatttaaagcagcggccgctcagtctgggcgcttgcaggctgctaaacccaaccgcagttgactagcacctgctaccgcgcctttgcttcctggcgcacgcggagcctcctggagcctgccaccatcctgcctactacgtgctgccctgcgcccgcagccatgtgccgcaccctggccgccttccccaccacctgcctggagagagccaaagagttcaagacacgtctggggatctttcttcacaaatcagagctgggctgcgatactgggagtactggcaagttcgagtggggcagtaaacacagcaaagagaatagaaacttctcagaagatgtgctggggtggagagagtcgttcgacctgctgctgagcagtaaaaatggagtggctgccttccacgctttcctgaagacagagttcagtgaggagaacctggagttctggctggcctgtgaggagttcaagaagatccgatcagctaccaagctggcctccagggcacaccagatctttgaggagttcatttgcagtgaggcccctaaagaggtcaacattgaccatgagacccacgagctgacgaggatgaacctgcagactgccacagccacatgctttgatgcggctcaggggaagacacgtaccctgatggagaaggactcctacccacgcttcctgaagtcgcctgcttaccgggacctggctgcccaagcctcagccgcctctgccactctgtccagctgcagcctggacgagccctcacacacctgagtctccacggcagtgaggaagccagccgggaagagaggttgagtcacccatccccgaggtggctgcccctgtgtgggaggcaggttctgcaaagcaagtgcaagaggacaaaaaaaaaaaaaaaaaaaaaaaaaatgcgctccagcagcctgtttgggaagcagcagtctctccttcagatactgtgggactcatgctggagaggagccgcccacttccaggacctgtgaataagggctaatgatgagggttggtggggctctctgtggggcaaaaaggtggtatgggggttagcactggctctcgttctcaccggagaaggaagtgttctagtgtggtttaggaaacatgtggataaagggaaccatgaaaatgagaggaggaaagacatccagatcagctgttttgcctgttgctcagttgactctgattgcatcctgttttcctaattcccagactgttctgggcacggaagggaccctggatgtggagtcttcccctttggccctcctcactggcctctgggctagcccagagtcccttagcttgtacctcgtaacactcctgtgtgtctgtccagccttgcagtcatgtcaaggccagcaagctgatgtgactcttgccccatgcgagatatttatacctcaaacactggcctgtgagccctttccaagtcagtggagagccctgaaaggaggctcacttgaatccagctcagtgctctgggtggccccctgcaggtggcccctgaccctgcgttgcagcagggtccacctgtgagcaggcccgccctggggcctcttcctggatgtgccctctctgagttctgtgctgtctcttggaggcagggcccaggagaacaaagtgtggaggcctcggggagtggcttttccagctctcatgccccgcagtgtggaacaaggcagaaaaggatcctaggaaataagtctcttggcggtccctgagagtcctgctgaaatccagccagtgttttttgtggtatgagaacaggcaaaaagagatgccccgagatagaaggggagccttgtgtttctttcctgcagacgtgagatgaacactggagtgggcagaggtggcccaggaccatggcacccttagagtgcagaagctggggggagaggctgcttcgaagggcaggactggggataatcagaacctgcctgtcacctcagggcatcactgaacaaacatttcctgatggcaactcctgcggcagagcccaggctggggaagtgaactacccagggcagcccctttgtggcccaggataatcaacactgttctctctgtaccatgagctcctccaggagattatttaagtgtattgtatcattggttttctgtgattgtcataacattgtttttgttattgttggtgctgttgttatttattattgtaatttcagtttgcctctactggagaatctcagcaggggtttcagcctgactgtctccctttctctaccagactctacctctgaatgtgctgggaacctcttggagcctgtcaggaactcctcactgtttaaatatttatttattgtgacaaatggagctggtttcctagatatgaatgatgtttgcaatccccattttcctgtttcagcatgttatattcttataaaataaaagcaaaagtcaaatatgaca

SEQ ID NO: 1961 - protein, 202 aa, Homo sapiens; identical to SEQ ID NO: 103

SEQ ID NO: 1962 - DNA, 1374 bp, Homo sapiens
ataaaatggagatgatgatgaagagcttacttagccccgtgtccatcatggtaagagcctcgtaaagggtacttatcagtataatcagatgctgttttgcccaggtttgcaccctgtgcgcctgtcctcaggacccagcaggctcagacttgcctgcgatcaaagaaagccctgtgtgcctcccagacccaccacccccgtgcaaactctctcaacacgacaccgctgcgtgactttcctgctgttactagaggtcggcaggtacttttccctaggaaactgggtgtgcacgtctcatccccgtgccaattctcttgccgcttttccttccacacgcggcgtcctctgggcggagggtgcagctccgcgtgctccagctgccgcgaaagttgcacccggcccagtctggctgcgggccccgcctccgccttctcagcgcccagccccaccctccgattggtcagcagtgcccagccccgccccgctcctccgaggggatttaaagcagcggccgctcagtctgggcgcttgcaggctgctaaacccaaccgcagttgactagcacctgctaccgcgcctttgcttcctggcgcacgcggagcctcctggagcctgccaccatcctgcctactacgtgctgccctgcgcccgcagccatgtgccgcaccctggccgccttccccaccacctgcctggagagagccaaagagttcaagacacgtctggggatctttcttcacaaatcagagctgggctgcgatactgggagtactggcaagttcgagtggggcagtaaacacagcaaagagaatagaaacttctcagaagatgtgctggggtggagagagtcgttcgacctgctgctgagcagtaaaaatggagtggctgccttccacgctttcctgaagacagagttcagtgaggagaacctggagttctggctggcctgtgaggagttcaagaagatccgatcagctaccaagctggcctccagggcacaccagatctttgaggagttcatttgcagtgaggcccctaaagaggtcaacattgaccatgagacccacgagctgacgaggatgaacctgcagactgccacagccacatgctttgatgcggctcaggggaagacacgtaccctgatggagaaggactcctacccacgcttcctgaagtcgcctgcttaccgggacctggctgcccaagcctcagccgcctctgccactctgtccagctgcagcctggacgagccctcacacacctgagtctccacggcagtgaggaagccagccgggaagagaggttgagtcacccatccccgaggtggctgcccctgtgtgggaggcaggttctgcaaagcaagtgcaagaggac

SEQ ID NO: 1963 - protein, 202 aa, Homo sapiens; identical to SEQ ID NO: 103

SEQ ID NO: 1964 - DNA, 882 bp, Homo sapiens
gcttgcaggctgctaaacccaaccgcagttgactagcacctgctaccgcgcctttgcttcctggcgcacgcggagcctcctggagcctgccaccatcctgcctactacgtgctgccctgcgcccgcagccatgtgccgcaccctggccgccttccccaccacctgcctggagagagccaaagagttcaagacacgtctggggatctttcttcacaaatcagagctgggctgcgatactgggagtactggcaagttcgagtggggcagtaaacacagcaaagagaatagaaacttctcagaagatgtgctggggtggagagagtcgttcgacctgctgctgagcagtaaaagtgagtaggagccttttgtgtctgtctctgggtggcacatgtgtactcatgtgctttggagccagccccaggactgctgagagcctgggcagaataatagtagtagtaataataataataatgatcccctagtgtgccagcctctattcaacatataaaggcaggtcattgttcaagaaaattatgttctaaaaatagagccattaattgcaattgctttcctttcttcttgtattccctgctgtccctccagctgacctatttcctcttctttcccgcaaccccagatggagtggctgccttccacgctttcctgaagacagagttcagtgaggagaacctggagttctggctggcctgtgaggagttcaagaagatccgatcagctaccaagctggcctccagggcacaccagatctttgaggagttcatttgcagtgaggcccctaaagaggttagagcccccatatgcccagtgaatcctcacgaccctgcctgctccttcccctctgagaatcagggctagagggga

SEQ ID NO: 1965 - protein, 75 aa, Homo sapiens
MCRTLAAFPTTCLERAKEFKTRLGIFLHKSELGCDTGSTGKFEWGSKHSKENRNFSEDVLGWRESFDLLLSSKSE

SEQ ID NO: 1966 - DNA, 604 bp, Homo sapiens
gcttgcaggctgctaaacccaaccgcagttgactagcacctgctaccgcgcctttgcttcctggcgcacgcggagcctcctggagcctgccaccatcctgcctactacgtgctgccctgcgcccgcagccatgtgccgcaccctggccgccttccccaccacctgcctggagagagccaaagagttcaagacacgtctggggatctttcttcacaaatcagagctgggctgcgatactgggagtactggcaagttcgagtggggcagtaaacacagcaaagagaagtaagtgttgctgaccagctcagggctccgagagggaagggagtgggaagggagtcatgaggagggaaatacagggagaagccaggacacgctaagtggaccttggcaacacctccctagagattttagtgggacttgttgctggtctgttatgactacttggctcatgggtgagtgggtaggtggctccagggctccaagtccatccacggatgagggcacacagggcatgaatgcctagttcccagactctcccacctcgggattcattgcacgtgcatccagggctaggacagaatccaagaccacttgaagtttt

SEQ ID NO: 1967 - protein, 52 aa, Homo sapiens
MCRTLAAFPTTCLERAKEFKTRLGIFLHKSELGCDTGSTGKFEWGSKHSKEK

SEQ ID NO: 1968 - DNA, 403 bp, Homo sapiens
cgcgtctggagtttcttccttctggtgggttcgtgatctcgctggctcaggagtgaagctgcagaccttcacggagattgtaaaatcaggaagtatatctaagtcacctccagtagccgtaactctaccttgtccagtaaaagtgctgcttgttgctgacgtttctgcccaaacatcatgaaatgtggagaagaaagaacactcagatgtgccctggagactttccttttatttttaaacagtttttttttccattgggtttgaccaactctatattcgacttgaacaaatccgaaggaaagcttccaattatggggaacaagtcctctgaagtggctaaattcccacacacacaaaagaaaaggtagggtggtgggggggagaaaaacagccagcaaaagga

SEQ ID NO: 1969 - protein, 61 aa, Homo sapiens
MWRRKNTQMCPGDFPFIFKQFFFPLGLTNSIFDLNKSEGKLPIMGNKSSEVAKFPHTQKKR

SEQ ID NO: 1970 - DNA, 796 bp, Homo sapiens
cgggctggtctcaaacttctggacacaaacaatcctccacattggcctcccaaaatgctggaattacaggtgtgagccactggaccagcaggactctaaattttggtgctcaaaaaacatttgttgagtaagtgaacctgagactatcaacaagcattattttaaaatcactagcaaaggagattgtaaaatcaggaagtatatctaagtcacctccagtagccgtaactctaccttgtccagtaaaaggacagtgtacaaatcatgaattcaaataaccaccatgcaggtcaagaagataaaatcagcagcacattccaggtcaccctcttgtctctaccatcccttctcatctctccaaatatgaccaataaccttagttttgtcagtgtttggaatttgtataaatgtgattgtacagaatgtaccctttcgtatctggtttctttcagtcaatactatgcctattttatttattcatgttaatgaatggaaaaatagttcatttattttaacttctgtttggcattccgttgtgtgatcattctacaatatatgtattttacctatagctggtgggctttgtgcggcttccagaatagtaatgttatatatagtgctattatattcatttttgtatgaatacaaatggtacctttgttttgttttgaataggaggggatttactagataaatgggttatgggtgttttcaactttgacagaccctaaaagtttctcaaagtaatagtaccaaattaccttctcaccaggaatataagaggtctatttttttc

SEQ ID NO: 1971 - protein, 73 aa, Homo sapiens
MNSNNHHAGQEDKISSTFQVTLLSLPSLLISPNMTNNLSFVSVWNLYKCDCTECTLSYLVSFSQYYAYFIYSC

SEQ ID NO: 1972 - DNA, 2204 bp, Homo sapiens
tatacttctctctttcaccagtctttaatttgcaaaaaggattattaatatcaaaacctgcaattacgtttgtaccaacctaatatttaaacgacatcacttaatctgcatttatcaagaagtactcagcatttcaaggccttctcctcgacaatgccgcagaaactactcatcaaattaagcaatgaattccacatagatatagccaaaggttgcaatccttgtgtggccctgcctggaagccttctctcattcagagctagtagatacaggaagaagagtgaaggaagaggaggagtgaaaataggcatggaagcctctaagcctccaggtactgggagcagagagagaggtcaattatacaaacacggaaagaccagaaacagactggaagaaaatatttgcaaaacatgtgtcaggaaaaggttgtgtatcctatatatataactaatttttgaactcatttgtaagataatcaacctgattaaaaagaaatgtgcaaaaatgtgagcagcatttcaccaaatatggtgtgtgtgtgtgtgtgtgtgtgtgtgtgtatgtgtgtgtgatgcataagcatgtggaaatatacccaacattgttaatcatttgagaaatacaaactaaaccataagaatacaccatcacatagttgttaagatggctaaaattacaaagtttgctaatacccagggttgttaaaagtgtggatcaactggacctctcattcattgttggtgggaatataaaatgctacaatcaactgggaaataaatagttcagcagtttcctattaagttaaagatacacttataaacagtcagtgattcaactcccagatatttacccagcagatatgaaaaatatccatacaaagcttatatccgcacaaaacttacactccccataatggaaaaaaaggatctctgctttagatctagttgttagagaaagtctgtataagaatgctttaacttaaagcttgattggaaggaagaagaaagccatgccaaatctaggaaaaatattaaacactaaacaagtagctggcacaaaagctctaagatagtaacaaaagtggctagaaagaaagctaatatttctttagaagaatgagctaatataattatggcaggcagtgaaattttcaagaaatatggaagccataccaaagaaaattctaaagcccagttgtagaattaaaaatcaaccatcagtattttccaacaacagtgtaactaaaaatattataagcaacagacaacagtattctgacttcacaaatatccagattgtgtgtttatattataattccttctctatgtataccatgtaaaacctccatgtatcttaaaagacagtgatgttaatatcaatactggcagaaataacttgactggtatataattaattgtccaatctacctgggcctggtggctcacacctgtaatcccagcactttgggaggctgaggcaggtagattacttgagcccaggaattcaagaccagtctgggcaacatgactaaaccccgtttctacaaaaattacaaaaattagcctagctcggcatggtggtgcatgcttgtagttccagctactcaggagattgaggtggaaaaatcaactgagcccaggaagttgaagctataatgagtcatgattgctctactgtacttcaccttgaacaacagagtgataacctgtctcaaaaaaaaaattggtcaatctaatgccacattatattttgctttatatttggggtatattttatttcatagtttattatttttcccttcatgagttctaatagttttctcctcgacctaaggttaatccacttttaccatatgcttatcatctagtgcatagaacctccctgtttgtcaaagcactctaattgttgctttttattcatttcagaatgaatgttttctatatgcctgctgcaatgcatatcttttcctgttacttattttccttgaactcatggattagagtttctcttctatattttttgtttgcaattttcttccttatttgttataattcaccttcaattaacttgtttggctaaagtatatgaaaacaaaacctttggaattcttgcacatgcaaaactgttactatgatgctctcacatatgtttgtataatgtgtataattgcttactatacatattaattaaagattcaaaattgc

SEQ ID NO: 1973 - protein, 97 aa, Homo sapiens
MPQKLLIKLSNEFHIDIAKGCNPCVALPGSLLSFRASRYRKKSEGRGGVKIGMEASKPPGTGSRERGQLYKHGKTRNRLEENICKTCVRKRLCILYI

SEQ ID NO: 1974 - DNA, 7956 bp, Homo sapiens
ccacctcggcctcccaaagtgttgggattacgggcatgagccacctctcccagcttgttcttgcattttgtaagatcacatagagtatcaaaactggaaaggacctgggccatcacttccctgagaaaaagtgactttctcaaggtcatgcagttagtagcaatgctggaactgaacgcctaccccgcagatcacaacatgacccgtgaaaggacctatcctgcaacactttggagtttcgtgccgacccaattagtggctttgtctttgggaaatttacttccccaaaacactgggacattgggatggaattcactcaccccaaatcatcaccctggttaaggagactaaagaatcagaagacatttgtgctttggggagcagaggccctcagggtatagagaaggaagaagagagaggttcactgtagtcctgaagcagaaataagacctgtggctgaaggaagccttagcaattcactccttcctcttcctgagaactctctgtaggaagtctcacctagcagaggcttcacagtatttcagagaagccaaagattgtttgcctctttggaaactgttatccttccatcatgactgtgtcactcctgccactgttccaccatagagatggcgtcctttgcagcaaaccgtaagttataaggatgagggaagaagagtagagggccaaaaggattccattttgaggaaaaactacagtttgccttgccaggtagaagaatcaggcgcccagacaccatgtcacaaccctccagaactgacgttggcaggaagtagagactttgttgcctgtgtcccccatcctcaccatgtcttcgactcagggcaatggggaacactggaagtccctggagtcagtgggcatcagccgcaaagagctagcgatggccgaagccctgcagatggagtatgatgccctgtcccggctccggcatgacaaggaggagaacagagccaagcagaacgcagacccctctctcatcagctgggatgagcctggggtagacttttacagcaagccagcaggaaggcggaccgacctcaagctgttacgcggtctctctggctctgatcctacccttaactacaactcactctccccacaggaagggccgcccaaccactctacctcccaagggccacagcctggctcagatccctggcccaaaggctccctgtctggagactatctctacatttttgatggttcagatgggggagtctcttcgtccccaggaccaggggacatagagggctcttgcaagaaactatccccacctcctctgcctccccgagcttctatctgggatacccctcccctgcctcccagaaaggggtccccctcatcctccaagatctcccagcccagtgacatcaacactttctctttggtcgaacaattgccgggcaaactgctagagcatcggatcctagaagaggaagaggtgctgggaggtgggggtcaggggcgcctactggggtctgtggactatgatggtatcaatgatgcaattactaggctcaacttgaaatcgacctatgatgcggagatgttgcgggatgccaccaggggctggaaggagggccgagggccgctggacttcagcaaagacacctctggaaaacccgtggccaggagcaagactatgccccctcaggtgcccccccgcacctatgcctcccgctatggcaaccgaaagaatgcgacgcctggcaagaaccgccggatttctgcagccccggtgggctcccggccccacactgttgccaatggccatgagttgtttgaggtctcagaagagagagatgaggaggttgctgcattttgccacatgctggatatccttcgatctggctctgacatccaagactacttcctcactggctatgtctggagtgctgtcacccctagcccagagcacctcggggatgaggtcaacctgaaggtgactgtgttgtgtgacaggcttcaagaggcactcactttcacctgcaactgttcctccactgtagacttgcttatctaccagaccctgtgctacacccatgatgacctgaggaatgtggacgtgggtgactttgtgctaaagccctgcgggctggaggagttcctgcagaacaagcatgccttgggcagtcatgagtacatccaatactgccgcaagtttgacattgacattcggctacagctgatggagcagaaggttgtgcgcagtgacctggcccggacggtgaatgatgaccagagcccctccaccttgaactacctcgtccatctccaagagaggcctgtcaagcagaccatcagcaggcaggccctgagtcttctgttcgacacttaccacaatgaggtggatgccttcctgctggctgatggagacttcccactgaaggctgacagggtggtccagtccgtcaaggccatctgcaacgccctggccgccgtggaaacccctgagatcaccagtgctctcaaccagctgcccccctgcccctcccgcatgcagcctaaaattcagaaggatcccagtgtcttggctgtgagggaaaaccgagagaaggtcgtggaagccctgaccgctgccatcttggacctggtggagctgtactgcaacacattcaacgcagacttccagacggcagtgcccgggagccgcaagcatgacctggtccaggaggcctgccatttcgccaggtccctggccttcactgtctatgccacccaccgcatccccatcatctgggctaccagctatgaagatttctacctctcctgctccctcagccatggcggcaaggagctgtgcagccccctgcagacccgaagagctcacttctccaagtacctcttccacctcatcgtctgggaccagcagatctgcttcccagtgcaggtgaaccggctgcctcgggagacactgctgtgtgccactctctatgctctgcccatccccccaccggggagctcctcagaggccaataagcagcggcgggtgcctgaagccctgggctgggtcactaccccactcttcaacttcaggcaggtcctgacctgtggccggaagcttctgggtttgtggccagcaacacaggaaaatcccagcgcccgttggagtgcacctaatttccaccagccagacagtgtcatcctgcagattgacttccccacctcggcctttgacatcaagttcaccagcccccctggagacaagttcagcccccgctatgagtttggcagcctccgggaagaagaccagcgcaagcttaaagacatcatgcagaaagagtccttgtactggctcactgatgctgacaagaagcgcctgtgggagaagcgatattactgccactcggaggtgagctcgctccccctggtgctcgccagcgcccccagctgggagtgggcttgcctgcctgacatctatgttctcctgaagcagtggacccacatgaaccaccaggatgccctggggctcctgcatgccaccttcccggaccaggaggtgcgtcgtatggctgtgcagtggattggctcactctcagatgctgagctgctagactacctgccccagctggtacaggccctgaagtatgaatgctacctggacagcccgttggtgcgcttcctcctgaaacgagctgtgtctgacttgagagtgactcactacttcttctggttactgaaggacggcctcaaggactctcagttcagcatccgctaccagtatctgctggcagccttactgtgctgctgtggcaaggggctgagagaagagtttaaccgccagtgctggcttgtcaatgccctggccaaactggcccagcaggtccgggaggcagccccatctgcaaggcagggaatcctccgcacgggcctggaggaggtgaagcagttctttgccctcaatggctcgtgccgcttgccactcagccccagtctgctggttaagggaattgtgcccagggactgttcctacttcaactccaatgctgtccccctcaaactctccttccaaaatgtggatcccctgggtgagaacatccgtgtcatcttcaagtgtggggacgaccttcgccaggacatgctaacgctgcagatgattcgcatcatgagcaagatctgggtccaggaggggctggacatgcgcatggtcatcttccgctgcttctccaccggccggggcagagggatggtggagatgatccctaatgctgagaccctgcgtaagatccaggtggagcatggggtgaccggctcgttcaaggaccggcccctggcagactggctgcagaaacacaaccctggggaggacgagtatgagaaggctgtggagaactttatctactcctgcgctggctgctgcgtggccacgtacgtcttgggcatctgtgaccgacataatgacaacatcatgctgaagaccactggtcacatgttccacattgattttggccgcttcctgggccatgcccagatgtttggcaacatcaagcgggaccgtgccccctttgtcttcacctcggacatggcgtatgtcatcaacgggggtgacaagccttccagccgcttccatgattttgttgacctttgctgccaagcctacaacctcattcgcaagcacacccacctcttcctcaaccttctgggcctgatgttgtcctgtgggatccctgaactctcagacctggaggacctcaagtatgtgtacgatgccctgaggcctcaggatacagaggccaatgccactacctacttcactaggttgattgagtccagcctgggcagtgtagccacaaagctcaattttttcatccataatctggctcagatgaagttcacgggctcagatgaccggctgaccctctcctttgcctcccgaacacacactctcaagagctctggccgaatcagtgatgttttcctctgccgccatgagaagatcttccaccccaacaaaggctatatatatgtggtaaaggtgatgcgagagaacactcacgaggccacctacatccagcggacctttgaggagttccaggaattacacaataagttgcggctgctcttcccttcttcccacttgcccagcttccctagtcgcttcgtgatcggccgctcccggggagaggcggtggccgagcggcggagggaggagctaaacggttacatctggcacttgatccacgcaccccctgaggtggccgagtgtgatttggtgtacaccttcttccacccactgccccgggatgagaaggctatgggcaccagcccagctcctaagtcctcagatggcacatgggcccggcccgtcggaaaggtgggaggggaggtgaagctgtccatctcctacaaaaacaataaactcttcatcatggtgatgcatattcggggcttgcaactgctccaggatggaaatgaccctgacccctatgtgaaaatttacctccttcctgaccctcagaaaaccactaagaggaaaaccaaagtggcccggaaaacctgcaatcctacctacaatgagatgttggtatatgatgggatccccaagggtgacctgcagcagcgggagctccagctgagcgtgctgagtgagcagggattctgggagaacgtcctcctcggtgaggtgaacatccgcctgcgagagctggacctggctcaggagaagaccggctggttcgccctgggatctcgaagtcatggcaccttgtgagcccagcagagccaccacccagcatcccaggctggtggcaggagctgggggagaggactctcccctgtgagactcctccttgtgaagggccagggccctgggcaggcctccagctcggtccaggtgattctggcctctgtggtaggaggcagggagagtaagacatgctctgctgtctcttcctctggagactgaacttgggttggttgtgatgagcagccccttggaggctgtgaggttgcagcaaagttttaagtttaccttgtgtcaagggagcaatgcttggtttggggagtgtgtggggtgggctgtatgaagtagcattttgggggtgggtgggtggatatcttaatttttatttttaaaaaatgaaatagtgatgttgtcctaactgggacaggaagccttgcgagaagggacgtacctatgccccagaaggcaagagaggaagactatttggactttttgtatgattaaggttcttattggacttttccctaggttttttttttttgttattgttgttgttgtttcgttttctagctataggaactatctggggaggggcccagtgggtcctcggccagagccctctctaaggacaggttggggagggttggggagggctgcctgtgctggactgaggcttgtgccactgggcctttctgattttgcctccaaaggagagcgctgtgatacctacatgtgtaaggaagggccttccgtattggggttctgccaaggacccgtattcagggacccatgctcttttggggggacttttcctcttgtcttccctactttattaggacttgccctgaataccattttctaccccttgcccctccattctcctggcccttctgggggtcagctggtctctatgaatatgctgggggtgcttccccataggtctctcccttcatttgtctctggtgggacaaaatactgactcagtccttagatgtagtttcacccaagagcatcttggccctgggaagaggtccctaggctgcagatgctactgactgcttgctaggtagcctctggaaagcattccccatccatcactccccacttctttctgctgtgctgcttccctcccaaactccatttctgtcaccctttttataagacttttcctcattctgtggggccataaacctatttagtctggagccaaagggatgccctatctgaaggaaaggggcatggggtgggggattccatcaaaactgttgttttttgccccatgatttttctttggtcagtaggaggctggattggagtggtgattattcccctggagctaagctcaggagcccgaagggagagactgagactgactcccttatctcttcatattctttattccctaccagatggatttttttttttttttttggagacggagtctcgccctgtcgccaggctggagtgtagtggcatgatctcgactcactgcaaaatctgcctcccgggttcaagcgattctcctacctcagcctcccgagtagctgggattacaggcatgtgccaccacgccaagctaatttttgtatttttagtagagacggggtttcaccatgttggccaggatggtctcgatctcttgacctcgtgatctgcctgccttggcctcccaaagtgctgggattacaggcgtgagccaccatgccccgccccagatggattttacatttgctcttttgtgtttcgctccaaagggttgtcttcctcgccaaaaggagggagggactttgaatttgatatgaatctttaaaaccagaattggctggatatttcccatgattgggaaaagagtgaaatgaggacattctgtaaactgtccctccctaattccaaggatcagaaactccccgttttgctgactcattccataactggagaaagaagctccattgaccgaagccacagggcagcatggaagtttaaattttctctaaaattaaaatgccaaggataaagctggctgcttccaggagggggaagaggagtggggagtgggcggtgaaacttttccagatgaacggaccataaatgtgttactggctttgtgcctgtagctcattttattatgacctatatgctcctgatttaaagagatctgtgtactgtttacttcccacttcccagaatcccttgtatctcctttctcgggaattgtattttctaataaatgacatttgagaaaaaaatga

SEQ ID NO: 1975 - protein, 1634 aa, Homo sapiens
MSSTQGNGEHWKSLESVGISRKELAMAEALQMEYDALSRLRHDKEENRAKQNADPSLISWDEPGVDFYSKPAGRRTDLKLLRGLSGSDPTLNYNSLSPQEGPPNHSTSQGPQPGSDPWPKGSLSGDYLYIFDGSDGGVSSSPGPGDIEGSCKKLSPPPLPPRASIWDTPPLPPRKGSPSSSKISQPSDINTFSLVEQLPGKLLEHRILEEEEVLGGGGQGRLLGSVDYDGINDAITRLNLKSTYDAEMLRDATRGWKEGRGPLDFSKDTSGKPVARSKTMPPQVPPRTYASRYGNRKNATPGKNRRISAAPVGSRPHTVANGHELFEVSEERDEEVAAFCHMLDILRSGSDIQDYFLTGYVWSAVTPSPEHLGDEVNLKVTVLCDRLQEALTFTCNCSSTVDLLIYQTLCYTHDDLRNVDVGDFVLKPCGLEEFLQNKHALGSHEYIQYCRKFDIDIRLQLMEQKVVRSDLARTVNDDQSPSTLNYLVHLQERPVKQTISRQALSLLFDTYHNEVDAFLLADGDFPLKADRVVQSVKAICNALAAVETPEITSALNQLPPCPSRMQPKIQKDPSVLAVRENREKVVEALTAAILDLVELYCNTFNADFQTAVPGSRKHDLVQEACHFARSLAFTVYATHRIPIIWATSYEDFYLSCSLSHGGKELCSPLQTRRAHFSKYLFHLIVWDQQICFPVQVNRLPRETLLCATLYALPIPPPGSSSEANKQRRVPEALGWVTTPLFNFRQVLTCGRKLLGLWPATQENPSARWSAPNFHQPDSVILQIDFPTSAFDIKFTSPPGDKFSPRYEFGSLREEDQRKLKDIMQKESLYWLTDADKKRLWEKRYYCHSEVSSLPLVLASAPSWEWACLPDIYVLLKQWTHMNHQDALGLLHATFPDQEVRRMAVQWIGSLSDAELLDYLPQLVQALKYECYLDSPLVRFLLKRAVSDLRVTHYFFWLLKDGLKDSQFSIRYQYLLAALLCCCGKGLREEFNRQCWLVNALAKLAQQVREAAPSARQGILRTGLEEVKQFFALNGSCRLPLSPSLLVKGIVPRDCSYFNSNAVPLKLSFQNVDPLGENIRVIFKCGDDLRQDMLTLQMIRIMSKIWVQEGLDMRMVIFRCFSTGRGRGMVEMIPNAETLRKIQVEHGVTGSFKDRPLADWLQKHNPGEDEYEKAVENFIYSCAGCCVATYVLGICDRHNDNIMLKTTGHMFHIDFGRFLGHAQMFGNIKRDRAPFVFTSDMAYVINGGDKPSSRFHDFVDLCCQAYNLIRKHTHLFLNLLGLMLSCGIPELSDLEDLKYVYDALRPQDTEANATTYFTRLIESSLGSVATKLNFFIHNLAQMKFTGSDDRLTLSFASRTHTLKSSGRISDVFLCRHEKIFHPNKGYIYVVKVMRENTHEATYIQRTFEEFQELHNKLRLLFPSSHLPSFPSRFVIGRSRGEAVAERRREELNGYIWHLIHAPPEVAECDLVYTFFHPLPRDEKAMGTSPAPKSSDGTWARPVGKVGGEVKLSISYKNNKLFIMVMHIRGLQLLQDGNDPDPYVKIYLLPDPQKTTKRKTKVARKTCNPTYNEMLVYDGIPKGDLQQRELQLSVLSEQGFWENVLLGEVNIRLRELDLAQEKTGWFALGSRSHGTL

SEQ ID NO: 1976 - DNA, 2735 bp, Homo sapiens
ggctcgcggcggattcggcgctgcggctggagccggcggccgggtgcctgcctgtccaggcagggtctggccgagcgtcgcgtcgccgtgcagtgcgccgggtgtccgggagatggcttcccctctctcgcccgctgctgccgctattgtctcacccggggtggcctgactctgcgagctcgcgcacgctctcggcggagagcacccctccccacccccacaagctggtccttgcgccctttgctgcctctccctctgccccttggagcctagggtctgtgcggagcctggagaggggagcggcccgggagcaggcggcgtgcggccggccagctcctctcgcgctggtgcaagaggcgcctggagccgcagagcgagcccgggaggcgcggagcgagcagcccacgtcgccaggcacaagacacgtcggatgttgcagcagagccagcagctagcgcaggcgcccagacaccatgtcacaaccctccagaactgacgttggcaggaagtagagactttgttgcctgtgtcccccatcctcaccatgtcttcgactcagggcaatggggaacactggaagtccctggagtcagtgggcatcagccgcaaagagctagcgatggccgaagccctgcagatggagtatgatgccctgtcccggctccggcatgacaaggaggagaacagagccaagcagaacgcagacccctctctcatcagctgggatgagcctggggtagacttttacagcaagccagcaggaaggcggaccgacctcaagctgttacgcggtctctctggctctgatcctacccttaactacaactcactctccccacaggaagggccgcccaaccactctacctcccaagggccacagcctggctcagatccctggcccaaaggctccctgtctggagactatctctacatttttgatggttcagatgggggagtctcttcgtccccaggaccaggggacatagagggctcttgcaagaaactatccccacctcctctgcctccccgagcttctatctgggatacccctcccctgcctcccagaaaggggtccccctcatcctccaagatctcccagcccagtgacatcaacactttctctttggtcgaacaattgccgggcaaactgctagagcatcggatcctagaagaggaagaggtgctgggaggtgggggtcaggggcgcctactggggtctgtggactatgatggtatcaatgatgcaattactaggctcaacttgaaatcgacctatgatgcggagatgttgcgggatgccaccaggggctggaaggagggccgagggccgctggacttcagcaaagacacctctggaaaacccgtggccaggagcaagactatgccccctcaggtgcccccccgcacctatgcctcccgctatggcaaccgaaagaatgcgacgcctggcaagaaccgccggatttctgcagccccggtgggctcccggccccacactgttgccaatggccatgagttgtttgaggtctcagaagagagagatgaggaggttgctgcattttgccacatgctggatatccttcgatctggctctgacatccaagactacttcctcactggctatgtctggagtgctgtcacccctagcccagagcacctcggggatgaggtcaacctgaaggtgactgtgttgtgtgacaggcttcaagaggcactcactttcacctgcaactgttcctccactgtagacttgcttatctaccagaccctgtgctacacccatgatgacctgaggaatgtggacgtgggtgactttgtgctaaagccctgcgggctggaggagttcctgcagaacaagcatgccttgggcagtcatgagtacatccaatactgccgcaagtttgacattgacattcggctacagctgatggagcagaaggttgtgcgcagtgacctggcccggacggtgaatgatgaccagagcccctccaccttgaactacctcgtccatctccaagagaggcctgtcaagcagaccatcagcaggcaggccctgagtcttctgttcgacacttaccacaatgaggtggatgccttcctgctggctgatggagacttcccactgaaggctgacagggtggtccagtccgtcaaggccatctgcaacgccctggccgccgtggaaacccctgagatcaccagtgctctcaaccagctgcccccctgcccctcccgcatgcagcctaaaattcagaaggatcccagtgtcttggctgtgagggaaaaccgagagaaggtcgtggaagccctgaccgctgccatcttggacctggtggagctgtactgcaacacattcaacgcagacttccagacggcagtgcccgggagccgcaagcatgacctggtccaggaggcctgccatttcgccaggtccctggccttcactgtctatgccacccaccgcatccccatcatctgggctaccagctatgaagatttctacctctcctgctccctcagccatggcggcaaggagctgtgcagccccctgcagacccgaagagctcacttctccaagtacctcttccacctcatcgtctgggaccagcagtaagcccttcccccaggcttcagtgcccaggccactgtagacctgctcagcctctgaaatatccctggggccagataactagtccaggactaatgataaaaccaggctccttgttaaccctaac

SEQ ID NO: 1977 - protein, 689 aa, Homo sapiens
MSSTQGNGEHWKSLESVGISRKELAMAEALQMEYDALSRLRHDKEENRAKQNADPSLISWDEPGVDFYSKPAGRRTDLKLLRGLSGSDPTLNYNSLSPQEGPPNHSTSQGPQPGSDPWPKGSLSGDYLYIFDGSDGGVSSSPGPGDIEGSCKKLSPPPLPPRASIWDTPPLPPRKGSPSSSKISQPSDINTFSLVEQLPGKLLEHRILEEEEVLGGGGQGRLLGSVDYDGINDAITRLNLKSTYDAEMLRDATRGWKEGRGPLDFSKDTSGKPVARSKTMPPQVPPRTYASRYGNRKNATPGKNRRISAAPVGSRPHTVANGHELFEVSEERDEEVAAFCHMLDILRSGSDIQDYFLTGYVWSAVTPSPEHLGDEVNLKVTVLCDRLQEALTFTCNCSSTVDLLIYQTLCYTHDDLRNVDVGDFVLKPCGLEEFLQNKHALGSHEYIQYCRKFDIDIRLQLMEQKVVRSDLARTVNDDQSPSTLNYLVHLQERPVKQTISRQALSLLFDTYHNEVDAFLLADGDFPLKADRVVQSVKAICNALAAVETPEITSALNQLPPCPSRMQPKIQKDPSVLAVRENREKVVEALTAAILDLVELYCNTFNADFQTAVPGSRKHDLVQEACHFARSLAFTVYATHRIPIIWATSYEDFYLSCSLSHGGKELCSPLQTRRAHFSKYLFHLIVWDQQ

SEQ ID NO: 1978 - DNA, 1014 bp, Homo sapiens
tgcccctggctgctgatgccttctgtgacagcttagcattctacttcattctgtcctggtttcctccttagccattgtttaaggggcactggggttttcccaccttgtgtctagcctttgggaaccttcccaactctgaagagctacacagttcttccttcctccgcttctcctaagagagtccccccaaaagcagaatcagctcctgggataagccacatccctagagctcagggatttttaaaggccctgctctgagaggtggggctgttcccgctatttatagggactgggagattcctgttcccagctctgagttcctcacacccagctgggcctgctcactgagtcagggcaccctggtaggtggtcacctctgtcactccttctctctcctgcctcccctactccctcacccttccccatcccctgcatgtcatcagagttctgagacagagctcagcccagaatctccttgaagaagcggacacaaagcaaaaagctcttgccagttctgagtggggaaatgcggccttggtcctccccggctcagcttgttgcaggggctcagcctgctgggaggggggaccccttgggccctcggcctataccaccgccccgctttcgtcgggcttccagccagagggaacctccttatcccaggccagcggagccagctctggaactggctggctccaaatgccagcctgatacccctgctgccagcctctgcccggcagactcccccagccagcatcgggtgatgccaccagggcctgccagctgggcaaacgtgggctcccggccccacactgttgccaatggccatgagttgtttgaggtctcagaagagagagatgaggaggttgctgcattttgccacatgctggatatccttcgatctggctctgacatccaagactacttcctcactggctatgtctggagtgctgtcacccctagcccagagcacctcggggatgaggtcaacctgaaggtgactgtgttgtgtga

SEQ ID NO: 1979 - protein, 161 aa, Homo sapiens
MRPWSSPAQLVAGAQPAGRGDPLGPRPIPPPRFRRASSQREPPYPRPAEPALELAGSKCQPDTPAASLCPADSPSQHRVMPPGPASWANVGSRPHTVANGHELFEVSEERDEEVAAFCHMLDILRSGSDIQDYFLTGYVWSAVTPSPEHLGDEVNLKVTVL

SEQ ID NO: 1980 - DNA, 595 bp, Homo sapiens
acactcccaacatgtaggtggcctcatcagaaggtaaaaactgaagaaaaaaatcattcaaactcccatatactagatctttctcatttaatcttgaggtttccatgttgagaggagtgaaaggagatttctgtacccattagccaagattgtctgaaacaaatcccaggaagatgttttgaaagaagaatacataagccttatgactcagttctcagtagcttcttcagtatctttcttttaaaatatcattttaaagtcttgcattatagcactaaaaaagctaaaagaatgctaaaattgcactaaatccaaccacgccagcaagcctgctcaattcatttcttcagacatcactccgaaattgccagagtggtttcccactgacagacttcatcgctgtactgcacatctcttcactacaaatggggagatgagacagagacaaaaagagaaatggatttactgtgctggggaagttaagcacacactgggttggaatttcatttccactgaattagaagctctggctcagcacggatgacacagtgatgctcctttaataacacaaaataaataaaacatggaaaaggtt

SEQ ID NO: 1981 - protein, 36 aa, Homo sapiens
MRQRQKEKWIYCAGEVKHTLGWNFISTELEALAQHG

SEQ ID NO: 1982 - DNA, 385 bp, Homo sapiens
gctggagcacactgaagctggagcacactgaagtggaagatggggctgcagacagagactgggcagcctctgctccagggaggcccgagagccagagagcagattccataagaagaataactcccattcctcatgcatgagaccctctgctaaatgcttcctgtgcaccacctccagaaatcctcccaagccaggacaccagcagtattacaggaactggatgacaaaaagaagagccgatataaccaggaacctactctggccaccccaagtaaggatctaaagtccagcctcctcctccactgccctcaaggcctttcctcatgaaagcagaggttctgaatgctgatttctgttttaaagcccaataactctttaaacatct

SEQ ID NO: 1983 - protein, 57 aa, Homo sapiens
MLPVHHLQKSSQARTPAVLQELDDKKKSRYNQEPTLATPSKDLKSSLLLHCPQGLSS

SEQ ID NO: 1984 - DNA, 666 bp, Homo sapiens
agacaggaagcatgagggcaggctcatcagtgtcagagcaggggagaccagcacagacaccttacaagcagaatgaccttctgtggctacagagaaaggcttcaggcaaagagatgcagctctgggccccagagtccgctggagcacactgaagctggagcacactgaagtggaagatggggctgcagacagagactgggcagcctctgctccagggaggcccgagagccagagagcagattccataagaagaataactcccattcctcatgcatgagaccctctgctaaatgcttcctgtgcaccacctccagaaatcctcccaagccaggacaccagcagtattacaggtaagaaaatggaggctcccagagatttgacaacctgcccgcagcaatgaccaaatcagacttggtgctaagtctgcacctccccaaagtcagtgtgtttgtatgctctgctgccactgccccccgctggccctgcacatgatgtgaaccatcaggcagacctggagttctgtctcctgggtgggctgcttgccaacaccagggtggctggcccctgcctgtgtcaggtcctgcagtgttgactctcttcgtgtgatgttgggcaggtggagctggttgtgctgagcctgaggaaacatccaatgtgccaaacttt

SEQ ID NO: 1985 - protein, 46 aa, Homo sapiens
MRAGSSVSEQGRPAQTPYKQNDLLWLQRKASGKEMQLWAPESAGAH

SEQ ID NO: 1986 - DNA, 338 bp, Homo sapiens
gagctgccttggtgctgtaaaggtaagaaaatggaggctcccagagatttgacaacctgcccgcagcaatgaccaaatcagacttggtgctaagtctgcacctccccaaagtcagtgtgtttgtatgctctgctgccactgccccccgctggccctgcacatgatgtgaaccatcaggcagacctggagttctgtctcctgggtgggctgcttgccaacaccagggtggctggcccctgcctgtgtcaggtcctgcagtgttgactctcttcgtgtgatgttgggcaggtggagctggttgtgctgagcctgaggaaacatccaatgtgccaaacttt

SEQ ID NO: 1987 - protein, 31 aa, Homo sapiens
MTKSDLVLSLHLPKVSVFVCSAATAPRWPCT

SEQ ID NO: 1988 - DNA, 475 bp, Homo sapiens
cctttttctcattgttatggtaggagtgacattctcttgtggctttctacaaactgaatagaaatagatctcctagggaaggtggaaggcttttcattcaaaaaatctatttctttagtagatacaggaacattaaaattgtcttcttcatctttggggactgtggctgtcagtggagtaacgagaaagaggaacaaagatgggaaaagaccagcagctatttgtgaggctgtggccattcctgcctccacccccagaccacctgctgaagggagagatgttaaaaagaaccacgttttccattcctcaaagccaaacaaacacagagagtcggctgagcctctctaaatcagtgactgccaggggagtaaaatgctgaacccaccaaaaggccacatctgcgaaataaatccatgtcctgagagtcaaatcaaaacagatgtggtcccacagcagggacccctcccatggagag

SEQ ID NO: 1989 - protein, 59 aa, Homo sapiens
MGKDQQLFVRLWPFLPPPPDHLLKGEMLKRTTFSIPQSQTNTESRLSLSKSVTARGVKC

SEQ ID NO: 1990 - DNA, 1418 bp, Homo sapiens
ggagctggggccgggcttcggcgcagaggcaggaagaggaagcggcacccgcttcggggacccagccggcggccaggccaccgcgcccacccggccgatggcaccgtgttcctgcgcctcgggagggaggaggctctgcgcgggactgcaggttctgccccgcatcggagtgatcgctgagcctgacgctctcgaaggctgggcctggggcccgcaatctactccggaggctttcccactgggcagggtcgctagcagggtgccacccgggtgcagtgaggacctggagcccctgccccaggctgtgaggagacttgaccagagctgcctgaatgctccacggagcaggaggaagcattcccatgtgaaagatgagctccctataaaagcaacgctcttatcatcgagaacagaaagttgaagccaagagagagctccacaagctgaccttgttaaactaacccttatcttcttagtcgcttctttacccaattaactaccctagccgaagcccctttgccttattacattttgcaacagtgttcgttgtccaattcagtatacaagtgagtgactctggatgctttttggggtcttcgtttccttatgagggcttctgtgccatgtaaaacttgtattaaataaatttgtatgcttttctcctgttaatctgtctatatcgattgaactttagggtccagtcagaacccaaagaggatggaggtggagttttggctcctctacagctatctgaataatcaaaattcaagatattccatgttctttctgagtttctttgaaattaaaaatgcagacaaccactcaactaatacgtcagcgagatacgttttctgtccttattgccttactgatgaaattgcctttattcataaaaaataaatgtgggagtcttgtttatttatttctaatgacattaacttgacattaaccttggtgctcttgggaaccataaatgggccctgtactacttgttacagagtataaattcccagaactacaagtacatcatattcctcaagttactgaagaatttcatgatccatgtgtcaggcctctgagcccaagctaagtcatcatatcccctgtgacctgcacgtatacatccagatggccggttcctgccttaactgatgacattccaccacaaaagaagtgaaaatggcctgttcctgccttaactgatgacattgtcttgtgaaattccttctcctggctcatcctggctcaaaagctcccccactgaataccttgtgacccccaactcctgcccgccagagagccacccccctttttcctttacctacccaagtcctataaaacagcgccacccctatctccctttgctgactctcttttcggactcagcccacttgcacccaggtgattaaaagctttat

SEQ ID NO: 1991 - protein, 107 aa, Homo sapiens
MAPCSCASGGRRLCAGLQVLPRIGVIAEPDALEGWAWGPQSTPEAFPLGRVASRVPPGCSEDLEPLPQAVRRLDQSCLNAPRSRRKHSHVKDELPIKATLLSSRTES

SEQ ID NO: 1992 - DNA, 944 bp, Homo sapiens
gttcctgcgcctcgggagggaggaggctctgcgcgggactgcaggttctgccccgcatcggagtgatcgctgagcctgacgctctcgaaggctgggcctggggcccgcaatctactccggaggctttcccactgggcagggtcgctagcagggaggaagcattcccatgtgaaagatgagctccctataaaagcaacgctcttatcatcgagaacagaaagttgaagccaagagagagctccacaagctgaccttgttaaactaacccttatcttcttagtcgcttctttacccaattaactaccctagccgaagcccctttgccttattacattttgcaacagtgttcgttgtccaattcagtatacaagtgagtgactctggatgctttttggggtcttcgtttccttatgagggcttctgtgccatgtaaaacttgtattaaataaatttgtatgcttttctcctgttaatctgtctatatcgattgaactttagggtccagtcagaacccaaagaggatggaggtggagttttggctcctctacagctatctgaataatcaaaattcaagatattccatgttctttctgagtttctttgaaattaaaaatgcagacaaccactcaactaatacgtcagcgagatacgttttctgtccttattgccttactgatgaaattgcctttattcataaaaaataaatgtgggagtcttgtttatttatttctaatgacattaacttgacattaaccttggtgctcttgggaaccataaatgggccctgtactacttgttacagagtataaattcccagaactacaagtacatcatattcctcaagttactgaagaatttcatgatccatgtgtcaggcctctgagcccaagctaagtcatcatatcccctgtgacctgcacgtatacatccagatggccggttcc

SEQ ID NO: 1993 - protein, 60 aa, Homo sapiens
MEVEFWLLYSYLNNQNSRYSMFFLSFFEIKNADNHSTNTSARYVFCPYCLTDEIAFIHKK

SEQ ID NO: 1994 - DNA, 1866 bp, Homo sapiens
gacaaccggcgtggaggcgtggccacagccgcccagaaattctacccaagctccctcagcaccatgtaccgagcacttcggctcctcgcgcgctcgcgtcccctcgtgcgggctccagccgcagccttagcttcggctcccggcttgggtggcgcggccgtgccctcgttttggcctccgaacgcggctcgaatggcaagccaaaattccttccggatagaatatgatacctttggtgaactaaaggtgccaaatgataagtattatggcgcccagaccgtgagatctacgatgaactttaagattggaggtgtgacagaacgcatgccaaccccagttattaaagcttttggcatcttgaagcgagcggccgctgaagtaaaccaggattatggtcttgatccaaagattgctaatgcaataatgaaggcagcagatgaggtagctgaaggtaaattaaatgatcattttcctctcgtggtatggcagactggatcaggaactcagacaaatatgaatgtaaatgaagtcattagcaatagagcaattgaaatgttaggaggtgaacttggcagcaagatacctgtgcatcccaacgatcatgttaataaaagccagagctcaaatgatacttttcccacagcaatgcacattgctgctgcaatagaagttcatgaagtactgttaccaggactacagaagttacatgatgctcttgatgcaaaatccaaagagtttgcacagatcatcaagattggacgtactcatactcaggatgctgttccacttactcttgggcaggaatttagtggttatgttcaacaagtaaaatatgcaatgacaagaataaaagctgccatgccaagaatctatgagctcgcagctggaggcactgctgttggtacaggtttaaatactagaattggctttgcagaaaaggttgctgcaaaagtggctgcacttacaggcttgccttttgtcactgctccgaataaatttgaagctctggctgctcatgacgctctggttgagctcagtggagccatgaacactactgcctgcagtctgatgaagatagcaaatgatattcgatttttgggttctggtcctcggtcaggtctgggagaattgatcttgcctgaaaatgaaccaggaagcagtatcatgccaggcaaggtgaaccctactcagtgtgaagcaatgaccatggttgcagcccaagtcatggggaaccatgttgctgtcactgtcggaggcagcaatggacattttgagttgaatgttttcaagccaatgatgattaaaaatgtgttacactcagccaggctgctgggggatgcttcagtttcctttacagaaaactgcgtggtgggaatccaggccaatacagaaaggatcaacaagctgatgaatgagtctctaatgttggtgacagctctcaatcctcatatagggtatgacaaggcagcaaagattgctaagacagcacacaaaaatggatcaaccttaaaggaaactgctatcgaacttggctatctcacagcagagcagtttgacgaatgggtaaaacctaaggacatgctgggtccaaagtgatttacataaatttataatgaaaataaacatgtataaaatttaaaaaaacagactcccatttcttaaaaacggataagtttgaaaggaaactgctattgaacttaagcatctctagcagagcaatttgatcagtatataaaaccctaggatgtgctaggtctaagatggattaaacaagtataaaataaaatacatttataaaataaaaaggaaaacagacttaaattttctcctatgttaattgacttgtattatagttgaatctatgat

SEQ ID NO: 1995 - protein, 510 aa, Homo sapiens; identical to SEQ ID NO: 105

SEQ ID NO: 1996 - DNA, 1818 bp, Homo sapiens
gacaaccggcgtggaggcgtggccacagccgcccagaaattctacccaagctccctcagcaccatgtaccgagcacttcggctcctcgcgcgctcgcgtcccctcgtgcgggctccagccgcagccttagcttcggctcccggcttgggtggcgcggccgtgccctcgttttggcctccgaacgcggctcgaatggcaagccaaaattccttccggatagaatatgatacctttggtgaactaaaggtgccaaatgataagtattatggcgcccagaccgtgagatctacgatgaactttaagattggaggtgtgacagaacgcatgccaaccccagttattaaagcttttggcatcttgaagcgagcggccgctgaagtaaaccaggattatggtcttgatccaaagattgctaatgcaataatgaaggcagcagatgaggtagctgaaggtaaattaaatgatcattttcctctcgtggtatggcagactggatcaggaactcagacaaatatgaatgtaaatgaagtcattagcaatagagcaattgaaatgttaggaggtgaacttggcagcaagatacctgtgcatcccaacgatcatgttaataaaagccagagctcaaatgatacttttcccacagcaatgcacattgctgctgcaatagaagttcatgaagtactgttaccaggactacagaagttacatgatgctcttgatgcaaaatccaaagagtttgcacagatcatcaagattggacgtactcatactcaggatgctgttccacttactcttgggcaggaatttagtggttatgttcaacaagtaaaatatgcaatgacaagaataaaagctgccatgccaagaatctatgagctcgcagctggaggcactgctgttggtacaggtttaaatactagaattggctttgcagaaaaggttgctgcaaaagtggctgcacttacaggcttgccttttgtcactgctccgaataaatttgaagctctggctgctcatgacgctctggttgagctcagtggagccatgaacactactgcctgcagtctgatgaagatagcaaatgatattcgatttttgggttctggtcctcggtcaggtctgggagaattgatcttgcctgaaaatgaaccaggaagcagtatcatgccaggcaaggtgaaccctactcagtgtgaagcaatgaccatggttgcagcccaagtcatggggaaccatgttgctgtcactgtcggaggcagcaatggacattttgagttgaatgttttcaagccaatgatgattaaaaatgtgttacactcagccaggctgctgggggatgcttcagtttcctttacagaaaactgcgtggtgggaatccaggccaatacagaaaggatcaacaagctgatgaatgagtctctaatgttggtgacagctctcaatcctcatatagggtatgacaaggcagcaaagattgctaagacagcacacaaaaatggatcaaccttaaaggaaactgctatcgaacttggctatctcacagcagagcagtttgacgaatgggtaaaacctaaggacatgctgggtccaaagtgatttacataaatttataatgaaaataaacatgtataaaatttaaaaaaacagactcccatttcttaaaaacggataagtttgaaaggaaactgctattgaacttaagcatctctagcagagcaatttgatcagtatataaaaccctaggatgtgctaggtctaagatggattaaacaagtataaaataaaatacatttataaaataaaaaggaaaacagactt

SEQ ID NO: 1997 - protein, 510 aa, Homo sapiens; identical to SEQ ID NO: 105

SEQ ID NO: 1998 - DNA, 1637 bp, Homo sapiens
gacaaccggcgtggaggcgtggccacagccgcccagaaattctacccaagctccctcagcaccatgtaccgagcacttcggctcctcgcgcgctcgcgtcccctcgtgcgggctccagccgcagccttagcttcggctcccggcttgggtggcgcggccgtgccctcgttttggcctccgaacgcggctcgaatggcaagccaaaattccttccggatagaatatgatacctttggtgaactaaaggtgccaaatgataagtattatggcgcccagaccgtgagatctacgatgaactttaagattggaggtgtgacagaacgcatgccaaccccagttattaaagcttttggcatcttgaagcgagcggccgctgaagtaaaccaggattatggtcttgatccaaagattgctaatgcaataatgaaggcagcagatgaggtagctgaaggtaaattaaatgatcattttcctctcgtggtatggcagactggatcaggaactcagacaaatatgaatgtaaatgaagtcattagcaatagagcaattgaaatgttaggaggtgaacttggcagcaagatacctgtgcatcccaacgatcatgttaataaaagccagagctcaaatgatacttttcccacagcaatgcacattgctgctgcaatagaagttcatgaagtactgttaccaggactacagaagttacatgatgctcttgatgcaaaatccaaagagtttgcacagatcatcaagattggacgtactcatactcaggatgctgttccacttactcttgggcaggaatttagtggttatgttcaacaagtaaaatatgcaatgacaagaataaaagctgccatgccaagaatctatgagctcgcagctggaggcactgctgttggtacaggtttaaatactagaattggctttgcagaaaaggttgctgcaaaagtggctgcacttacaggcttgccttttgtcactgctccgaataaatttgaagctctggctgctcatgacgctctggttgagctcagtggagccatgaacactactgcctgcagtctgatgaagatagcaaatgatattcgatttttgggttctggtcctcggtcaggtctgggagaattgatcttgcctgaaaatgaaccaggaagcagtatcatgccaggcaaggtgaaccctactcagtgtgaagcaatgaccatggttgcagcccaagtcatggggaaccatgttgctgtcactgtcggaggcagcaatggacattttgagttgaatgttttcaagccaatgatgattaaaaatgtgttacactcagccaggctgctgggggatgcttcagtttcctttacagaaaactgcgtggtgggaatccaggccaatacagaaaggatcaacaagctgatgaatgagtctctaatgttggtgacagctctcaatcctcatatagggtatgacaaggcagcaaagattgctaagacagcacacaaaaatggatcaaccttaaaggaaactgctatcgaacttggctatctcacagcagagcagtttgacgaatgggtaaaacctaaggacatgctgggtccaaagtgatttacataaatttataatgaaaataaacatgtataaaattt

SEQ ID NO: 1999 - protein, 510 aa, Homo sapiens; identical to SEQ ID NO: 105

SEQ ID NO: 2000 - DNA, 833 bp, Homo sapiens
gacaaccggcgtggaggcgtggccacagccgcccagaaattctacccaagctccctcagcaccatgtaccgagcacttcggctcctcgcgcgctcgcgtcccctcgtgcgggctccagccgcagccttagcttcggctcccggcttgggtggcgcggccgtgccctcgttttggcctccgaacgcggctcgaatggcaagccaaaattccttccggatagaatatgatacctttggtgaactaaaggtgccaaatgataagtattatggcgcccagaccgtgagatctacgatgaactttaagattggaggtgtgacagaacgcatgccaaccccagttattaaagcttttggcatcttgaagcgagcggccgctgaagtaaaccaggattatggtcttgatccaaagattgctaatgcaataatgaaggcagcagatgaggtagctgaaggtaaattaaatgatcattttcctctcgtggtatggcagactggatcaggaactcagacaaatatgaatgtaaatgaagtcattagcaatagagcaattgaaatgttaggaggtgaacttggcagcaagatacctgtgcatcccaacgatcatgttaataaaagccagagctcaaatgatacttttcccacagcaatgcacattgctgctgcaatagaagttcatgaagtactgttaccaggactacagaagttacatgatgctcttgatgcaaaatccaaagagtttgcacagatcatcaagattggacgtactcatactcaggatgctgttccacttactcttgggcaggtataggagtttgactaatttgattcaattta

SEQ ID NO: 2001 - protein, 247 aa, Homo sapiens
MYRALRLLARSRPLVRAPAAALASAPGLGGAAVPSFWPPNAARMASQNSFRIEYDTFGELKVPNDKYYGAQTVRSTMNFKIGGVTERMPTPVIKAFGILKRAAAEVNQDYGLDPKIANAIMKAADEVAEGKLNDHFPLVVWQTGSGTQTNMNVNEVISNRAIEMLGGELGSKIPVHPNDHVNKSQSSNDTFPTAMHIAAAIEVHEVLLPGLQKLHDALDAKSKEFAQIIKIGRTHTQDAVPLTLGQV

SEQ ID NO: 2002 - DNA, 956 bp, Homo sapiens
aagatgtttttggacttcagatgagaagggctccattcatggttaatcatgaatgaaaacgaaactaagaatatatgctgtagaaaaagaagaagaaaagccacaagactgcttaaaaatttctgtgtcttacacagaagatagaaaaaatagagtgtctccaattggatggattttttaaaaaatttggttattgtaatggatttattttttcttagagctgagctgattgtactttggccaactaatgggttaatactgtcaagggaaattagccctgactaaacattgccgctggctcatgaatgcactaggcttggggcagtataaaaactcagagaaatcagtgtgtaggagacacagaaatcagtgtcactcagtgacagaagcaacaataattgtgaaaaatacttcagcagttatggactcatctgtcattcaaaggaaaaaagtagctgtcattggtggtggcttggttggctcattacaagcatgctttcttgcaaagaggaatttccagattgatgtatatgaagctagggaagatactcgagtggctaccttcacacgtggaagaagcattaacttagccctttctcatagaggacgacaagccttgaaagctgttggcctggaagatcaggtacttaatgtatctttcttacagaagataatacctggtatttttcaacaattgcatggtttgatttcatcctggcttaaaaagtaccatttaataccaagaatctctgcatgaaaactcattctactaaagcttttaaaattcgaaatttggcaagagggtgaacattggacactcgaggcacccgaggaggaccctgcaaccggatgattgcttctgatattgggttctcaacaggatggtgcgtcactgcctgtagaaagtgagagtcaagatggcatccaggataaaaggagccagattcctttttttt

SEQ ID NO: 2003 - protein, 151 aa, Homo sapiens
MNALGLGQYKNSEKSVCRRHRNQCHSVTEATIIVKNTSAVMDSSVIQRKKVAVIGGGLVGSLQACFLAKRNFQIDVYEAREDTRVATFTRGRSINLALSHRGRQALKAVGLEDQVLNVSFLQKIIPGIFQQLHGLISSWLKKYHLIPRISA

SEQ ID NO: 2004 - DNA, 2016 bp, Homo sapiens
aagatgtttttggacttcagatgagaagggctccattcatggttaatcatgaatgaaaacgaaactaagaatatatgctgtagaaaaagaagaagaaaagccacaagactgcttaaaaatttctgtgtcttacacagaagatagaaaaaatagagtgtctccaattggatggattttttaaaaaatttggttattgtaatggatttattttttcttagagctgagctgattgtactttggccaactaatgggttaatactgtcaagggaaattagccctgactaaacattgccgctggctcatgaatgcactaggcttggggcagtataaaaactcagagaaatcagtgtgtaggagacacagaaatcagtgtcactcagtgacagaagcaacaataattgtgaaaaatacttcagcagttatggactcatctgtcattcaaaggaaaaaagtagctgtcattggtggtggcttggttggctcattacaagcatgctttcttgcaaagaggaatttccagattgatgtatatgaagctagggaagatactcgagtggctaccttcacacgtggaagaagcattaacttagccctttctcatagaggacgacaagccttgaaagctgttggcctggaagatcagattgtatcccaaggtattcccatgagagcaagaatgatccactctctttcaggaaaaaagtctgcaattccctatgggacaaagtctcagtatattctttctgtaagcagagaaaatctaaacaaggatctattgactgctgctgagaaataccccaatgtgaaaatgcactttaaccacaggctgttgaaatgtaatccagaggaaggaatgatcacagtgcttggatctgacaaagttcccaaagatgtcacttgtgacctcattgtaggatgtgatggagcctattcaactgtcagatctcacctgatgaagaaacctcgctttgattacagtcagcagtacattcctcatgggtacatggagttgactattccacctaagaacggagattatgccatggaacctaattatctgcatatttggcctagaaatacctttatgatgattgcacttcctaacatgaacaaatcattcacatgtactttgttcatgccctttgaagagtttgaaaaacttctaaccagtaatgatgtggtagatttcttccagaaatactttccggatgccatccctctaattggagagaaactcctagtgcaagatttcttcctgttgcctgcccagcccatgatatctgtaaagtgctcttcatttcactttaaatctcactgtgtactgctgggagatgcagctcatgctatagtgccgttttttgggcaaggaatgaatgcgggctttgaagactgcttggtatttgatgagttaatggataaattcagtaacgaccttagtttgtgtcttcctgtgttctcaagattgagaatcccagatgatcacgcgatttcagacctatccatgtacaattacatagagatgcgagcacatgtcaactcaagctggttcatttttcagaagaacatggagagatttcttcatgcgattatgccatcgacctttatccctctctatacaatggtcactttttccagaataagataccatgaggctgtgcagcgttggcattggcaaaaaaaggtgataaacaaaggactctttttcttgggatcactgatagccatcagcagtacctacctacttatacactacatgtcaccacgatctttcctccgcttgagaagaccatggaactggatagctcacttccggaatacaacatgtttccccgcaaaggccgtggactccctagaacaaatttccaatctcattagcaggtgatagaaaggttttgtggtagcaaatgcatgatttctctgtgaccaaaattaagcatgaaaaaaatgtttccattgccatatttgattcactagtggaagatagtgttctgcttataattaaactgaatgtagagt

SEQ ID NO: 2005 - protein, 526 aa, Homo sapiens
MNALGLGQYKNSEKSVCRRHRNQCHSVTEATIIVKNTSAVMDSSVIQRKKVAVIGGGLVGSLQACFLAKRNFQIDVYEAREDTRVATFTRGRSINLALSHRGRQALKAVGLEDQIVSQGIPMRARMIHSLSGKKSAIPYGTKSQYILSVSRENLNKDLLTAAEKYPNVKMHFNHRLLKCNPEEGMITVLGSDKVPKDVTCDLIVGCDGAYSTVRSHLMKKPRFDYSQQYIPHGYMELTIPPKNGDYAMEPNYLHIWPRNTFMMIALPNMNKSFTCTLFMPFEEFEKLLTSNDVVDFFQKYFPDAIPLIGEKLLVQDFFLLPAQPMISVKCSSFHFKSHCVLLGDAAHAIVPFFGQGMNAGFEDCLVFDELMDKFSNDLSLCLPVFSRLRIPDDHAISDLSMYNYIEMRAHVNSSWFIFQKNMERFLHAIMPSTFIPLYTMVTFSRIRYHEAVQRWHWQKKVINKGLFFLGSLIAISSTYLLIHYMSPRSFLRLRRPWNWIAHFRNTTCFPAKAVDSLEQISNLISR

SEQ ID NO: 2006 - DNA, 1978 bp, Homo sapiens
aagatgtttttggacttcagatgagaagggctccattcatggttaatcatgaatgaaaacgaaactaagaatatatgctgtagaaaaagaagaagaaaagccacaagactgcttaaaaatttctgtgtcttacacagaagatagaaaaaatagagtgtctccaattggatggattttttaaaaaatttggttattgtaatggatttattttttcttagagctgagctgattgtactttggccaactaatgggttaatactgtcaagggaaattagccctgactaaacattgccgctggctcatgaatgcactaggcttggggcagtataaaaactcagagaaatcagtgtgtaggagacacagaaatcagtgtcactcagtgacagaagcaacaataattgtgaaaaatacttcagcagttatggactcatctgtcattcaaaggaaaaaagtagctgtcattggtggtggcttggttggctcattacaagcatgctttcttgcaaagaggaatttccagattgatgtatatgaagctagggaagatactcgagtggctaccttcacacgtggaagaagcattaacttagccctttctcatagaggacgacaagccttgaaagctgttggcctggaagatcagattgtatcccaaggtattcccatgagagcaagaatgatccactctctttcaggaaaaaagtctgcaattccctatgggacaaagtctcagtatattctttctgtaagcagagaaaatctaaacaaggatctattgactgctgctgagaaataccccaatgtgaaaatgcactttaaccacaggctgttgaaatgtaatccagaggaaggaatgatcacagtgcttggatctgacaaagttcccaaagatgtcacttgtgacctcattgtaggatgtgatggagcctattcaactgtcagatctcacctgatgaagaaacctcgctttgattacagtcagcagtacattcctcatgggtacatggagttgactattccacctaagaacggagattatgccatggaacctaattatctgcatatttggcctagaaatacctttatgatgattgcacttcctaacatgaacaaatcattcacatgtactttgttcatgccctttgaagagtttgaaaaacttctaaccagtaatgatgtggtagatttcttccagaaatactttccggatgccatccctctaattggagagaaactcctagtgcaagatttcttcctgttgcctgcccagcccatgatatctgtaaagtgctcttcatttcactttaaatctcactgtgtactgctgggagatgcagctcatgctatagtgccgttttttgggcaaggaatgaatgcgggctttgaagactgcttggtatttgatgagttaatggataaattcagtaacgaccttagtttgtgtcttcctgtgttctcaagattgagaatcccagatgatcacgcgatttcagacctatccatgtacaattacatagagaagaacatggagagatttcttcatgcgattatgccatcgacctttatccctctctatacaatggtcactttttccagaataagataccatgaggctgtgcagcgttggcattggcaaaaaaaggtgataaacaaaggactctttttcttgggatcactgatagccatcagcagtacctacctacttatacactacatgtcaccacgatctttcctccgcttgagaagaccatggaactggatagctcacttccggaatacaacatgtttccccgcaaaggccgtggactccctagaacaaatttccaatctcattagcaggtgatagaaaggttttgtggtagcaaatgcatgatttctctgtgaccaaaattaagcatgaaaaaaatgtttccattgccatatttgattcactagtggaagatagtgttctgcttataattaaactgaatgtagagta

SEQ ID NO: 2007 - protein, 513 aa, Homo sapiens
MNALGLGQYKNSEKSVCRRHRNQCHSVTEATIIVKNTSAVMDSSVIQRKKVAVIGGGLVGSLQACFLAKRNFQIDVYEAREDTRVATFTRGRSINLALSHRGRQALKAVGLEDQIVSQGIPMRARMIHSLSGKKSAIPYGTKSQYILSVSRENLNKDLLTAAEKYPNVKMHFNHRLLKCNPEEGMITVLGSDKVPKDVTCDLIVGCDGAYSTVRSHLMKKPRFDYSQQYIPHGYMELTIPPKNGDYAMEPNYLHIWPRNTFMMIALPNMNKSFTCTLFMPFEEFEKLLTSNDVVDFFQKYFPDAIPLIGEKLLVQDFFLLPAQPMISVKCSSFHFKSHCVLLGDAAHAIVPFFGQGMNAGFEDCLVFDELMDKFSNDLSLCLPVFSRLRIPDDHAISDLSMYNYIEKNMERFLHAIMPSTFIPLYTMVTFSRIRYHEAVQRWHWQKKVINKGLFFLGSLIAISSTYLLIHYMSPRSFLRLRRPWNWIAHFRNTTCFPAKAVDSLEQISNLISR

SEQ ID NO: 2008 - DNA, 5376 bp, Homo sapiens
aagatgtttttggacttcagatgagaagggctccattcatggttaatcatgaatgaaaacgaaactaagaatatatgctgtagaaaaagaagaagaaaagccacaagactgcttaaaaatttctgtgtcttacacagaagatagaaaaaatagagtgtctccaattggatggattttttaaaaaatttggttattgtaatggatttattttttcttagagctgagctgattgtactttggccaactaatgggttaatactgtcaagggaaattagccctgactaaacattgccgctggctcatgaatgcactaggcttggggcagtataaaaactcagagaaatcagtgtgtaggagacacagaaatcagtgtcactcagtgacagaagcaacaataattgtgaaaaatacttcagcagttatggactcatctgtcattcaaaggaaaaaagtagctgtcattggtggtggcttggttggctcattacaagcatgctttcttgcaaagaggaatttccagattgatgtatatgaagctagggaagatactcgagtggctaccttcacacgtggaagaagcattaacttagccctttctcatagaggacgacaagccttgaaagctgttggcctggaagatcagattgtatcccaaggtattcccatgagagcaagaatgatccactctctttcaggaaaaaagtctgcaattccctatgggacaaagtctcagtatattctttctgtaagcagagaaaatctaaacaaggatctattgactgctgctgagaaataccccaatgtgaaaatgcactttaaccacaggctgttgaaatgtaatccagaggaaggaatgatcacagtgcttggatctgacaaagttcccaaagatgtcacttgtgacctcattgtaggatgtgatggagcctattcaactgtcagatctcacctgatgaagaaacctcgctttgattacagtcagcagtacattcctcatgggtacatggagttgactattccacctaagaacggagattatgccatggaacctaattatctgcatatttggcctagaaatacctttatgatgattgcacttcctaacatgaacaaatcattcacatgtactttgttcatgccctttgaagagtttgaaaaacttctaaccagtaatgatgtggtagatttcttccagaaatactttccggatgccatccctctaattggagagaaactcctagtgcaagatttcttcctgttgcctgcccagcccatgatatctgtaaagtgctcttcatttcactttaaatctcactgtgtactgctgggagatgcagctcatgctatagtgccgttttttgggcaaggaatgaatgcgggctttgaagactgcttggtatttgatgagttaatggataaattcagtaacgaccttagtttgtgtcttcctgtgttctcaagattgagaatcccagatgatcacgcgatttcagacctatccatgtacaattacatagagatgcgagcacatgtcaactcaagctggttcatttttcagaagaacatggagagatttcttcatgcgattatgccatcgacctttatccctctctatacaatggtcactttttccagaataagataccatgaggctgtgcagcgttggcattggcaaaaaaaggtgataaacaaaggactctttttcttgggatcactgatagccatcagcagtacctacctacttatacactacatgtcaccacgatctttcctccgcttgagaagaccatggaactggatagctcacttccggaatacaacatgtttccccgcaaaggccgtggactccctagaacaaatttccaatctcattagcaggtgatagaaaggttttgtggtagcaaatgcatgatttctctgtgaccaaaattaagcatgaaaaaaatgtttccattgccatatttgattcactagtggaagatagtgttctgcttataattaaactgaatgtagagtatctctgtatgttaattgcaattactggttggggggtgcattttaaaagatgaaacatgcagcttccctacattacacacactcaggttgagtcattctaactataaaagtgcaatgactaagatccttcacttctctgaaagtaaggccctagatgcctcagggaagacagtaatcatgccttttctttaaaagacacaataggactcgcaacagcattgactcaacacctaggactaaaaatcacaacttaactagcatgttaactgcacttttcattacgtgaatggaacttacctaaccacagggctcagacttactagataaaaccagaaatggaaataaggaattcaggggagttccagagacttacaaaatgaactcattttattttcccaccttcaaatataagtattatcatctatctgtttatcgtctatctatctatcatctatctatctatctatcatctatctatctatctatctatctatctatctatctatctatctctatttatttatgtatttagagatcaggtctcactctgttgaccaggctggagtgcagtggtgagatctgggttcactgcaacctctgcctcctgggctcaagcaatcctcccacttcagcctcccaaatagctggggctaccatggtatttttcagtagagaccgggtcttgccatgctgcccaggccagtctcaaactcctggcctcatgtgatctgcccacctcagcctcccaaagtacagggattagagttgtgagccaccgctgccagcccagagttaccctctaaagataagaaaaaggctattaatatcatactaagtgaaggacaggaaagggttttattcataaattaaatgtctacatgtgccagaatggaaaggaaacaaggggagacaacttttatagaaatacaaagccattactttattcaatttcagaccctcagaagcaatttactaatttattcttcgactacatactgcagcagaaccagcaatacacttgatttttaaaagcacatttagtgaaatgttttctttggttcatccttctttaacaggctgctgagtcactcagaaatccttcaaacatgattaattatgaagatgaaacactagagtcatataagaaataaaaattgggcaataaaataaaatgattcagtgtttcttttctatattgtcaatgaaaaccttgagttctaataatccatgttcagtttgtagggaaagaaaaaataatttttccttctacccactttaggttccttggctggggcccctataacaaaagacagattgacaagagaaaaacaaacataaatttattagcgggtatatgtaatatatatgtgggaaatacaggggaatgagcaaatctcaaagagctggcgtcttagaactccctggcttatatagcatcgacaaagaacagtaaatttttagagaaacaacaaaacaaagaaaaagagctttgagtctgtaggggcagcaatttgggggaagcaaatatatgggagtttgccttgtagattcctctggtgctggtctccaggctgacaaggattcaaagttgtctctgaaactcctctttgtcatactgcacatataaaacgtcttttgtttccaacaagaggattttctttttcattctagaattatctccttgataacttgatcagatataggacatgacactgaatagagtccaacagtacaaaaaaaattcagtatgttctagctacttcacacatgtgtacgcgacagttatttttacagtaaggtattttcgagaaaaatgcattacgtgttttggaaaatagagtaatttaaaaaatatatttgaaatgaaaatctccaacacattagaagatgatgatgttagatgcccatcgtgtgccacaagtggttttttcattatgtaaagcacccgttgaattaaaagaatttgtttttgttcaacctcttcctgaggcccaagagcatatgggcaattcggatttcctgctggaccacaaggttctgttgatattacatagaacgggtattccagacacttcttatgatgaaagtccaaaagtggcatccaatttaaggccccatctttcgttgccattcttcattcctacaaaggacgaacttggattacatcaactttggacccattggttttgtcgctgtcgtcaactgacagtgattcatcactggtgatgataaaaatgatggaagaagagttgaaagtcacttttttctttggcctgtccccatctttctgtgacatcacaatgggtctgatctgcatttcacttccagctgctggtaggtctttagcaggcctctggcacctcagcagtcggaggcacagaagctgcaaaagggatcttcgaaactgggcagagaaaaaataaagtggaatattaagtaaaagttgggcactaatctggattaacattcgaggaaatcagttgagctgaatttaagttgttttttgtttgttagcaggtgtggatgtggggttatgtggtcatgctcagatctacctaaatcaccccagagctttatgtcttttattcattctaattcttattaaccggaatatgtaggaccatttcaataccttgtaatcctccaagcttcaatctgcacacactttctatgagggcaggtacaactattaagagattttgaacattaagttagtccacaaatattcagtgggcatctactaggtgacagccactgtgctataattagagactttttactataagcatcaaaaacagataaggctcttcctggcagagtttacagcctggtgtacttgctaatgtctctttaattaggtgaagaattttttttttctatcgaaattactaatcagttggggaaaaaaatactatagcagacagcactaatgtcatcaacaaacattgttcttctccgtgtcctgggtacaacatcgaataatatttcttggcctcctttccgcttctcctctctgctgttcctctctacaagaacctgggaggccaacgcctaaagatcataatatcacacaatggaaggaacctagattcctaaatgactgcataggacagatcccatctcctccacccaatacattattagactgaactgtgacctgaaatgagcaataaactctgtattaattcactgaaatgttggggttgcttgttatagtagtcggtccatcatgaccagtaaaacataaatcaaaagttaatgtaattgttatcccattatttagagcgaaataaatgttgaatatatggactttctcagattaggaaataccaattaaaaatataataaatagctacattg

SEQ ID NO: 2009 - protein, 526 aa, Homo sapiens; identical to SEQ ID NO: 2005

SEQ ID NO: 2010 - DNA, 736 bp, Homo sapiens
atttcttgacactcctgtcttcttgccacctcatgatgcggccaatggtaatatttcttgttttcagaaactgactttttattttgcctcttgtcttagcacactttctttctctggaacattctgtctctcctccttacttgactaattcctccttccctcacaaggctaacagcacgattttcttgctctaacccaccctcagaaccagtttcccatcctgtgtactaccatatcctccctgtttacctccctcatggcttctacccgctcagtgtgcatcatcctcaccaaatagtgaattcctcaagagcagagactgggtcttatgtattttctcacctgtgactggaacagtgtctgcatgtagtagcttcgttgtgtggaagatcttcagacaattcaagtgatcaagattttaaaatatgaaaagaaactggccaaaatgtgctttttaatgatattcaccttcctggtctgttggatgccttatatcgtgatctgcttcttggtggttaatggtcatggtcacctggtcactccaacaatatctattgtttcgtacctctttgctaaatcgaacactgtatacaatccagtgatttatgtcttcatgatcagaaagggagtccacggcctttgcggggaaacatgttgtattccggaagtgagctatccagttccatggtcttctcaagcggaggaaagatcgtggtgacatgtagtgtataagtag

SEQ ID NO: 2011 - protein, 90 aa, Homo sapiens
MCFLMIFTFLVCWMPYIVICFLVVNGHGHLVTPTISIVSYLFAKSNTVYNPVIYVFMIRKGVHGLCGETCCIPEVSYPVPWSSQAEERSW

SEQ ID NO: 2012 - DNA, 2607 bp, Homo sapiens
aagctgagcgcctccgcccgccaggcgcgccggcgccgggccatgtactcggggaaccgcagcggcggccacggctactgggacggcggcggggccgcgggcgctgaggggccggcgccggcggggacactgagccccgcgcccctcttcagccccggcacctacgagcgcctggcgctgctgctgggctccattgggctgctgggcgtcggcaacaacctgctggtgctcgtcctctactacaagttccagcggctccgcactcccactcacctcctcctggtcaacatcagcctcagcgacctgctggtgtccctcttcggggtcacctttaccttcgtgtcctgcctgaggaacggctgggtgtgggacaccgtgggctgcgtgtgggacgggtttagcggcagcctcttcggttggatcagccagcttcaggcagccactagggaagccagagcctccatgggtccagtgcagcaaggcactatctgcatgcagacggagtctcactctgttgcccaggctggagtgcattggcatgatctcggctgactgcaacctccacctcatggattccagcgattctcctgcttcagcctcccaagtagctgggactacagcttcgttgtgtggaagatcttcagacaattcaagtgatcaagattttaaaatatgaaaagaaactggccaaaatgtgctttttaatgatattcaccttcctggtctgttggatgccttatatcgtgatctgcttcttggtggttaatggtcatggtcacctggtcactccaacaatatctattgtttcgtacctctttgctaaatcgaacactgtatacaatccagtgatttatgtcttcatgatcagaaagtttcgaagatcccttttgcagcttctgtgcctccgactgctgaggtgccagaggcctgctaaagacctaccagcagctggaagtgaaatgcagatcagacccattgtgatgtcacagaaagatggggacaggccaaagaaaaaagtgactttcaactcttcttccatcatttttatcatcaccagtgatgaatcactgtcagttgacgacagcgacaaaaccaatgggtccaaagttgatgtaatccaagttcgtcctttgtaggaatgaagaatggcaacgaaagatggggccttaaattggatgccacttttggactttcatcataagaagtgtctggaatacccgttctatgtaatatcaacagaaccttgtggtccagcaggaaatccgaattgcccatatgctcttgggcctcaggaagaggttgaacaaaaacaaattcttttaattcaacgggtgctttacataatgaaaaaaccacttgtggcacacgatgggcatctaacatcatcatcttctaatgtgttggagattttcatttcaaatatattttttaaattactctattttccaaaacacgtaatgcatttttctcgaaaataccttactgtaaaaataactgtcgcgtacacatgtgtgaagtagctagaacatactgaattttttttgtactgttggactctattcagtgtcatgtcctatatctgatcaagttatcaaggagataattctagaatgaaaaagaaaatcctcttgttggaaacaaaagacgttttatatgtgcagtatgacaaagaggagtttcagagacaactttgaatccttgtcagcctggagaccagcaccagaggaatctacaaggcaaactcccatatatttgcttcccccaaattgctgcccctacagactcaaagctctttttctttgttttgttgtttctctaaaaatttactgttctttgtcgatgctatataagccagggagttctaagacgccagctctttgagatttgctcattcccctgtatttcccacatatatattacatatacccgctaataaatttatgtttgtttttctcttgtcaatctgtcttttgttataggggccccagccaaggaacctaaagtgggtagaaggaaaaattattttttctttccctacaaactgaacatggattattagaactcaaggttttcattgacaatatagaaaagaaacactgaatcattttattttattgcccaatttttatttcttatatgactctagtgtttcatcttcataattaatcatgtttgaaggatttctgagtgactcagcagcctgttaaagaaggatgaaccaaagaaaacatttcactaaatgtgcttttaaaaatcaagtgtattgctggttctgctgcagtatgtagtcgaagaataaattagtaaattgcttctgagggtctgaaattgaataaagtaatggctttgtatttctataaaagttgtctccccttgtttcctttccattctggcacatgtagacatttaatttatgaataaaaccctttcctgtccttcacttagtatgatattaatagcctttttcttatctttagagggtaactctgggctggcagcggtggctcacaactctaatccctgtactttgggaggctgaggtgggcagatcacatgaggccaggagtttgagactggcctgggcagcatggcaagacccggtctcta

SEQ ID NO: 2013 - protein, 169 aa, Homo sapiens
MYSGNRSGGHGYWDGGGAAGAEGPAPAGTLSPAPLFSPGTYERLALLLGSIGLLGVGNNLLVLVLYYKFQRLRTPTHLLLVNISLSDLLVSLFGVTFTFVSCLRNGWVWDTVGCVWDGFSGSLFGWISQLQAATREARASMGPVQQGTICMQTESHSVAQAGVHWHDLG

SEQ ID NO: 2014 - DNA, 2825 bp, Homo sapiens
gggcccggcgcgcggtagcgcgggcccctcagtgcacaatggctagagcaggcggcggagccccaaccccacccagtgcggagcgcgccgcgagccccgccgcaagctgagcgcctccgcccgccaggcgcgccggcgccgggccatgtactcggggaaccgcagcggcggccacggctactgggacggcggcggggccgcgggcgctgaggggccggcgccggcggggacactgagccccgcgcccctcttcagccccggcacctacgagcgcctggcgctgctgctgggctccattgggctgctgggcgtcggcaacaacctgctggtgctcgtcctctactacaagttccagcggctccgcactcccactcacctcctcctggtcaacatcagcctcagcgacctgctggtgtccctcttcggggtcacctttaccttcgtgtcctgcctgaggaacggctgggtgtgggacaccgtgggctgcgtgtgggacgggtttagcggcagcctcttcgggattgtttccattgccaccctaaccgtgctggcctatgaacgttacattcgcgtggtccatgccagagtgatcaatttttcctgggcctggagggccattacctacatctggctctactcactggcgtgggcaggagcacctctcctgggatggaacaggtacatcctggacgtacacggactaggctgcactgtggactggaaatccaaggatgccaacgattcctcctttgtgcttttcttatttcttggctgcctggtggtgcccctgggtgtcatagcccattgctatggccatattctatattccattcgaatgcttcgttgtgtggaagatcttcagacaattcaagtgatcaagattttaaaatatgaaaagaaactggccaaaatgtgctttttaatgatattcaccttcctggtctgttggatgccttatatcgtgatctgcttcttggtggttaatggtcatggtcacctggtcactccaacaatatctattgtttcgtacctctttgctaaatcgaacactgtatacaatccagtgatttatgtcttcatgatcagaaagtttcgaagatcccttttgcagcttctgtgcctccgactgctgaggtgccagaggcctgctaaagacctaccagcagctggaagtgaaatgcagatcagacccattgtgatgtcacagaaagatggggacaggccaaagaaaaaagtgactttcaactcttcttccatcatttttatcatcaccagtgatgaatcactgtcagttgacgacagcgacaaaaccaatgggtccaaagttgatgtaatccaagttcgtcctttgtaggaatgaagaatggcaacgaaagatggggccttaaattggatgccacttttggactttcatcataagaagtgtctggaatacccgttctatgtaatatcaacagaaccttgtggtccagcaggaaatccgaattgcccatatgctcttgggcctcaggaagaggttgaacaaaaacaaattcttttaattcaacgggtgctttacataatgaaaaaaccacttgtggcacacgatgggcatctaacatcatcatcttctaatgtgttggagattttcatttcaaatatattttttaaattactctattttccaaaacacgtaatgcatttttctcgaaaataccttactgtaaaaataactgtcgcgtacacatgtgtgaagtagctagaacatactgaattttttttgtactgttggactctattcagtgtcatgtcctatatctgatcaagttatcaaggagataattctagaatgaaaaagaaaatcctcttgttggaaacaaaagacgttttatatgtgcagtatgacaaagaggagtttcagagacaactttgaatccttgtcagcctggagaccagcaccagaggaatctacaaggcaaactcccatatatttgcttcccccaaattgctgcccctacagactcaaagctctttttctttgttttgttgtttctctaaaaatttactgttctttgtcgatgctatataagccagggagttctaagacgccagctctttgagatttgctcattcccctgtatttcccacatatatattacatatacccgctaataaatttatgtttgtttttctcttgtcaatctgtcttttgttataggggccccagccaaggaacctaaagtgggtagaaggaaaaattattttttctttccctacaaactgaacatggattattagaactcaaggttttcattgacaatatagaaaagaaacactgaatcattttattttattgcccaatttttatttcttatatgactctagtgtttcatcttcataattaatcatgtttgaaggatttctgagtgactcagcagcctgttaaagaaggatgaaccaaagaaaacatttcactaaatgtgcttttaaaaatcaagtgtattgctggttctgctgcagtatgtagtcgaagaataaattagtaaattgcttctgagggtctgaaattgaataaagtaatggctttgtatttctataaaagttgtctccccttgtttcctttccattctggcacatgtagacatttaatttatgaataaaaccctttcctgtccttcacttagtatgatattaatagcctttttcttatctttagagggtaactctgggctggcagcggtggctcacaactctaatccctgtactttgggaggctgaggtgggcagatcacatgaggccaggagtttgagactggcctgggcagcatggcaagacccggtctcta

SEQ ID NO: 2015 - protein, 402 aa, Homo sapiens; identical to SEQ ID NO: 109

SEQ ID NO: 2016 - DNA, 2665 bp, Homo sapiens
gggcccggcgcgcggtagcgcgggcccctcagtgcacaatggctagagcaggcggcggagccccaaccccacccagtgcggagcgcgccgcgagccccgccgcaagctgagcgcctccgcccgccaggcgcgccggcgccgggccatgtactcggggaaccgcagcggcggccacggctactgggacggcggcggggccgcgggcgctgaggggccggcgccggcggggacactgagccccgcgcccctcttcagccccggcacctacgagcgcctggcgctgctgctgggctccattgggctgctgggcgtcggcaacaacctgctggtgctcgtcctctactacaagttccagcggctccgcactcccactcacctcctcctggtcaacatcagcctcagcgacctgctggtgtccctcttcggggtcacctttaccttcgtgtcctgcctgaggaacggctgggtgtgggacaccgtgggctgcgtgtgggacgggtttagcggcagcctcttcgggattgtttccattgccaccctaaccgtgctggcctatgaacgttacattcgcgtggtccatgccagagtgatcaatttttcctgggcctggagggccattacctacatctggctctactcactggcgtgggcaggagcacctctcctgggatggaacagcttcgttgtgtggaagatcttcagacaattcaagtgatcaagattttaaaatatgaaaagaaactggccaaaatgtgctttttaatgatattcaccttcctggtctgttggatgccttatatcgtgatctgcttcttggtggttaatggtcatggtcacctggtcactccaacaatatctattgtttcgtacctctttgctaaatcgaacactgtatacaatccagtgatttatgtcttcatgatcagaaagtttcgaagatcccttttgcagcttctgtgcctccgactgctgaggtgccagaggcctgctaaagacctaccagcagctggaagtgaaatgcagatcagacccattgtgatgtcacagaaagatggggacaggccaaagaaaaaagtgactttcaactcttcttccatcatttttatcatcaccagtgatgaatcactgtcagttgacgacagcgacaaaaccaatgggtccaaagttgatgtaatccaagttcgtcctttgtaggaatgaagaatggcaacgaaagatggggccttaaattggatgccacttttggactttcatcataagaagtgtctggaatacccgttctatgtaatatcaacagaaccttgtggtccagcaggaaatccgaattgcccatatgctcttgggcctcaggaagaggttgaacaaaaacaaattcttttaattcaacgggtgctttacataatgaaaaaaccacttgtggcacacgatgggcatctaacatcatcatcttctaatgtgttggagattttcatttcaaatatattttttaaattactctattttccaaaacacgtaatgcatttttctcgaaaataccttactgtaaaaataactgtcgcgtacacatgtgtgaagtagctagaacatactgaattttttttgtactgttggactctattcagtgtcatgtcctatatctgatcaagttatcaaggagataattctagaatgaaaaagaaaatcctcttgttggaaacaaaagacgttttatatgtgcagtatgacaaagaggagtttcagagacaactttgaatccttgtcagcctggagaccagcaccagaggaatctacaaggcaaactcccatatatttgcttcccccaaattgctgcccctacagactcaaagctctttttctttgttttgttgtttctctaaaaatttactgttctttgtcgatgctatataagccagggagttctaagacgccagctctttgagatttgctcattcccctgtatttcccacatatatattacatatacccgctaataaatttatgtttgtttttctcttgtcaatctgtcttttgttataggggccccagccaaggaacctaaagtgggtagaaggaaaaattattttttctttccctacaaactgaacatggattattagaactcaaggttttcattgacaatatagaaaagaaacactgaatcattttattttattgcccaatttttatttcttatatgactctagtgtttcatcttcataattaatcatgtttgaaggatttctgagtgactcagcagcctgttaaagaaggatgaaccaaagaaaacatttcactaaatgtgcttttaaaaatcaagtgtattgctggttctgctgcagtatgtagtcgaagaataaattagtaaattgcttctgagggtctgaaattgaataaagtaatggctttgtatttctataaaagttgtctccccttgtttcctttccattctggcacatgtagacatttaatttatgaataaaaccctttcctgtccttcacttagtatgatattaatagcctttttcttatctttagagggtaactctgggctggcagcggtggctcacaactctaatccctgtactttgggaggctgaggtgggcagatcacatgaggccaggagtttgagactggcctgggcagcatggcaagacccggtctcta

SEQ ID NO: 2017 - protein, 189 aa, Homo sapiens
MYSGNRSGGHGYWDGGGAAGAEGPAPAGTLSPAPLFSPGTYERLALLLGSIGLLGVGNNLLVLVLYYKFQRLRTPTHLLLVNISLSDLLVSLFGVTFTFVSCLRNGWVWDTVGCVWDGFSGSLFGIVSIATLTVLAYERYIRVVHARVINFSWAWRAITYIWLYSLAWAGAPLLGWNSFVVWKIFRQFK

SEQ ID NO: 2018 - DNA, 2505 bp, Homo sapiens
gggcccggcgcgcggtagcgcgggcccctcagtgcacaatggctagagcaggcggcggagccccaaccccacccagtgcggagcgcgccgcgagccccgccgcaagctgagcgcctccgcccgccaggcgcgccggcgccgggccatgtactcggggaaccgcagcggcggccacggctactgggacggcggcggggccgcgggcgctgaggggccggcgccggcggggacactgagccccgcgcccctcttcagccccggcacctacgagcgcctggcgctgctgctgggctccattgggctgctgggcgtcggcaacaacctgctggtgctcgtcctctactacaagttccagcggctccgcactcccactcacctcctcctggtcaacatcagcctcagcgacctgctggtgtccctcttcggggtcacctttaccttcgtgtcctgcctgaggaacggctgggtgtgggacaccgtgggctgcgtgtgggacgggtttagcggcagcctcttcgcttcgttgtgtggaagatcttcagacaattcaagtgatcaagattttaaaatatgaaaagaaactggccaaaatgtgctttttaatgatattcaccttcctggtctgttggatgccttatatcgtgatctgcttcttggtggttaatggtcatggtcacctggtcactccaacaatatctattgtttcgtacctctttgctaaatcgaacactgtatacaatccagtgatttatgtcttcatgatcagaaagtttcgaagatcccttttgcagcttctgtgcctccgactgctgaggtgccagaggcctgctaaagacctaccagcagctggaagtgaaatgcagatcagacccattgtgatgtcacagaaagatggggacaggccaaagaaaaaagtgactttcaactcttcttccatcatttttatcatcaccagtgatgaatcactgtcagttgacgacagcgacaaaaccaatgggtccaaagttgatgtaatccaagttcgtcctttgtaggaatgaagaatggcaacgaaagatggggccttaaattggatgccacttttggactttcatcataagaagtgtctggaatacccgttctatgtaatatcaacagaaccttgtggtccagcaggaaatccgaattgcccatatgctcttgggcctcaggaagaggttgaacaaaaacaaattcttttaattcaacgggtgctttacataatgaaaaaaccacttgtggcacacgatgggcatctaacatcatcatcttctaatgtgttggagattttcatttcaaatatattttttaaattactctattttccaaaacacgtaatgcatttttctcgaaaataccttactgtaaaaataactgtcgcgtacacatgtgtgaagtagctagaacatactgaattttttttgtactgttggactctattcagtgtcatgtcctatatctgatcaagttatcaaggagataattctagaatgaaaaagaaaatcctcttgttggaaacaaaagacgttttatatgtgcagtatgacaaagaggagtttcagagacaactttgaatccttgtcagcctggagaccagcaccagaggaatctacaaggcaaactcccatatatttgcttcccccaaattgctgcccctacagactcaaagctctttttctttgttttgttgtttctctaaaaatttactgttctttgtcgatgctatataagccagggagttctaagacgccagctctttgagatttgctcattcccctgtatttcccacatatatattacatatacccgctaataaatttatgtttgtttttctcttgtcaatctgtcttttgttataggggccccagccaaggaacctaaagtgggtagaaggaaaaattattttttctttccctacaaactgaacatggattattagaactcaaggttttcattgacaatatagaaaagaaacactgaatcattttattttattgcccaatttttatttcttatatgactctagtgtttcatcttcataattaatcatgtttgaaggatttctgagtgactcagcagcctgttaaagaaggatgaaccaaagaaaacatttcactaaatgtgcttttaaaaatcaagtgtattgctggttctgctgcagtatgtagtcgaagaataaattagtaaattgcttctgagggtctgaaattgaataaagtaatggctttgtatttctataaaagttgtctccccttgtttcctttccattctggcacatgtagacatttaatttatgaataaaaccctttcctgtccttcacttagtatgatattaatagcctttttcttatctttagagggtaactctgggctggcagcggtggctcacaactctaatccctgtactttgggaggctgaggtgggcagatcacatgaggccaggagtttgagactggcctgggcagcatggcaagacccggtctcta

SEQ ID NO: 2019 - protein, 147 aa, Homo sapiens [sequence omitted]

SEQ ID NO: 2020 - DNA, 2061 bp, Homo sapiens
gaagagttcaaaaaggcttttctaacccgggactgacttctaggtggaaaaaatacatcgctgtaagaaaaccgcttcgttgtgtggaagatcttcagacaattcaagtgatcaagattttaaaatatgaaaagaaactggccaaaatgtgctttttaatgatattcaccttcctggtctgttggatgccttatatcgtgatctgcttcttggtggttaatggtcatggtcacctggtcactccaacaatatctattgtttcgtacctctttgctaaatcgaacactgtatacaatccagtgatttatgtcttcatgatcagaaagtttcgaagatcccttttgcagcttctgtgcctccgactgctgaggtgccagaggcctgctaaagacctaccagcagctggaagtgaaatgcagatcagacccattgtgatgtcacagaaagatggggacaggccaaagaaaaaagtgactttcaactcttcttccatcatttttatcatcaccagtgatgaatcactgtcagttgacgacagcgacaaaaccaatgggtccaaagttgatgtaatccaagttcgtcctttgtaggaatgaagaatggcaacgaaagatggggccttaaattggatgccacttttggactttcatcataagaagtgtctggaatacccgttctatgtaatatcaacagaaccttgtggtccagcaggaaatccgaattgcccatatgctcttgggcctcaggaagaggttgaacaaaaacaaattcttttaattcaacgggtgctttacataatgaaaaaaccacttgtggcacacgatgggcatctaacatcatcatcttctaatgtgttggagattttcatttcaaatatattttttaaattactctattttccaaaacacgtaatgcatttttctcgaaaataccttactgtaaaaataactgtcgcgtacacatgtgtgaagtagctagaacatactgaattttttttgtactgttggactctattcagtgtcatgtcctatatctgatcaagttatcaaggagataattctagaatgaaaaagaaaatcctcttgttggaaacaaaagacgttttatatgtgcagtatgacaaagaggagtttcagagacaactttgaatccttgtcagcctggagaccagcaccagaggaatctacaaggcaaactcccatatatttgcttcccccaaattgctgcccctacagactcaaagctctttttctttgttttgttgtttctctaaaaatttactgttctttgtcgatgctatataagccagggagttctaagacgccagctctttgagatttgctcattcccctgtatttcccacatatatattacatatacccgctaataaatttatgtttgtttttctcttgtcaatctgtcttttgttataggggccccagccaaggaacctaaagtgggtagaaggaaaaattattttttctttccctacaaactgaacatggattattagaactcaaggttttcattgacaatatagaaaagaaacactgaatcattttattttattgcccaatttttatttcttatatgactctagtgtttcatcttcataattaatcatgtttgaaggatttctgagtgactcagcagcctgttaaagaaggatgaaccaaagaaaacatttcactaaatgtgcttttaaaaatcaagtgtattgctggttctgctgcagtatgtagtcgaagaataaattagtaaattgcttctgagggtctgaaattgaataaagtaatggctttgtatttctataaaagttgtctccccttgtttcctttccattctggcacatgtagacatttaatttatgaataaaaccctttcctgtccttcacttagtatgatattaatagcctttttcttatctttagagggtaactctgggctggcagcggtggctcacaactctaatccctgtactttgggaggctgaggtgggcagatcacatgaggccaggagtttgagactggcctgggcagcatggcaagacccggtctcta

SEQ ID NO: 2021 - protein, 147 aa, Homo sapiens [sequence omitted]

SEQ ID NO: 2022 - DNA, 2358 bp, Homo sapiens
aagctgagcgcctccgcccgccaggcgcgccggcgccgggccatgtactcggggaaccgcagcggcggccacggctactgggacggcggcggggccgcgggcgctgaggggccggcgccggcggggacactgagccccgcgcccctcttcagccccggcacctacgagcgcctggcgctgctgctgggctccattgggctgctgggcgtcggcaacaacctgctggtgctcgtcctctactacaagttccagcggctccgcactcccactcacctcctcctggtcaacatcagcctcagcgacctgctggtgtccctcttcggggtcacctttaccttcgtgtcctgcctgaggaacggctgggtgtgggacaccgtgggctgcgtgtgggacgggtttagcggcagcctcttcggttggatcagccagcttcaggcagccactagggaagccagagcctccatgggtccagtgcagcaaggcactatctgcatgcagacggagtctcactctgttgcccaggctggagtgcattggcatgatctcggctgactgcaacctccacctcatggattccagcgattctcctgcttcagcctcccaagtagctgggactacagcttcgttgtgtggaagatcttcagacaattcaagtgatcaagattttaaaatatgaaaagaaactggccaaaatgtgctttttaatgatattcaccttcctggtctgttggatgccttatatcgtgatctgcttcttggtggttaatggtcatggtcacctggtcactccaacaatatctattgtttcgtacctctttgctaaatcgaacactgtatacaatccagtgatttatgtcttcatgatcagaaagtttcgaagatcccttttgcagcttctgtgcctccgactgctgaggtgccagaggcctgctaaagacctaccagcagctggaagtgaaatgcagatcagacccattgtgatgtcacagaaagatggggacaggccaaagaaaaaagtgactttcaactcttcttccatcatttttatcatcaccagtgatgaatcactgtcagttgacgacagcgacaaaaccaatgggtccaaagttgatgtaatccaagttcgtcctttgtaggaatgaagaatggcaacgaaagatggggccttaaattggatgccacttttggactttcatcataagaagtgtctggaatacccgttctatgtaatatcaacagaaccttgtggtccagcaggaaatccgaattgcccatatgctcttgggcctcaggaagaggttgaacaaaaacaaattcttttaattcaacgggtgctttacataatgaaaaaaccacttgtggcacacgatgggcatctaacatcatcatcttctaatgtgttggagattttcatttcaaatatattttttaaattactctattttccaaaacacgtaatgcatttttctcgaaaataccttactgtaaaaataactgtcgcgtacacatgtgtgaagtagctagaacatactgaattttttttgtactgttggactctattcagtgtcatgtcctatatctgatcaagttatcaaggagataattctagaatgaaaaagaaaatcctcttgttggaaacaaaagacgttttatatgtgcagtatgacaaagaggagtttcagagacaactttgaatccttgtcagcctggagaccagcaccagaggaatctacaaggcaaactcccatatatttgcttcccccaaattgctgcccctacagactcaaagctctttttctttgttttgttgtttctctaaaaatttactgttctttgtcgatgctatataagccagggagttctaagacgccagctctttgagatttgctcattcccctgtatttcccacatatatattacatatacccgctaataaatttatgtttgtttttctcttgtcaatctgtcttttgttataggggccccagccaaggaacctaaagtgggtagaaggaaaaattattttttctttccctacaaactgaacatggattattagaactcaaggttttcattgacaatatagaaaagaaacactgaatcattttattttattgcccaatttttatttcttatatgactctagtgtttcatcttcataattaatcatgtttgaaggatttctgagtgactcagcagcctgttaaagaaggatgaaccaaagaaaacatttcactaaatgtgcttttaaaaatcaagtgtattgctggttctgctgcagtatgtagtcgaagaataaattagtaaattgcttctgagggtctgaaattgaataaagtaatggctttgtatttctat

SEQ ID NO: 2023 - protein, 169 aa, Homo sapiens; identical to SEQ ID NO: 2013

SEQ ID NO: 2024 - DNA, 2212 bp, Homo sapiens
agagcaggcggcggagccccaaccccacccagtgcggagcgcgccgcgagccccgccgcaagctgagcgcctccgcccgccaggcgcgccggcgccgggccatgtactcggggaaccgcagcggcggccacggctactgggacggcggcggggccgcgggcgctgaggggccggcgccggcggggacactgagccccgcgcccctcttcagccccggcacctacgagcgcctggcgctgctgctgggctccattgggctgctgggcgtcggcaacaacctgctggtgctcgtcctctactacaagttccagcggctccgcactcccactcacctcctcctggtcaacatcagcctcagcgacctgctggtgtccctcttcggggtcacctttaccttcgtgtcctgcctgaggaacggctgggtgtgggacaccgtgggctgcgtgtgggacgggtttagcggcagcctcttcgcttcgttgtgtggaagatcttcagacaattcaagtgatcaagattttaaaatatgaaaagaaactggccaaaatgtgctttttaatgatattcaccttcctggtctgttggatgccttatatcgtgatctgcttcttggtggttaatggtcatggtcacctggtcactccaacaatatctattgtttcgtacctctttgctaaatcgaacactgtatacaatccagtgatttatgtcttcatgatcagaaagtttcgaagatcccttttgcagcttctgtgcctccgactgctgaggtgccagaggcctgctaaagacctaccagcagctggaagtgaaatgcagatcagacccattgtgatgtcacagaaagatggggacaggccaaagaaaaaagtgactttcaactcttcttccatcatttttatcatcaccagtgatgaatcactgtcagttgacgacagcgacaaaaccaatgggtccaaagttgatgtaatccaagttcgtcctttgtaggaatgaagaatggcaacgaaagatggggccttaaattggatgccacttttggactttcatcataagaagtgtctggaatacccgttctatgtaatatcaacagaaccttgtggtccagcaggaaatccgaattgcccatatgctcttgggcctcaggaagaggttgaacaaaaacaaattcttttaattcaacgggtgctttacataatgaaaaaaccacttgtggcacacgatgggcatctaacatcatcatcttctaatgtgttggagattttcatttcaaatatattttttaaattactctattttccaaaacacgtaatgcatttttctcgaaaataccttactgtaaaaataactgtcgcgtacacatgtgtgaagtagctagaacatactgaattttttttgtactgttggactctattcagtgtcatgtcctatatctgatcaagttatcaaggagataattctagaatgaaaaagaaaatcctcttgttggaaacaaaagacgttttatatgtgcagtatgacaaagaggagtttcagagacaactttgaatccttgtcagcctggagaccagcaccagaggaatctacaaggcaaactcccatatatttgcttcccccaaattgctgcccctacagactcaaagctctttttctttgttttgttgtttctctaaaaatttactgttctttgtcgatgctatataagccagggagttctaagacgccagctctttgagatttgctcattcccctgtatttcccacatatatattacatatacccgctaataaatttatgtttgtttttctcttgtcaatctgtcttttgttataggggccccagccaaggaacctaaagtgggtagaaggaaaaattattttttctttccctacaaactgaacatggattattagaactcaaggttttcattgacaatatagaaaagaaacactgaatcattttattttattgcccaatttttatttcttatatgactctagtgtttcatcttcataattaatcatgtttgaaggatttctgagtgactcagcagcctgttaaagaaggatgaaccaaagaaaacatttcactaaatgtgcttttaaaaatcaagtgtattgctggttctgctgcagtatgtagtcgaagaataaattagtaaattgcttctgagggtctgaaattgaataaagtaatggctttgtatttctat

SEQ ID NO: 2025 - protein, 147 aa, Homo sapiens [sequence omitted]

SEQ ID NO: 2026 - DNA, 2538 bp, Homo sapiens
atggctagagcaggcggcggagccccaaccccacccagtgcggagcgcgccgcgagccccgccgcaagctgagcgcctccgcccgccaggcgcgccggcgccgggccatgtactcggggaaccgcagcggcggccacggctactgggacggcggcggggccgcgggcgctgaggggccggcgccggcggggacactgagccccgcgcccctcttcagccccggcacctacgagcgcctggcgctgctgctgggctccattgggctgctgggcgtcggcaacaacctgctggtgctcgtcctctactacaagttccagcggctccgcactcccactcacctcctcctggtcaacatcagcctcagcgacctgctggtgtccctcttcggggtcacctttaccttcgtgtcctgcctgaggaacggctgggtgtgggacaccgtgggctgcgtgtgggacgggtttagcggcagcctcttcgggattgtttccattgccaccctaaccgtgctggcctatgaacgttacattcgcgtggtccatgccagagtgatcaatttttcctgggcctggagggccattacctacatctggctctactcactggcgtgggcaggagcacctctcctgggatggaacaggtacatcctggacgtacacggactaggctgcactgtggactggaaatccaaggatgccaacgattcctcctttgtgcttttcttatttcttggctgcctggtggtgcccctgggtgtcatagcccattgctatggccatattctatattccattcgaatgcttcgttgtgtggaagatcttcagacaattcaagtgatcaagattttaaaatatgaaaagaaactggccaaaatgtgctttttaatgatattcaccttcctggtctgttggatgccttatatcgtgatctgcttcttggtggttaatggtcatggtcacctggtcactccaacaatatctattgtttcgtacctctttgctaaatcgaacactgtatacaatccagtgatttatgtcttcatgatcagaaagtttcgaagatcccttttgcagcttctgtgcctccgactgctgaggtgccagaggcctgctaaagacctaccagcagctggaagtgaaatgcagatcagacccattgtgatgtcacagaaagatggggacaggccaaagaaaaaagtgactttcaactcttcttccatcatttttatcatcaccagtgatgaatcactgtcagttgacgacagcgacaaaaccaatgggtccaaagttgatgtaatccaagttcgtcctttgtaggaatgaagaatggcaacgaaagatggggccttaaattggatgccacttttggactttcatcataagaagtgtctggaatacccgttctatgtaatatcaacagaaccttgtggtccagcaggaaatccgaattgcccatatgctcttgggcctcaggaagaggttgaacaaaaacaaattcttttaattcaacgggtgctttacataatgaaaaaaccacttgtggcacacgatgggcatctaacatcatcatcttctaatgtgttggagattttcatttcaaatatattttttaaattactctattttccaaaacacgtaatgcatttttctcgaaaataccttactgtaaaaataactgtcgcgtacacatgtgtgaagtagctagaacatactgaattttttttgtactgttggactctattcagtgtcatgtcctatatctgatcaagttatcaaggagataattctagaatgaaaaagaaaatcctcttgttggaaacaaaagacgttttatatgtgcagtatgacaaagaggagtttcagagacaactttgaatccttgtcagcctggagaccagcaccagaggaatctacaaggcaaactcccatatatttgcttcccccaaattgctgcccctacagactcaaagctctttttctttgttttgttgtttctctaaaaatttactgttctttgtcgatgctatataagccagggagttctaagacgccagctctttgagatttgctcattcccctgtatttcccacatatatattacatatacccgctaataaatttatgtttgtttttctcttgtcaatctgtcttttgttataggggccccagccaaggaacctaaagtgggtagaaggaaaaattattttttctttccctacaaactgaacatggattattagaactcaaggttttcattgacaatatagaaaagaaacactgaatcattttattttattgcccaatttttatttcttatatgactctagtgtttcatcttcataattaatcatgtttgaaggatttctgagtgactcagcagcctgttaaagaaggatgaaccaaagaaaacatttcactaaatgtgcttttaaaaatcaagtgtattgctggttctgctgcagtatgtagtcgaagaataaattagtaaattgcttctgagggtctgaaattgaataaagtaatggctttgtatttctat

SEQ ID NO: 2027 - protein, 402 aa, Homo sapiens; identical to SEQ ID NO: 109

SEQ ID NO: 2028 - DNA, 1812 bp, Homo sapiens
gaagagttcaaaaaggcttttctaacccgggactgacttctaggtggaaaaaatacatcgctgtaagaaaaccgcttcgttgtgtggaagatcttcagacaattcaagtgatcaagattttaaaatatgaaaagaaactggccaaaatgtgctttttaatgatattcaccttcctggtctgttggatgccttatatcgtgatctgcttcttggtggttaatggtcatggtcacctggtcactccaacaatatctattgtttcgtacctctttgctaaatcgaacactgtatacaatccagtgatttatgtcttcatgatcagaaagtttcgaagatcccttttgcagcttctgtgcctccgactgctgaggtgccagaggcctgctaaagacctaccagcagctggaagtgaaatgcagatcagacccattgtgatgtcacagaaagatggggacaggccaaagaaaaaagtgactttcaactcttcttccatcatttttatcatcaccagtgatgaatcactgtcagttgacgacagcgacaaaaccaatgggtccaaagttgatgtaatccaagttcgtcctttgtaggaatgaagaatggcaacgaaagatggggccttaaattggatgccacttttggactttcatcataagaagtgtctggaatacccgttctatgtaatatcaacagaaccttgtggtccagcaggaaatccgaattgcccatatgctcttgggcctcaggaagaggttgaacaaaaacaaattcttttaattcaacgggtgctttacataatgaaaaaaccacttgtggcacacgatgggcatctaacatcatcatcttctaatgtgttggagattttcatttcaaatatattttttaaattactctattttccaaaacacgtaatgcatttttctcgaaaataccttactgtaaaaataactgtcgcgtacacatgtgtgaagtagctagaacatactgaattttttttgtactgttggactctattcagtgtcatgtcctatatctgatcaagttatcaaggagataattctagaatgaaaaagaaaatcctcttgttggaaacaaaagacgttttatatgtgcagtatgacaaagaggagtttcagagacaactttgaatccttgtcagcctggagaccagcaccagaggaatctacaaggcaaactcccatatatttgcttcccccaaattgctgcccctacagactcaaagctctttttctttgttttgttgtttctctaaaaatttactgttctttgtcgatgctatataagccagggagttctaagacgccagctctttgagatttgctcattcccctgtatttcccacatatatattacatatacccgctaataaatttatgtttgtttttctcttgtcaatctgtcttttgttataggggccccagccaaggaacctaaagtgggtagaaggaaaaattattttttctttccctacaaactgaacatggattattagaactcaaggttttcattgacaatatagaaaagaaacactgaatcattttattttattgcccaatttttatttcttatatgactctagtgtttcatcttcataattaatcatgtttgaaggatttctgagtgactcagcagcctgttaaagaaggatgaaccaaagaaaacatttcactaaatgtgcttttaaaaatcaagtgtattgctggttctgctgcagtatgtagtcgaagaataaattagtaaattgcttctgagggtctgaaattgaataaagtaatggctttgtatttctat

SEQ ID NO: 2029 - protein, 147 aa, Homo sapiens [sequence omitted]

SEQ ID NO: 2030 - DNA, 1960 bp, Homo sapiens
aagctgagcgcctccgcccgccaggcgcgccggcgccgggccatgtactcggggaaccgcagcggcggccacggctactgggacggcggcggggccgcgggcgctgaggggccggcgccggcggggacactgagccccgcgcccctcttcagccccggcacctacgagcgcctggcgctgctgctgggctccattgggctgctgggcgtcggcaacaacctgctggtgctcgtcctctactacaagttccagcggctccgcactcccactcacctcctcctggtcaacatcagcctcagcgacctgctggtgtccctcttcggggtcacctttaccttcgtgtcctgcctgaggaacggctgggtgtgggacaccgtgggctgcgtgtgggacgggtttagcggcagcctcttcggttggatcagccagcttcaggcagccactagggaagccagagcctccatgggtccagtgcagcaaggcactatctgcatgcagacggagtctcactctgttgcccaggctggagtgcattggcatgatctcggctgactgcaacctccacctcatggattccagcgattctcctgcttcagcctcccaagtagctgggactacagcttcgttgtgtggaagatcttcagacaattcaagtgatcaagattttaaaatatgaaaagaaactggccaaaatgtgctttttaatgatattcaccttcctggtctgttggatgccttatatcgtgatctgcttcttggtggttaatggtcatggtcacctggtcactccaacaatatctattgtttcgtacctctttgctaaatcgaacactgtatacaatccagtgatttatgtcttcatgatcagaaagtttcgaagatcccttttgcagcttctgtgcctccgactgctgaggtgccagaggcctgctaaagacctaccagcagctggaagtgaaatgcagatcagacccattgtgatgtcacagaaagatggggacaggccaaagaaaaaagtgactttcaactcttcttccatcatttttatcatcaccagtgatgaatcactgtcagttgacgacagcgacaaaaccaatgggtccaaagttgatgtaatccaagttcgtcctttgtaggaatgaagaatggcaacgaaagatggggccttaaattggatgccacttttggactttcatcataagaagtgtctggaatacccgttctatgtaatatcaacagaaccttgtggtccagcaggaaatccgaattgcccatatgctcttgggcctcaggaagaggttgaacaaaaacaaattcttttaattcaacgggtgctttacataatgaaaaaaccacttgtggcacacgatgggcatctaacatcatcatcttctaatgtgttggagattttcatttcaaatatattttttaaattactctattttccaaaacacgtaatgcatttttctcgaaaataccttactgtaaaaataactgtcgcgtacacatgtgtgaagtagctagaacatactgaattttttttgtactgttggactctattcagtgtcatgtcctatatctgatcaagttatcaaggagataattctagaatgaaaaagaaaatcctcttgttggaaacaaaagacgttttatatgtgcagtatgacaaagaggagtttcagagacaactttgaatccttgtcagcctggagaccagcaccagaggaatctacaaggcaaactcccatatatttgcttcccccaaattgctgcccctacagactcaaagctctttttctttgttttgttgtttctctaaaaatttactgttctttgtcgatgctatataagccagggagttctaagacgccagctctttgagatttgctcattcccctgtatttcccacatatatattacatatacccgctaataaatttatgtttgtttttctcttgtc

SEQ ID NO: 2031 - protein, 169 aa, Homo sapiens; identical to SEQ ID NO: 2013

SEQ ID NO: 2032 - DNA, 1959 bp, Homo sapiens
gccccaaccccacccagtgcggagcgcgccgcgagccccgccgcaagctgagcgcctccgcccgccaggcgcgccggcgccgggccatgtactcggggaaccgcagcggcggccacggctactgggacggcggcggggccgcgggcgctgaggggccggcgccggcggggacactgagccccgcgcccctcttcagccccggcacctacgagcgcctggcgctgctgctgggctccattgggctgctgggcgtcggcaacaacctgctggtgctcgtcctctactacaagttccagcggctccgcactcccactcacctcctcctggtcaacatcagcctcagcgacctgctggtgtccctcttcggggtcacctttaccttcgtgtcctgcctgaggaacggctgggtgtgggacaccgtgggctgcgtgtgggacgggtttagcggcagcctcttcgggattgtttccattgccaccctaaccgtgctggcctatgaacgttacattcgcgtggtccatgccagagtgatcaatttttcctgggcctggagggccattacctacatctggctctactcactggcgtgggcaggagcacctctcctgggatggaacagcttcgttgtgtggaagatcttcagacaattcaagtgatcaagattttaaaatatgaaaagaaactggccaaaatgtgctttttaatgatattcaccttcctggtctgttggatgccttatatcgtgatctgcttcttggtggttaatggtcatggtcacctggtcactccaacaatatctattgtttcgtacctctttgctaaatcgaacactgtatacaatccagtgatttatgtcttcatgatcagaaagtttcgaagatcccttttgcagcttctgtgcctccgactgctgaggtgccagaggcctgctaaagacctaccagcagctggaagtgaaatgcagatcagacccattgtgatgtcacagaaagatggggacaggccaaagaaaaaagtgactttcaactcttcttccatcatttttatcatcaccagtgatgaatcactgtcagttgacgacagcgacaaaaccaatgggtccaaagttgatgtaatccaagttcgtcctttgtaggaatgaagaatggcaacgaaagatggggccttaaattggatgccacttttggactttcatcataagaagtgtctggaatacccgttctatgtaatatcaacagaaccttgtggtccagcaggaaatccgaattgcccatatgctcttgggcctcaggaagaggttgaacaaaaacaaattcttttaattcaacgggtgctttacataatgaaaaaaccacttgtggcacacgatgggcatctaacatcatcatcttctaatgtgttggagattttcatttcaaatatattttttaaattactctattttccaaaacacgtaatgcatttttctcgaaaataccttactgtaaaaataactgtcgcgtacacatgtgtgaagtagctagaacatactgaattttttttgtactgttggactctattcagtgtcatgtcctatatctgatcaagttatcaaggagataattctagaatgaaaaagaaaatcctcttgttggaaacaaaagacgttttatatgtgcagtatgacaaagaggagtttcagagacaactttgaatccttgtcagcctggagaccagcaccagaggaatctacaaggcaaactcccatatatttgcttcccccaaattgctgcccctacagactcaaagctctttttctttgttttgttgtttctctaaaaatttactgttctttgtcgatgctatataagccagggagttctaagacgccagctctttgagatttgctcattcccctgtatttcccacatatatattacatatacccgctaataaatttatgtttgtttttctcttgtc

SEQ ID NO: 2033 - protein, 189 aa, Homo sapiens; identical to SEQ ID NO: 2017

SEQ ID NO: 2034 - DNA, 1814 bp, Homo sapiens
agagcaggcggcggagccccaaccccacccagtgcggagcgcgccgcgagccccgccgcaagctgagcgcctccgcccgccaggcgcgccggcgccgggccatgtactcggggaaccgcagcggcggccacggctactgggacggcggcggggccgcgggcgctgaggggccggcgccggcggggacactgagccccgcgcccctcttcagccccggcacctacgagcgcctggcgctgctgctgggctccattgggctgctgggcgtcggcaacaacctgctggtgctcgtcctctactacaagttccagcggctccgcactcccactcacctcctcctggtcaacatcagcctcagcgacctgctggtgtccctcttcggggtcacctttaccttcgtgtcctgcctgaggaacggctgggtgtgggacaccgtgggctgcgtgtgggacgggtttagcggcagcctcttcgcttcgttgtgtggaagatcttcagacaattcaagtgatcaagattttaaaatatgaaaagaaactggccaaaatgtgctttttaatgatattcaccttcctggtctgttggatgccttatatcgtgatctgcttcttggtggttaatggtcatggtcacctggtcactccaacaatatctattgtttcgtacctctttgctaaatcgaacactgtatacaatccagtgatttatgtcttcatgatcagaaagtttcgaagatcccttttgcagcttctgtgcctccgactgctgaggtgccagaggcctgctaaagacctaccagcagctggaagtgaaatgcagatcagacccattgtgatgtcacagaaagatggggacaggccaaagaaaaaagtgactttcaactcttcttccatcatttttatcatcaccagtgatgaatcactgtcagttgacgacagcgacaaaaccaatgggtccaaagttgatgtaatccaagttcgtcctttgtaggaatgaagaatggcaacgaaagatggggccttaaattggatgccacttttggactttcatcataagaagtgtctggaatacccgttctatgtaatatcaacagaaccttgtggtccagcaggaaatccgaattgcccatatgctcttgggcctcaggaagaggttgaacaaaaacaaattcttttaattcaacgggtgctttacataatgaaaaaaccacttgtggcacacgatgggcatctaacatcatcatcttctaatgtgttggagattttcatttcaaatatattttttaaattactctattttccaaaacacgtaatgcatttttctcgaaaataccttactgtaaaaataactgtcgcgtacacatgtgtgaagtagctagaacatactgaattttttttgtactgttggactctattcagtgtcatgtcctatatctgatcaagttatcaaggagataattctagaatgaaaaagaaaatcctcttgttggaaacaaaagacgttttatatgtgcagtatgacaaagaggagtttcagagacaactttgaatccttgtcagcctggagaccagcaccagaggaatctacaaggcaaactcccatatatttgcttcccccaaattgctgcccctacagactcaaagctctttttctttgttttgttgtttctctaaaaatttactgttctttgtcgatgctatataagccagggagttctaagacgccagctctttgagatttgctcattcccctgtatttcccacatatatattacatatacccgctaataaatttatgtttgtttttctcttgtc

SEQ ID NO: 2035 - protein, 147 aa, Homo sapiens [sequence omitted]

SEQ ID NO: 2036 - DNA, 2140 bp, Homo sapiens
atggctagagcaggcggcggagccccaaccccacccagtgcggagcgcgccgcgagccccgccgcaagctgagcgcctccgcccgccaggcgcgccggcgccgggccatgtactcggggaaccgcagcggcggccacggctactgggacggcggcggggccgcgggcgctgaggggccggcgccggcggggacactgagccccgcgcccctcttcagccccggcacctacgagcgcctggcgctgctgctgggctccattgggctgctgggcgtcggcaacaacctgctggtgctcgtcctctactacaagttccagcggctccgcactcccactcacctcctcctggtcaacatcagcctcagcgacctgctggtgtccctcttcggggtcacctttaccttcgtgtcctgcctgaggaacggctgggtgtgggacaccgtgggctgcgtgtgggacgggtttagcggcagcctcttcgggattgtttccattgccaccctaaccgtgctggcctatgaacgttacattcgcgtggtccatgccagagtgatcaatttttcctgggcctggagggccattacctacatctggctctactcactggcgtgggcaggagcacctctcctgggatggaacaggtacatcctggacgtacacggactaggctgcactgtggactggaaatccaaggatgccaacgattcctcctttgtgcttttcttatttcttggctgcctggtggtgcccctgggtgtcatagcccattgctatggccatattctatattccattcgaatgcttcgttgtgtggaagatcttcagacaattcaagtgatcaagattttaaaatatgaaaagaaactggccaaaatgtgctttttaatgatattcaccttcctggtctgttggatgccttatatcgtgatctgcttcttggtggttaatggtcatggtcacctggtcactccaacaatatctattgtttcgtacctctttgctaaatcgaacactgtatacaatccagtgatttatgtcttcatgatcagaaagtttcgaagatcccttttgcagcttctgtgcctccgactgctgaggtgccagaggcctgctaaagacctaccagcagctggaagtgaaatgcagatcagacccattgtgatgtcacagaaagatggggacaggccaaagaaaaaagtgactttcaactcttcttccatcatttttatcatcaccagtgatgaatcactgtcagttgacgacagcgacaaaaccaatgggtccaaagttgatgtaatccaagttcgtcctttgtaggaatgaagaatggcaacgaaagatggggccttaaattggatgccacttttggactttcatcataagaagtgtctggaatacccgttctatgtaatatcaacagaaccttgtggtccagcaggaaatccgaattgcccatatgctcttgggcctcaggaagaggttgaacaaaaacaaattcttttaattcaacgggtgctttacataatgaaaaaaccacttgtggcacacgatgggcatctaacatcatcatcttctaatgtgttggagattttcatttcaaatatattttttaaattactctattttccaaaacacgtaatgcatttttctcgaaaataccttactgtaaaaataactgtcgcgtacacatgtgtgaagtagctagaacatactgaattttttttgtactgttggactctattcagtgtcatgtcctatatctgatcaagttatcaaggagataattctagaatgaaaaagaaaatcctcttgttggaaacaaaagacgttttatatgtgcagtatgacaaagaggagtttcagagacaactttgaatccttgtcagcctggagaccagcaccagaggaatctacaaggcaaactcccatatatttgcttcccccaaattgctgcccctacagactcaaagctctttttctttgttttgttgtttctctaaaaatttactgttctttgtcgatgctatataagccagggagttctaagacgccagctctttgagatttgctcattcccctgtatttcccacatatatattacatatacccgctaataaatttatgtttgtttttctcttgtc

SEQ ID NO: 2037 - protein, 402 aa, Homo sapiens; identical to SEQ ID NO: 109

SEQ ID NO: 2038 - DNA, 1414 bp, Homo sapiens
gaagagttcaaaaaggcttttctaacccgggactgacttctaggtggaaaaaatacatcgctgtaagaaaaccgcttcgttgtgtggaagatcttcagacaattcaagtgatcaagattttaaaatatgaaaagaaactggccaaaatgtgctttttaatgatattcaccttcctggtctgttggatgccttatatcgtgatctgcttcttggtggttaatggtcatggtcacctggtcactccaacaatatctattgtttcgtacctctttgctaaatcgaacactgtatacaatccagtgatttatgtcttcatgatcagaaagtttcgaagatcccttttgcagcttctgtgcctccgactgctgaggtgccagaggcctgctaaagacctaccagcagctggaagtgaaatgcagatcagacccattgtgatgtcacagaaagatggggacaggccaaagaaaaaagtgactttcaactcttcttccatcatttttatcatcaccagtgatgaatcactgtcagttgacgacagcgacaaaaccaatgggtccaaagttgatgtaatccaagttcgtcctttgtaggaatgaagaatggcaacgaaagatggggccttaaattggatgccacttttggactttcatcataagaagtgtctggaatacccgttctatgtaatatcaacagaaccttgtggtccagcaggaaatccgaattgcccatatgctcttgggcctcaggaagaggttgaacaaaaacaaattcttttaattcaacgggtgctttacataatgaaaaaaccacttgtggcacacgatgggcatctaacatcatcatcttctaatgtgttggagattttcatttcaaatatattttttaaattactctattttccaaaacacgtaatgcatttttctcgaaaataccttactgtaaaaataactgtcgcgtacacatgtgtgaagtagctagaacatactgaattttttttgtactgttggactctattcagtgtcatgtcctatatctgatcaagttatcaaggagataattctagaatgaaaaagaaaatcctcttgttggaaacaaaagacgttttatatgtgcagtatgacaaagaggagtttcagagacaactttgaatccttgtcagcctggagaccagcaccagaggaatctacaaggcaaactcccatatatttgcttcccccaaattgctgcccctacagactcaaagctctttttctttgttttgttgtttctctaaaaatttactgttctttgtcgatgctatataagccagggagttctaagacgccagctctttgagatttgctcattcccctgtatttcccacatatatattacatatacccgctaataaatttatgtttgtttttctcttgtc

SEQ ID NO: 2039 - protein, 147 aa, Homo sapiens [sequence omitted]

SEQ ID NO: 2040 - DNA, 7078 bp, Homo sapiens
ataagaaaaaaaatattttaaaagggtaaccgttaaacagctaggacctgcaacttcagtgcttctgggataactggaacatcagaaggacagattttattacagcataatcacacctcatttctttcatcagcagttgtcaccagacgctgttacttcctaaaatggcggacaatcttcccacagagtttgatgtggttataatagggacaggtttgcccgaatccatccttgcagctgcatgttcaagaagtggtcagagggttctgcatattgattcaagaagctactatggaggaaactgggctagtttcagcttttcaggattgctatcctggttgaaggagtatcagcaaaacaatgacattggggaagaaagtactgttgtatggcaggacctgatccatgaaacagaagaagccatcactcttcgcaagaaggatgaaactattcaacacacagaagctttttgctacgccagtcaggatatggaggacaacgttgaagagattggtgctctgcagaaaaatccttctttgggggtgtctaataccttcactgaagttctggattctgcattacctgaagaaagccagttatcgtattttaatagcgacgaaatgcctgcaaaacacactcagaaaagtgatacagagatttcactagaagtaactgatgtagaggaatcagtggagaaggaaaagtattgtggagataaaacttgtatgcacacagtttcagataaagatggagataaagatgaaagcaaatctacagtagaagataaggccgatgaaccaattagaaataggattacttactctcaaatagttaaagaaggcaggaggtttaatattgatttggtgtcaaaactgctgtattctcaaggattgctaattgatcttttaatcaaatcagatgttagtcgttatgtagaatttaaaaatgtcactaggattcttgcatttcgggaaggaaaggtagaacaagttccttgttccagagcagatgtctttaatagcaaggaactcaccatggttgaaaagaggatgctaatgaaatttctcacattttgtttagagtatgaacaacatcctgatgaataccaagctttcaggcagtgttcattttcagaatacttaaaaactaaaaaactaactcccaaccttcaacattttgtactgcactcaattgcaatgacatcagaatcatcttgcactacaatagatggtcttaacgcaactaaaaacttccttcagtgtctcggacggtttggcaacaccccctttttatttcccttgtatggccaaggagaaattccccagggtttctgtaggatgtgtgcagtttttggtggaatctattgtcttcgtcataaagtacaatgctttgtagtcgacaaagaatctggacgatgtaaagcaattatagatcactttggtcaaagaataaatgctaaatattttattgtggaagacagttacctttctgaggaaacatgctcaaatgtgcagtataagcagatctctagggcagtactcattacagatcagtctatactaaagacagatttagatcagcagacttccattctgatagttcctccagcagagccaggagcttgtgctgtacgggtcacagaattatgttcttcaaccatgacatgcatgaaggacacctatctggtacatttgacatgttcatcttctaaaacagcaagagaagacttagaatcagtggtgaagaaattattcactccgtatactgaaacagaaataaacgaggaagaacttacaaagccaagactcttgtgggctctttattttaatatgagagattcctcgggaatcagcagaagctcgtataatggcttgccttccaatgtttatgtctgctctgggcctgactgtggcctgggaaatgagcatgctgtcaagcaagctgaaacacttttccaggagatctttccaactgaagaattctgccctccacctccaaatccagaagacattatctttgatggtgatgataagcagccagaggctcctggaaccaataatgtagtaatggccaaactagaatcctctgaggaaagcaaaaacctagaaagcccagagaagcaccttcaaaattagaaaagagcaatctcgaaatgctgttttggacctccttcatggcatcagaattttctcatttaaaggacagtttcccatatgagtaattagaagtggttatatatgatgaatgctatgcagatgttgtctttaactctcagacattcagcattgaatatctttgttaacctatcaatgagtgatttattgattattgaacattttgtttagaatgggctatatgacccagaatcttaaaacagagttagctttattttagtattgggtatatatgtaagggttccatattagcaactcagcttaaaggtaatgtatttgctaatgatcttcagattttatctttgtctacagaacaattagtaatacccaagtaatattttaattacttttgcagctgttacagttgctgcggcctgttcgaatagtgaaacatacacaaatggtaaattatgtggatcttttgcatataatataaatgtatagacatggtggtaggaatagcaactaatacaaatgccaatatgataataaaatacatttgtctataatcgtttaaagattagctttgcatgatcctttatgcactgtgaaggtctgaagtttataatactcacttgacccttgtaactgatgaggcaatgatgccaccacagtattctaatttacaaaaagaattggagttcaattagtggttgtaaagctcattttggggaggttgattgcaaaggaaatttgaaagataagatttattcttatttaatacttcagaaaatttctgcagagccctgccctggcacttaaaatagcttccaataagtaacttagaccaaaaggaaaaatgaagtgccccaggagaagatacttcagaagggctgttctgaaattcctaaggaggaattcttaggaattcctaaggagaaacagagtgaggcctttttaacctgagattacagatacttataaaaccctctataaatagattacccaaggtttttcagtgagaatgaaacataccaccttgttggctctaccactttaattaatatcactataacataactgataggaatgaatcaaaggaggatttaccatgccctttcggttgtgtcccacttaacaaattgtgaagtaacaattttctgtaatctctcttgcctcttagctgttatccagagtatagaaactttttttctcccagagccacccaacgtcataaaactggtagtactctaatggtgaaaacctgtggagctgtcagaagacatgaacttgcttttcctctagtccagtttccattcttcagtcagagtatgatgatccctgtgacagtttttgctctgaaatagtatttatcatgtgtttggtacctagtattatgctttctcatgacagtttctcaacaatcctgtgaggcaaattcgcatgtaccctctgtattagtgtgttctcatgctgttgataaagacacacctgagatggtaatttgtaaagaaaaaggtttaatggactcacagttccatgtggctggggaggcctcacaatcatggtggaaggtgaaaggcacgtcttacatggcggtggacaagagagaatgagaactaagtgaaaagggaaacccttttaaaaccatcagatatcgtgagacttatttactaccatgagaacagtatgggggaaacaactccatgattcagttatctcccaccaggttcctcccacaacacgtgggaattataggagctacaattcaagatgagatttgagtgggaacacagccaaaccatatcaccttcaaagaagaaataagagaattattagtaatttgctcagaatctggtatgtggaagagccaacatggggacccagccttttgtgattctaaaacctttgatctttctactaacattcactgttagagagtgtaggcgctgcaggagaaagagaaagtgcccacgaaaattagtctagcattgccgggggtaaaaagcacacactggtcctgcagcttattgaatcagagaaatgtgaagataagatgaactaaacaaacatattttagagcatggatctcgaagcagaatttggctaaattttaacaaaatgttcttcagtaacacatctcatgatctgaagattgtgttacaaaaaatattatcaggccaaaatttgttcggaatacactaatttttgctcctctatatgtgaggaaaatgagactagacagatttaagtaattgacaacttacttaaagtagcaaagtcatggattgtattgacttttaaaaatatagtaaaagtcatatttaaactttatcctaaagtttaaatctaacagaacaactgaaatacttgaaatagacctataaaatagtaattaaaatgagaaatacataagatgataaataaaatgaaggtgaaggtattccagatctaccgaaaagattttcagtatcacagattattcataagaaattgagaaaaggaacaatcagaagttgcaaaagatggtatagccgaatataatggaaataggaaaaattagtcgaaaataaaggttgatttagaaatgaagaaaatgaatatatttcttaatacaaaataagtgggaaatgagaagttataccaataaaaagcatttaaaaatttaggggatattgtaacccagtataattttctgacaggttggactttgaccctaatggacttactggtgaactttttcaaatgtttaaataatgtctatccatgtatcatgaaggacagtatgcttcaaattgtcttttgaggcagacatgttctcagtactaaaagacatttttagaaggattttattctcaacagatgcaaaatgcaaaataaaatattggcaaacaatacagcaacaaataatttactatcactcaggattataaggctggtgttaagcagaacagccattaaatcagcatcaaaagaacaaatagtaaaatccaaagtattaattacagataacttttcaaaaattcatcattcacccttgatttaattatttctctggcaatgatttaatagacttctcggagtctgttaagtacttaaaccaagaactaccattattcctactgggaaaacataaacatttctcaagtggaaagtaaacagtgttggcactatttttatatatggttaaagagacctgtcattgcaataaaagccagcattcacaaaatgaggaagataaggaaagtagcataaatattttctattaacatggctttacaactgctaaaacttatagtataaaaatgtactaacaaagactaattcaagaagttgcaggatacacaatttttaaaaatctcatttctacatcttagcagtgacaaactgcaatttaaaaagtgtgtttggttattaatatatatgagacttttaaagaaagttatataactacatagagataaattaagaaagatgcctaaatagaagcaagtttaaagagctatatttttaaacatgaacaaactcccatgggagccatgccagtgtagtggaaaagtagtacatggggagatggggagtttttttgaaaaccagaattacagttctcatttcactacttaccagttgtatactcttgggaaagtcactcctagtatctatttcaccatctacagaagagaaatacttcacagaattattgtggggattaagttagataatgtgttttaaaatataaagctacatccaaagaaatgccaatatgtgacattagtatgaaatttactacagttccatttaacattccaactggttgctgtgtggaatatggcataattgtaataaattatttaggaaagcaagcaaagatgtaagtttttttaatttagggggaaaaaatgggagccttgctctccaaatccttaaaacatgctattaagcaacctttctgaatattctgtggtgccaagtagaaagtttaactgaaattaataagccaatggaaagaaagaaatattaataactgctggtggaaagactagctagatgtcagtgtggaaagattagatccactttacatgtgatattccaaatgaattaaaatgttaagtataaaaagaaaaatactacaagtctcacaccaatagtggtataaaggaacttcatggcaattggcaaggtagatcaactaagagaaaaagttttaaatgtgtagtaaataggaaaaagacaaaacaagatggaatttaaaagaagctatttgcattacacatggatgcactcagtttttgtaaaactatatgcatatccataagggtttgtactcttaggcaaatttataaagcgatcgtgtataaatgatataaaaaatcaatttgaatggtattcaaatttcctaatattaaaaatgcaactttgacttagttcatgctattgtattagcaaaactgttttaattgcatgtgtccttatagcagcagcattgtgtattagtagccttttaagagaactgtgtagaagactataaaaagggctttataactgatcttttgacatactcactttgagtggcatatgcccaggaaaatatttaaaagaaagaaaagctatttgtacaaagttttctagcagttccactcagataactttaagggggaaaaaagcccaacgattggaaatggttaagtaaattttggtgtattgctagtgctatcacagaatgttatatagccattcaataatattgatatatgtcaaattgtatgcaaaaaagtgagattcaaaaatgttaataagaacataaattgtgtttactgatacatgtgaaaatttaggtctacattgaaaagaatcagaagataacatgtaattcagtttaacattaggggttctttatttttcttctgttaaatattgatgtatgcaataaaaaataaaagattaattggtaaagtggtttactg

SEQ ID NO: 2041 - protein, 656 aa, Homo sapiens; identical to SEQ ID NO: 111

SEQ ID NO: 2042 - DNA, 1350 bp, Homo sapiens
ctttagtagaggtttatgtccaaataagatgtcacactccaatggattgtcattgttgcatgaaattatttttctcttatattgtttacaatgtattctttcttgaattttcttctttcagagaagagttccagtcacaaatgcatatatgatgcattttgacatttactgctaagatgaaatgcagaaatgaaaccacacatccattttagtattctcagatgtgattagatgtacttgctcatgtttttatgctactgacttataagaaaaaaaatattttaaaagggtaaccgttaaacagctaggacctgcaacttcagtgcttctgggataactggaacatcagaaggacagattttattacagcataatcacacctcatttctttcatcagcagttgtcaccagacgctgttacttcctaaaatggcggacaatcttcccacagagtttgatgtggttataatagggacaggtttgcccgaatccatccttgcagctgcatgttcaagaagtggtcagagggttctgcatattgattcaagaagctactatggaggaaactgggctagtttcagcttttcaggattgctatcctggttgaaggagtatcagcaaaacaatgacattggggaagaaagtactgttgtatggcaggacctgatccatgaaacagaagaagccatcactcttcgcaagaaggatgaaactattcaacacacagaagctttttgctacgccagtcaggatatggaggacaacgttgaagagattggtgctctgcagaaaaatccttctttgggggtgtctaataccttcactgaagttctggattctgcattacctgaagaaagccagttatcgtattttaatagcgacgaaatgcctgcaaaacacactcagaaaagtgatacagagatttcactagaagtaactgatgtagaggaatcagtggagaaggaaaagtattgtggagataaaacttgtatgcacacagtttcagataaagatggagataaagatgaaagcaaatctacagtagaagataaggccgatgaaccaattagaaataggattacttactctcaaatagttaaagaaggcaggaggtttaatattgatttggtgtcaaaactgctgtattctcaaggattgctaattgatcttttaatcaaatcagatgttagtcgttatgtagaatttaaaaatgtcactaggattcttgcatttcgggaaggaaaggtagaacaagttccttgttccagagcagatgtctttaatagcaaggaactcaccatggttgaaaagaggatgctaatgaaatttctcacatttttgttcattttca

SEQ ID NO: 2043 - protein, 306 aa, Homo sapiens
MADNLPTEFDVVIIGTGLPESILAAACSRSGQRVLHIDSRSYYGGNWASFSFSGLLSWLKEYQQNNDIGEESTVVWQDLIHETEEAITLRKKDETIQHTEAFCYASQDMEDNVEEIGALQKNPSLGVSNTFTEVLDSALPEESQLSYFNSDEMPAKHTQKSDTEISLEVTDVEESVEKEKYCGDKTCMHTVSDKDGDKDESKSTVEDKADEPIRNRITYSQIVKEGRRFNIDLVSKLLYSQGLLIDLLIKSDVSRYVEFKNVTRILAFREGKVEQVPCSRADVFNSKELTMVEKRMLMKFLTFLFI

SEQ ID NO: 2044 - DNA, 769 bp, Homo sapiens
atagatgggttccagcacaccagaatcttgggtgagattacaaatggctcagccaataccatctcagagaagagttccagtcacaaatgcatatatgatgcattttgacatttactgctaagatgaaatgcagaaatgaaaccacacatccattttagtattctcagatgtgattagatgtacttgctcatgtttttatgctactgacttataagaaaaaaaatattttaaaagggtaaccgttaaacagctaggacctgcaacttcagtgcttctgggataactggaacatcagaaggacagattttattacagcataatcacacctcatttctttcatcagcagttgtcaccagacgctgttacttcctaaaatggcggacaatcttcccacagagtttgatgtggttataatagggacaggtttgcccgaatccatccttgcagctgcatgttcaagaagtggtcagagggttctgcatattgattcaagaagctactatggaggaaactgggctagtttcagcttttcaggattgctatcctggttgaaggagtatcagcaaaacaatgacattggggaagaaagtactgttgtatggcaggacctgatccatgaaacagaagaagccatcactcttcgcaagaaggatgaaactattcaacacacagaagctttttgctacgccagtcaggatatggaggacaacgttgaagagattggtgctctgcagaaaaatccttctttgggggtgtctaataccttcac

SEQ ID NO: 2045 - protein, 38 aa, Homo sapiens
MGSSTPESWVRLQMAQPIPSQRRVPVTNAYMMHFDIYC

SEQ ID NO: 2046 - DNA, 1117 bp, Homo sapiens
aagctgagcgcctccgcccgccaggcgcgccggcgccgggccatgtactcggggaaccgcagcggcggccacggctactgggacggcggcggggccgcgggcgctgaggggccggcgccggcggggacactgagccccgcgcccctcttcagccccggcacctacgagcgcctggcgctgctgctgggctccattgggctgctgggcgtcggcaacaacctgctggtgctcgtcctctactacaagttccagcggctccgcactcccactcacctcctcctggtcaacatcagcctcagcgacctgctggtgtccctcttcggggtcacctttaccttcgtgtcctgcctgaggaacggctgggtgtgggacaccgtgggctgcgtgtgggacgggtttagcggcagcctcttcgagaagagttccagtcacaaatgcatatatgatgcattttgacatttactgctaagatgaaatgcagaaatgaaaccacacatccattttagtattctcagatgtgattagatgtacttgctcatgtttttatgctactgacttataagaaaaaaaatattttaaaagggtaaccgttaaacagctaggacctgcaacttcagtgcttctgggataactggaacatcagaaggacagattttattacagcataatcacacctcatttctttcatcagcagttgtcaccagacgctgttacttcctaaaatggcggacaatcttcccacagagtttgatgtggttataatagggacaggtttgcccgaatccatccttgcagctgcatgttcaagaagtggtcagagggttctgcatattgattcaagaagctactatggaggaaactgggctagtttcagcttttcaggattgctatcctggttgaaggagtatcagcaaaacaatgacattggggaagaaagtactgttgtatggcaggacctgatccatgaaacagaagaagccatcactcttcgcaagaaggatgaaactattcaacacacagaagctttttgctacgccagtcaggatatggaggacaacgttgaagagattggtgctctgcagaaaaatccttctttgggggtgtctaataccttcac

SEQ ID NO: 2047 - protein, 137 aa, Homo sapiens
MYSGNRSGGHGYWDGGGAAGAEGPAPAGTLSPAPLFSPGTYERLALLLGSIGLLGVGNNLLVLVLYYKFQRLRTPTHLLLVNISLSDLLVSLFGVTFTFVSCLRNGWVWDTVGCVWDGFSGSLFEKSSSHKCIYDAF

SEQ ID NO: 2048 - DNA, 747 bp, Homo sapiens
aagctgagcgcctccgcccgccaggcgcgccggcgccgggccatgtactcggggaaccgcagcggcggccacggctactgggacggcggcggggccgcgggcgctgaggggccggcgccggcggggacactgagccccgcgcccctcttcagccccggcacctacgagcgcctggcgctgctgctgggctccattgggctgctgggcgtcggcaacaacctgctggtgctcgtcctctactacaagttccagcggctccgcactcccactcacctcctcctggtcaacatcagcctcagcgacctgctggtgtccctcttcggggtcacctttaccttcgtgtcctgcctgaggaacggctgggtgtgggacaccgtgggctgcgtgtgggacgggtttagcggcagcctcttcgcagttgtcaccagacgctgttacttcctaaaatggcggacaatcttcccacagagtttgatgtggttataatagggacaggtttgcccgaatccatccttgcagctgcatgttcaagaagtggtcagagggttctgcatattgattcaagaagctactatggaggaaactgggctagtttcagcttttcaggattgctatcctggttgaaggagtatcagcaaaacaatgacattggggaagaaagtactgttgtatggcaggacctgatccatgaaacagaagaagccatcactcttcgcaagaaggatgaaactattcaacacacagaag

SEQ ID NO: 2049 - protein, 147 aa, Homo sapiens
MYSGNRSGGHGYWDGGGAAGAEGPAPAGTLSPAPLFSPGTYERLALLLGSIGLLGVGNNLLVLVLYYKFQRLRTPTHLLLVNISLSDLLVSLFGVTFTFVSCLRNGWVWDTVGCVWDGFSGSLFAVVTRRCYFLKWRTIFPQSLMWL

SEQ ID NO: 2050 - DNA, 850 bp, Homo sapiens
agacggttagaaatggcggttggggcggagcagggggctggcgcgggaagcggggctgtctggctcggttacgcccccacctcgccaggaatctaggagtcggtttgttttccgaacccatctccttccgctctcccgcccctgcaggctgtgtgccgagcttggaagaaagtgtgacccgttcgacggaacaaaggacatgacagcccggccccgtgcggccactgcggagcgttaggaacattccctaaaatggcggccggcgcgtcggaacagggcgggaggcggcggcgcgtgggggcgggacggggaggggcgcggccagccgggcttctgcttccgcgaccccggcggtgcagggcgggtggagtcgcggagtagtcctcatggccgccccgccggagcccggtgagcccgaggagaggaagtcccttaagctcctaggatttttagatgttgaaaatactccctgcgcccggcattcaatattgtatggttcattaggatctgttgtggctggctttggacattttttgttcactagtagaattagaagatcatgtgatgttggagtaggagggtttatcttggtgactttgggatgctggtttcattgtaggtataattatgcaaagcaaagaatccaggaaagaattgccagagaagaaattaaaaagaagatattatatgaaggtacccacctcgatcctgaaagaaaacacaacggcagcagcagcaattgaacaatcttgagcatagaagtcaatgtaaacgaagttaagatcaaccacataaaacatttcatgtgcaataagctctcaatcaagtaaataaagtttaagttgtagtc

SEQ ID NO: 2051 - protein, 118 aa, Homo sapiens; identical to SEQ ID NO: 113

SEQ ID NO: 2052 - DNA, 1132 bp, Homo sapiens
agacggttagaaatggcggttggggcggagcagggggctggcgcgggaagcggggctgtctggctcggttacgcccccacctcgccaggaatctaggagtcggtttgttttccgaacccatctccttccgctctcccgcccctgcaggctgtgtgccgagcttggaagaaagtgtgacccgttcgacggaacaaaggacatgacagcccggccccgtgcggccactgcggagcgttaggaacattccctaaaatggcggccggcgcgtcggaacagggcgggaggcggcggcgcgtgggggcgggacggggaggggcgcggccagccgggcttctgcttccgcgaccccggcggtgcagggcgggtggagtcgcggagtagtcctcatggccgccccgccggagcccggtgagcccgaggagaggaagtcccttaagctcctaggatttttagatgttgaaaatactccctgcgcccggcattcaatattgtatggttcattaggatctgttgtggctggctttggacattttttgttcactagtagaattagaagatcatgtgatgttggagtaggagggtttatcttggtgactttgggatgctggtttcattgtaggtataattatgcaaagcaaagaatccaggaaagaattgccagagaagaaattaaaaagaagatattatatgaaggtacccacctcgatcctgaaagaaaacacaacggcagcagcagcaattgaacaatcttgagcatagaagtcaatgtaaacgaagttaagatcaaccacataaaacatttcatgtgcaataagctctcaatcaagtaaataaagtttaagttgtagtcatttttttcccacacttgtgtggaatgaaaacttgccagtttattctggccctgtgtctactgccaggatagcattcttacgtgttacatatagtggacttgtcatccttaaaatgtgaacagaatttattggcagtgtggcaaagaattataaaacatagtgtttaatgtacttggagtttccttgtagtagtaagtatagagtttgatgataagtaaacgtcccttaacaaaaacctcaaccttattactatcccattaaaaaacagcaaatacttactg

SEQ ID NO: 2053 - protein, 118 aa, Homo sapiens; identical to SEQ ID NO: 113

SEQ ID NO: 2054 - DNA, 1222 bp, Homo sapiens
agacggttagaaatggcggttggggcggagcagggggctggcgcgggaagcggggctgtctggctcggttacgcccccacctcgccaggaatctaggagtcggtttgttttccgaacccatctccttccgctctcccgcccctgcaggctgtgtgccgagcttggaagaaagtgtgacccgttcgacggaacaaaggacatgacagcccggccccgtgcggccactgcggagcgttaggaacattccctaaaatggcggccggcgcgtcggaacagggcgggaggcggcggcgcgtgggggcgggacggggaggggcgcggccagccgggcttctgcttccgcgaccccggcggtgcagggcgggtggagtcgcggagtagtcctcatggccgccccgccggagcccggtgagcccgaggagaggaagtcccttaagctcctaggatttttagatgttgaaaatactccctgcgcccggcattcaatattgtatggttcattaggatctgttgtggctggctttggacattttttgttcactagtagaattagaagatcatgtgatgttggagtaggagggtttatcttggtgactttgggatgctggtttcattgtaggtataattatgcaaagcaaagaatccaggaaagaattgccagagaagaaattaaaaagaagatattatatgaaggtacccacctcgatcctgaaagaaaacacaacggcagcagcagcaattgaacaatcttgagcatagaagtcaatgtaaacgaagttaagatcaaccacataaaacatttcatgtgcaataagctctcaatcaagtaaataaagtttaagttgtagtcatttttttcccacacttgtgtggaatgaaaacttgccagtttattctggccctgtgtctactgccaggatagcattcttacgtgttacatatagtggacttgtcatccttaaaatgtgaacagaatttattggcagtgtggcaaagaattataaaacatagtgtttaatgtacttggagtttccttgtagtagtaagtatagagtttgatgataagtaaacgtcccttaacaaaaacctcaaccttattactatcccattaaaaaacagcaaatacttactgagttcttgtaagagctaatgtcattgtaagatttaaaactaagggcttttatcactttgcaaattattttttaaatgcattcatcatttg

SEQ ID NO: 2055 - protein, 118 aa, Homo sapiens; identical to SEQ ID NO: 113

SEQ ID NO: 2056 - DNA, 1352 bp, Homo sapiens
agacggttagaaatggcggttggggcggagcagggggctggcgcgggaagcggggctgtctggctcggttacgcccccacctcgccaggaatctaggagtcggtttgttttccgaacccatctccttccgctctcccgcccctgcaggctgtgtgccgagcttggaagaaagtgtgacccgttcgacggaacaaaggacatgacagcccggccccgtgcggccactgcggagcgttaggaacattccctaaaatggcggccggcgcgtcggaacagggcgggaggcggcggcgcgtgggggcgggacggggaggggcgcggccagccgggcttctgcttccgcgaccccggcggtgcagggcgggtggagtcgcggagtagtcctcatggccgccccgccggagcccggtgagcccgaggagaggaagtcccttaagctcctaggatttttagatgttgaaaatactccctgcgcccggcattcaatattgtatggttcattaggatctgttgtggctggctttggacattttttgttcactagtagaattagaagatcatgtgatgttggagtaggagggtttatcttggtgactttgggatgctggtttcattgtaggtataattatgcaaagcaaagaatccaggaaagaattgccagagaagaaattaaaaagaagatattatatgaaggtacccacctcgatcctgaaagaaaacacaacggcagcagcagcaattgaacaatcttgagcatagaagtcaatgtaaacgaagttaagatcaaccacataaaacatttcatgtgcaataagctctcaatcaagtaaataaagtttaagttgtagtcatttttttcccacacttgtgtggaatgaaaacttgccagtttattctggccctgtgtctactgccaggatagcattcttacgtgttacatatagtggacttgtcatccttaaaatgtgaacagaatttattggcagtgtggcaaagaattataaaacatagtgtttaatgtacttggagtttccttgtagtagtaagtatagagtttgatgataagtaaacgtcccttaacaaaaacctcaaccttattactatcccattaaaaaacagcaaatacttactgagttcttgtaagagctaatgtcattgtaagatttaaaactaagggcttttatcactttgcaaattattttttaaatgcattcatcatttgacagtgttctctcatttcttaaaatgcgagtcatcttccaaaagagttgtttttaactgccctaaacatttttggggaagtatgcagggtttaaatttttaagtataattagttctgaattaaaatatgc

SEQ ID NO: 2057 - protein, 118 aa, Homo sapiens; identical to SEQ ID NO: 113

SEQ ID NO: 2058 - DNA, 2622 bp, Homo sapiens
agacggttagaaatggcggttggggcggagcagggggctggcgcgggaagcggggctgtctggctcggttacgcccccacctcgccaggaatctaggagtcggtttgttttccgaacccatctccttccgctctcccgcccctgcaggctgtgtgccgagcttggaagaaagtgtgacccgttcgacggaacaaaggacatgacagcccggccccgtgcggccactgcggagcgttaggaacattccctaaaatggcggccggcgcgtcggaacagggcgggaggcggcggcgcgtgggggcgggacggggaggggcgcggccagccgggcttctgcttccgcgaccccggcggtgcagggcgggtggagtcgcggagtagtcctcatggccgccccgccggagcccggtgagcccgaggagaggaagtcccttaagctcctaggatttttagatgttgaaaatactccctgcgcccggcattcaatattgtatggttcattaggatctgttgtggctggctttggacattttttgttcactagtagaattagaagatcatgtgatgttggagtaggagggtttatcttggtgactttgggatgctggtttcattgtaggtataattatgcaaagcaaagaatccaggaaagaattgccagagaagaaattaaaaagaagatattatatgaaggtacccacctcgatcctgaaagaaaacacaacggcagcagcagcaattgaacaatcttgagcatagaagtcaatgtaaacgaagttaagatcaaccacataaaacatttcatgtgcaataagctctcaatcaagtaaataaagtttaagttgtagtcatttttttcccacacttgtgtggaatgaaaacttgccagtttattctggccctgtgtctactgccaggatagcattcttacgtgttacatatagtggacttgtcatccttaaaatgtgaacagaatttattggcagtgtggcaaagaattataaaacatagtgtttaatgtacttggagtttccttgtagtagtaagtatagagtttgatgataagtaaacgtcccttaacaaaaacctcaaccttattactatcccattaaaaaacagcaaatacttactgagttcttgtaagagctaatgtcattgtaagatttaaaactaagggcttttatcactttgcaaattattttttaaatgcattcatcatttgacagtgttctctcatttcttaaaatgcgagtcatcttccaaaagagttgtttttaactgccctaaacatttttggggaagtatgcagggtttaaatttttaagtataattagttctgaattaaaatatgcacatggaacttgtctggcagactgatgcaatagtaaaacaactgcagaattactattaatgtaaacaatccatttgaaagtcaatcagctgctcccattaaaatattatttaaaatacaatacccacagcatctaactaaatcctcaggatttattctccgggagaaattatccctttctaggaaaatgaagttatttctggttttaattcatacaatactttaagaaaatctgttaaatataacaaaacacaagctagatgcttaagaaatgcttaaagaaatattggggcgaaggtaacagcagtcaacaggattgtggccattactggtcctattattttgatgtaccatggaaggcacagaaatcgagcaaggaagaaaatattagttattttgatctacatctttttctaaagaaaagtggagcttgcctccagttcaattcacaagagcattttccctcccatgcccaccttttcttgtggctgtcgctaggaaggatgcagaggctgtgtggtttaccaaatgccttaacttagcagtgaatgacaactgtcaaacacatgttgagggaaaatttttactgattcacaaaaaggaagacagtttgcccactcttagtggcacaaatcaaagctgcatgcactacattatccaaattagtcgtaaccaaatagttaaaaaattctgctgggcacggtggctcatacctgtaatcccagcactttgggaggccgaggcagttggatcacctgaggttaggagtttgagaccagcctggccaacagggtgaaaccctgtctcgtctaaaaatacaaaaattagccgggcgtggtggtgcatgcctgtagtcccaggtactcaggaggctgaggcaggagaatcacttgaacccgaggtggggcaggcggaggttgcagtaagccaagatcgcgccattgcactctagcctaggtgacagagtgagactccatctcaaaaaaaaaaaaaaattccataggatgttcaaccatgttttcagaggccgcactgcatgaatgcgggaaaatgttgatgatcactaatcaataatctgatatttaacaaaatatggacaggccacttatgctcagttttaccttagttattccttggtatccacaggcccaagtccctttaaataaaataccctcatatttccatataatctacatacattctcccatatactttaaatcatctctagattacttataatgtctaatacaaaataaatgctatgtaaatgt

SEQ ID NO: 2059 - protein, 118 aa, Homo sapiens; identical to SEQ ID NO: 113

SEQ ID NO: 2060 - DNA, 2937 bp, Homo sapiens
agacggttagaaatggcggttggggcggagcagggggctggcgcgggaagcggggctgtctggctcggttacgcccccacctcgccaggaatctaggagtcggtttgttttccgaacccatctccttccgctctcccgcccctgcaggctgtgtgccgagcttggaagaaagtgtgacccgttcgacggaacaaaggacatgacagcccggccccgtgcggccactgcggagcgttaggaacattccctaaaatggcggccggcgcgtcggaacagggcgggaggcggcggcgcgtgggggcgggacggggaggggcgcggccagccgggcttctgcttccgcgaccccggcggtgcagggcgggtggagtcgcggagtagtcctcatggccgccccgccggagcccggtgagcccgaggagaggaagtcccttaagctcctaggatttttagatgttgaaaatactccctgcgcccggcattcaatattgtatggttcattaggatctgttgtggctggctttggacattttttgttcactagtagaattagaagatcatgtgatgttggagtaggagggtttatcttggtgactttgggatgctggtttcattgtaggtataattatgcaaagcaaagaatccaggaaagaattgccagagaagaaattaaaaagaagatattatatgaaggtacccacctcgatcctgaaagaaaacacaacggcagcagcagcaattgaacaatcttgagcatagaagtcaatgtaaacgaagttaagatcaaccacataaaacatttcatgtgcaataagctctcaatcaagtaaataaagtttaagttgtagtcatttttttcccacacttgtgtggaatgaaaacttgccagtttattctggccctgtgtctactgccaggatagcattcttacgtgttacatatagtggacttgtcatccttaaaatgtgaacagaatttattggcagtgtggcaaagaattataaaacatagtgtttaatgtacttggagtttccttgtagtagtaagtatagagtttgatgataagtaaacgtcccttaacaaaaacctcaaccttattactatcccattaaaaaacagcaaatacttactgagttcttgtaagagctaatgtcattgtaagatttaaaactaagggcttttatcactttgcaaattattttttaaatgcattcatcatttgacagtgttctctcatttcttaaaatgcgagtcatcttccaaaagagttgtttttaactgccctaaacatttttggggaagtatgcagggtttaaatttttaagtataattagttctgaattaaaatatgcacatggaacttgtctggcagactgatgcaatagtaaaacaactgcagaattactattaatgtaaacaatccatttgaaagtcaatcagctgctcccattaaaatattatttaaaatacaatacccacagcatctaactaaatcctcaggatttattctccgggagaaattatccctttctaggaaaatgaagttatttctggttttaattcatacaatactttaagaaaatctgttaaatataacaaaacacaagctagatgcttaagaaatgcttaaagaaatattggggcgaaggtaacagcagtcaacaggattgtggccattactggtcctattattttgatgtaccatggaaggcacagaaatcgagcaaggaagaaaatattagttattttgatctacatctttttctaaagaaaagtggagcttgcctccagttcaattcacaagagcattttccctcccatgcccaccttttcttgtggctgtcgctaggaaggatgcagaggctgtgtggtttaccaaatgccttaacttagcagtgaatgacaactgtcaaacacatgttgagggaaaatttttactgattcacaaaaaggaagacagtttgcccactcttagtggcacaaatcaaagctgcatgcactacattatccaaattagtcgtaaccaaatagttaaaaaattctgctgggcacggtggctcatacctgtaatcccagcactttgggaggccgaggcagttggatcacctgaggttaggagtttgagaccagcctggccaacagggtgaaaccctgtctcgtctaaaaatacaaaaattagccgggcgtggtggtgcatgcctgtagtcccaggtactcaggaggctgaggcaggagaatcacttgaacccgaggtggggcaggcggaggttgcagtaagccaagatcgcgccattgcactctagcctaggtgacagagtgagactccatctcaaaaaaaaaaaaaaattccataggatgttcaaccatgttttcagaggccgcactgcatgaatgcgggaaaatgttgatgatcactaatcaataatctgatatttaacaaaatatggacaggccacttatgctcagttttaccttagttattccttggtatccacaggcccaagtccctttaaataaaataccctcatatttccatataatctacatacattctcccatatactttaaatcatctctagattacttataatgtctaatacaaaataaatgctatgtaaatgtaattattatactgtgtatttttgttgttgttcttcattgttattttttgtctttttacctccagtattttcaacccacagttggttgaatccaaggatgcagaactggaggacatggagggctgacgtgtaacatacataacatataaaacaggtcccttccagcgctagcacactgcaattacatcttaccctgaataagagagaaactctgttttggctggtaaaatttccaatgtcttcaccaataacaaagctcattttcacagaagtttgcataaactggaaacctggataaaaacaaagttgtaacata

SEQ ID NO: 2061 - protein, 118 aa, Homo sapiens; identical to SEQ ID NO: 113

SEQ ID NO: 2062 - DNA, 727 bp, Homo sapiens
agaaatggcggttggggcggagcagggggctggcgcgggaagcggggctgtctggctcggttacgcccccacctcgccaggaatctaggagtcggtttgttttccgaacccatctccttccgctctcccgcccctgcaggctgtgtgccgagcttggaagaaagtgtgacccgttcgacggaacaaaggacatgacagcccggccccgtgcggccactgcggagcgttaggaacattccctaaaatggcggccggcgcgtcggaacagggcgggaggcggcggcgcgtgggggcgggacggggaggggcgcggccagccgggcttctgcttccgcgaccccggcggtgcagggcgggtggagtcgcggagtagtcctcatggccgccccgccggagcccggtgagcccgaggagaggaaggtagaattagaagatcatgtgatgttggagtaggagggtttatcttggtgactttgggatgctggtttcattgtaggtataattatgcaaagcaaagaatccaggaaagaattgccagagaagaaattaaaaagaagatattatatgaaggtacccacctcgatcctgaaagaaaacacaacggcagcagcagcaattgaacaatcttgagcatagaagtcaatgtaaacgaagttaagatcaaccacataaaacatttcatgtgcaataagctctcaatcaagtaaataaagtttaagttgtagtc

SEQ ID NO: 2063 - protein, 42 aa, Homo sapiens
MAAGASEQGGRRRRVGAGRGGARPAGLLLPRPRRCRAGGVAE

SEQ ID NO: 2064 - DNA, 1009 bp, Homo sapiens
agaaatggcggttggggcggagcagggggctggcgcgggaagcggggctgtctggctcggttacgcccccacctcgccaggaatctaggagtcggtttgttttccgaacccatctccttccgctctcccgcccctgcaggctgtgtgccgagcttggaagaaagtgtgacccgttcgacggaacaaaggacatgacagcccggccccgtgcggccactgcggagcgttaggaacattccctaaaatggcggccggcgcgtcggaacagggcgggaggcggcggcgcgtgggggcgggacggggaggggcgcggccagccgggcttctgcttccgcgaccccggcggtgcagggcgggtggagtcgcggagtagtcctcatggccgccccgccggagcccggtgagcccgaggagaggaaggtagaattagaagatcatgtgatgttggagtaggagggtttatcttggtgactttgggatgctggtttcattgtaggtataattatgcaaagcaaagaatccaggaaagaattgccagagaagaaattaaaaagaagatattatatgaaggtacccacctcgatcctgaaagaaaacacaacggcagcagcagcaattgaacaatcttgagcatagaagtcaatgtaaacgaagttaagatcaaccacataaaacatttcatgtgcaataagctctcaatcaagtaaataaagtttaagttgtagtcatttttttcccacacttgtgtggaatgaaaacttgccagtttattctggccctgtgtctactgccaggatagcattcttacgtgttacatatagtggacttgtcatccttaaaatgtgaacagaatttattggcagtgtggcaaagaattataaaacatagtgtttaatgtacttggagtttccttgtagtagtaagtatagagtttgatgataagtaaacgtcccttaacaaaaacctcaaccttattactatcccattaaaaaacagcaaatacttactg

SEQ ID NO: 2065 - protein, 42 aa, Homo sapiens; identical to SEQ ID NO: 2063

SEQ ID NO: 2066 - DNA, 2499 bp, Homo sapiens
agaaatggcggttggggcggagcagggggctggcgcgggaagcggggctgtctggctcggttacgcccccacctcgccaggaatctaggagtcggtttgttttccgaacccatctccttccgctctcccgcccctgcaggctgtgtgccgagcttggaagaaagtgtgacccgttcgacggaacaaaggacatgacagcccggccccgtgcggccactgcggagcgttaggaacattccctaaaatggcggccggcgcgtcggaacagggcgggaggcggcggcgcgtgggggcgggacggggaggggcgcggccagccgggcttctgcttccgcgaccccggcggtgcagggcgggtggagtcgcggagtagtcctcatggccgccccgccggagcccggtgagcccgaggagaggaaggtagaattagaagatcatgtgatgttggagtaggagggtttatcttggtgactttgggatgctggtttcattgtaggtataattatgcaaagcaaagaatccaggaaagaattgccagagaagaaattaaaaagaagatattatatgaaggtacccacctcgatcctgaaagaaaacacaacggcagcagcagcaattgaacaatcttgagcatagaagtcaatgtaaacgaagttaagatcaaccacataaaacatttcatgtgcaataagctctcaatcaagtaaataaagtttaagttgtagtcatttttttcccacacttgtgtggaatgaaaacttgccagtttattctggccctgtgtctactgccaggatagcattcttacgtgttacatatagtggacttgtcatccttaaaatgtgaacagaatttattggcagtgtggcaaagaattataaaacatagtgtttaatgtacttggagtttccttgtagtagtaagtatagagtttgatgataagtaaacgtcccttaacaaaaacctcaaccttattactatcccattaaaaaacagcaaatacttactgagttcttgtaagagctaatgtcattgtaagatttaaaactaagggcttttatcactttgcaaattattttttaaatgcattcatcatttgacagtgttctctcatttcttaaaatgcgagtcatcttccaaaagagttgtttttaactgccctaaacatttttggggaagtatgcagggtttaaatttttaagtataattagttctgaattaaaatatgcacatggaacttgtctggcagactgatgcaatagtaaaacaactgcagaattactattaatgtaaacaatccatttgaaagtcaatcagctgctcccattaaaatattatttaaaatacaatacccacagcatctaactaaatcctcaggatttattctccgggagaaattatccctttctaggaaaatgaagttatttctggttttaattcatacaatactttaagaaaatctgttaaatataacaaaacacaagctagatgcttaagaaatgcttaaagaaatattggggcgaaggtaacagcagtcaacaggattgtggccattactggtcctattattttgatgtaccatggaaggcacagaaatcgagcaaggaagaaaatattagttattttgatctacatctttttctaaagaaaagtggagcttgcctccagttcaattcacaagagcattttccctcccatgcccaccttttcttgtggctgtcgctaggaaggatgcagaggctgtgtggtttaccaaatgccttaacttagcagtgaatgacaactgtcaaacacatgttgagggaaaatttttactgattcacaaaaaggaagacagtttgcccactcttagtggcacaaatcaaagctgcatgcactacattatccaaattagtcgtaaccaaatagttaaaaaattctgctgggcacggtggctcatacctgtaatcccagcactttgggaggccgaggcagttggatcacctgaggttaggagtttgagaccagcctggccaacagggtgaaaccctgtctcgtctaaaaatacaaaaattagccgggcgtggtggtgcatgcctgtagtcccaggtactcaggaggctgaggcaggagaatcacttgaacccgaggtggggcaggcggaggttgcagtaagccaagatcgcgccattgcactctagcctaggtgacagagtgagactccatctcaaaaaaaaaaaaaaattccataggatgttcaaccatgttttcagaggccgcactgcatgaatgcgggaaaatgttgatgatcactaatcaataatctgatatttaacaaaatatggacaggccacttatgctcagttttaccttagttattccttggtatccacaggcccaagtccctttaaataaaataccctcatatttccatataatctacatacattctcccatatactttaaatcatctctagattacttataatgtctaatacaaaataaatgctatgtaaatgt

SEQ ID NO: 2067 - protein, 93 aa, Homo sapiens
MLKKCLKKYWGEGNSSQQDCGHYWSYYFDVPWKAQKSSKEENISYFDLHLFLKKSGACLQFNSQEHFPSHAHLFLWLSLGRMQRLCGLPNALT

SEQ ID NO: 2068 - DNA, 2814 bp, Homo sapiens
agaaatggcggttggggcggagcagggggctggcgcgggaagcggggctgtctggctcggttacgcccccacctcgccaggaatctaggagtcggtttgttttccgaacccatctccttccgctctcccgcccctgcaggctgtgtgccgagcttggaagaaagtgtgacccgttcgacggaacaaaggacatgacagcccggccccgtgcggccactgcggagcgttaggaacattccctaaaatggcggccggcgcgtcggaacagggcgggaggcggcggcgcgtgggggcgggacggggaggggcgcggccagccgggcttctgcttccgcgaccccggcggtgcagggcgggtggagtcgcggagtagtcctcatggccgccccgccggagcccggtgagcccgaggagaggaaggtagaattagaagatcatgtgatgttggagtaggagggtttatcttggtgactttgggatgctggtttcattgtaggtataattatgcaaagcaaagaatccaggaaagaattgccagagaagaaattaaaaagaagatattatatgaaggtacccacctcgatcctgaaagaaaacacaacggcagcagcagcaattgaacaatcttgagcatagaagtcaatgtaaacgaagttaagatcaaccacataaaacatttcatgtgcaataagctctcaatcaagtaaataaagtttaagttgtagtcatttttttcccacacttgtgtggaatgaaaacttgccagtttattctggccctgtgtctactgccaggatagcattcttacgtgttacatatagtggacttgtcatccttaaaatgtgaacagaatttattggcagtgtggcaaagaattataaaacatagtgtttaatgtacttggagtttccttgtagtagtaagtatagagtttgatgataagtaaacgtcccttaacaaaaacctcaaccttattactatcccattaaaaaacagcaaatacttactgagttcttgtaagagctaatgtcattgtaagatttaaaactaagggcttttatcactttgcaaattattttttaaatgcattcatcatttgacagtgttctctcatttcttaaaatgcgagtcatcttccaaaagagttgtttttaactgccctaaacatttttggggaagtatgcagggtttaaatttttaagtataattagttctgaattaaaatatgcacatggaacttgtctggcagactgatgcaatagtaaaacaactgcagaattactattaatgtaaacaatccatttgaaagtcaatcagctgctcccattaaaatattatttaaaatacaatacccacagcatctaactaaatcctcaggatttattctccgggagaaattatccctttctaggaaaatgaagttatttctggttttaattcatacaatactttaagaaaatctgttaaatataacaaaacacaagctagatgcttaagaaatgcttaaagaaatattggggcgaaggtaacagcagtcaacaggattgtggccattactggtcctattattttgatgtaccatggaaggcacagaaatcgagcaaggaagaaaatattagttattttgatctacatctttttctaaagaaaagtggagcttgcctccagttcaattcacaagagcattttccctcccatgcccaccttttcttgtggctgtcgctaggaaggatgcagaggctgtgtggtttaccaaatgccttaacttagcagtgaatgacaactgtcaaacacatgttgagggaaaatttttactgattcacaaaaaggaagacagtttgcccactcttagtggcacaaatcaaagctgcatgcactacattatccaaattagtcgtaaccaaatagttaaaaaattctgctgggcacggtggctcatacctgtaatcccagcactttgggaggccgaggcagttggatcacctgaggttaggagtttgagaccagcctggccaacagggtgaaaccctgtctcgtctaaaaatacaaaaattagccgggcgtggtggtgcatgcctgtagtcccaggtactcaggaggctgaggcaggagaatcacttgaacccgaggtggggcaggcggaggttgcagtaagccaagatcgcgccattgcactctagcctaggtgacagagtgagactccatctcaaaaaaaaaaaaaaattccataggatgttcaaccatgttttcagaggccgcactgcatgaatgcgggaaaatgttgatgatcactaatcaataatctgatatttaacaaaatatggacaggccacttatgctcagttttaccttagttattccttggtatccacaggcccaagtccctttaaataaaataccctcatatttccatataatctacatacattctcccatatactttaaatcatctctagattacttataatgtctaatacaaaataaatgctatgtaaatgtaattattatactgtgtatttttgttgttgttcttcattgttattttttgtctttttacctccagtattttcaacccacagttggttgaatccaaggatgcagaactggaggacatggagggctgacgtgtaacatacataacatataaaacaggtcccttccagcgctagcacactgcaattacatcttaccctgaataagagagaaactctgttttggctggtaaaatttccaatgtcttcaccaataacaaagctcattttcacagaagtttgcataaactggaaacctggataaaaacaaagttgtaacata

SEQ ID NO: 2069 - protein, 93 aa, Homo sapiens; identical to SEQ ID NO: 2067

SEQ ID NO: 2070 - DNA, 2751 bp, Homo sapiens
ccacttctgagcattttacagttcagtgtacttaactgtaaaggtatacaggctcaagtcgttgcatattcttcctgttttgatagaaattgcagggatttatgtactgaatcttattactccttagatatgtgacaactggaaagctccccaccaaaccctccagccttggttacttcttaatgatgtggtttggcacaatgaaaatgtcataggctttgtggtgaaactgacttctgcctccactcctgccaacacttattattagcctcttaagtccccgagcctgtttcagaggtaatctcacacaaaggctagagaattaaaaaacatgtagagagcctggcactaatacctacctcccccaccagcagctcttaattatgagatcaaccactattattttagaccagagttttgttggggattgggtttgtttcagaaggcactattttaaataagatgtgtagcttctatttagatatttgcctttaaagtcagctgagctattttcctattgtttgcaaatttacttttatttaaaaaaataaaatttcctaaagcagtgtttccccaatatgacagtcatcagaaaaaaccacctagagttttctaaacatagattccagtgattgtaaatcagaatctgagagtgggactagaaaatacttaattctatcctgtggtacaagctggtctcacacttgcatctttgcacctaagactagatcaaactggtactaatcctctggccccagcatcccatccttggggaaatagtctagtttagaggtagtcctggactggagcgctaagtccagcattcctcacctgcataacactacccacatgatcatatgtcccctgggctctcaagctgataggaaaaagtcgtcttgctaaatgaaatcccccaacctcttggtaatgtgaagaactgtactgcaaagctttgaagcaatcctatgttaggcatgcgggtgggaacggggccagacagagggaaaaaatggaatagaatgatccgagagtaaataattcttgctttattatgaaccaagtcacattttgtctcttccaacagatgcttgagccaaaaaagcaaacataggcagaaatacaattgagaatatcttcatgtttcaacctttaatctgacttgccttttactatcctttccccatttcttctaatctcttttgccttacaatatattaccttctaggtatcacctcatcctatagaatcccttctagtttaatgtcctgccccaaacaatactaacccattgaagataactatgaaacctttaaatggacagtggttccttttaaaagcagccttactgaaaattttatatacacttaaatcaagtaacagttaccgtgagttttctaaacttttgtgttaacagaaatgccagttcagcagtgtgactgttacttttaaatgtctgtcttgccgccctagagtgacagacatcccagttaaacatattaggaataagaaatacataaatccaatgaagactgtagaaaaagaattttagcacttgaaggaacttcagtcatttaacccaacccattcatgttatagattgagaccatagaaataaaagtagcctataggatacaaaagttagcggcagatctgagataaaaatccagctctttggatccccgcgtttttcaccacacttagctgtcgttcccatgtattacgaacaaagaatcaaatataatcaagtgcagcctcacttcacaggcaagaaaacagactagagtttaatatattgcccatgtttatcttaaggtgaaacatttactcttacaaccacagttgatgttaacctagttaataaaatatgaaaggtaattactaggggaattttaaacggcactacataagcaaacatgactcaaattactttttccatttctgcttcccaaattattggagttactgaagcaagctatgctgctttcaattccaatgataggcatattcccaaataaactcatttaaagagctcataaaatgaattatcctatttccaagtcagttgattagcaaattaagatacagctccaagttaccctactgcttaagggttttccggtccaatttgtaaggttttcggatttaaagattcagactgcataccaaaggtggacaaagacaacgcaagctgatttaggttgtcacgtggcacatactctagtttaaaccctcaactacaagaaaagaaatggtgtattgtcatttttgccaaagcaccccaaaatgaaatactttcttactcaatctaggttcttttttttcattctagtcccttaagctcctaggatttttagatgttgaaaatactccctgcgcccggcattcaatattgtatggttcattaggatctgttgtggctggctttggacattttttgttcactagtagaattagaagatcatgtgatgttggagtaggagggtttatcttggtgactttgggatgctggtttcattgtaggtataattatgcaaagcaaagaatccaggaaagaattgccagagaagaaattaaaaagaagatattatatgaaggtacccacctcgatcctgaaagaaaacacaacggcagcagcagcaattgaacaatcttgagcatagaagtcaatgtaaacgaagttaagatcaaccacataaaacatttcatgtgcaataagctctcaatcaagtaaataaagtttaagttgtagtc

SEQ ID NO: 2071 - protein, 41 aa, Homo sapiens [sequence omitted]

SEQ ID NO: 2072 - DNA, 5948 bp, Homo sapiens
ctctctcagaattagtatttgcctattaatgtaatcagtgtagccttctcaacataaaaatgtccttattctagaacatggaagcgtacggcaaatgcaacggttgaaagcactgaaaaatatttgtaaaacatctgtagtgctcacattatgaactttaaatgtaatactttgaaaaccatcttcataatttttttgttctaacagcttcctttttaagaaaacattttaaaacattttaaaatggaacttaatgtgcaaaataagttgtgtaaaataccagtatttgggtggtggaggatattggtatattatattgacctgggttgatgactactggactattttaagatacctacttccaaaacttattttattctagaggaccactaaaaatcagaattacagcaatcattttaatttttctactttccttgttaaggtcttctgcttacccaaagaatagtgtatatcttaacatgacttttaaaggggtatcttgatccccatcacagatttttatctatgaatagaaggattgaaaccctatttgatccctagctctttgctgaaaagtgcataaacaggaatcctgaatttattatatagacctcctcgcattatataatcgaagcaaagggaaaccagcgatggagtagaggtacgtagactaaagagatgcttgcaaatgatggtacctagggatagtcacattttcttgttgccaaactcagacaatataatcacaagtccagagaagagctagttaattttaaattccccgaggtccttttactgagatggaaaagcacaaacagtcaaggaaaaccaaagagggaggggtgagggaaggggaaagtgcataaagcacttaaagattttttaaaagtaggtatgatagataagccacaagaagtttttaagactactaataaccataattctattttaatcagctatttagctggtacctactgctatatcacctagtgtgacatttcggaattaatggaacaatgaaggaagctgtacactggaggttccaggtggtcatggaaggtttccagtttatgcaaacttctgtgaaaatgagctttgttattggtgaagacattggaaattttaccagccaaaacagagtttctctcttattcagggtaagatgtaattgcagtgtgctagcgctggaagggacctgttttatatgttatgtatgttacacgtcagccctccatgtcctccagttctgcatccttggattcaaccaactgtgggttgaaaatactggaggtaaaaagacaaaaaataacaatgaagaacaacaacaaaaatacacagtataataattacatttacatagcatttattttgtattagacattataagtaatctagagatgatttaaagtatatgggagaatgtatgtagattatatggaaatatgagggtattttatttaaagggacttgggcctgtggataccaaggaataactaaggtaaaactgagcataagtggcctgtccatattttgttaaatatcagattattgattagtgatcatcaacattttcccgcattcatgcagtgcggcctctgaaaacatggttgaacatcctatggaatttttttttttttttgagatggagtctcactctgtcacctaggctagagtgcaatggcgcgatcttggcttactgcaacctccgcctgccccacctcgggttcaagtgattctcctgcctcagcctcctgagtacctgggactacaggcatgcaccaccacgcccggctaatttttgtatttttagacgagacagggtttcaccctgttggccaggctggtctcaaactcctaacctcaggtgatccaactgcctcggcctcccaaagtgctgggattacaggtatgagccaccgtgcccagcagaattttttaactatttggttacgactaatttggataatgtagtgcatgcagctttgatttgtgccactaagagtgggcaaactgtcttcctttttgtgaatcagtaaaaattttccctcaacatgtgtttgacagttgtcattcactgctaagttaaggcatttggtaaaccacacagcctctgcatccttcctagcgacagccacaagaaaaggtgggcatgggagggaaaatgctcttgtgaattgaactggaggcaagctccacttttctttagaaaaagatgtagatcaaaataactaatattttcttccttgctcgatttctgtgccttccatggtacatcaaaataataggaccagtaatggccacaatcctgttgactgctgttaccttcgccccaatatttctttaagcatttcttaagcatctagcttgtgttttgttatatttaacagattttcttaaagtattgtatgaattaaaaccagaaataacttcattttcctagaaagggataatttctcccggagaataaatcctgaggatttagttagatgctgtgggtattgtattttaaataatattttaatgggagcagctgattgactttcaaatggattgtttacattaatagtaattctgcagttgttttactattgcatcagtctgccagacaagttccatgtgcatattttaattcagaactaattatacttaaaaatttaaaccctgcatacttccccaaaaatgtttagggcagttaaaaacaactcttttggaagatgactcgcattttaagaaatgagagaacactgtcaaatgatgaatgcatttaaaaaataatttgcaaagtgataaaagcccttagttttaaatcttacaatgacattagctcttacaagaactcagtaagtatttgctgttttttaatgggatagtaataaggttgaggtttttgttaagggacgtttacttatcatcaaactctatacttactactacaaggaaactccaagtacattaaacactatgttttataattctttgccacactgccaataaattctgttcacattttaaggatgacaagtccactatatgtaacacgtaagaatgctatcctggcagtagacacagggccagaataaactggcaagttttcattccacacaagtgtgggaaaaaaatgactacaacttaaactttatttacttgattgagagcttattgcacatgaaatgttttatgtggttgatcttaacttcgtttacattgacttctatgctcaagattgttcaattgctgctgctgccgttgtgttttctttcaggatcgaggtgggtaccttcatataatatcttctttttaatttcttctctggcaattctttcctggattctttgctttgcataattatacctacaatgaaaccttagaagaaaagaatatgaataaattgttaatataaagtcctacagaaattaatttatgaaatttctctaaatcacacaaaacttaaatacagatgactactaccctgagactgaaaaatatgttctaatttatagtgctatttttgggcagttttggtgtcagaatacctatcaacacattctttttttattaggaaaaaaaggatgtctacataacaatttgtaaagtgataaaatccattagtttttaagtcttctgatagcattggctattataagaaacaagtatttgctctcgtttttaacgggataataatgctatgtctacataaaatgatttctaccaccttaaatagctcactgtagaaattcatgtataaatggaaccatatagtacatacatatcatactcttaggtctggcaaatatttgaggttcatccatattttatattcactcatcagtagttgtaaacacattcttaaagtagcattttcagatatgaataagcagggatgaaataagtattagggtaagggaaatggttgaggctttcctaagtgaagtgtaaaaaccacagctttctttttaatgggatgtctaatatgcatttatctgttcaagcattttaagatttccatgaaaatgtcctgaaaaatcaagattcttcattgagggtgaggatctcccaatgggagactgctctgaaaagagcatgtgctttttgaattagataacctactataatcatggatgttcttgaatacttagcaaacataccagcatcccaaagtcaccaagataaaccctcctactccaacatcacatgatcttctaattctacctgtaaaaataagcataacaattaattagaatataattacgttatatacattactccacctagaaaaaaaaatagttcattatgtagagaaatgctttttttagtacatagagaaataaaaaatacagatactcactagtgaacaaaaaatgtccaaagccagccacaacagatcctaatgaaccatacaatattgaatgccgggcgcagggagtattttcaacatctaaaaatcctaggagcttaagggactagaatgaaaaaaaagaacctagattgagtaagaaagtatttcattttggggtgctttggcaaaaatgacaatacaccatttcttttcttgtagttgagggtttaaactagagtatgtgccacgtgacaacctaaatcagcttgcgttgtctttgtccacctttggtatgcagtctgaatctttaaatccgaaaaccttacaaattggaccggaaaacccttaagcagtagggtaacttggagctgtatcttaatttgctaatcaactgacttggaaataggataattcattttatgagctctttaaatgagtttatttgggaatatgcctatcattggaattgaaagcagcatagcttgcttcagtaactccaataatttgggaagcagaaatggaaaaagtaatttgagtcatgtttgcttatgtagtgccgtttaaaattcccctagtaattacctttcatattttattaactaggttaacatcaactgtggttgtaagagtaaatgtttcaccttaagataaacatgggcaatatattaaactctagtctgttttcttgcctgtgaagtgaggctgcacttgattatatttgattctttgttcgtaatacatgggaacgacagctaagtgtggtgaaaaacgcggggatccaaagagctggatttttatctcagatctgccgctaacttttgtatcctataggctacttttatttctatggtctcaatctataacatgaatgggttgggttaaatgactgaagttccttcaagtgctaaaattctttttctacagtcttcattggatttatgtatttcttattcctaatatgtttaactgggatgtctgtcactctagggcggcaagacagacatttaaaagtaacagtcacactgctgaactggcatttctgttaacacaaaagtttagaaaactcacggtaactgttacttgatttaagtgtatataaaattttcagtaaggctgcttttaaaaggaaccactgtccatttaaaggtttcatagttatcttcaatgggttagtattgtttggggcaggacattaaactagaagggattctataggatgaggtgatacctagaaggtaatatattgtaaggcaaaagagattagaagaaatggggaaaggatagtaaaaggcaagtcagattaaaggttgaaacatgaagatattctcaattgtatttctgcctatgtttgcttttttggctcaagcatctgttggaagagacaaaatgtgacttggttcataataaagcaagaattatttactctcggatcattctattccattttttccctctgtctggccccgttcccacccgcatgcctaacataggattgcttcaaagctttgcagtacagttcttcacattaccaagaggttgggggatttcatttagcaagacgactttttcctatcagcttgagagcccaggggacatatgatcatgtgggtag

SEQ ID NO: 2073 - protein, 108 aa, Homo sapiens [sequence omitted]

SEQ ID NO: 2074 - DNA, 5770 bp, Homo sapiens
aacaatcgtggctacaaaaatcaatctcagggctacaaccagtggcagcagggtgtaagtaatttcttatgtgctttatgtacattaattgtattttgagttcctaagatttatcagtcttgaaaaagatcttgttcagggattgaagtgtttataagtgttaatagggtaaagtgtgaatcgtcttgcagtagtagccataatctaccttttgaaggcaaaataggttgaagattgctataagttaaatttttttaataaagtaatattatttaatatatacagttcttttactgctagctttaattgtgtaaactaacaaagtcatgatgtttcgttttgtaatgtgtattgataattatgggatattaaaactaaatctggtttggtagaaatcagaggtatgacaggtataaatttgtttccagcaaattactctgaattagattcattgtcatttcctaaaaacagtttgagtggcttattgatgttttttctttaaaaacaaaattttctcttacagcaattctggggtcagaagccatggagtcagcattatcaccaaggatattattgaatacccaaataaaacgaactgatacatatttctccaaaaccttcacaagaagtcgactgttttctttagtaggctaactttttaaacattccacaagaggaagtgcctgcgggttccttttttagaagcttttctgtccatgtgaatgtgctgtgtggaagagttaaagggcccaactaaatgttccagtgattccaatagctatttagctggtacctactgctatatcacctagtgtgacatttcggaattaatggaacaatgaaggaagctgtacactggaggttccaggtggtcatggaaggtttccagtttatgcaaacttctgtgaaaatgagctttgttattggtgaagacattggaaattttaccagccaaaacagagtttctctcttattcagggtaagatgtaattgcagtgtgctagcgctggaagggacctgttttatatgttatgtatgttacacgtcagccctccatgtcctccagttctgcatccttggattcaaccaactgtgggttgaaaatactggaggtaaaaagacaaaaaataacaatgaagaacaacaacaaaaatacacagtataataattacatttacatagcatttattttgtattagacattataagtaatctagagatgatttaaagtatatgggagaatgtatgtagattatatggaaatatgagggtattttatttaaagggacttgggcctgtggataccaaggaataactaaggtaaaactgagcataagtggcctgtccatattttgttaaatatcagattattgattagtgatcatcaacattttcccgcattcatgcagtgcggcctctgaaaacatggttgaacatcctatggaatttttttttttttttgagatggagtctcactctgtcacctaggctagagtgcaatggcgcgatcttggcttactgcaacctccgcctgccccacctcgggttcaagtgattctcctgcctcagcctcctgagtacctgggactacaggcatgcaccaccacgcccggctaatttttgtatttttagacgagacagggtttcaccctgttggccaggctggtctcaaactcctaacctcaggtgatccaactgcctcggcctcccaaagtgctgggattacaggtatgagccaccgtgcccagcagaattttttaactatttggttacgactaatttggataatgtagtgcatgcagctttgatttgtgccactaagagtgggcaaactgtcttcctttttgtgaatcagtaaaaattttccctcaacatgtgtttgacagttgtcattcactgctaagttaaggcatttggtaaaccacacagcctctgcatccttcctagcgacagccacaagaaaaggtgggcatgggagggaaaatgctcttgtgaattgaactggaggcaagctccacttttctttagaaaaagatgtagatcaaaataactaatattttcttccttgctcgatttctgtgccttccatggtacatcaaaataataggaccagtaatggccacaatcctgttgactgctgttaccttcgccccaatatttctttaagcatttcttaagcatctagcttgtgttttgttatatttaacagattttcttaaagtattgtatgaattaaaaccagaaataacttcattttcctagaaagggataatttctcccggagaataaatcctgaggatttagttagatgctgtgggtattgtattttaaataatattttaatgggagcagctgattgactttcaaatggattgtttacattaatagtaattctgcagttgttttactattgcatcagtctgccagacaagttccatgtgcatattttaattcagaactaattatacttaaaaatttaaaccctgcatacttccccaaaaatgtttagggcagttaaaaacaactcttttggaagatgactcgcattttaagaaatgagagaacactgtcaaatgatgaatgcatttaaaaaataatttgcaaagtgataaaagcccttagttttaaatcttacaatgacattagctcttacaagaactcagtaagtatttgctgttttttaatgggatagtaataaggttgaggtttttgttaagggacgtttacttatcatcaaactctatacttactactacaaggaaactccaagtacattaaacactatgttttataattctttgccacactgccaataaattctgttcacattttaaggatgacaagtccactatatgtaacacgtaagaatgctatcctggcagtagacacagggccagaataaactggcaagttttcattccacacaagtgtgggaaaaaaatgactacaacttaaactttatttacttgattgagagcttattgcacatgaaatgttttatgtggttgatcttaacttcgtttacattgacttctatgctcaagattgttcaattgctgctgctgccgttgtgttttctttcaggatcgaggtgggtaccttcatataatatcttctttttaatttcttctctggcaattctttcctggattctttgctttgcataattatacctacaatgaaaccttagaagaaaagaatatgaataaattgttaatataaagtcctacagaaattaatttatgaaatttctctaaatcacacaaaacttaaatacagatgactactaccctgagactgaaaaatatgttctaatttatagtgctatttttgggcagttttggtgtcagaatacctatcaacacattctttttttattaggaaaaaaaggatgtctacataacaatttgtaaagtgataaaatccattagtttttaagtcttctgatagcattggctattataagaaacaagtatttgctctcgtttttaacgggataataatgctatgtctacataaaatgatttctaccaccttaaatagctcactgtagaaattcatgtataaatggaaccatatagtacatacatatcatactcttaggtctggcaaatatttgaggttcatccatattttatattcactcatcagtagttgtaaacacattcttaaagtagcattttcagatatgaataagcagggatgaaataagtattagggtaagggaaatggttgaggctttcctaagtgaagtgtaaaaaccacagctttctttttaatgggatgtctaatatgcatttatctgttcaagcattttaagatttccatgaaaatgtcctgaaaaatcaagattcttcattgagggtgaggatctcccaatgggagactgctctgaaaagagcatgtgctttttgaattagataacctactataatcatggatgttcttgaatacttagcaaacataccagcatcccaaagtcaccaagataaaccctcctactccaacatcacatgatcttctaattctacctgtaaaaataagcataacaattaattagaatataattacgttatatacattactccacctagaaaaaaaaatagttcattatgtagagaaatgctttttttagtacatagagaaataaaaaatacagatactcactagtgaacaaaaaatgtccaaagccagccacaacagatcctaatgaaccatacaatattgaatgccgggcgcagggagtattttcaacatctaaaaatcctaggagcttaagggactagaatgaaaaaaaagaacctagattgagtaagaaagtatttcattttggggtgctttggcaaaaatgacaatacaccatttcttttcttgtagttgagggtttaaactagagtatgtgccacgtgacaacctaaatcagcttgcgttgtctttgtccacctttggtatgcagtctgaatctttaaatccgaaaaccttacaaattggaccggaaaacccttaagcagtagggtaacttggagctgtatcttaatttgctaatcaactgacttggaaataggataattcattttatgagctctttaaatgagtttatttgggaatatgcctatcattggaattgaaagcagcatagcttgcttcagtaactccaataatttgggaagcagaaatggaaaaagtaatttgagtcatgtttgcttatgtagtgccgtttaaaattcccctagtaattacctttcatattttattaactaggttaacatcaactgtggttgtaagagtaaatgtttcaccttaagataaacatgggcaatatattaaactctagtctgttttcttgcctgtgaagtgaggctgcacttgattatatttgattctttgttcgtaatacatgggaacgacagctaagtgtggtgaaaaacgcggggatccaaagagctggatttttatctcagatctgccgctaacttttgtatcctataggctacttttatttctatggtctcaatctataacatgaatgggttgggttaaatgactgaagttccttcaagtgctaaaattctttttctacagtcttcattggatttatgtatttcttattcctaatatgtttaactgggatgtctgtcactctagggcggcaagacagacatttaaaagtaacagtcacactgctgaactggcatttctgttaacacaaaagtttagaaaactcacggtaactgttacttgatttaagtgtatataaaattttcagtaaggctgcttttaaaaggaaccactgtccatttaaaggtttcatagttatcttcaatgggttagtattgtttggggcaggacattaaactagaagggattctataggatgaggtgatacctagaaggtaatatattgtaaggcaaaagagattagaagaaatggggaaaggatagtaaaaggcaagtcagattaaaggttgaaacatgaagatattctcaattgtatttctgcctatgtttgcttttttggctcaagcatctgttggaagagacaaaatgtgacttggttcataataaagcaagaattatttactctcggatcattctattccattttttccctctgtctggccccgttcccacccgcatgcctaacataggattgcttcaaagctttgcagtacagttcttcacattaccaagaggttgggggatttcatttagcaagacgactttttcctatcagcttgagagcccaggggacatatgatcatgtgggtag

SEQ ID NO: 2075 - protein, 108 aa, Homo sapiens [sequence omitted]

SEQ ID NO: 2076 - DNA, 2030 bp, Homo sapiens
gaaaaaatggaatagaatgatccgagagtaaataattcttgctttattatgaaccaagtcacattttgtctcttccaacagatgcttgagccaaaaaagcaaacataggcagaaatacaattgagaatatcttcatgtttcaacctttaatctgacttgccttttactatcctttccccatttcttctaatctcttttgccttacaatatattaccttctaggtatcacctcatcctatagaatcccttctagtttaatgtcctgccccaaacaatactaacccattgaagataactatgaaacctttaaatggacagtggttccttttaaaagcagccttactgaaaattttatatacacttaaatcaagtaacagttaccgtgagttttctaaacttttgtgttaacagaaatgccagttcagcagtgtgactgttacttttaaatgtctgtcttgccgccctagagtgacagacatcccagttaaacatattaggaataagaaatacataaatccaatgaagactgtagaaaaagaattttagcacttgaaggaacttcagtcatttaacccaacccattcatgttatagattgagaccatagaaataaaagtagcctataggatacaaaagttagcggcagatctgagataaaaatccagctctttggatccccgcgtttttcaccacacttagctgtcgttcccatgtattacgaacaaagaatcaaatataatcaagtgcagcctcacttcacaggcaagaaaacagactagagtttaatatattgcccatgtttatcttaaggtgaaacatttactcttacaaccacagttgatgttaacctagttaataaaatatgaaaggtaattactaggggaattttaaacggcactacataagcaaacatgactcaaattactttttccatttctgcttcccaaattattggagttactgaagcaagctatgctgctttcaattccaatgataggcatattcccaaataaactcatttaaagagctcataaaatgaattatcctatttccaagtcagttgattagcaaattaagatacagctccaagttaccctactgcttaagggttttccggtccaatttgtaaggttttcggatttaaagattcagactgcataccaaaggtggacaaagacaacgcaagctgatttaggttgtcacgtggcacatactctagtttaaaccctcaactacaagaaaagaaatggtgtattgtcatttttgccaaagcaccccaaaatgaaatactttcttactcaatctaggttcttttttttcattctagtcccttaagctcctaggatttttagatgttgaaaatactccctgcgcccggcattcaatattgtatggttcattaggatctgttgtggctggctttggacattttttgttcactagtagaattagaagatcatgtgatgttggagtaggagggtttatcttggtgactttgggatgctggtttcattgtaggtataattatgcaaagcaaagaatccaggaaagaattgccagagaagaaattaaaaagaagatattatatgaaggtacccacctcgatcctgaaagaaaacacaacggcagcagcagcaattgaacaatcttgagcatagaagtcaatgtaaacgaagttaagatcaaccacataaaacatttcatgtgcaataagctctcaatcaagtaaataaagtttaagttgtagtcatttttttcccacacttgtgtggaatgaaaacttgccagtttattctggccctgtgtctactgccaggatagcattcttacgtgttacatatagtggacttgtcatccttaaaatgtgaacagaatttattggcagtgtggcaaagaattataaaacatagtgtttaatgtacttggagtttccttgtagtagtaagtatagagtttgatgataagtaaacgtcccttaacaaaaacctcaaccttattactatcccattaaaaaacagcaaatacttactg

SEQ ID NO: 2077 - protein, 41 aa, Homo sapiens [sequence omitted]

SEQ ID NO: 2078 - DNA, 3520 bp, Homo sapiens
gaaaaaatggaatagaatgatccgagagtaaataattcttgctttattatgaaccaagtcacattttgtctcttccaacagatgcttgagccaaaaaagcaaacataggcagaaatacaattgagaatatcttcatgtttcaacctttaatctgacttgccttttactatcctttccccatttcttctaatctcttttgccttacaatatattaccttctaggtatcacctcatcctatagaatcccttctagtttaatgtcctgccccaaacaatactaacccattgaagataactatgaaacctttaaatggacagtggttccttttaaaagcagccttactgaaaattttatatacacttaaatcaagtaacagttaccgtgagttttctaaacttttgtgttaacagaaatgccagttcagcagtgtgactgttacttttaaatgtctgtcttgccgccctagagtgacagacatcccagttaaacatattaggaataagaaatacataaatccaatgaagactgtagaaaaagaattttagcacttgaaggaacttcagtcatttaacccaacccattcatgttatagattgagaccatagaaataaaagtagcctataggatacaaaagttagcggcagatctgagataaaaatccagctctttggatccccgcgtttttcaccacacttagctgtcgttcccatgtattacgaacaaagaatcaaatataatcaagtgcagcctcacttcacaggcaagaaaacagactagagtttaatatattgcccatgtttatcttaaggtgaaacatttactcttacaaccacagttgatgttaacctagttaataaaatatgaaaggtaattactaggggaattttaaacggcactacataagcaaacatgactcaaattactttttccatttctgcttcccaaattattggagttactgaagcaagctatgctgctttcaattccaatgataggcatattcccaaataaactcatttaaagagctcataaaatgaattatcctatttccaagtcagttgattagcaaattaagatacagctccaagttaccctactgcttaagggttttccggtccaatttgtaaggttttcggatttaaagattcagactgcataccaaaggtggacaaagacaacgcaagctgatttaggttgtcacgtggcacatactctagtttaaaccctcaactacaagaaaagaaatggtgtattgtcatttttgccaaagcaccccaaaatgaaatactttcttactcaatctaggttcttttttttcattctagtcccttaagctcctaggatttttagatgttgaaaatactccctgcgcccggcattcaatattgtatggttcattaggatctgttgtggctggctttggacattttttgttcactagtagaattagaagatcatgtgatgttggagtaggagggtttatcttggtgactttgggatgctggtttcattgtaggtataattatgcaaagcaaagaatccaggaaagaattgccagagaagaaattaaaaagaagatattatatgaaggtacccacctcgatcctgaaagaaaacacaacggcagcagcagcaattgaacaatcttgagcatagaagtcaatgtaaacgaagttaagatcaaccacataaaacatttcatgtgcaataagctctcaatcaagtaaataaagtttaagttgtagtcatttttttcccacacttgtgtggaatgaaaacttgccagtttattctggccctgtgtctactgccaggatagcattcttacgtgttacatatagtggacttgtcatccttaaaatgtgaacagaatttattggcagtgtggcaaagaattataaaacatagtgtttaatgtacttggagtttccttgtagtagtaagtatagagtttgatgataagtaaacgtcccttaacaaaaacctcaaccttattactatcccattaaaaaacagcaaatacttactgagttcttgtaagagctaatgtcattgtaagatttaaaactaagggcttttatcactttgcaaattattttttaaatgcattcatcatttgacagtgttctctcatttcttaaaatgcgagtcatcttccaaaagagttgtttttaactgccctaaacatttttggggaagtatgcagggtttaaatttttaagtataattagttctgaattaaaatatgcacatggaacttgtctggcagactgatgcaatagtaaaacaactgcagaattactattaatgtaaacaatccatttgaaagtcaatcagctgctcccattaaaatattatttaaaatacaatacccacagcatctaactaaatcctcaggatttattctccgggagaaattatccctttctaggaaaatgaagttatttctggttttaattcatacaatactttaagaaaatctgttaaatataacaaaacacaagctagatgcttaagaaatgcttaaagaaatattggggcgaaggtaacagcagtcaacaggattgtggccattactggtcctattattttgatgtaccatggaaggcacagaaatcgagcaaggaagaaaatattagttattttgatctacatctttttctaaagaaaagtggagcttgcctccagttcaattcacaagagcattttccctcccatgcccaccttttcttgtggctgtcgctaggaaggatgcagaggctgtgtggtttaccaaatgccttaacttagcagtgaatgacaactgtcaaacacatgttgagggaaaatttttactgattcacaaaaaggaagacagtttgcccactcttagtggcacaaatcaaagctgcatgcactacattatccaaattagtcgtaaccaaatagttaaaaaattctgctgggcacggtggctcatacctgtaatcccagcactttgggaggccgaggcagttggatcacctgaggttaggagtttgagaccagcctggccaacagggtgaaaccctgtctcgtctaaaaatacaaaaattagccgggcgtggtggtgcatgcctgtagtcccaggtactcaggaggctgaggcaggagaatcacttgaacccgaggtggggcaggcggaggttgcagtaagccaagatcgcgccattgcactctagcctaggtgacagagtgagactccatctcaaaaaaaaaaaaaaattccataggatgttcaaccatgttttcagaggccgcactgcatgaatgcgggaaaatgttgatgatcactaatcaataatctgatatttaacaaaatatggacaggccacttatgctcagttttaccttagttattccttggtatccacaggcccaagtccctttaaataaaataccctcatatttccatataatctacatacattctcccatatactttaaatcatctctagattacttataatgtctaatacaaaataaatgctatgtaaatgt

SEQ ID NO: 2079 - protein, 93 aa, Homo sapiens; identical to SEQ ID NO: 2067

SEQ ID NO: 2080 - DNA, 3835 bp, Homo sapiens
gaaaaaatggaatagaatgatccgagagtaaataattcttgctttattatgaaccaagtcacattttgtctcttccaacagatgcttgagccaaaaaagcaaacataggcagaaatacaattgagaatatcttcatgtttcaacctttaatctgacttgccttttactatcctttccccatttcttctaatctcttttgccttacaatatattaccttctaggtatcacctcatcctatagaatcccttctagtttaatgtcctgccccaaacaatactaacccattgaagataactatgaaacctttaaatggacagtggttccttttaaaagcagccttactgaaaattttatatacacttaaatcaagtaacagttaccgtgagttttctaaacttttgtgttaacagaaatgccagttcagcagtgtgactgttacttttaaatgtctgtcttgccgccctagagtgacagacatcccagttaaacatattaggaataagaaatacataaatccaatgaagactgtagaaaaagaattttagcacttgaaggaacttcagtcatttaacccaacccattcatgttatagattgagaccatagaaataaaagtagcctataggatacaaaagttagcggcagatctgagataaaaatccagctctttggatccccgcgtttttcaccacacttagctgtcgttcccatgtattacgaacaaagaatcaaatataatcaagtgcagcctcacttcacaggcaagaaaacagactagagtttaatatattgcccatgtttatcttaaggtgaaacatttactcttacaaccacagttgatgttaacctagttaataaaatatgaaaggtaattactaggggaattttaaacggcactacataagcaaacatgactcaaattactttttccatttctgcttcccaaattattggagttactgaagcaagctatgctgctttcaattccaatgataggcatattcccaaataaactcatttaaagagctcataaaatgaattatcctatttccaagtcagttgattagcaaattaagatacagctccaagttaccctactgcttaagggttttccggtccaatttgtaaggttttcggatttaaagattcagactgcataccaaaggtggacaaagacaacgcaagctgatttaggttgtcacgtggcacatactctagtttaaaccctcaactacaagaaaagaaatggtgtattgtcatttttgccaaagcaccccaaaatgaaatactttcttactcaatctaggttcttttttttcattctagtcccttaagctcctaggatttttagatgttgaaaatactccctgcgcccggcattcaatattgtatggttcattaggatctgttgtggctggctttggacattttttgttcactagtagaattagaagatcatgtgatgttggagtaggagggtttatcttggtgactttgggatgctggtttcattgtaggtataattatgcaaagcaaagaatccaggaaagaattgccagagaagaaattaaaaagaagatattatatgaaggtacccacctcgatcctgaaagaaaacacaacggcagcagcagcaattgaacaatcttgagcatagaagtcaatgtaaacgaagttaagatcaaccacataaaacatttcatgtgcaataagctctcaatcaagtaaataaagtttaagttgtagtcatttttttcccacacttgtgtggaatgaaaacttgccagtttattctggccctgtgtctactgccaggatagcattcttacgtgttacatatagtggacttgtcatccttaaaatgtgaacagaatttattggcagtgtggcaaagaattataaaacatagtgtttaatgtacttggagtttccttgtagtagtaagtatagagtttgatgataagtaaacgtcccttaacaaaaacctcaaccttattactatcccattaaaaaacagcaaatacttactgagttcttgtaagagctaatgtcattgtaagatttaaaactaagggcttttatcactttgcaaattattttttaaatgcattcatcatttgacagtgttctctcatttcttaaaatgcgagtcatcttccaaaagagttgtttttaactgccctaaacatttttggggaagtatgcagggtttaaatttttaagtataattagttctgaattaaaatatgcacatggaacttgtctggcagactgatgcaatagtaaaacaactgcagaattactattaatgtaaacaatccatttgaaagtcaatcagctgctcccattaaaatattatttaaaatacaatacccacagcatctaactaaatcctcaggatttattctccgggagaaattatccctttctaggaaaatgaagttatttctggttttaattcatacaatactttaagaaaatctgttaaatataacaaaacacaagctagatgcttaagaaatgcttaaagaaatattggggcgaaggtaacagcagtcaacaggattgtggccattactggtcctattattttgatgtaccatggaaggcacagaaatcgagcaaggaagaaaatattagttattttgatctacatctttttctaaagaaaagtggagcttgcctccagttcaattcacaagagcattttccctcccatgcccaccttttcttgtggctgtcgctaggaaggatgcagaggctgtgtggtttaccaaatgccttaacttagcagtgaatgacaactgtcaaacacatgttgagggaaaatttttactgattcacaaaaaggaagacagtttgcccactcttagtggcacaaatcaaagctgcatgcactacattatccaaattagtcgtaaccaaatagttaaaaaattctgctgggcacggtggctcatacctgtaatcccagcactttgggaggccgaggcagttggatcacctgaggttaggagtttgagaccagcctggccaacagggtgaaaccctgtctcgtctaaaaatacaaaaattagccgggcgtggtggtgcatgcctgtagtcccaggtactcaggaggctgaggcaggagaatcacttgaacccgaggtggggcaggcggaggttgcagtaagccaagatcgcgccattgcactctagcctaggtgacagagtgagactccatctcaaaaaaaaaaaaaaattccataggatgttcaaccatgttttcagaggccgcactgcatgaatgcgggaaaatgttgatgatcactaatcaataatctgatatttaacaaaatatggacaggccacttatgctcagttttaccttagttattccttggtatccacaggcccaagtccctttaaataaaataccctcatatttccatataatctacatacattctcccatatactttaaatcatctctagattacttataatgtctaatacaaaataaatgctatgtaaatgtaattattatactgtgtatttttgttgttgttcttcattgttattttttgtctttttacctccagtattttcaacccacagttggttgaatccaaggatgcagaactggaggacatggagggctgacgtgtaacatacataacatataaaacaggtcccttccagcgctagcacactgcaattacatcttaccctgaataagagagaaactctgttttggctggtaaaatttccaatgtcttcaccaataacaaagctcattttcacagaagtttgcataaactggaaacctggataaaaacaaagttgtaacata

SEQ ID NO: 2081 - protein, 93 aa, Homo sapiens; identical to SEQ ID NO: 2067

SEQ ID NO: 2082 - DNA, 5765 bp, Homo sapiens
ctctctcagaattagtatttgcctattaatgtaatcagtgtagccttctcaacataaaaatgtccttattctagaacatggaagcgtacggcaaatgcaacggttgaaagcactgaaaaatatttgtaaaacatctgtagtgctcacattatgaactttaaatgtaatactttgaaaaccatcttcataatttttttgttctaacagcttcctttttaagaaaacattttaaaacattttaaaatggaacttaatgtgcaaaataagttgtgtaaaataccagtatttgggtggtggaggatattggtatattatattgacctgggttgatgactactggactattttaagatacctacttccaaaacttattttattctagaggaccactaaaaatcagaattacagcaatcattttaatttttctactttccttgttaaggtcttctgcttacccaaagaatagtgtatatcttaacatgacttttaaaggggtatcttgatccccatcacagatttttatctatgaatagaaggattgaaaccctatttgatccctagctctttgctgaaaagtgcataaacaggaatcctgaatttattatatagacctcctcgcattatataatcgaagcaaagggaaaccagcgatggagtagaggtacgtagactaaagagatgcttgcaaatgatggtacctagggatagtcacattttcttgttgccaaactcagacaatataatcacaagtccagagaagagctagttaattttaaattccccgaggtccttttactgagatggaaaagcacaaacagtcaaggaaaaccaaagagggaggggtgagggaaggggaaagtgcataaagcacttaaagattttttaaaagtaggtatgatagataagccacaagaagtttttaagactactaataaccataattctattttaatcagctatttagctggtacctactgctatatcacctagtgtgacatttcggaattaatggaacaatgaaggaagctgtacactggaggttccaggtggtcatggaaggtttccagtttatgcaaacttctgtgaaaatgagctttgttattggtgaagacattggaaattttaccagccaaaacagagtttctctcttattcagggtaagatgtaattgcagtgtgctagcgctggaagggacctgttttatatgttatgtatgttacacgtcagccctccatgtcctccagttctgcatccttggattcaaccaactgtgggttgaaaatactggaggtaaaaagacaaaaaataacaatgaagaacaacaacaaaaatacacagtataataattacatttacatagcatttattttgtattagacattataagtaatctagagatgatttaaagtatatgggagaatgtatgtagattatatggaaatatgagggtattttatttaaagggacttgggcctgtggataccaaggaataactaaggtaaaactgagcataagtggcctgtccatattttgttaaatatcagattattgattagtgatcatcaacattttcccgcattcatgcagtgcggcctctgaaaacatggttgaacatcctatggaatttttttttttttttgagatggagtctcactctgtcacctaggctagagtgcaatggcgcgatcttggcttactgcaacctccgcctgccccacctcgggttcaagtgattctcctgcctcagcctcctgagtacctgggactacaggcatgcaccaccacgcccggctaatttttgtatttttagacgagacagggtttcaccctgttggccaggctggtctcaaactcctaacctcaggtgatccaactgcctcggcctcccaaagtgctgggattacaggtatgagccaccgtgcccagcagaattttttaactatttggttacgactaatttggataatgtagtgcatgcagctttgatttgtgccactaagagtgggcaaactgtcttcctttttgtgaatcagtaaaaattttccctcaacatgtgtttgacagttgtcattcactgctaagttaaggcatttggtaaaccacacagcctctgcatccttcctagcgacagccacaagaaaaggtgggcatgggagggaaaatgctcttgtgaattgaactggaggcaagctccacttttctttagaaaaagatgtagatcaaaataactaatattttcttccttgctcgatttctgtgccttccatggtacatcaaaataataggaccagtaatggccacaatcctgttgactgctgttaccttcgccccaatatttctttaagcatttcttaagcatctagcttgtgttttgttatatttaacagattttcttaaagtattgtatgaattaaaaccagaaataacttcattttcctagaaagggataatttctcccggagaataaatcctgaggatttagttagatgctgtgggtattgtattttaaataatattttaatgggagcagctgattgactttcaaatggattgtttacattaatagtaattctgcagttgttttactattgcatcagtctgccagacaagttccatgtgcatattttaattcagaactaattatacttaaaaatttaaaccctgcatacttccccaaaaatgtttagggcagttaaaaacaactcttttggaagatgactcgcattttaagaaatgagagaacactgtcaaatgatgaatgcatttaaaaaataatttgcaaagtgataaaagcccttagttttaaatcttacaatgacattagctcttacaagaactcagtaagtatttgctgttttttaatgggatagtaataaggttgaggtttttgttaagggacgtttacttatcatcaaactctatacttactactacaaggaaactccaagtacattaaacactatgttttataattctttgccacactgccaataaattctgttcacattttaaggatgacaagtccactatatgtaacacgtaagaatgctatcctggcagtagacacagggccagaataaactggcaagttttcattccacacaagtgtgggaaaaaaatgactacaacttaaactttatttacttgattgagagcttattgcacatgaaatgttttatgtggttgatcttaacttcgtttacattgacttctatgctcaagattgttcaattgctgctgctgccgttgtgttttctttcaggatcgaggtgggtaccttcatataatatcttctttttaatttcttctctggcaattctttcctggattctttgctttgcataattatacctacaatgaaaccttagaagaaaagaatatgaataaattgttaatataaagtcctacagaaattaatttatgaaatttctctaaatcacacaaaacttaaatacagatgactactaccctgagactgaaaaatatgttctaatttatagtgctatttttgggcagttttggtgtcagaatacctatcaacacattctttttttattaggaaaaaaaggatgtctacataacaatttgtaaagtgataaaatccattagtttttaagtcttctgatagcattggctattataagaaacaagtatttgctctcgtttttaacgggataataatgctatgtctacataaaatgatttctaccaccttaaatagctcactgtagaaattcatgtataaatggaaccatatagtacatacatatcatactcttaggtctggcaaatatttgaggttcatccatattttatattcactcatcagtagttgtaaacacattcttaaagtagcattttcagatatgaataagcagggatgaaataagtattagggtaagggaaatggttgaggctttcctaagtgaagtgtaaaaaccacagctttctttttaatgggatgtctaatatgcatttatctgttcaagcattttaagatttccatgaaaatgtcctgaaaaatcaagattcttcattgagggtgaggatctcccaatgggagactgctctgaaaagagcatgtgctttttgaattagataacctactataatcatggatgttcttgaatacttagcaaacataccagcatcccaaagtcaccaagataaaccctcctactccaacatcacatgatcttctaattctacctgtaaaaataagcataacaattaattagaatataattacgttatatacattactccacctagaaaaaaaaatagttcattatgtagagaaatgctttttttagtacatagagaaataaaaaatacagatactcactagtgaacaaaaaatgtccaaagccagccacaacagatcctaatgaaccatacaatattgaatgccgggcgcagggagtattttcaacatctaaaaatcctaggagcttaagggactagaatgaaaaaaaagaacctagattgagtaagaaagtatttcattttggggtgctttggcaaaaatgacaatacaccatttcttttcttgtagttgagggtttaaactagagtatgtgccacgtgacaacctaaatcagcttgcgttgtctttgtccacctttggtatgcagtctgaatctttaaatccgaaaaccttacaaattggaccggaaaacccttaagcagtagggtaacttggagctgtatcttaatttgctaatcaactgacttggaaataggataattcattttatgagctctttaaatgagtttatttgggaatatgcctatcattggaattgaaagcagcatagcttgcttcagtaactccaataatttgggaagcagaaatggaaaaagtaatttgagtcatgtttgcttatgtagtgccgtttaaaattcccctagtaattacctttcatattttattaactaggttaacatcaactgtggttgtaagagtaaatgtttcaccttaagataaacatgggcaatatattaaactctagtctgttttcttgcctgtgaagtgaggctgcacttgattatatttgattctttgttcgtaatacatgggaacgacagctaagtgtggtgaaaaacgcggggatccaaagagctggatttttatctcagatctgccgctaacttttgtatcctataggctacttttatttctatggtctcaatctataacatgaatgggttgggttaaatgactgaagttccttcaagtgctaaaattctttttctacagtcttcattggatttatgtatttcttattcctaatatgtttaactgggatgtctgtcactctagggcggcaagacagacatttaaaagtaacagtcacactgctgaactggcatttctgttaacacaaaagtttagaaaactcacggtaactgttacttgatttaagtgtatataaaattttcagtaaggctgcttttaaaaggaaccactgtccatttaaaggtttcatagttatcttcaatgggttagtattgtttggggcaggacattaaactagaagggattctataggatgaggtgatacctagaaggtaatatattgtaaggcaaaagagattagaagaaatggggaaaggatagtaaaaggcaagtcagattaaaggttgaaacatgaagatattctcaattgtatttctgcctatgtttgcttttttggctcaagcatctgttggaagagacaaaatgtgacttggttcataataaagcaagaattatttactctcgg

SEQ ID NO: 2083 - protein, 108 aa, Homo sapiens [sequence omitted]

SEQ ID NO: 2084 - DNA, 5587 bp, Homo sapiens
aacaatcgtggctacaaaaatcaatctcagggctacaaccagtggcagcagggtgtaagtaatttcttatgtgctttatgtacattaattgtattttgagttcctaagatttatcagtcttgaaaaagatcttgttcagggattgaagtgtttataagtgttaatagggtaaagtgtgaatcgtcttgcagtagtagccataatctaccttttgaaggcaaaataggttgaagattgctataagttaaatttttttaataaagtaatattatttaatatatacagttcttttactgctagctttaattgtgtaaactaacaaagtcatgatgtttcgttttgtaatgtgtattgataattatgggatattaaaactaaatctggtttggtagaaatcagaggtatgacaggtataaatttgtttccagcaaattactctgaattagattcattgtcatttcctaaaaacagtttgagtggcttattgatgttttttctttaaaaacaaaattttctcttacagcaattctggggtcagaagccatggagtcagcattatcaccaaggatattattgaatacccaaataaaacgaactgatacatatttctccaaaaccttcacaagaagtcgactgttttctttagtaggctaactttttaaacattccacaagaggaagtgcctgcgggttccttttttagaagcttttctgtccatgtgaatgtgctgtgtggaagagttaaagggcccaactaaatgttccagtgattccaatagctatttagctggtacctactgctatatcacctagtgtgacatttcggaattaatggaacaatgaaggaagctgtacactggaggttccaggtggtcatggaaggtttccagtttatgcaaacttctgtgaaaatgagctttgttattggtgaagacattggaaattttaccagccaaaacagagtttctctcttattcagggtaagatgtaattgcagtgtgctagcgctggaagggacctgttttatatgttatgtatgttacacgtcagccctccatgtcctccagttctgcatccttggattcaaccaactgtgggttgaaaatactggaggtaaaaagacaaaaaataacaatgaagaacaacaacaaaaatacacagtataataattacatttacatagcatttattttgtattagacattataagtaatctagagatgatttaaagtatatgggagaatgtatgtagattatatggaaatatgagggtattttatttaaagggacttgggcctgtggataccaaggaataactaaggtaaaactgagcataagtggcctgtccatattttgttaaatatcagattattgattagtgatcatcaacattttcccgcattcatgcagtgcggcctctgaaaacatggttgaacatcctatggaatttttttttttttttgagatggagtctcactctgtcacctaggctagagtgcaatggcgcgatcttggcttactgcaacctccgcctgccccacctcgggttcaagtgattctcctgcctcagcctcctgagtacctgggactacaggcatgcaccaccacgcccggctaatttttgtatttttagacgagacagggtttcaccctgttggccaggctggtctcaaactcctaacctcaggtgatccaactgcctcggcctcccaaagtgctgggattacaggtatgagccaccgtgcccagcagaattttttaactatttggttacgactaatttggataatgtagtgcatgcagctttgatttgtgccactaagagtgggcaaactgtcttcctttttgtgaatcagtaaaaattttccctcaacatgtgtttgacagttgtcattcactgctaagttaaggcatttggtaaaccacacagcctctgcatccttcctagcgacagccacaagaaaaggtgggcatgggagggaaaatgctcttgtgaattgaactggaggcaagctccacttttctttagaaaaagatgtagatcaaaataactaatattttcttccttgctcgatttctgtgccttccatggtacatcaaaataataggaccagtaatggccacaatcctgttgactgctgttaccttcgccccaatatttctttaagcatttcttaagcatctagcttgtgttttgttatatttaacagattttcttaaagtattgtatgaattaaaaccagaaataacttcattttcctagaaagggataatttctcccggagaataaatcctgaggatttagttagatgctgtgggtattgtattttaaataatattttaatgggagcagctgattgactttcaaatggattgtttacattaatagtaattctgcagttgttttactattgcatcagtctgccagacaagttccatgtgcatattttaattcagaactaattatacttaaaaatttaaaccctgcatacttccccaaaaatgtttagggcagttaaaaacaactcttttggaagatgactcgcattttaagaaatgagagaacactgtcaaatgatgaatgcatttaaaaaataatttgcaaagtgataaaagcccttagttttaaatcttacaatgacattagctcttacaagaactcagtaagtatttgctgttttttaatgggatagtaataaggttgaggtttttgttaagggacgtttacttatcatcaaactctatacttactactacaaggaaactccaagtacattaaacactatgttttataattctttgccacactgccaataaattctgttcacattttaaggatgacaagtccactatatgtaacacgtaagaatgctatcctggcagtagacacagggccagaataaactggcaagttttcattccacacaagtgtgggaaaaaaatgactacaacttaaactttatttacttgattgagagcttattgcacatgaaatgttttatgtggttgatcttaacttcgtttacattgacttctatgctcaagattgttcaattgctgctgctgccgttgtgttttctttcaggatcgaggtgggtaccttcatataatatcttctttttaatttcttctctggcaattctttcctggattctttgctttgcataattatacctacaatgaaaccttagaagaaaagaatatgaataaattgttaatataaagtcctacagaaattaatttatgaaatttctctaaatcacacaaaacttaaatacagatgactactaccctgagactgaaaaatatgttctaatttatagtgctatttttgggcagttttggtgtcagaatacctatcaacacattctttttttattaggaaaaaaaggatgtctacataacaatttgtaaagtgataaaatccattagtttttaagtcttctgatagcattggctattataagaaacaagtatttgctctcgtttttaacgggataataatgctatgtctacataaaatgatttctaccaccttaaatagctcactgtagaaattcatgtataaatggaaccatatagtacatacatatcatactcttaggtctggcaaatatttgaggttcatccatattttatattcactcatcagtagttgtaaacacattcttaaagtagcattttcagatatgaataagcagggatgaaataagtattagggtaagggaaatggttgaggctttcctaagtgaagtgtaaaaaccacagctttctttttaatgggatgtctaatatgcatttatctgttcaagcattttaagatttccatgaaaatgtcctgaaaaatcaagattcttcattgagggtgaggatctcccaatgggagactgctctgaaaagagcatgtgctttttgaattagataacctactataatcatggatgttcttgaatacttagcaaacataccagcatcccaaagtcaccaagataaaccctcctactccaacatcacatgatcttctaattctacctgtaaaaataagcataacaattaattagaatataattacgttatatacattactccacctagaaaaaaaaatagttcattatgtagagaaatgctttttttagtacatagagaaataaaaaatacagatactcactagtgaacaaaaaatgtccaaagccagccacaacagatcctaatgaaccatacaatattgaatgccgggcgcagggagtattttcaacatctaaaaatcctaggagcttaagggactagaatgaaaaaaaagaacctagattgagtaagaaagtatttcattttggggtgctttggcaaaaatgacaatacaccatttcttttcttgtagttgagggtttaaactagagtatgtgccacgtgacaacctaaatcagcttgcgttgtctttgtccacctttggtatgcagtctgaatctttaaatccgaaaaccttacaaattggaccggaaaacccttaagcagtagggtaacttggagctgtatcttaatttgctaatcaactgacttggaaataggataattcattttatgagctctttaaatgagtttatttgggaatatgcctatcattggaattgaaagcagcatagcttgcttcagtaactccaataatttgggaagcagaaatggaaaaagtaatttgagtcatgtttgcttatgtagtgccgtttaaaattcccctagtaattacctttcatattttattaactaggttaacatcaactgtggttgtaagagtaaatgtttcaccttaagataaacatgggcaatatattaaactctagtctgttttcttgcctgtgaagtgaggctgcacttgattatatttgattctttgttcgtaatacatgggaacgacagctaagtgtggtgaaaaacgcggggatccaaagagctggatttttatctcagatctgccgctaacttttgtatcctataggctacttttatttctatggtctcaatctataacatgaatgggttgggttaaatgactgaagttccttcaagtgctaaaattctttttctacagtcttcattggatttatgtatttcttattcctaatatgtttaactgggatgtctgtcactctagggcggcaagacagacatttaaaagtaacagtcacactgctgaactggcatttctgttaacacaaaagtttagaaaactcacggtaactgttacttgatttaagtgtatataaaattttcagtaaggctgcttttaaaaggaaccactgtccatttaaaggtttcatagttatcttcaatgggttagtattgtttggggcaggacattaaactagaagggattctataggatgaggtgatacctagaaggtaatatattgtaaggcaaaagagattagaagaaatggggaaaggatagtaaaaggcaagtcagattaaaggttgaaacatgaagatattctcaattgtatttctgcctatgtttgcttttttggctcaagcatctgttggaagagacaaaatgtgacttggttcataataaagcaagaattatttactctcgg

SEQ ID NO: 2085 - protein, 108 aa, Homo sapiens [sequence omitted]

SEQ ID NO: 2086 - DNA, 1283 bp, Homo sapiens
ctctctcagaattagtatttgcctattaatgtaatcagtgtagccttctcaacataaaaatgtccttattctagaacatggaagcgtacggcaaatgcaacggttgaaagcactgaaaaatatttgtaaaacatctgtagtgctcacattatgaactttaaatgtaatactttgaaaaccatcttcataatttttttgttctaacagcttcctttttaagaaaacattttaaaacattttaaaatggaacttaatgtgcaaaataagttgtgtaaaataccagtatttgggtggtggaggatattggtatattatattgacctgggttgatgactactggactattttaagatacctacttccaaaacttattttattctagaggaccactaaaaatcagaattacagcaatcattttaatttttctactttccttgttaaggtcttctgcttacccaaagaatagtgtatatcttaacatgacttttaaaggggtatcttgatccccatcacagatttttatctatgaatagaaggattgaaaccctatttgatccctagctctttgctgaaaagtgcataaacaggaatcctgaatttattatatagacctcctcgcattatataatcgaagcaaagggaaaccagcgatggagtagaggtacgtagactaaagagatgcttgcaaatgatggtacctagggatagtcacattttcttgttgccaaactcagacaatataatcacaagtccagagaagagctagttaattttaaattccccgaggtccttttactgagatggaaaagcacaaacagtcaaggaaaaccaaagagggaggggtgagggaaggggaaagtgcataaagcacttaaagattttttaaaagtaggtatgatagataagccacaagaagtttttaagactactaataaccataattctattttaatcagctatttagctggtacctactgctatatcacctagtgtgacatttcggaattaatggaacaatgaaggaagctgtacactggaggttccaggtggtcatggaaggtaggttactcttaaagtttgaaattgtaaagtgtgaaagtctggatagaggggaaggggaacctggactatttttatttttttttgagacgagtctggctctgtcgccaaggctggagtgtagtgacccgagatcacgccattgtactccagcctgggcgacgagagtgaaactccatctcaagagagaaaaaaaaaaggtcatagtgcattgaaggtttggc

SEQ ID NO: 2087 - protein, 85 aa, Homo sapiens
MKEAVHWRFQVVMEGRLLLKFEIVKCESLDRGEGEPGLFLFFFETSLALSPRLECSDPRSRHCTPAWATRVKLHLKREKKKVIVH

SEQ ID NO: 2088 - DNA, 8000 bp, Homo sapiens
acgaagagctggagaaacacataagaaggcagatctaagatggaagaaaaggcggattcgggttgaaacgccaagttgaggactgaagaaagcatttggataaagcagcctccaagctgggaaggagaaaagccaaacgagtatagccaccaaagacccagaaaggccaatatatcatgcagtgagtcggttgaactgaaaggcggtttccttttcctccatttgctcagtcccaattggaagcgcactgcgcggcctccaccgcgctctcggcccgggttcggcgtgggggcggggaggtaagtacggtaatgggcggggccgagcgcgggcgcgctccggctttcctcctgcgcagtgctcccgtcagcgcagggggcggggcgcctatattacgtgcgcggcgccgctcctgcgagaggacgttgcgtgctcgctcgcgccaggcgagtctccgcgtctccctcgcgaactcggtgaaaggaattggcgccgttcgacaccaggcggatccgctctgcagcacgaacccatctccagccgcagccgcagccgccgcccgggccgaggagcagccgcagcagccgccaccagtggccgagtgagcggagccgagtttgaggcagcgcctagcggtgaatcggggccctcaccatgagttcctcgcctgttaatgtaaaaaagctgaaggtgtcggagctgaaagaggagctcaagaagcgacgcctttctgacaagggtctcaaggccgagctcatggagcgactccaggctgcgctggacgacgaggaggccgggggccgccccgccatggagcccgggaacggcagcctagacctgggcggggattccgctgggcgctcgggagcaggcctcgagcaggaggccgcggccggcggcgatgaagaggaggaggaagaggaagaggaggaggaaggaatctccgctctggacggcgaccagatggagctaggagaggagaacggggccgcgggggcggccgactcgggcccgatggaggaggaggaggccgcctcggaagacgagaacggcgacgatcagggtttccaggaaggggaagatgagctcggggacgaagaggaaggcgcgggcgacgagaacgggcacggggagcagcagcctcaaccgccggcgacgcagcagcaacagccccaacagcagcgcggggccgccaaggaggccgcggggaagagcagcggccccacctcgctgttcgcggtgacggtggcgccgcccggggcgaggcagggccagcagcaggcgggaggtaagaagaaggcggaaggcggcggaggcggcggtcgccccggggctccggcggcgggggacggcaaaacagaacagaaaggcggagataaaaagaggggtgttaaaagaccacgagaagatcatggccgtggatattttgagtacattgaagagaacaagtatagcagagccaaatctcctcagccacctgttgaagaagaagatgaacacttcgatgacacagtggtttgtcttgatacttataattgtgatctacattttaaaatatcaagagatcgtctcagtgcttcttcccttacaatggagagttttgcttttctttgggctggaggaagagcatcctatggtgtgtcaaaaggcaaagtgtgttttgagatgaaggttacagagaagatcccagtaaggcatttatatacaaaagatattgacatacatgaagttcgtattggctggtcactaactacaagtggaatgttacttggtgaagaagaattttcttatgggtattctctaaaaggaataaaaacatgcaactgtgagactgaagattatggagaaaagtttgatgaaaatgatgtgattacatgttttgctaactttgaaagtgatgaagtagaactctcgtatgctaagaatggacaagatcttggcgttgccttcaaaatcagtaaggaagttcttgctggacggccactgttcccgcatgttctctgccacaactgtgcagttgaatttaattttggtcagaaggaaaagccatattttccaatacctgaagagtatactttcatccagaacgtccccttagaggatcgagttagaggaccaaaggggcctgaagagaagaaagattgtgaagttgtgatgatgattggcttgccaggagctggaaaaactacctgggttactaaacatgcagcagaaaatccagggaaatataacattcttggcacaaatactattatggataagatgatggtggcaggttttaagaagcaaatggcagatactggaaaactgaacacactgttgcagagagccccccagtgtcttgggaaatttattgagattgctgcccgaaagaagcgaaattttattctggatcagacaaatgtgtctgctgctgcccagaggagaaaaatgtgcctgtttgcaggcttccagcgaaaagctgttgtagtttgcccaaaagatgaagactataagcaaagaacacagaagaaagcagaagtagaggggaaagacctaccagaacatgcggtcctcaaaatgaaaggaaactttaccctcccagaggtagctgagtgctttgatgaaataacctatgttgaacttcagaaggaagaagcccaaaaactcttggagcaatataaggaagaaagcaaaaaggctcttccaccagaaaagaaacagaacactggctcaaagaaaagcaataaaaataagagtggcaagaaccagtttaacagaggtggtggccatagaggacgtggaggattcaatatgcgtggtggaaatttcagaggaggaggcaacccctgggaatcgtggcggatataataggaggggcaacatgccacagagaggtggtggcggtggaggaagtggtggaatcggctatccataccctcgtgcccctgtttttcctggccgtggtagttactcaaacagagggaactacaacagaggtggaatgcccaacagagggaactacaaccagaacttcagaggacgaggaaacaatcgtggctacaaaaatcaatctcagggctacaaccagtggcagcagggtcaattctggggtcagaagccatggagtcagcattatcaccaaggatattattgaatacccaaataaaacgaactgatacatatttctccaaaaccttcacaagaagtcgactgttttctttagtaggctaactttttaaacattccacaagaggaagtgcctgcgggttccttttttagaagctttgtgggttgattttttttcttttcttttttgtacatttttaattgcagtttaaaagtgaatcgtaagagaacctcagcattgtgcacgataagagaatgtgtcagtatttcagggttctacattttatctgtaaaatgtgacttttttttttttttatcacaacagaagtaaaatgttgctttgtacctggtgtcttttattaagaatttactccccccatttctcacagagaataacagtcgggagtcattgtcacaatataatagaaatgttagcaaccagattcatgtaaggactaagtggtcctcatgaattgcattaagactctgtactgctcatattacactccatcctctctgtagtttgctgggtagtggagggggtaagctaaatcatagtttctgacaataactgggaaggttttttcttaaaataacaatggaattggtataattgggattgaaaactaaaacttggaactaagatagagaagatggagtgtatgtagaagggctgttaaaaatgtaaaacttggttgcattatttgtggaggctcaaacttgtgaaggttaataccataatttttccatttgttctgcattttgattctgaaaagaaagctggctttgcccatttcttattaaaaaaacttgttgtaaatccagttgtctaatgggatctatatgaagttagccatgtctgtatgcccttctcccacaaaatactgtataactagtgtgcttgtagtagttaactccaccatctttgtaagctaatgaaattgtgagtcacccatttatatcttaatttttaatcatgtcagttcttgaatgggtatctccttagcctgctgatttctttttctttctaaagaaagtgggtggagaaattaatttagacgtttgtttgcaataaaaagaattcattttactcttgttttgggattctcgccatcaaggttcaaaatccctttatataactcccaagaggagaaatttattaagtgtgtgctttctggacagcttattctttactctgcatagaacatttaggttttaaaaacttaaatgtatactgacaattgatacataattatgaagtaaagttgaattcttcccttcccctcccccccagacaacttttaacatatttaatgaggggaaaaggtactggctgggagaagttaacactgagtttatcatctttacagaatgctaatgctgtcctcaactgattattttatatacatatatatgatacatgaaactctgggatcagatgcttttagaagccatcatgcaagccagtcattgatgtcactgctacacaacactgctaacttgactgtagctatgtaataacattagatcccctaattgtaattatattgggtttgcacagaacactttaatcttcccctcaccaatgtgaagtgaggaatcaggagtcaaactgtagaactaaaatttgacttcagtctagcgtttccttggtgtttttaggttgctttggtaagtttaggtttgctatatttctgattgcttagaattttgttttagccctttaaaatcagatcataaatatgaattcatacttctaaggaattttcttgctataagctggagtttaggtgatgtataggttcagttgagacatttttggaacaggcaaatccttagttaacataagatatttaacagttgaagatagtgtcatggatttttatcttttttagcaagtaatgctaagaaccactggcctgagctactactcttcagtatacattattaggattgcatagacttactagaggaacagtttcaggttttgatgctaatcagtgttgtgtcctaaagttgtcctttgtgcctttaaaaagttttggatatatcttctagtttaaaattgcttattaaggaattcattttataattgcagtgggaaagtaatggtcaagtaacactaggtagactatcatgcctgtttagcccagagaatttggggggagagagaatagataaaaatggcacccagaaaaatgttaaaatctttagtcaagactagaattaatacaattgtctacacttgtatggcagaaataaccttataaagtgtttaaggaattcagagaagggaatgtaccaaataagcaacagggagaaaattaggtaagaagtaagatacgaacgagaaacctgatttattgctcatccttcccttgcctccctaatggcaagcaaaactctgaacatctgaaaaggatgtagttctggacaaatcctgactacccagaggaaactcactgtgagattgctgttgatttgaagggtgctttcactaaggttatattttaaagtagaataacacatgctgagtgtaaactggctttggattggtcagctgcagtagtacaaaaacagcatagaatttgagaaaactaaaactgctatgagatagctatgagaaaactaaaactgctatgagatagaaatgatgtaaaattatgtggaaagttttccctcatatactcacatacagcctttgaagggctctggctctgaccggttgatggccttgagcgagatgaaatcatgaaattgagtcaaatcaatttgacattgaaatgacaagaggaaactcttaaatacataaaaacaagctctcatttgcctaggatagatactgtcttaaaaataaagactgaacctagatgttctgagcactagcaacaaggtattttaacaagtttaaaggaattctctgaaaaagttataaaattattctaggaaacataaccataatagtgttttaagggactttcacctggggattttatattcatgaacagagtgtattctgtatttaaaatgtctcatttgtgggaattggatgacatgttttttgataaatttattcacaatataaattgactttttattctaggaccatgtgaataatgggttccattgcacaaatacaaatattttaatagcttcttaggcagtggtgtagacatcttggatataaataattgtagatcttgtatatttgatttttaaaaaactagaataaacagagaggcataaacatatcttagagtccaagtggtagtgtttagcattggatataataaatggatgttttacaaagtgtttccataattctcttcctatacataaatgtcttgttttcaaaagtggatggaacttgtggatggaacttgtagcagagaattttatctacttctcaacctgcttcagaatacccatttgagatgttcccctggaaagatgaacacaatactgcatctgaagccatttcttcccacctaacattcttaaaatgattagagtctaaactttgtcattcattcctaattctggagctctgaggttgaggtgttcagagtttggtgaataattgggtttaagttttaacattttagtaataataaaagcaaacacatacatgttaaggcctgacaataggttgcaatacccatgcattgggactcatacccagcataaatggtgagggactgaacattagtgctttgagcaagaattggttaactacctgagatctctaaaacagtaatttgaattactaatacataaaccacaagtctcttcgaattgttaattgcctaaatttaccctaaaacttagttaacgctgcagtgcctttattaaagcttttttttgggggggggtgtgggcacagctactccataactttaaattttaaagcatgaaggtgatctagctagtgttagtgcttgagttggtagttacataggctgctcttgaatcgtcctgttttctttgcctagtattagcaccacaggtacatatttgtaaaataagcattaaaagtactttgtccagctaactcatgttggagtgacctttgtcttactaacctttgttactaaacttgttaattagaataagcccttgagaatttggaagtgagctatactactaatgtagtatatatctcttgagtgtgttggagtagatgaaaaaccaggggtccccaagggtatatttttgaaattgaacagaaacaattcatcttaatatttagttttcattatgtttagcttaatatgtgtgctagtttatttggcgtcacacttatgtcaatctcaagtcatgcagaaatagcacagtctcagaaaagaggttaggtgggaaatagatgatatgcttacattattgagcaggactatgctttcacatcctaaccaattgactaaaaatataaatgattgaagtaattttcattagttgccccaggagtctttaataatagttttaagggatagtagattggacatagatagatgggttattcataatggatattcataatggatattcataatgttaacctagaattattcagaaaatataacacctatgtagtagaatctattgattgtaagcctagtgttggtaggcaaacatgttgatgatgggccaggacatcagtaatcactacttggttaggcaagtaattaggacagggattgtaatcatgtcaatttgtagctacctaatttttattgattaggatactttatttttcatgccaggattcagcatatacttaggtcttgagcaggggctttgcttttaaagctgaatcctgggcataagaagctatgtactgtagttgaaagtgaagtaaatgtcaatgtaggctagtctctagagaaatgtcttct

SEQ ID NO: 2089 - protein, 731 aa, Homo sapiens
MSSSPVNVKKLKVSELKEELKKRRLSDKGLKAELMERLQAALDDEEAGGRPAMEPGNGSLDLGGDSAGRSGAGLEQEAAAGGDEEEEEEEEEEEGISALDGDQMELGEENGAAGAADSGPMEEEEAASEDENGDDQGFQEGEDELGDEEEGAGDENGHGEQQPQPPATQQQQPQQQRGAAKEAAGKSSGPTSLFAVTVAPPGARQGQQQAGGKKKAEGGGGGGRPGAPAAGDGKTEQKGGDKKRGVKRPREDHGRGYFEYIEENKYSRAKSPQPPVEEEDEHFDDTVVCLDTYNCDLHFKISRDRLSASSLTMESFAFLWAGGRASYGVSKGKVCFEMKVTEKIPVRHLYTKDIDIHEVRIGWSLTTSGMLLGEEEFSYGYSLKGIKTCNCETEDYGEKFDENDVITCFANFESDEVELSYAKNGQDLGVAFKISKEVLAGRPLFPHVLCHNCAVEFNFGQKEKPYFPIPEEYTFIQNVPLEDRVRGPKGPEEKKDCEVVMMIGLPGAGKTTWVTKHAAENPGKYNILGTNTIMDKMMVAGFKKQMADTGKLNTLLQRAPQCLGKFIEIAARKKRNFILDQTNVSAAAQRRKMCLFAGFQRKAVVVCPKDEDYKQRTQKKAEVEGKDLPEHAVLKMKGNFTLPEVAECFDEITYVELQKEEAQKLLEQYKEESKKALPPEKKQNTGSKKSNKNKSGKNQFNRGGGHRGRGGFNMRGGNFRGGGNPWESWRI

SEQ ID NO: 2090 - DNA, 7904 bp, Homo sapiens
acgaagagctggagaaacacataagaaggcagatctaagatggaagaaaaggcggattcgggttgaaacgccaagttgaggactgaagaaagcatttggataaagcagcctccaagctgggaaggagaaaagccaaacgagtatagccaccaaagacccagaaaggccaatatatcatgcagtgagtcggttgaactgaaaggcggtttccttttcctccatttgctcagtcccaattggaagcgcactgcgcggcctccaccgcgctctcggcccgggttcggcgtgggggcggggaggtaagtacggtaatgggcggggccgagcgcgggcgcgctccggctttcctcctgcgcagtgctcccgtcagcgcagggggcggggcgcctatattacgtgcgcggcgccgctcctgcgagaggacgttgcgtgctcgctcgcgccaggcgagtctccgcgtctccctcgcgaactcggtgaaaggaattggcgccgttcgacaccaggcggatccgctctgcagcacgaacccatctccagccgcagccgcagccgccgcccgggccgaggagcagccgcagcagccgccaccagtggccgagtgagcggagccgagtttgaggcagcgcctagcggtgaatcggggccctcaccatgagttcctcgcctgttaatgtaaaaaagctgaaggtgtcggagctgaaagaggagctcaagaagcgacgcctttctgacaagggtctcaaggccgagctcatggagcgactccaggctgcgctggacgacgaggaggccgggggccgccccgccatggagcccggaacggcgacgatcagggtttccaggaaggggaagatgagctcggggacgaagaggaaggcgcgggcgacgagaacgggcacggggagcagcagcctcaaccgccggcgacgcagcagcaacagccccaacagcagcgcggggccgccaaggaggccgcggggaagagcagcggccccacctcgctgttcgcggtgacggtggcgccgcccggggcgaggcagggccagcagcaggcgggaggtaagaagaaggcggaaggcggcggaggcggcggtcgccccggggctccggcggcgggggacggcaaaacagaacagaaaggcggagataaaaagaggggtgttaaaagaccacgagaagatcatggccgtggatattttgagtacattgaagagaacaagtatagcagagccaaatctcctcagccacctgttgaagaagaagatgaacacttcgatgacacagtggtttgtcttgatacttataattgtgatctacattttaaaatatcaagagatcgtctcagtgcttcttcccttacaatggagagttttgcttttctttgggctggaggaagagcatcctatggtgtgtcaaaaggcaaagtgtgttttgagatgaaggttacagagaagatcccagtaaggcatttatatacaaaagatattgacatacatgaagttcgtattggctggtcactaactacaagtggaatgttacttggtgaagaagaattttcttatgggtattctctaaaaggaataaaaacatgcaactgtgagactgaagattatggagaaaagtttgatgaaaatgatgtgattacatgttttgctaactttgaaagtgatgaagtagaactctcgtatgctaagaatggacaagatcttggcgttgccttcaaaatcagtaaggaagttcttgctggacggccactgttcccgcatgttctctgccacaactgtgcagttgaatttaattttggtcagaaggaaaagccatattttccaatacctgaagagtatactttcatccagaacgtccccttagaggatcgagttagaggaccaaaggggcctgaagagaagaaagattgtgaagttgtgatgatgattggcttgccaggagctggaaaaactacctgggttactaaacatgcagcagaaaatccagggaaatataacattcttggcacaaatactattatggataagatgatggtggcaggttttaagaagcaaatggcagatactggaaaactgaacacactgttgcagagagccccccagtgtcttgggaaatttattgagattgctgcccgaaagaagcgaaattttattctggatcagacaaatgtgtctgctgctgcccagaggagaaaaatgtgcctgtttgcaggcttccagcgaaaagctgttgtagtttgcccaaaagatgaagactataagcaaagaacacagaagaaagcagaagtagaggggaaagacctaccagaacatgcggtcctcaaaatgaaaggaaactttaccctcccagaggtagctgagtgctttgatgaaataacctatgttgaacttcagaaggaagaagcccaaaaactcttggagcaatataaggaagaaagcaaaaaggctcttccaccagaaaagaaacagaacactggctcaaagaaaagcaataaaaataagagtggcaagaaccagtttaacagaggtggtggccatagaggacgtggaggattcaatatgcgtggtggaaatttcagaggaggaggcaacccctgggaatcgtggcggatataataggaggggcaacatgccacagagaggtggtggcggtggaggaagtggtggaatcggctatccataccctcgtgcccctgtttttcctggccgtggtagttactcaaacagagggaactacaacagaggtggaatgcccaacagagggaactacaaccagaacttcagaggacgaggaaacaatcgtggctacaaaaatcaatctcagggctacaaccagtggcagcagggtcaattctggggtcagaagccatggagtcagcattatcaccaaggatattattgaatacccaaataaaacgaactgatacatatttctccaaaaccttcacaagaagtcgactgttttctttagtaggctaactttttaaacattccacaagaggaagtgcctgcgggttccttttttagaagctttgtgggttgattttttttcttttcttttttgtacatttttaattgcagtttaaaagtgaatcgtaagagaacctcagcattgtgcacgataagagaatgtgtcagtatttcagggttctacattttatctgtaaaatgtgacttttttttttttttatcacaacagaagtaaaatgttgctttgtacctggtgtcttttattaagaatttactccccccatttctcacagagaataacagtcgggagtcattgtcacaatataatagaaatgttagcaaccagattcatgtaaggactaagtggtcctcatgaattgcattaagactctgtactgctcatattacactccatcctctctgtagtttgctgggtagtggagggggtaagctaaatcatagtttctgacaataactgggaaggttttttcttaaaataacaatggaattggtataattgggattgaaaactaaaacttggaactaagatagagaagatggagtgtatgtagaagggctgttaaaaatgtaaaacttggttgcattatttgtggaggctcaaacttgtgaaggttaataccataatttttccatttgttctgcattttgattctgaaaagaaagctggctttgcccatttcttattaaaaaaacttgttgtaaatccagttgtctaatgggatctatatgaagttagccatgtctgtatgcccttctcccacaaaatactgtataactagtgtgcttgtagtagttaactccaccatctttgtaagctaatgaaattgtgagtcacccatttatatcttaatttttaatcatgtcagttcttgaatgggtatctccttagcctgctgatttctttttctttctaaagaaagtgggtggagaaattaatttagacgtttgtttgcaataaaaagaattcattttactcttgttttgggattctcgccatcaaggttcaaaatccctttatataactcccaagaggagaaatttattaagtgtgtgctttctggacagcttattctttactctgcatagaacatttaggttttaaaaacttaaatgtatactgacaattgatacataattatgaagtaaagttgaattcttcccttcccctcccccccagacaacttttaacatatttaatgaggggaaaaggtactggctgggagaagttaacactgagtttatcatctttacagaatgctaatgctgtcctcaactgattattttatatacatatatatgatacatgaaactctgggatcagatgcttttagaagccatcatgcaagccagtcattgatgtcactgctacacaacactgctaacttgactgtagctatgtaataacattagatcccctaattgtaattatattgggtttgcacagaacactttaatcttcccctcaccaatgtgaagtgaggaatcaggagtcaaactgtagaactaaaatttgacttcagtctagcgtttccttggtgtttttaggttgctttggtaagtttaggtttgctatatttctgattgcttagaattttgttttagccctttaaaatcagatcataaatatgaattcatacttctaaggaattttcttgctataagctggagtttaggtgatgtataggttcagttgagacatttttggaacaggcaaatccttagttaacataagatatttaacagttgaagatagtgtcatggatttttatcttttttagcaagtaatgctaagaaccactggcctgagctactactcttcagtatacattattaggattgcatagacttactagaggaacagtttcaggttttgatgctaatcagtgttgtgtcctaaagttgtcctttgtgcctttaaaaagttttggatatatcttctagtttaaaattgcttattaaggaattcattttataattgcagtgggaaagtaatggtcaagtaacactaggtagactatcatgcctgtttagcccagagaatttggggggagagagaatagataaaaatggcacccagaaaaatgttaaaatctttagtcaagactagaattaatacaattgtctacacttgtatggcagaaataaccttataaagtgtttaaggaattcagagaagggaatgtaccaaataagcaacagggagaaaattaggtaagaagtaagatacgaacgagaaacctgatttattgctcatccttcccttgcctccctaatggcaagcaaaactctgaacatctgaaaaggatgtagttctggacaaatcctgactacccagaggaaactcactgtgagattgctgttgatttgaagggtgctttcactaaggttatattttaaagtagaataacacatgctgagtgtaaactggctttggattggtcagctgcagtagtacaaaaacagcatagaatttgagaaaactaaaactgctatgagatagctatgagaaaactaaaactgctatgagatagaaatgatgtaaaattatgtggaaagttttccctcatatactcacatacagcctttgaagggctctggctctgaccggttgatggccttgagcgagatgaaatcatgaaattgagtcaaatcaatttgacattgaaatgacaagaggaaactcttaaatacataaaaacaagctctcatttgcctaggatagatactgtcttaaaaataaagactgaacctagatgttctgagcactagcaacaaggtattttaacaagtttaaaggaattctctgaaaaagttataaaattattctaggaaacataaccataatagtgttttaagggactttcacctggggattttatattcatgaacagagtgtattctgtatttaaaatgtctcatttgtgggaattggatgacatgttttttgataaatttattcacaatataaattgactttttattctaggaccatgtgaataatgggttccattgcacaaatacaaatattttaatagcttcttaggcagtggtgtagacatcttggatataaataattgtagatcttgtatatttgatttttaaaaaactagaataaacagagaggcataaacatatcttagagtccaagtggtagtgtttagcattggatataataaatggatgttttacaaagtgtttccataattctcttcctatacataaatgtcttgttttcaaaagtggatggaacttggctgggtgtggtggctcacgcctgtaatcctagcactttgggaggccaaggcgggaggatcacttgagctcaggagtttgagaccatcctgggcaacatagtgagacctggtctcttgaaaaaaaaaaagtggatggaacttgtagcagagaattttatctacttctcaacctgcttcagaatacccatttgagatgttcccctggaaagatgaacacaatactgcatctgaagccatttcttcccacctaacattcttaaaatgattagagtctaaactttgtcattcattcctaattctggagctctgaggttgaggtgttcagagtttggtgaataattgggtttaagttttaacattttagtaataataaaagcaaacacatacatgttaaggcctgacaataggttgcaatacccatgcattgggactcatacccagcataaatggtgagggactgaacattagtgctttgagcaagaattggttaactacctgagatctctaaaacagtaatttgaattactaatacataaaccacaagtctcttcgaattgttaattgcctaaatttaccctaaaacttagttaacgctgcagtgcctttattaaagcttttttttgggggggggtgtgggcacagctactccataactttaaattttaaagcatgaaggtgatctagctagtgttagtgcttgagttggtagttacataggctgctcttgaatcgtcctgttttctttgcctagtattagcaccacaggtacatatttgtaaaataagcattaaaagtactttgtccagctaactcatgttggagtgacctttgtcttactaacctttgttactaaacttgttaattagaataagcccttgagaatttggaagtgagctatactactaatgtagtatatatctcttgagtgtgttggagtagatgaaaaaccaggggtccccaagggtatatttttgaaattgaacagaaacaattcatcttaatatttagttttcattatgtttagcttaatatgtgtgctagtttatttggcgtcacacttatgtcaatctcaagtcatgcagaaatagcacagtctcagaaaagaggttaggtgggaaatagatgatatgcttacattattgagcaggactatgctttcacatcctaaccaattgactaaaaatataaatgattgaagtaattttcattagttgccccaggagtctttaataatagttttaagggatagtagattggacatagatagatgggttattcataatggatattcataatggatattcataatgttaacctagaattattcagaaaatataacacctatgtagtagaatctattgattgtaagcctagtgttggtaggcaaacatgttgatgatgggccaggacatcagtaatcactacttggttaggcaagtaattaggacagggattgtaatcatgtcaatttgtagctacctaatttttattgattaggatactttatttttcatgccaggattcagcatatacttaggtcttgagcaggggctttgcttttaaagctgaatcctgggcataagaagctatgtactgtagttgaaagtgaagtaaatgtcaatgtaggctagtctctagagaaatgtcttct

SEQ ID NO: 2091 - protein, 419 aa, Homo sapiens
MESFAFLWAGGRASYGVSKGKVCFEMKVTEKIPVRHLYTKDIDIHEVRIGWSLTTSGMLLGEEEFSYGYSLKGIKTCNCETEDYGEKFDENDVITCFANFESDEVELSYAKNGQDLGVAFKISKEVLAGRPLFPHVLCHNCAVEFNFGQKEKPYFPIPEEYTFIQNVPLEDRVRGPKGPEEKKDCEVVMMIGLPGAGKTTWVTKHAAENPGKYNILGTNTIMDKMMVAGFKKQMADTGKLNTLLQRAPQCLGKFIEIAARKKRNFILDQTNVSAAAQRRKMCLFAGFQRKAVVVCPKDEDYKQRTQKKAEVEGKDLPEHAVLKMKGNFTLPEVAECFDEITYVELQKEEAQKLLEQYKEESKKALPPEKKQNTGSKKSNKNKSGKNQFNRGGGHRGRGGFNMRGGNFRGGGNPWESWRI

SEQ ID NO: 2092 - DNA, 5859 bp, Homo sapiens
acgaagagctggagaaacacataagaaggcagatctaagatggaagaaaaggcggattcgggttgaaacgccaagttgaggactgaagaaagcatttggataaagcagcctccaagctgggaaggagaaaagccaaacgagtatagccaccaaagacccagaaaggccaatatatcatgcagtgagtcggttgaactgaaaggcggtttccttttcctccatttgctcagtcccaattggaagcgcactgcgcggcctccaccgcgctctcggcccgggttcggcgtgggggcggggaggtaagtacggtaatgggcggggccgagcgcgggcgcgctccggctttcctcctgcgcagtgctcccgtcagcgcagggggcggggcgcctatattacgtgcgcggcgccgctcctgcgagaggacgttgcgtgctcgctcgcgccaggcgagtctccgcgtctccctcgcgaactcggtgaaaggaattggcgccgttcgacaccaggcggatccgctctgcagcacgaacccatctccagccgcagccgcagcccccctgggaatcgtggcggatataataggaggggcaacatgccacagagaggtggtggcggtggaggaagtggtggaatcggctatccataccctcgtgcccctgtttttcctggccgtggtagttactcaaacagagggaactacaacagaggtggaatgcccaacagagggaactacaaccagaacttcagaggacgaggaaacaatcgtggctacaaaaatcaatctcagggctacaaccagtggcagcagggtcaattctggggtcagaagccatggagtcagcattatcaccaaggatattattgaatacccaaataaaacgaactgatacatatttctccaaaaccttcacaagaagtcgactgttttctttagtaggctaactttttaaacattccacaagaggaagtgcctgcgggttccttttttagaagctttgtgggttgattttttttcttttcttttttgtacatttttaattgcagtttaaaagtgaatcgtaagagaacctcagcattgtgcacgataagagaatgtgtcagtatttcagggttctacattttatctgtaaaatgtgacttttttttttttttatcacaacagaagtaaaatgttgctttgtacctggtgtcttttattaagaatttactccccccatttctcacagagaataacagtcgggagtcattgtcacaatataatagaaatgttagcaaccagattcatgtaaggactaagtggtcctcatgaattgcattaagactctgtactgctcatattacactccatcctctctgtagtttgctgggtagtggagggggtaagctaaatcatagtttctgacaataactgggaaggttttttcttaaaataacaatggaattggtataattgggattgaaaactaaaacttggaactaagatagagaagatggagtgtatgtagaagggctgttaaaaatgtaaaacttggttgcattatttgtggaggctcaaacttgtgaaggttaataccataatttttccatttgttctgcattttgattctgaaaagaaagctggctttgcccatttcttattaaaaaaacttgttgtaaatccagttgtctaatgggatctatatgaagttagccatgtctgtatgcccttctcccacaaaatactgtataactagtgtgcttgtagtagttaactccaccatctttgtaagctaatgaaattgtgagtcacccatttatatcttaatttttaatcatgtcagttcttgaatgggtatctccttagcctgctgatttctttttctttctaaagaaagtgggtggagaaattaatttagacgtttgtttgcaataaaaagaattcattttactcttgttttgggattctcgccatcaaggttcaaaatccctttatataactcccaagaggagaaatttattaagtgtgtgctttctggacagcttattctttactctgcatagaacatttaggttttaaaaacttaaatgtatactgacaattgatacataattatgaagtaaagttgaattcttcccttcccctcccccccagacaacttttaacatatttaatgaggggaaaaggtactggctgggagaagttaacactgagtttatcatctttacagaatgctaatgctgtcctcaactgattattttatatacatatatatgatacatgaaactctgggatcagatgcttttagaagccatcatgcaagccagtcattgatgtcactgctacacaacactgctaacttgactgtagctatgtaataacattagatcccctaattgtaattatattgggtttgcacagaacactttaatcttcccctcaccaatgtgaagtgaggaatcaggagtcaaactgtagaactaaaatttgacttcagtctagcgtttccttggtgtttttaggttgctttggtaagtttaggtttgctatatttctgattgcttagaattttgttttagccctttaaaatcagatcataaatatgaattcatacttctaaggaattttcttgctataagctggagtttaggtgatgtataggttcagttgagacatttttggaacaggcaaatccttagttaacataagatatttaacagttgaagatagtgtcatggatttttatcttttttagcaagtaatgctaagaaccactggcctgagctactactcttcagtatacattattaggattgcatagacttactagaggaacagtttcaggttttgatgctaatcagtgttgtgtcctaaagttgtcctttgtgcctttaaaaagttttggatatatcttctagtttaaaattgcttattaaggaattcattttataattgcagtgggaaagtaatggtcaagtaacactaggtagactatcatgcctgtttagcccagagaatttggggggagagagaatagataaaaatggcacccagaaaaatgttaaaatctttagtcaagactagaattaatacaattgtctacacttgtatggcagaaataaccttataaagtgtttaaggaattcagagaagggaatgtaccaaataagcaacagggagaaaattaggtaagaagtaagatacgaacgagaaacctgatttattgctcatccttcccttgcctccctaatggcaagcaaaactctgaacatctgaaaaggatgtagttctggacaaatcctgactacccagaggaaactcactgtgagattgctgttgatttgaagggtgctttcactaaggttatattttaaagtagaataacacatgctgagtgtaaactggctttggattggtcagctgcagtagtacaaaaacagcatagaatttgagaaaactaaaactgctatgagatagctatgagaaaactaaaactgctatgagatagaaatgatgtaaaattatgtggaaagttttccctcatatactcacatacagcctttgaagggctctggctctgaccggttgatggccttgagcgagatgaaatcatgaaattgagtcaaatcaatttgacattgaaatgacaagaggaaactcttaaatacataaaaacaagctctcatttgcctaggatagatactgtcttaaaaataaagactgaacctagatgttctgagcactagcaacaaggtattttaacaagtttaaaggaattctctgaaaaagttataaaattattctaggaaacataaccataatagtgttttaagggactttcacctggggattttatattcatgaacagagtgtattctgtatttaaaatgtctcatttgtgggaattggatgacatgttttttgataaatttattcacaatataaattgactttttattctaggaccatgtgaataatgggttccattgcacaaatacaaatattttaatagcttcttaggcagtggtgtagacatcttggatataaataattgtagatcttgtatatttgatttttaaaaaactagaataaacagagaggcataaacatatcttagagtccaagtggtagtgtttagcattggatataataaatggatgttttacaaagtgtttccataattctcttcctatacataaatgtcttgttttcaaaagtggatggaacttggctgggtgtggtggctcacgcctgtaatcctagcactttgggaggccaaggcgggaggatcacttgagctcaggagtttgagaccatcctgggcaacatagtgagacctggtctcttgaaaaaaaaaaagtggatggaacttgtagcagagaattttatctacttctcaacctgcttcagaatacccatttgagatgttcccctggaaagatgaacacaatactgcatctgaagccatttcttcccacctaacattcttaaaatgattagagtctaaactttgtcattcattcctaattctggagctctgaggttgaggtgttcagagtttggtgaataattgggtttaagttttaacattttagtaataataaaagcaaacacatacatgttaaggcctgacaataggttgcaatacccatgcattgggactcatacccagcataaatggtgagggactgaacattagtgctttgagcaagaattggttaactacctgagatctctaaaacagtaatttgaattactaatacataaaccacaagtctcttcgaattgttaattgcctaaatttaccctaaaacttagttaacgctgcagtgcctttattaaagcttttttttgggggggggtgtgggcacagctactccataactttaaattttaaagcatgaaggtgatctagctagtgttagtgcttgagttggtagttacataggctgctcttgaatcgtcctgttttctttgcctagtattagcaccacaggtacatatttgtaaaataagcattaaaagtactttgtccagctaactcatgttggagtgacctttgtcttactaacctttgttactaaacttgttaattagaataagcccttgagaatttggaagtgagctatactactaatgtagtatatatctcttgagtgtgttggagtagatgaaaaaccaggggtccccaagggtatatttttgaaattgaacagaaacaattcatcttaatatttagttttcattatgtttagcttaatatgtgtgctagtttatttggcgtcacacttatgtcaatctcaagtcatgcagaaatagcacagtctcagaaaagaggttaggtgggaaatagatgatatgcttacattattgagcaggactatgctttcacatcctaaccaattgactaaaaatataaatgattgaagtaattttcattagttgccccaggagtctttaataatagttttaagggatagtagattggacatagatagatgggttattcataatggatattcataatggatattcataatgttaacctagaattattcagaaaatataacacctatgtagtagaatctattgattgtaagcctagtgttggtaggcaaacatgttgatgatgggccaggacatcagtaatcactacttggttaggcaagtaattaggacagggattgtaatcatgtcaatttgtagctacctaatttttattgattaggatactttatttttcatgccaggattcagcatatacttaggtcttgagcaggggctttgcttttaaagctgaatcctgggcataagaagctatgtactgtagttgaaagtgaagtaaatgtcaatgtaggctagtctctagagaaatgtcttct

SEQ ID NO: 2093 - protein, 191 aa, Homo sapiens
MGGAERGRAPAFLLRSAPVSAGGGAPILRARRRSCERTLRARSRQASLRVSLANSVKGIGAVRHQADPLCSTNPSPAAAAAPLGIVADIIGGATCHREVVAVEEVVESAIHTLVPLFFLAVVVTQTEGTTTEVECPTEGTTTRTSEDEETIVATKINLRATTSGSRVNSGVRSHGVSIITKDIIEYPNKTN

SEQ ID NO: 2094 - DNA, 7943 bp, Homo sapiens
acgaagagctggagaaacacataagaaggcagatctaagatggaagaaaaggcggattcgggttgaaacgccaagttgaggactgaagaaagcatttggataaagcagcctccaagctgggaaggagaaaagccaaacgagtatagccaccaaagacccagaaaggccaatatatcatgcagtgagtcggttgaactgaaaggcggtttccttttcctccatttgctcagtcccaattggaagcgcactgcgcggcctccaccgcgctctcggcccgggttcggcgtgggggcggggaggtaagtacggtaatgggcggggccgagcgcgggcgcgctccggctttcctcctgcgcagtgctcccgtcagcgcagggggcggggcgcctatattacgtgcgcggcgccgctcctgcgagaggacgttgcgtgctcgctcgcgccaggcgagtctccgcgtctccctcgcgaactcggtgaaaggaattggcgccgttcgacaccaggcggatccgctctgcagcacgaacccatctccagccgcagccgcagccgccgcccgggccgaggagcagccgcagcagccgccaccagtggccgagtgagcggagccgagtttgaggcagcgcctagcggtgaatcggggccctcaccatgagttcctcgcctgttaatgtaaaaaagctgaaggtgtcggagctgaaagaggagctcaagaagcgacgcctttctgacaagggtctcaaggccgagctcatggagcgactccaggctgcgctggacgacgaggaggccgggggccgccccgccatggagcccgggaacggcagcctagacctgggcggggattccgctgggcgctcgggagcaggcctcgagcaggaggccgcggccggcggcgatgaagaggaggaggaagaggaagaggaggaggaaggaatctccgctctggacggcgaccagatggagctaggagaggagaacggggccgcgggggcggccgactcgggcccgatggaggaggaggaggccgcctcggaagacgagaacggcgacgatcagggtttccaggaaggggaagatgagctcggggacgaagaggaaggcgcgggcgacgagaacgggcacggggagcagcagcctcaaccgccggcgacgcagcagcaacagccccaacagcagcgcggggccgccaaggaggccgcggggaagagcagcggccccacctcgctgttcgcggtgacggtggcgccgcccggggcgaggcagggccagcagcaggcgggaggggacggcaaaacagaacagaaaggcggagataaaaagaggggtgttaaaagaccacgagaagatcatggccgtggatattttgagtacattgaagagaacaagtatagcagagccaaatctcctcagccacctgttgaagaagaagatgaacacttcgatgacacagtggtttgtcttgatacttataattgtgatctacattttaaaatatcaagagatcgtctcagtgcttcttcccttacaatggagagttttgcttttctttgggctggaggaagagcatcctatggtgtgtcaaaaggcaaagtgtgttttgagatgaaggttacagagaagatcccagtaaggcatttatatacaaaagatattgacatacatgaagttcgtattggctggtcactaactacaagtggaatgttacttggtgaagaagaattttcttatgggtattctctaaaaggaataaaaacatgcaactgtgagactgaagattatggagaaaagtttgatgaaaatgatgtgattacatgttttgctaactttgaaagtgatgaagtagaactctcgtatgctaagaatggacaagatcttggcgttgccttcaaaatcagtaaggaagttcttgctggacggccactgttcccgcatgttctctgccacaactgtgcagttgaatttaattttggtcagaaggaaaagccatattttccaatacctgaagagtatactttcatccagaacgtccccttagaggatcgagttagaggaccaaaggggcctgaagagaagaaagattgtgaagttgtgatgatgattggcttgccaggagctggaaaaactacctgggttactaaacatgcagcagaaaatccagggaaatataacattcttggcacaaatactattatggataagatgatggtggcaggttttaagaagcaaatggcagatactggaaaactgaacacactgttgcagagagccccccagtgtcttgggaaatttattgagattgctgcccgaaagaagcgaaattttattctggatcagacaaatgtgtctgctgctgcccagaggagaaaaatgtgcctgtttgcaggcttccagcgaaaagctgttgtagtttgcccaaaagatgaagactataagcaaagaacacagaagaaagcagaagtagaggggaaagacctaccagaacatgcggtcctcaaaatgaaaggaaactttaccctcccagaggtagctgagtgctttgatgaaataacctatgttgaacttcagaaggaagaagcccaaaaactcttggagcaatataaggaagaaagcaaaaaggctcttccaccagaaaagaaacagaacactggctcaaagaaaagcaataaaaataagagtggcaagaaccagtttaacagaggtggtggccatagaggacgtggaggattcaatatgcgtggtggaaatttcagaggaggaggcaacccctgggaatcgtggcggatataataggaggggcaacatgccacagagaggtggtggcggtggaggaagtggtggaatcggctatccataccctcgtgcccctgtttttcctggccgtggtagttactcaaacagagggaactacaacagaggtggaatgcccaacagagggaactacaaccagaacttcagaggacgaggaaacaatcgtggctacaaaaatcaatctcagggctacaaccagtggcagcagggtcaattctggggtcagaagccatggagtcagcattatcaccaaggatattattgaatacccaaataaaacgaactgatacatatttctccaaaaccttcacaagaagtcgactgttttctttagtaggctaactttttaaacattccacaagaggaagtgcctgcgggttccttttttagaagctttgtgggttgattttttttcttttcttttttgtacatttttaattgcagtttaaaagtgaatcgtaagagaacctcagcattgtgcacgataagagaatgtgtcagtatttcagggttctacattttatctgtaaaatgtgacttttttttttttttatcacaacagaagtaaaatgttgctttgtacctggtgtcttttattaagaatttactccccccatttctcacagagaataacagtcgggagtcattgtcacaatataatagaaatgttagcaaccagattcatgtaaggactaagtggtcctcatgaattgcattaagactctgtactgctcatattacactccatcctctctgtagtttgctgggtagtggagggggtaagctaaatcatagtttctgacaataactgggaaggttttttcttaaaataacaatggaattggtataattgggattgaaaactaaaacttggaactaagatagagaagatggagtgtatgtagaagggctgttaaaaatgtaaaacttggttgcattatttgtggaggctcaaacttgtgaaggttaataccataatttttccatttgttctgcattttgattctgaaaagaaagctggctttgcccatttcttattaaaaaaacttgttgtaaatccagttgtctaatgggatctatatgaagttagccatgtctgtatgcccttctcccacaaaatactgtataactagtgtgcttgtagtagttaactccaccatctttgtaagctaatgaaattgtgagtcacccatttatatcttaatttttaatcatgtcagttcttgaatgggtatctccttagcctgctgatttctttttctttctaaagaaagtgggtggagaaattaatttagacgtttgtttgcaataaaaagaattcattttactcttgttttgggattctcgccatcaaggttcaaaatccctttatataactcccaagaggagaaatttattaagtgtgtgctttctggacagcttattctttactctgcatagaacatttaggttttaaaaacttaaatgtatactgacaattgatacataattatgaagtaaagttgaattcttcccttcccctcccccccagacaacttttaacatatttaatgaggggaaaaggtactggctgggagaagttaacactgagtttatcatctttacagaatgctaatgctgtcctcaactgattattttatatacatatatatgatacatgaaactctgggatcagatgcttttagaagccatcatgcaagccagtcattgatgtcactgctacacaacactgctaacttgactgtagctatgtaataacattagatcccctaattgtaattatattgggtttgcacagaacactttaatcttcccctcaccaatgtgaagtgaggaatcaggagtcaaactgtagaactaaaatttgacttcagtctagcgtttccttggtgtttttaggttgctttggtaagtttaggtttgctatatttctgattgcttagaattttgttttagccctttaaaatcagatcataaatatgaattcatacttctaaggaattttcttgctataagctggagtttaggtgatgtataggttcagttgagacatttttggaacaggcaaatccttagttaacataagatatttaacagttgaagatagtgtcatggatttttatcttttttagcaagtaatgctaagaaccactggcctgagctactactcttcagtatacattattaggattgcatagacttactagaggaacagtttcaggttttgatgctaatcagtgttgtgtcctaaagttgtcctttgtgcctttaaaaagttttggatatatcttctagtttaaaattgcttattaaggaattcattttataattgcagtgggaaagtaatggtcaagtaacactaggtagactatcatgcctgtttagcccagagaatttggggggagagagaatagataaaaatggcacccagaaaaatgttaaaatctttagtcaagactagaattaatacaattgtctacacttgtatggcagaaataaccttataaagtgtttaaggaattcagagaagggaatgtaccaaataagcaacagggagaaaattaggtaagaagtaagatacgaacgagaaacctgatttattgctcatccttcccttgcctccctaatggcaagcaaaactctgaacatctgaaaaggatgtagttctggacaaatcctgactacccagaggaaactcactgtgagattgctgttgatttgaagggtgctttcactaaggttatattttaaagtagaataacacatgctgagtgtaaactggctttggattggtcagctgcagtagtacaaaaacagcatagaatttgagaaaactaaaactgctatgagatagctatgagaaaactaaaactgctatgagatagaaatgatgtaaaattatgtggaaagttttccctcatatactcacatacagcctttgaagggctctggctctgaccggttgatggccttgagcgagatgaaatcatgaaattgagtcaaatcaatttgacattgaaatgacaagaggaaactcttaaatacataaaaacaagctctcatttgcctaggatagatactgtcttaaaaataaagactgaacctagatgttctgagcactagcaacaaggtattttaacaagtttaaaggaattctctgaaaaagttataaaattattctaggaaacataaccataatagtgttttaagggactttcacctggggattttatattcatgaacagagtgtattctgtatttaaaatgtctcatttgtgggaattggatgacatgttttttgataaatttattcacaatataaattgactttttattctaggaccatgtgaataatgggttccattgcacaaatacaaatattttaatagcttcttaggcagtggtgtagacatcttggatataaataattgtagatcttgtatatttgatttttaaaaaactagaataaacagagaggcataaacatatcttagagtccaagtggtagtgtttagcattggatataataaatggatgttttacaaagtgtttccataattctcttcctatacataaatgtcttgttttcaaaagtggatggaacttgtggatggaacttgtagcagagaattttatctacttctcaacctgcttcagaatacccatttgagatgttcccctggaaagatgaacacaatactgcatctgaagccatttcttcccacctaacattcttaaaatgattagagtctaaactttgtcattcattcctaattctggagctctgaggttgaggtgttcagagtttggtgaataattgggtttaagttttaacattttagtaataataaaagcaaacacatacatgttaaggcctgacaataggttgcaatacccatgcattgggactcatacccagcataaatggtgagggactgaacattagtgctttgagcaagaattggttaactacctgagatctctaaaacagtaatttgaattactaatacataaaccacaagtctcttcgaattgttaattgcctaaatttaccctaaaacttagttaacgctgcagtgcctttattaaagcttttttttgggggggggtgtgggcacagctactccataactttaaattttaaagcatgaaggtgatctagctagtgttagtgcttgagttggtagttacataggctgctcttgaatcgtcctgttttctttgcctagtattagcaccacaggtacatatttgtaaaataagcattaaaagtactttgtccagctaactcatgttggagtgacctttgtcttactaacctttgttactaaacttgttaattagaataagcccttgagaatttggaagtgagctatactactaatgtagtatatatctcttgagtgtgttggagtagatgaaaaaccaggggtccccaagggtatatttttgaaattgaacagaaacaattcatcttaatatttagttttcattatgtttagcttaatatgtgtgctagtttatttggcgtcacacttatgtcaatctcaagtcatgcagaaatagcacagtctcagaaaagaggttaggtgggaaatagatgatatgcttacattattgagcaggactatgctttcacatcctaaccaattgactaaaaatataaatgattgaagtaattttcattagttgccccaggagtctttaataatagttttaagggatagtagattggacatagatagatgggttattcataatggatattcataatggatattcataatgttaacctagaattattcagaaaatataacacctatgtagtagaatctattgattgtaagcctagtgttggtaggcaaacatgttgatgatgggccaggacatcagtaatcactacttggttaggcaagtaattaggacagggattgtaatcatgtcaatttgtagctacctaatttttattgattaggatactttatttttcatgccaggattcagcatatacttaggtcttgagcaggggctttgcttttaaagctgaatcctgggcataagaagctatgtactgtagttgaaagtgaagtaaatgtcaatgtaggctagtctctagagaaatgtcttct

SEQ ID NO: 2095 - protein, 712 aa, Homo sapiens
MSSSPVNVKKLKVSELKEELKKRRLSDKGLKAELMERLQAALDDEEAGGRPAMEPGNGSLDLGGDSAGRSGAGLEQEAAAGGDEEEEEEEEEEEGISALDGDQMELGEENGAAGAADSGPMEEEEAASEDENGDDQGFQEGEDELGDEEEGAGDENGHGEQQPQPPATQQQQPQQQRGAAKEAAGKSSGPTSLFAVTVAPPGARQGQQQAGGDGKTEQKGGDKKRGVKRPREDHGRGYFEYIEENKYSRAKSPQPPVEEEDEHFDDTVVCLDTYNCDLHFKISRDRLSASSLTMESFAFLWAGGRASYGVSKGKVCFEMKVTEKIPVRHLYTKDIDIHEVRIGWSLTTSGMLLGEEEFSYGYSLKGIKTCNCETEDYGEKFDENDVITCFANFESDEVELSYAKNGQDLGVAFKISKEVLAGRPLFPHVLCHNCAVEFNFGQKEKPYFPIPEEYTFIQNVPLEDRVRGPKGPEEKKDCEVVMMIGLPGAGKTTWVTKHAAENPGKYNILGTNTIMDKMMVAGFKKQMADTGKLNTLLQRAPQCLGKFIEIAARKKRNFILDQTNVSAAAQRRKMCLFAGFQRKAVVVCPKDEDYKQRTQKKAEVEGKDLPEHAVLKMKGNFTLPEVAECFDEITYVELQKEEAQKLLEQYKEESKKALPPEKKQNTGSKKSNKNKSGKNQFNRGGGHRGRGGFNMRGGNFRGGGNPWESWRI

SEQ ID NO: 2096 - DNA, 4149 bp, Homo sapiens
acgaagagctggagaaacacataagaaggcagatctaagatggaagaaaaggcggattcgggttgaaacgccaagttgaggactgaagaaagcatttggataaagcagcctccaagctgggaaggagaaaagccaaacgagtatagccaccaaagacccagaaaggccaatatatcatgcagtgagtcggttgaactgaaaggcggtttccttttcctccatttgctcagtcccaattggaagcgcactgcgcggcctccaccgcgctctcggcccgggttcggcgtgggggcggggaggtaagtacggtaatgggcggggccgagcgcgggcgcgctccggctttcctcctgcgcagtgctcccgtcagcgcagggggcggggcgcctatattacgtgcgcggcgccgctcctgcgagaggacgttgcgtgctcgctcgcgccaggcgagtctccgcgtctccctcgcgaactcggtgaaaggaattggcgccgttcgacaccaggcggatccgctctgcagcacgaacccatctccagccgcagccgcagcccccctgggaatcgtggcggatataataggaggggcaacatgccacagagaggtggtggcggtggaggaagtggtggaatcggctatccataccctcgtgcccctgtttttcctggccgtggtagttactcaaacagagggaactacaacagaggtggaatgcccaacagagggaactacaaccagaacttcagaggacgaggaaacaatcgtggctacaaaaatcaatctcagggctacaaccagtggcagcagggtcaattctggggtcagaagccatggagtcagcattatcaccaaggatattattgaatacccaaataaaacgaactgatacatatttctccaaaaccttcacaagaagtcgactgttttctttagtaggctaactttttaaacattccacaagaggaagtgcctgcgggttccttttttagaagctttgtgggttgattttttttcttttcttttttgtacatttttaattgcagtttaaaagtgaatcgtaagagaacctcagcattgtgcacgataagagaatgtgtcagtatttcagggttctacattttatctgtaaaatgtgacttttttttttttttatcacaacagaagtaaaatgttgctttgtacctggtgtcttttattaagaatttactccccccatttctcacagagaataacagtcgggagtcattgtcacaatataatagaaatgttagcaaccagattcatgtaaggactaagtggtcctcatgaattgcattaagactctgtactgctcatattacactccatcctctctgtagtttgctgggtagtggagggggtaagctaaatcatagtttctgacaataactgggaaggttttttcttaaaataacaatggaattggtataattgggattgaaaactaaaacttggaactaagatagagaagatggagtgtatgtagaagggctgttaaaaatgtaaaacttggttgcattatttgtggaggctcaaacttgtgaaggttaataccataatttttccatttgttctgcattttgattctgaaaagaaagctggctttgcccatttcttattaaaaaaacttgttgtaaatccagttgtctaatgggatctatatgaagttagccatgtctgtatgcccttctcccacaaaatactgtataactagtgtgcttgtagtagttaactccaccatctttgtaagctaatgaaattgtgagtcacccatttatatcttaatttttaatcatgtcagttcttgaatgggtatctccttagcctgctgatttctttttctttctaaagaaagtgggtggagaaattaatttagacgtttgtttgcaataaaaagaattcattttactcttgttttgggattctcgccatcaaggttcaaaatccctttatataactcccaagaggagaaatttattaagtgtgtgctttctggacagcttattctttactctgcatagaacatttaggttttaaaaacttaaatgtatactgacaattgatacataattatgaagtaaagttgaattcttcccttcccctcccccccagacaacttttaacatatttaatgaggggaaaaggtactggctgggagaagttaacactgagtttatcatctttacagaatgctaatgctgtcctcaactgattattttatatacatatatatgatacatgaaactctgggatcagatgcttttagaagccatcatgcaagccagtcattgatgtcactgctacacaacactgctaacttgactgtagctatgtaataacattagatcccctaattgtaattatattgggtttgcacagaacactttaatcttcccctcaccaatgtgaagtgaggaatcaggagtcaaactgtagaactaaaatttgacttcagtctagcgtttccttggtgtttttaggttgctttggtaagtttaggtttgctatatttctgattgcttagaattttgttttagccctttaaaatcagatcataaatatgaattcatacttctaaggaattttcttgctataagctggagtttaggtgatgtataggttcagttgagacatttttggaacaggcaaatccttagttaacataagatatttaacagttgaagatagtgtcatggatttttatcttttttagcaagtaatgctaagaaccactggcctgagctactactcttcagtatacattattaggattgcatagacttactagaggaacagtttcaggttttgatgctaatcagtgttgtgtcctaaagttgtcctttgtgcctttaaaaagttttggatatatcttctagtttaaaattgcttattaaggaattcattttataattgcagtgggaaagtaatggtcaagtaacactaggtagactatcatgcctgtttagcccagagaatttggggggagagagaatagataaaaatggcacccagaaaaatgttaaaatctttagtcaagactagaattaatacaattgtctacacttgtatggcagaaataaccttataaagtgtttaaggaattcagagaagggaatgtaccaaataagcaacagggagaaaattaggtaagaagtaagatacgaacgagaaacctgatttattgctcatccttcccttgcctccctaatggcaagcaaaactctgaacatctgaaaaggatgtagttctggacaaatcctgactacccagaggaaactcactgtgagattgctgttgatttgaagggtgctttcactaaggttatattttaaagtagaataacacatgctgagtgtaaactggctttggattggtcagctgcagtagtacaaaaacagcatagaatttgagaaaactaaaactgctatgagatagctatgagaaaactaaaactgctatgagatagaaatgatgtaaaattatgtggaaagttttccctcatatactcacatacagcctttgaagggctctggctctgaccggttgatggccttgagcgagatgaaatcatgaaattgagtcaaatcaatttgacattgaaatgacaagaggaaactcttaaatacataaaaacaagctctcatttgcctaggatagatactgtcttaaaaataaagactgaacctagatgttctgagcactagcaacaaggtattttaacaagtttaaaggaattctctgaaaaagttataaaattattctaggaaacataaccataatagtgttttaagggactttcacctggggattttatattcatgaacagagtgtattctgtatttaaaatgtctcatttgtgggaattggatgacatgttttttgataaatttattcacaatataaattgactttttattctaggaccatgtgaataatgggttccattgcacaaatacaaatattttaatagcttcttaggcagtggtgtagacatcttggatataaataattgtagatcttgtatatttgatttttaaaaaactagaataaacagagaggcataaacatatcttagagtccaagtggtagtgtttagcattggatataataaatggatgttttacaaagtg

SEQ ID NO: 2097 - protein, 191 aa, Homo sapiens; identical to SEQ ID NO: 2093

SEQ ID NO: 2098 - DNA, 6363 bp, Homo sapiens
acgaagagctggagaaacacataagaaggcagatctaagatggaagaaaaggcggattcgggttgaaacgccaagttgaggactgaagaaagcatttggataaagcagcctccaagctgggaaggagaaaagccaaacgagtatagccaccaaagacccagaaaggccaatatatcatgcagtgagtcggttgaactgaaaggcggtttccttttcctccatttgctcagtcccaattggaagcgcactgcgcggcctccaccgcgctctcggcccgggttcggcgtgggggcggggaggtaagtacggtaatgggcggggccgagcgcgggcgcgctccggctttcctcctgcgcagtgctcccgtcagcgcagggggcggggcgcctatattacgtgcgcggcgccgctcctgcgagaggacgttgcgtgctcgctcgcgccaggcgagtctccgcgtctccctcgcgaactcggtgaaaggaattggcgccgttcgacaccaggcggatccgctctgcagcacgaacccatctccagccgcagccgcagccgccgcccgggccgaggagcagccgcagcagccgccaccagtggccgagtgagcggagccgagtttgaggcagcgcctagcggtgaatcggggccctcaccatgagttcctcgcctgttaatgtaaaaaagctgaaggtgtcggagctgaaagaggagctcaagaagcgacgcctttctgacaagggtctcaaggccgagctcatggagcgactccaggctgcgctggacgacgaggaggccgggggccgccccgccatggagcccgggaacggcagcctagacctgggcggggattccgctgggcgctcgggagcaggcctcgagcaggaggccgcggccggcggcgatgaagaggaggaggaagaggaagaggaggaggaaggaatctccgctctggacggcgaccagatggagctaggagaggagaacggggccgcgggggcggccgactcgggcccgatggaggaggaggaggccgcctcggaagacgagaacggcgacgatcagggtttccaggaaggggaagatgagctcggggacgaagaggaaggcgcgggcgacgagaacgggcacggggagcagcagcctcaaccgccggcgacgcagcagcaacagccccaacagcagcgcggggccgccaaggaggccgcggggaagagcagcggccccacctcgctgttcgcggtgacggtggcgccgcccggggcgaggcagggccagcagcaggcgggaggggacggcaaaacagaacagaaaggcggagataaaaagaggggtgttaaaagaccacgagaagatcatggccgtggatattttgagtacattgaagagaacaagtatagcagagccaaatctcctcagccacctgttgaagaagaagatgaacacttcgatgacacagtggtttgtcttgatacttataattgtgatctacattttaaaatatcaagagatcgtctcagtgcttcttcccttacaatggagagttttgcttttctttgggctggaggaagagcatcctatggtgtgtcaaaaggcaaagtgtgttttgagatgaaggttacagagaagatcccagtaaggcatttatatacaaaagatattgacatacatgaagttcgtattggctggtcactaactacaagtggaatgttacttggtgaagaagaattttcttatgggtattctctaaaaggaataaaaacatgcaactgtgagactgaagattatggagaaaagtttgatgaaaatgatgtgattacatgttttgctaactttgaaagtgatgaagtagaactctcgtatgctaagaatggacaagatcttggcgttgccttcaaaatcagtaaggaagttcttgctggacggccactgttcccgcatgttctctgccacaactgtgcagttgaatttaattttggtcagaaggaaaagccatattttccaatacctgaagagtatactttcatccagaacgtccccttagaggatcgagttagaggaccaaaggggcctgaagagaagaaagattgtgaagttgtgatgatgattggcttgccaggagctggaaaaactacctgggttactaaacatgcagcagaaaatccagggaaatataacattcttggcacaaatactattatggataagatgatggtggcaggttttaagaagcaaatggcagatactggaaaactgaacacactgttgcagagagccccccagtgtcttgggaaatttattgagattgctgcccgaaagaagcgaaattttattctggatcagacaaatgtgtctgctgctgcccagaggagaaaaatgtgcctgtttgcaggcttccagcgaaaagctgttgtagtttgcccaaaagatgaagactataagcaaagaacacagaagaaagcagaagtagaggggaaagacctaccagaacatgcggtcctcaaaatgaaaggaaactttaccctcccagaggtagctgagtgctttgatgaaataacctatgttgaacttcagaaggaagaagcccaaaaactcttggagcaatataaggaagaaagcaaaaaggctcttccaccagaaaagaaacagaacactggctcaaagaaaagcaataaaaataagagtggcaagaaccagtttaacagaggtggtggccatagaggacgtggaggattcaatatgcgtggtggaaatttcagaggaggaggcaacccctgggaatcgtggcggatataataggaggggcaacatgccacagagaggtggtggcggtggaggaagtggtggaatcggctatccataccctcgtgcccctgtttttcctggccgtggtagttactcaaacagagggaactacaacagaggtggaatgcccaacagagggaactacaaccagaacttcagaggacgaggaaacaatcgtggctacaaaaatcaatctcagggctacaaccagtggcagcagggtcaattctggggtcagaagccatggagtcagcattatcaccaaggatattattgaatacccaaataaaacgaactgatacatatttctccaaaaccttcacaagaagtcgactgttttctttagtaggctaactttttaaacattccacaagaggaagtgcctgcgggttccttttttagaagctttgtgggttgattttttttcttttcttttttgtacatttttaattgcagtttaaaagtgaatcgtaagagaacctcagcattgtgcacgataagagaatgtgtcagtatttcagggttctacattttatctgtaaaatgtgacttttttttttttttatcacaacagaagtaaaatgttgctttgtacctggtgtcttttattaagaatttactccccccatttctcacagagaataacagtcgggagtcattgtcacaatataatagaaatgttagcaaccagattcatgtaaggactaagtggtcctcatgaattgcattaagactctgtactgctcatattacactccatcctctctgtagtttgctgggtagtggagggggtaagctaaatcatagtttctgacaataactgggaaggttttttcttaaaataacaatggaattggtataattgggattgaaaactaaaacttggaactaagatagagaagatggagtgtatgtagaagggctgttaaaaatgtaaaacttggttgcattatttgtggaggctcaaacttgtgaaggttaataccataatttttccatttgttctgcattttgattctgaaaagaaagctggctttgcccatttcttattaaaaaaacttgttgtaaatccagttgtctaatgggatctatatgaagttagccatgtctgtatgcccttctcccacaaaatactgtataactagtgtgcttgtagtagttaactccaccatctttgtaagctaatgaaattgtgagtcacccatttatatcttaatttttaatcatgtcagttcttgaatgggtatctccttagcctgctgatttctttttctttctaaagaaagtgggtggagaaattaatttagacgtttgtttgcaataaaaagaattcattttactcttgttttgggattctcgccatcaaggttcaaaatccctttatataactcccaagaggagaaatttattaagtgtgtgctttctggacagcttattctttactctgcatagaacatttaggttttaaaaacttaaatgtatactgacaattgatacataattatgaagtaaagttgaattcttcccttcccctcccccccagacaacttttaacatatttaatgaggggaaaaggtactggctgggagaagttaacactgagtttatcatctttacagaatgctaatgctgtcctcaactgattattttatatacatatatatgatacatgaaactctgggatcagatgcttttagaagccatcatgcaagccagtcattgatgtcactgctacacaacactgctaacttgactgtagctatgtaataacattagatcccctaattgtaattatattgggtttgcacagaacactttaatcttcccctcaccaatgtgaagtgaggaatcaggagtcaaactgtagaactaaaatttgacttcagtctagcgtttccttggtgtttttaggttgctttggtaagtttaggtttgctatatttctgattgcttagaattttgttttagccctttaaaatcagatcataaatatgaattcatacttctaaggaattttcttgctataagctggagtttaggtgatgtataggttcagttgagacatttttggaacaggcaaatccttagttaacataagatatttaacagttgaagatagtgtcatggatttttatcttttttagcaagtaatgctaagaaccactggcctgagctactactcttcagtatacattattaggattgcatagacttactagaggaacagtttcaggttttgatgctaatcagtgttgtgtcctaaagttgtcctttgtgcctttaaaaagttttggatatatcttctagtttaaaattgcttattaaggaattcattttataattgcagtgggaaagtaatggtcaagtaacactaggtagactatcatgcctgtttagcccagagaatttggggggagagagaatagataaaaatggcacccagaaaaatgttaaaatctttagtcaagactagaattaatacaattgtctacacttgtatggcagaaataaccttataaagtgtttaaggaattcagagaagggaatgtaccaaataagcaacagggagaaaattaggtaagaagtaagatacgaacgagaaacctgatttattgctcatccttcccttgcctccctaatggcaagcaaaactctgaacatctgaaaaggatgtagttctggacaaatcctgactacccagaggaaactcactgtgagattgctgttgatttgaagggtgctttcactaaggttatattttaaagtagaataacacatgctgagtgtaaactggctttggattggtcagctgcagtagtacaaaaacagcatagaatttgagaaaactaaaactgctatgagatagctatgagaaaactaaaactgctatgagatagaaatgatgtaaaattatgtggaaagttttccctcatatactcacatacagcctttgaagggctctggctctgaccggttgatggccttgagcgagatgaaatcatgaaattgagtcaaatcaatttgacattgaaatgacaagaggaaactcttaaatacataaaaacaagctctcatttgcctaggatagatactgtcttaaaaataaagactgaacctagatgttctgagcactagcaacaaggtattttaacaagtttaaaggaattctctgaaaaagttataaaattattctaggaaacataaccataatagtgttttaagggactttcacctggggattttatattcatgaacagagtgtattctgtatttaaaatgtctcatttgtgggaattggatgacatgttttttgataaatttattcacaatataaattgactttttattctaggaccatgtgaataatgggttccattgcacaaatacaaatattttaatagcttcttaggcagtggtgtagacatcttggatataaataattgtagatcttgtatatttgatttttaaaaaactagaataaacagagaggcataaacatatcttagagtccaagtggtagtgtttagcattggatataataaatggatgttttacaaagtg

SEQ ID NO: 2099 - protein, 712 aa, Homo sapiens; identical to SEQ ID NO: 2095

SEQ ID NO: 2100 - DNA, 6194 bp, Homo sapiens
acgaagagctggagaaacacataagaaggcagatctaagatggaagaaaaggcggattcgggttgaaacgccaagttgaggactgaagaaagcatttggataaagcagcctccaagctgggaaggagaaaagccaaacgagtatagccaccaaagacccagaaaggccaatatatcatgcagtgagtcggttgaactgaaaggcggtttccttttcctccatttgctcagtcccaattggaagcgcactgcgcggcctccaccgcgctctcggcccgggttcggcgtgggggcggggaggtaagtacggtaatgggcggggccgagcgcgggcgcgctccggctttcctcctgcgcagtgctcccgtcagcgcagggggcggggcgcctatattacgtgcgcggcgccgctcctgcgagaggacgttgcgtgctcgctcgcgccaggcgagtctccgcgtctccctcgcgaactcggtgaaaggaattggcgccgttcgacaccaggcggatccgctctgcagcacgaacccatctccagccgcagccgcagccgccgcccgggccgaggagcagccgcagcagccgccaccagtggccgagtgagcggagccgagtttgaggcagcgcctagcggtgaatcggggccctcaccatgagttcctcgcctgttaatgtaaaaaagctgaaggtgtcggagctgaaagaggagctcaagaagcgacgcctttctgacaagggtctcaaggccgagctcatggagcgactccaggctgcgctggacgacgaggaggccgggggccgccccgccatggagcccggaacggcgacgatcagggtttccaggaaggggaagatgagctcggggacgaagaggaaggcgcgggcgacgagaacgggcacggggagcagcagcctcaaccgccggcgacgcagcagcaacagccccaacagcagcgcggggccgccaaggaggccgcggggaagagcagcggccccacctcgctgttcgcggtgacggtggcgccgcccggggcgaggcagggccagcagcaggcgggaggtaagaagaaggcggaaggcggcggaggcggcggtcgccccggggctccggcggcgggggacggcaaaacagaacagaaaggcggagataaaaagaggggtgttaaaagaccacgagaagatcatggccgtggatattttgagtacattgaagagaacaagtatagcagagccaaatctcctcagccacctgttgaagaagaagatgaacacttcgatgacacagtggtttgtcttgatacttataattgtgatctacattttaaaatatcaagagatcgtctcagtgcttcttcccttacaatggagagttttgcttttctttgggctggaggaagagcatcctatggtgtgtcaaaaggcaaagtgtgttttgagatgaaggttacagagaagatcccagtaaggcatttatatacaaaagatattgacatacatgaagttcgtattggctggtcactaactacaagtggaatgttacttggtgaagaagaattttcttatgggtattctctaaaaggaataaaaacatgcaactgtgagactgaagattatggagaaaagtttgatgaaaatgatgtgattacatgttttgctaactttgaaagtgatgaagtagaactctcgtatgctaagaatggacaagatcttggcgttgccttcaaaatcagtaaggaagttcttgctggacggccactgttcccgcatgttctctgccacaactgtgcagttgaatttaattttggtcagaaggaaaagccatattttccaatacctgaagagtatactttcatccagaacgtccccttagaggatcgagttagaggaccaaaggggcctgaagagaagaaagattgtgaagttgtgatgatgattggcttgccaggagctggaaaaactacctgggttactaaacatgcagcagaaaatccagggaaatataacattcttggcacaaatactattatggataagatgatggtggcaggttttaagaagcaaatggcagatactggaaaactgaacacactgttgcagagagccccccagtgtcttgggaaatttattgagattgctgcccgaaagaagcgaaattttattctggatcagacaaatgtgtctgctgctgcccagaggagaaaaatgtgcctgtttgcaggcttccagcgaaaagctgttgtagtttgcccaaaagatgaagactataagcaaagaacacagaagaaagcagaagtagaggggaaagacctaccagaacatgcggtcctcaaaatgaaaggaaactttaccctcccagaggtagctgagtgctttgatgaaataacctatgttgaacttcagaaggaagaagcccaaaaactcttggagcaatataaggaagaaagcaaaaaggctcttccaccagaaaagaaacagaacactggctcaaagaaaagcaataaaaataagagtggcaagaaccagtttaacagaggtggtggccatagaggacgtggaggattcaatatgcgtggtggaaatttcagaggaggaggcaacccctgggaatcgtggcggatataataggaggggcaacatgccacagagaggtggtggcggtggaggaagtggtggaatcggctatccataccctcgtgcccctgtttttcctggccgtggtagttactcaaacagagggaactacaacagaggtggaatgcccaacagagggaactacaaccagaacttcagaggacgaggaaacaatcgtggctacaaaaatcaatctcagggctacaaccagtggcagcagggtcaattctggggtcagaagccatggagtcagcattatcaccaaggatattattgaatacccaaataaaacgaactgatacatatttctccaaaaccttcacaagaagtcgactgttttctttagtaggctaactttttaaacattccacaagaggaagtgcctgcgggttccttttttagaagctttgtgggttgattttttttcttttcttttttgtacatttttaattgcagtttaaaagtgaatcgtaagagaacctcagcattgtgcacgataagagaatgtgtcagtatttcagggttctacattttatctgtaaaatgtgacttttttttttttttatcacaacagaagtaaaatgttgctttgtacctggtgtcttttattaagaatttactccccccatttctcacagagaataacagtcgggagtcattgtcacaatataatagaaatgttagcaaccagattcatgtaaggactaagtggtcctcatgaattgcattaagactctgtactgctcatattacactccatcctctctgtagtttgctgggtagtggagggggtaagctaaatcatagtttctgacaataactgggaaggttttttcttaaaataacaatggaattggtataattgggattgaaaactaaaacttggaactaagatagagaagatggagtgtatgtagaagggctgttaaaaatgtaaaacttggttgcattatttgtggaggctcaaacttgtgaaggttaataccataatttttccatttgttctgcattttgattctgaaaagaaagctggctttgcccatttcttattaaaaaaacttgttgtaaatccagttgtctaatgggatctatatgaagttagccatgtctgtatgcccttctcccacaaaatactgtataactagtgtgcttgtagtagttaactccaccatctttgtaagctaatgaaattgtgagtcacccatttatatcttaatttttaatcatgtcagttcttgaatgggtatctccttagcctgctgatttctttttctttctaaagaaagtgggtggagaaattaatttagacgtttgtttgcaataaaaagaattcattttactcttgttttgggattctcgccatcaaggttcaaaatccctttatataactcccaagaggagaaatttattaagtgtgtgctttctggacagcttattctttactctgcatagaacatttaggttttaaaaacttaaatgtatactgacaattgatacataattatgaagtaaagttgaattcttcccttcccctcccccccagacaacttttaacatatttaatgaggggaaaaggtactggctgggagaagttaacactgagtttatcatctttacagaatgctaatgctgtcctcaactgattattttatatacatatatatgatacatgaaactctgggatcagatgcttttagaagccatcatgcaagccagtcattgatgtcactgctacacaacactgctaacttgactgtagctatgtaataacattagatcccctaattgtaattatattgggtttgcacagaacactttaatcttcccctcaccaatgtgaagtgaggaatcaggagtcaaactgtagaactaaaatttgacttcagtctagcgtttccttggtgtttttaggttgctttggtaagtttaggtttgctatatttctgattgcttagaattttgttttagccctttaaaatcagatcataaatatgaattcatacttctaaggaattttcttgctataagctggagtttaggtgatgtataggttcagttgagacatttttggaacaggcaaatccttagttaacataagatatttaacagttgaagatagtgtcatggatttttatcttttttagcaagtaatgctaagaaccactggcctgagctactactcttcagtatacattattaggattgcatagacttactagaggaacagtttcaggttttgatgctaatcagtgttgtgtcctaaagttgtcctttgtgcctttaaaaagttttggatatatcttctagtttaaaattgcttattaaggaattcattttataattgcagtgggaaagtaatggtcaagtaacactaggtagactatcatgcctgtttagcccagagaatttggggggagagagaatagataaaaatggcacccagaaaaatgttaaaatctttagtcaagactagaattaatacaattgtctacacttgtatggcagaaataaccttataaagtgtttaaggaattcagagaagggaatgtaccaaataagcaacagggagaaaattaggtaagaagtaagatacgaacgagaaacctgatttattgctcatccttcccttgcctccctaatggcaagcaaaactctgaacatctgaaaaggatgtagttctggacaaatcctgactacccagaggaaactcactgtgagattgctgttgatttgaagggtgctttcactaaggttatattttaaagtagaataacacatgctgagtgtaaactggctttggattggtcagctgcagtagtacaaaaacagcatagaatttgagaaaactaaaactgctatgagatagctatgagaaaactaaaactgctatgagatagaaatgatgtaaaattatgtggaaagttttccctcatatactcacatacagcctttgaagggctctggctctgaccggttgatggccttgagcgagatgaaatcatgaaattgagtcaaatcaatttgacattgaaatgacaagaggaaactcttaaatacataaaaacaagctctcatttgcctaggatagatactgtcttaaaaataaagactgaacctagatgttctgagcactagcaacaaggtattttaacaagtttaaaggaattctctgaaaaagttataaaattattctaggaaacataaccataatagtgttttaagggactttcacctggggattttatattcatgaacagagtgtattctgtatttaaaatgtctcatttgtgggaattggatgacatgttttttgataaatttattcacaatataaattgactttttattctaggaccatgtgaataatgggttccattgcacaaatacaaatattttaatagcttcttaggcagtggtgtagacatcttggatataaataattgtagatcttgtatatttgatttttaaaaaactagaataaacagagaggcataaacatatcttagagtccaagtggtagtgtttagcattggatataataaatggatgttttacaaagtg

SEQ ID NO: 2101 - protein, 419 aa, Homo sapiens; identical to SEQ ID NO: 2091

SEQ ID NO: 2102 - DNA, 4146 bp, Homo sapiens
acgaagagctggagaaacacataagaaggcagatctaagatggaagaaaaggcggattcgggttgaaacgccaagttgaggactgaagaaagcatttggataaagcagcctccaagctgggaaggagaaaagccaaacgagtatagccaccaaagacccagaaaggccaatatatcatgcagtgagtcggttgaactgaaaggcggtttccttttcctccatttgctcagtcccaattggaagcgcactgcgcggcctccaccgcgctctcggcccgggttcggcgtgggggcggggaggtaagtacggtaatgggcggggccgagcgcgggcgcgctccggctttcctcctgcgcagtgctcccgtcagcgcagggggcggggcgcctatattacgtgcgcggcgccgctcctgcgagaggacgttgcgtgctcgctcgcgccaggcgagtctccgcgtctccctcgcgaactcggtgaaaggaattggcgccgttcgacaccaggcggatccgctctgcagcacgaacccatctccagccgcagccgcagccgccgcccgggccgaggagcagccgcagcagccgccaccagtggccgagtgagcggagccgagtttgaggcagcgcctagcggtgaatcggggccctcaccatgagttcctcgcctgttaatgtaaaaaagctgaaggtgtcggagctgaaagaggagctcaagaagcgacgcctttctgacaagggtctcaaggccgagctcatggagcgactccaggctgcgctggacgacgaggaggccgggggccgccccgccatggagcccgggaacggcagcctagacctgggcggggattccgctgggcgctcgggagcaggcctcgagcaggaggccgcggccggcggcgatgaagaggaggaggaagaggaagaggaggaggaaggaatctccgctctggacggcgaccagatggagctaggagaggagaacggggccgcgggggcggccgactcgggcccgatggaggaggaggaggccgcctcggaagacgagaacggcgacgatcagggtttccaggaaggggaagatgagctcggggacgaagaggaaggcgcgggcgacgagaacgggcacggggagcagcagcctcaaccgccggcgacgcagcagcaacagccccaacagcagcgcggggccgccaaggaggccgcggggaagagcagcggccccacctcgctgttcgcggtgacggtggcgccgcccggggcgaggcagggccagcagcaggcgggaggggacggcaaaacagaacagaaaggcggagataaaaagaggggtgttaaaagaccacgagaagatcatggccgtggatattttgagtacattgaagagaacaagtatagcagagccaaatctcctcagccacctgttgaagaagaagatgaacacttcgatgacacagtggtttgtcttgatacttataattgtgatctacattttaaaatatcaagagatcgtctcagtgcttcttcccttacaatggagagttttgcttttctttgggctggaggaagagcatcctatggtgtgtcaaaaggcaaagtgtgttttgagatgaaggttacagagaagatcccagtaaggcatttatatacaaaagatattgacatacatgaagttcgtattggctggtcactaactacaagtggaatgttacttggtgaagaagaattttcttatgggtattctctaaaaggaataaaaacatgcaactgtgagactgaagattatggagaaaagtttgatgaaaatgatgtgattacatgttttgctaactttgaaagtgatgaagtagaactctcgtatgctaagaatggacaagatcttggcgttgccttcaaaatcagtaaggaagttcttgctggacggccactgttcccgcatgttctctgccacaactgtgcagttgaatttaattttggtcagaaggaaaagccatattttccaatacctgaagagtatactttcatccagaacgtccccttagaggatcgagttagaggaccaaaggggcctgaagagaagaaagattgtgaagttgtgatgatgattggcttgccaggagctggaaaaactacctgggttactaaacatgcagcagaaaatccagggaaatataacattcttggcacaaatactattatggataagatgatggtggcaggttttaagaagcaaatggcagatactggaaaactgaacacactgttgcagagagccccccagtgtcttgggaaatttattgagattgctgcccgaaagaagcgaaattttattctggatcagacaaatgtgtctgctgctgcccagaggagaaaaatgtgcctgtttgcaggcttccagcgaaaagctgttgtagtttgcccaaaagatgaagactataagcaaagaacacagaagaaagcagaagtagaggggaaagacctaccagaacatgcggtcctcaaaatgaaaggaaactttaccctcccagaggtagctgagtgctttgatgaaataacctatgttgaacttcagaaggaagaagcccaaaaactcttggagcaatataaggaagaaagcaaaaaggctcttccaccagaaaagaaacagaacactggctcaaagaaaagcaataaaaataagagtggcaagaaccagtttaacagaggtggtggccatagaggacgtggaggattcaatatgcgtggtggaaatttcagaggaggaggcaacccctgggaatcgtggcggatataataggaggggcaacatgccacagagaggtggtggcggtggaggaagtggtggaatcggctatccataccctcgtgcccctgtttttcctggccgtggtagttactcaaacagagggaactacaacagaggtggaatgcccaacagagggaactacaaccagaacttcagaggacgaggaaacaatcgtggctacaaaaatcaatctcagggctacaaccagtggcagcagggtcaattctggggtcagaagccatggagtcagcattatcaccaaggatattattgaatacccaaataaaacgaactgatacatatttctccaaaaccttcacaagaagtcgactgttttctttagtaggctaactttttaaacattccacaagaggaagtgcctgcgggttccttttttagaagctttgtgggttgattttttttcttttcttttttgtacatttttaattgcagtttaaaagtgaatcgtaagagaacctcagcattgtgcacgataagagaatgtgtcagtatttcagggttctacattttatctgtaaaatgtgacttttttttttttttatcacaacagaagtaaaatgttgctttgtacctggtgtcttttattaagaatttactccccccatttctcacagagaataacagtcgggagtcattgtcacaatataatagaaatgttagcaaccagattcatgtaaggactaagtggtcctcatgaattgcattaagactctgtactgctcatattacactccatcctctctgtagtttgctgggtagtggagggggtaagctaaatcatagtttctgacaataactgggaaggttttttcttaaaataacaatggaattggtataattgggattgaaaactaaaacttggaactaagatagagaagatggagtgtatgtagaagggctgttaaaaatgtaaaacttggttgcattatttgtggaggctcaaacttgtgaaggttaataccataatttttccatttgttctgcattttgattctgaaaagaaagctggctttgcccatttcttattaaaaaaacttgttgtaaatccagttgtctaatgggatctatatgaagttagccatgtctgtatgcccttctcccacaaaatactgtataactagtgtgcttgtagtagttaactccaccatctttgtaagctaatgaaattgtgagtcacccatttatatcttaatttttaatcatgtcagttcttgaatgggtatctccttagcctgctgatttctttttctttctaaagaaagtgggtggagaaattaatttagacgtttgtttgcaataaaaagaattcattttactctt

SEQ ID NO: 2103 - protein, 712 aa, Homo sapiens; identical to SEQ ID NO: 2095

SEQ ID NO: 2104 - DNA, 3977 bp, Homo sapiens
acgaagagctggagaaacacataagaaggcagatctaagatggaagaaaaggcggattcgggttgaaacgccaagttgaggactgaagaaagcatttggataaagcagcctccaagctgggaaggagaaaagccaaacgagtatagccaccaaagacccagaaaggccaatatatcatgcagtgagtcggttgaactgaaaggcggtttccttttcctccatttgctcagtcccaattggaagcgcactgcgcggcctccaccgcgctctcggcccgggttcggcgtgggggcggggaggtaagtacggtaatgggcggggccgagcgcgggcgcgctccggctttcctcctgcgcagtgctcccgtcagcgcagggggcggggcgcctatattacgtgcgcggcgccgctcctgcgagaggacgttgcgtgctcgctcgcgccaggcgagtctccgcgtctccctcgcgaactcggtgaaaggaattggcgccgttcgacaccaggcggatccgctctgcagcacgaacccatctccagccgcagccgcagccgccgcccgggccgaggagcagccgcagcagccgccaccagtggccgagtgagcggagccgagtttgaggcagcgcctagcggtgaatcggggccctcaccatgagttcctcgcctgttaatgtaaaaaagctgaaggtgtcggagctgaaagaggagctcaagaagcgacgcctttctgacaagggtctcaaggccgagctcatggagcgactccaggctgcgctggacgacgaggaggccgggggccgccccgccatggagcccggaacggcgacgatcagggtttccaggaaggggaagatgagctcggggacgaagaggaaggcgcgggcgacgagaacgggcacggggagcagcagcctcaaccgccggcgacgcagcagcaacagccccaacagcagcgcggggccgccaaggaggccgcggggaagagcagcggccccacctcgctgttcgcggtgacggtggcgccgcccggggcgaggcagggccagcagcaggcgggaggtaagaagaaggcggaaggcggcggaggcggcggtcgccccggggctccggcggcgggggacggcaaaacagaacagaaaggcggagataaaaagaggggtgttaaaagaccacgagaagatcatggccgtggatattttgagtacattgaagagaacaagtatagcagagccaaatctcctcagccacctgttgaagaagaagatgaacacttcgatgacacagtggtttgtcttgatacttataattgtgatctacattttaaaatatcaagagatcgtctcagtgcttcttcccttacaatggagagttttgcttttctttgggctggaggaagagcatcctatggtgtgtcaaaaggcaaagtgtgttttgagatgaaggttacagagaagatcccagtaaggcatttatatacaaaagatattgacatacatgaagttcgtattggctggtcactaactacaagtggaatgttacttggtgaagaagaattttcttatgggtattctctaaaaggaataaaaacatgcaactgtgagactgaagattatggagaaaagtttgatgaaaatgatgtgattacatgttttgctaactttgaaagtgatgaagtagaactctcgtatgctaagaatggacaagatcttggcgttgccttcaaaatcagtaaggaagttcttgctggacggccactgttcccgcatgttctctgccacaactgtgcagttgaatttaattttggtcagaaggaaaagccatattttccaatacctgaagagtatactttcatccagaacgtccccttagaggatcgagttagaggaccaaaggggcctgaagagaagaaagattgtgaagttgtgatgatgattggcttgccaggagctggaaaaactacctgggttactaaacatgcagcagaaaatccagggaaatataacattcttggcacaaatactattatggataagatgatggtggcaggttttaagaagcaaatggcagatactggaaaactgaacacactgttgcagagagccccccagtgtcttgggaaatttattgagattgctgcccgaaagaagcgaaattttattctggatcagacaaatgtgtctgctgctgcccagaggagaaaaatgtgcctgtttgcaggcttccagcgaaaagctgttgtagtttgcccaaaagatgaagactataagcaaagaacacagaagaaagcagaagtagaggggaaagacctaccagaacatgcggtcctcaaaatgaaaggaaactttaccctcccagaggtagctgagtgctttgatgaaataacctatgttgaacttcagaaggaagaagcccaaaaactcttggagcaatataaggaagaaagcaaaaaggctcttccaccagaaaagaaacagaacactggctcaaagaaaagcaataaaaataagagtggcaagaaccagtttaacagaggtggtggccatagaggacgtggaggattcaatatgcgtggtggaaatttcagaggaggaggcaacccctgggaatcgtggcggatataataggaggggcaacatgccacagagaggtggtggcggtggaggaagtggtggaatcggctatccataccctcgtgcccctgtttttcctggccgtggtagttactcaaacagagggaactacaacagaggtggaatgcccaacagagggaactacaaccagaacttcagaggacgaggaaacaatcgtggctacaaaaatcaatctcagggctacaaccagtggcagcagggtcaattctggggtcagaagccatggagtcagcattatcaccaaggatattattgaatacccaaataaaacgaactgatacatatttctccaaaaccttcacaagaagtcgactgttttctttagtaggctaactttttaaacattccacaagaggaagtgcctgcgggttccttttttagaagctttgtgggttgattttttttcttttcttttttgtacatttttaattgcagtttaaaagtgaatcgtaagagaacctcagcattgtgcacgataagagaatgtgtcagtatttcagggttctacattttatctgtaaaatgtgacttttttttttttttatcacaacagaagtaaaatgttgctttgtacctggtgtcttttattaagaatttactccccccatttctcacagagaataacagtcgggagtcattgtcacaatataatagaaatgttagcaaccagattcatgtaaggactaagtggtcctcatgaattgcattaagactctgtactgctcatattacactccatcctctctgtagtttgctgggtagtggagggggtaagctaaatcatagtttctgacaataactgggaaggttttttcttaaaataacaatggaattggtataattgggattgaaaactaaaacttggaactaagatagagaagatggagtgtatgtagaagggctgttaaaaatgtaaaacttggttgcattatttgtggaggctcaaacttgtgaaggttaataccataatttttccatttgttctgcattttgattctgaaaagaaagctggctttgcccatttcttattaaaaaaacttgttgtaaatccagttgtctaatgggatctatatgaagttagccatgtctgtatgcccttctcccacaaaatactgtataactagtgtgcttgtagtagttaactccaccatctttgtaagctaatgaaattgtgagtcacccatttatatcttaatttttaatcatgtcagttcttgaatgggtatctccttagcctgctgatttctttttctttctaaagaaagtgggtggagaaattaatttagacgtttgtttgcaataaaaagaattcattttactctt

SEQ ID NO: 2105 - protein, 419 aa, Homo sapiens; identical to SEQ ID NO: 2091

SEQ ID NO: 2106 - DNA, 4203 bp, Homo sapiens
acgaagagctggagaaacacataagaaggcagatctaagatggaagaaaaggcggattcgggttgaaacgccaagttgaggactgaagaaagcatttggataaagcagcctccaagctgggaaggagaaaagccaaacgagtatagccaccaaagacccagaaaggccaatatatcatgcagtgagtcggttgaactgaaaggcggtttccttttcctccatttgctcagtcccaattggaagcgcactgcgcggcctccaccgcgctctcggcccgggttcggcgtgggggcggggaggtaagtacggtaatgggcggggccgagcgcgggcgcgctccggctttcctcctgcgcagtgctcccgtcagcgcagggggcggggcgcctatattacgtgcgcggcgccgctcctgcgagaggacgttgcgtgctcgctcgcgccaggcgagtctccgcgtctccctcgcgaactcggtgaaaggaattggcgccgttcgacaccaggcggatccgctctgcagcacgaacccatctccagccgcagccgcagccgccgcccgggccgaggagcagccgcagcagccgccaccagtggccgagtgagcggagccgagtttgaggcagcgcctagcggtgaatcggggccctcaccatgagttcctcgcctgttaatgtaaaaaagctgaaggtgtcggagctgaaagaggagctcaagaagcgacgcctttctgacaagggtctcaaggccgagctcatggagcgactccaggctgcgctggacgacgaggaggccgggggccgccccgccatggagcccgggaacggcagcctagacctgggcggggattccgctgggcgctcgggagcaggcctcgagcaggaggccgcggccggcggcgatgaagaggaggaggaagaggaagaggaggaggaaggaatctccgctctggacggcgaccagatggagctaggagaggagaacggggccgcgggggcggccgactcgggcccgatggaggaggaggaggccgcctcggaagacgagaacggcgacgatcagggtttccaggaaggggaagatgagctcggggacgaagaggaaggcgcgggcgacgagaacgggcacggggagcagcagcctcaaccgccggcgacgcagcagcaacagccccaacagcagcgcggggccgccaaggaggccgcggggaagagcagcggccccacctcgctgttcgcggtgacggtggcgccgcccggggcgaggcagggccagcagcaggcgggaggtaagaagaaggcggaaggcggcggaggcggcggtcgccccggggctccggcggcgggggacggcaaaacagaacagaaaggcggagataaaaagaggggtgttaaaagaccacgagaagatcatggccgtggatattttgagtacattgaagagaacaagtatagcagagccaaatctcctcagccacctgttgaagaagaagatgaacacttcgatgacacagtggtttgtcttgatacttataattgtgatctacattttaaaatatcaagagatcgtctcagtgcttcttcccttacaatggagagttttgcttttctttgggctggaggaagagcatcctatggtgtgtcaaaaggcaaagtgtgttttgagatgaaggttacagagaagatcccagtaaggcatttatatacaaaagatattgacatacatgaagttcgtattggctggtcactaactacaagtggaatgttacttggtgaagaagaattttcttatgggtattctctaaaaggaataaaaacatgcaactgtgagactgaagattatggagaaaagtttgatgaaaatgatgtgattacatgttttgctaactttgaaagtgatgaagtagaactctcgtatgctaagaatggacaagatcttggcgttgccttcaaaatcagtaaggaagttcttgctggacggccactgttcccgcatgttctctgccacaactgtgcagttgaatttaattttggtcagaaggaaaagccatattttccaatacctgaagagtatactttcatccagaacgtccccttagaggatcgagttagaggaccaaaggggcctgaagagaagaaagattgtgaagttgtgatgatgattggcttgccaggagctggaaaaactacctgggttactaaacatgcagcagaaaatccagggaaatataacattcttggcacaaatactattatggataagatgatggtggcaggttttaagaagcaaatggcagatactggaaaactgaacacactgttgcagagagccccccagtgtcttgggaaatttattgagattgctgcccgaaagaagcgaaattttattctggatcagacaaatgtgtctgctgctgcccagaggagaaaaatgtgcctgtttgcaggcttccagcgaaaagctgttgtagtttgcccaaaagatgaagactataagcaaagaacacagaagaaagcagaagtagaggggaaagacctaccagaacatgcggtcctcaaaatgaaaggaaactttaccctcccagaggtagctgagtgctttgatgaaataacctatgttgaacttcagaaggaagaagcccaaaaactcttggagcaatataaggaagaaagcaaaaaggctcttccaccagaaaagaaacagaacactggctcaaagaaaagcaataaaaataagagtggcaagaaccagtttaacagaggtggtggccatagaggacgtggaggattcaatatgcgtggtggaaatttcagaggaggaggcaacccctgggaatcgtggcggatataataggaggggcaacatgccacagagaggtggtggcggtggaggaagtggtggaatcggctatccataccctcgtgcccctgtttttcctggccgtggtagttactcaaacagagggaactacaacagaggtggaatgcccaacagagggaactacaaccagaacttcagaggacgaggaaacaatcgtggctacaaaaatcaatctcagggctacaaccagtggcagcagggtcaattctggggtcagaagccatggagtcagcattatcaccaaggatattattgaatacccaaataaaacgaactgatacatatttctccaaaaccttcacaagaagtcgactgttttctttagtaggctaactttttaaacattccacaagaggaagtgcctgcgggttccttttttagaagctttgtgggttgattttttttcttttcttttttgtacatttttaattgcagtttaaaagtgaatcgtaagagaacctcagcattgtgcacgataagagaatgtgtcagtatttcagggttctacattttatctgtaaaatgtgacttttttttttttttatcacaacagaagtaaaatgttgctttgtacctggtgtcttttattaagaatttactccccccatttctcacagagaataacagtcgggagtcattgtcacaatataatagaaatgttagcaaccagattcatgtaaggactaagtggtcctcatgaattgcattaagactctgtactgctcatattacactccatcctctctgtagtttgctgggtagtggagggggtaagctaaatcatagtttctgacaataactgggaaggttttttcttaaaataacaatggaattggtataattgggattgaaaactaaaacttggaactaagatagagaagatggagtgtatgtagaagggctgttaaaaatgtaaaacttggttgcattatttgtggaggctcaaacttgtgaaggttaataccataatttttccatttgttctgcattttgattctgaaaagaaagctggctttgcccatttcttattaaaaaaacttgttgtaaatccagttgtctaatgggatctatatgaagttagccatgtctgtatgcccttctcccacaaaatactgtataactagtgtgcttgtagtagttaactccaccatctttgtaagctaatgaaattgtgagtcacccatttatatcttaatttttaatcatgtcagttcttgaatgggtatctccttagcctgctgatttctttttctttctaaagaaagtgggtggagaaattaatttagacgtttgtttgcaataaaaagaattcattttactctt

SEQ ID NO: 2107 - protein, 731 aa, Homo sapiens; identical to SEQ ID NO: 2089

SEQ ID NO: 2108 - DNA, 1932 bp, Homo sapiens
acgaagagctggagaaacacataagaaggcagatctaagatggaagaaaaggcggattcgggttgaaacgccaagttgaggactgaagaaagcatttggataaagcagcctccaagctgggaaggagaaaagccaaacgagtatagccaccaaagacccagaaaggccaatatatcatgcagtgagtcggttgaactgaaaggcggtttccttttcctccatttgctcagtcccaattggaagcgcactgcgcggcctccaccgcgctctcggcccgggttcggcgtgggggcggggaggtaagtacggtaatgggcggggccgagcgcgggcgcgctccggctttcctcctgcgcagtgctcccgtcagcgcagggggcggggcgcctatattacgtgcgcggcgccgctcctgcgagaggacgttgcgtgctcgctcgcgccaggcgagtctccgcgtctccctcgcgaactcggtgaaaggaattggcgccgttcgacaccaggcggatccgctctgcagcacgaacccatctccagccgcagccgcagcccccctgggaatcgtggcggatataataggaggggcaacatgccacagagaggtggtggcggtggaggaagtggtggaatcggctatccataccctcgtgcccctgtttttcctggccgtggtagttactcaaacagagggaactacaacagaggtggaatgcccaacagagggaactacaaccagaacttcagaggacgaggaaacaatcgtggctacaaaaatcaatctcagggctacaaccagtggcagcagggtcaattctggggtcagaagccatggagtcagcattatcaccaaggatattattgaatacccaaataaaacgaactgatacatatttctccaaaaccttcacaagaagtcgactgttttctttagtaggctaactttttaaacattccacaagaggaagtgcctgcgggttccttttttagaagctttgtgggttgattttttttcttttcttttttgtacatttttaattgcagtttaaaagtgaatcgtaagagaacctcagcattgtgcacgataagagaatgtgtcagtatttcagggttctacattttatctgtaaaatgtgacttttttttttttttatcacaacagaagtaaaatgttgctttgtacctggtgtcttttattaagaatttactccccccatttctcacagagaataacagtcgggagtcattgtcacaatataatagaaatgttagcaaccagattcatgtaaggactaagtggtcctcatgaattgcattaagactctgtactgctcatattacactccatcctctctgtagtttgctgggtagtggagggggtaagctaaatcatagtttctgacaataactgggaaggttttttcttaaaataacaatggaattggtataattgggattgaaaactaaaacttggaactaagatagagaagatggagtgtatgtagaagggctgttaaaaatgtaaaacttggttgcattatttgtggaggctcaaacttgtgaaggttaataccataatttttccatttgttctgcattttgattctgaaaagaaagctggctttgcccatttcttattaaaaaaacttgttgtaaatccagttgtctaatgggatctatatgaagttagccatgtctgtatgcccttctcccacaaaatactgtataactagtgtgcttgtagtagttaactccaccatctttgtaagctaatgaaattgtgagtcacccatttatatcttaatttttaatcatgtcagttcttgaatgggtatctccttagcctgctgatttctttttctttctaaagaaagtgggtggagaaattaatttagacgtttgtttgcaataaaaagaattcattttactctt

SEQ ID NO: 2109 - protein, 191 aa, Homo sapiens; identical to SEQ ID NO: 2093

SEQ ID NO: 2110 - DNA, 3874 bp, Homo sapiens
acgaagagctggagaaacacataagaaggcagatctaagatggaagaaaaggcggattcgggttgaaacgccaagttgaggactgaagaaagcatttggataaagcagcctccaagctgggaaggagaaaagccaaacgagtatagccaccaaagacccagaaaggccaatatatcatgcagtgagtcggttgaactgaaaggcggtttccttttcctccatttgctcagtcccaattggaagcgcactgcgcggcctccaccgcgctctcggcccgggttcggcgtgggggcggggaggtaagtacggtaatgggcggggccgagcgcgggcgcgctccggctttcctcctgcgcagtgctcccgtcagcgcagggggcggggcgcctatattacgtgcgcggcgccgctcctgcgagaggacgttgcgtgctcgctcgcgccaggcgagtctccgcgtctccctcgcgaactcggtgaaaggaattggcgccgttcgacaccaggcggatccgctctgcagcacgaacccatctccagccgcagccgcagccgccgcccgggccgaggagcagccgcagcagccgccaccagtggccgagtgagcggagccgagtttgaggcagcgcctagcggtgaatcggggccctcaccatgagttcctcgcctgttaatgtaaaaaagctgaaggtgtcggagctgaaagaggagctcaagaagcgacgcctttctgacaagggtctcaaggccgagctcatggagcgactccaggctgcgctggacgacgaggaggccgggggccgccccgccatggagcccgggaacggcagcctagacctgggcggggattccgctgggcgctcgggagcaggcctcgagcaggaggccgcggccggcggcgatgaagaggaggaggaagaggaagaggaggaggaaggaatctccgctctggacggcgaccagatggagctaggagaggagaacggggccgcgggggcggccgactcgggcccgatggaggaggaggaggccgcctcggaagacgagaacggcgacgatcagggtttccaggaaggggaagatgagctcggggacgaagaggaaggcgcgggcgacgagaacgggcacggggagcagcagcctcaaccgccggcgacgcagcagcaacagccccaacagcagcgcggggccgccaaggaggccgcggggaagagcagcggccccacctcgctgttcgcggtgacggtggcgccgcccggggcgaggcagggccagcagcaggcgggaggggacggcaaaacagaacagaaaggcggagataaaaagaggggtgttaaaagaccacgagaagatcatggccgtggatattttgagtacattgaagagaacaagtatagcagagccaaatctcctcagccacctgttgaagaagaagatgaacacttcgatgacacagtggtttgtcttgatacttataattgtgatctacattttaaaatatcaagagatcgtctcagtgcttcttcccttacaatggagagttttgcttttctttgggctggaggaagagcatcctatggtgtgtcaaaaggcaaagtgtgttttgagatgaaggttacagagaagatcccagtaaggcatttatatacaaaagatattgacatacatgaagttcgtattggctggtcactaactacaagtggaatgttacttggtgaagaagaattttcttatgggtattctctaaaaggaataaaaacatgcaactgtgagactgaagattatggagaaaagtttgatgaaaatgatgtgattacatgttttgctaactttgaaagtgatgaagtagaactctcgtatgctaagaatggacaagatcttggcgttgccttcaaaatcagtaaggaagttcttgctggacggccactgttcccgcatgttctctgccacaactgtgcagttgaatttaattttggtcagaaggaaaagccatattttccaatacctgaagagtatactttcatccagaacgtccccttagaggatcgagttagaggaccaaaggggcctgaagagaagaaagattgtgaagttgtgatgatgattggcttgccaggagctggaaaaactacctgggttactaaacatgcagcagaaaatccagggaaatataacattcttggcacaaatactattatggataagatgatggtggcaggttttaagaagcaaatggcagatactggaaaactgaacacactgttgcagagagccccccagtgtcttgggaaatttattgagattgctgcccgaaagaagcgaaattttattctggatcagacaaatgtgtctgctgctgcccagaggagaaaaatgtgcctgtttgcaggcttccagcgaaaagctgttgtagtttgcccaaaagatgaagactataagcaaagaacacagaagaaagcagaagtagaggggaaagacctaccagaacatgcggtcctcaaaatgaaaggaaactttaccctcccagaggtagctgagtgctttgatgaaataacctatgttgaacttcagaaggaagaagcccaaaaactcttggagcaatataaggaagaaagcaaaaaggctcttccaccagaaaagaaacagaacactggctcaaagaaaagcaataaaaataagagtggcaagaaccagtttaacagaggtggtggccatagaggacgtggaggattcaatatgcgtggtggaaatttcagaggaggaggcaacccctgggaatcgtggcggatataataggaggggcaacatgccacagagaggtggtggcggtggaggaagtggtggaatcggctatccataccctcgtgcccctgtttttcctggccgtggtagttactcaaacagagggaactacaacagaggtggaatgcccaacagagggaactacaaccagaacttcagaggacgaggaaacaatcgtggctacaaaaatcaatctcagggctacaaccagtggcagcagggtcaattctggggtcagaagccatggagtcagcattatcaccaaggatattattgaatacccaaataaaacgaactgatacatatttctccaaaaccttcacaagaagtcgactgttttctttagtaggctaactttttaaacattccacaagaggaagtgcctgcgggttccttttttagaagctttgtgggttgattttttttcttttcttttttgtacatttttaattgcagtttaaaagtgaatcgtaagagaacctcagcattgtgcacgataagagaatgtgtcagtatttcagggttctacattttatctgtaaaatgtgacttttttttttttttatcacaacagaagtaaaatgttgctttgtacctggtgtcttttattaagaatttactccccccatttctcacagagaataacagtcgggagtcattgtcacaatataatagaaatgttagcaaccagattcatgtaaggactaagtggtcctcatgaattgcattaagactctgtactgctcatattacactccatcctctctgtagtttgctgggtagtggagggggtaagctaaatcatagtttctgacaataactgggaaggttttttcttaaaataacaatggaattggtataattgggattgaaaactaaaacttggaactaagatagagaagatggagtgtatgtagaagggctgttaaaaatgtaaaacttggttgcattatttgtggaggctcaaacttgtgaaggttaataccataatttttccatttgttctgcattttgattctgaaaagaaagctggctttgcccatttcttattaaaaaaacttgttgtaaatcc

SEQ ID NO: 2111 - protein, 712 aa, Homo sapiens; identical to SEQ ID NO: 2095

SEQ ID NO: 2112 - DNA, 3931 bp, Homo sapiens
acgaagagctggagaaacacataagaaggcagatctaagatggaagaaaaggcggattcgggttgaaacgccaagttgaggactgaagaaagcatttggataaagcagcctccaagctgggaaggagaaaagccaaacgagtatagccaccaaagacccagaaaggccaatatatcatgcagtgagtcggttgaactgaaaggcggtttccttttcctccatttgctcagtcccaattggaagcgcactgcgcggcctccaccgcgctctcggcccgggttcggcgtgggggcggggaggtaagtacggtaatgggcggggccgagcgcgggcgcgctccggctttcctcctgcgcagtgctcccgtcagcgcagggggcggggcgcctatattacgtgcgcggcgccgctcctgcgagaggacgttgcgtgctcgctcgcgccaggcgagtctccgcgtctccctcgcgaactcggtgaaaggaattggcgccgttcgacaccaggcggatccgctctgcagcacgaacccatctccagccgcagccgcagccgccgcccgggccgaggagcagccgcagcagccgccaccagtggccgagtgagcggagccgagtttgaggcagcgcctagcggtgaatcggggccctcaccatgagttcctcgcctgttaatgtaaaaaagctgaaggtgtcggagctgaaagaggagctcaagaagcgacgcctttctgacaagggtctcaaggccgagctcatggagcgactccaggctgcgctggacgacgaggaggccgggggccgccccgccatggagcccgggaacggcagcctagacctgggcggggattccgctgggcgctcgggagcaggcctcgagcaggaggccgcggccggcggcgatgaagaggaggaggaagaggaagaggaggaggaaggaatctccgctctggacggcgaccagatggagctaggagaggagaacggggccgcgggggcggccgactcgggcccgatggaggaggaggaggccgcctcggaagacgagaacggcgacgatcagggtttccaggaaggggaagatgagctcggggacgaagaggaaggcgcgggcgacgagaacgggcacggggagcagcagcctcaaccgccggcgacgcagcagcaacagccccaacagcagcgcggggccgccaaggaggccgcggggaagagcagcggccccacctcgctgttcgcggtgacggtggcgccgcccggggcgaggcagggccagcagcaggcgggaggtaagaagaaggcggaaggcggcggaggcggcggtcgccccggggctccggcggcgggggacggcaaaacagaacagaaaggcggagataaaaagaggggtgttaaaagaccacgagaagatcatggccgtggatattttgagtacattgaagagaacaagtatagcagagccaaatctcctcagccacctgttgaagaagaagatgaacacttcgatgacacagtggtttgtcttgatacttataattgtgatctacattttaaaatatcaagagatcgtctcagtgcttcttcccttacaatggagagttttgcttttctttgggctggaggaagagcatcctatggtgtgtcaaaaggcaaagtgtgttttgagatgaaggttacagagaagatcccagtaaggcatttatatacaaaagatattgacatacatgaagttcgtattggctggtcactaactacaagtggaatgttacttggtgaagaagaattttcttatgggtattctctaaaaggaataaaaacatgcaactgtgagactgaagattatggagaaaagtttgatgaaaatgatgtgattacatgttttgctaactttgaaagtgatgaagtagaactctcgtatgctaagaatggacaagatcttggcgttgccttcaaaatcagtaaggaagttcttgctggacggccactgttcccgcatgttctctgccacaactgtgcagttgaatttaattttggtcagaaggaaaagccatattttccaatacctgaagagtatactttcatccagaacgtccccttagaggatcgagttagaggaccaaaggggcctgaagagaagaaagattgtgaagttgtgatgatgattggcttgccaggagctggaaaaactacctgggttactaaacatgcagcagaaaatccagggaaatataacattcttggcacaaatactattatggataagatgatggtggcaggttttaagaagcaaatggcagatactggaaaactgaacacactgttgcagagagccccccagtgtcttgggaaatttattgagattgctgcccgaaagaagcgaaattttattctggatcagacaaatgtgtctgctgctgcccagaggagaaaaatgtgcctgtttgcaggcttccagcgaaaagctgttgtagtttgcccaaaagatgaagactataagcaaagaacacagaagaaagcagaagtagaggggaaagacctaccagaacatgcggtcctcaaaatgaaaggaaactttaccctcccagaggtagctgagtgctttgatgaaataacctatgttgaacttcagaaggaagaagcccaaaaactcttggagcaatataaggaagaaagcaaaaaggctcttccaccagaaaagaaacagaacactggctcaaagaaaagcaataaaaataagagtggcaagaaccagtttaacagaggtggtggccatagaggacgtggaggattcaatatgcgtggtggaaatttcagaggaggaggcaacccctgggaatcgtggcggatataataggaggggcaacatgccacagagaggtggtggcggtggaggaagtggtggaatcggctatccataccctcgtgcccctgtttttcctggccgtggtagttactcaaacagagggaactacaacagaggtggaatgcccaacagagggaactacaaccagaacttcagaggacgaggaaacaatcgtggctacaaaaatcaatctcagggctacaaccagtggcagcagggtcaattctggggtcagaagccatggagtcagcattatcaccaaggatattattgaatacccaaataaaacgaactgatacatatttctccaaaaccttcacaagaagtcgactgttttctttagtaggctaactttttaaacattccacaagaggaagtgcctgcgggttccttttttagaagctttgtgggttgattttttttcttttcttttttgtacatttttaattgcagtttaaaagtgaatcgtaagagaacctcagcattgtgcacgataagagaatgtgtcagtatttcagggttctacattttatctgtaaaatgtgacttttttttttttttatcacaacagaagtaaaatgttgctttgtacctggtgtcttttattaagaatttactccccccatttctcacagagaataacagtcgggagtcattgtcacaatataatagaaatgttagcaaccagattcatgtaaggactaagtggtcctcatgaattgcattaagactctgtactgctcatattacactccatcctctctgtagtttgctgggtagtggagggggtaagctaaatcatagtttctgacaataactgggaaggttttttcttaaaataacaatggaattggtataattgggattgaaaactaaaacttggaactaagatagagaagatggagtgtatgtagaagggctgttaaaaatgtaaaacttggttgcattatttgtggaggctcaaacttgtgaaggttaataccataatttttccatttgttctgcattttgattctgaaaagaaagctggctttgcccatttcttattaaaaaaacttgttgtaaatcc

SEQ ID NO: 2113 - protein, 731 aa, Homo sapiens; identical to SEQ ID NO: 2089

SEQ ID NO: 2114 - DNA, 1660 bp, Homo sapiens
acgaagagctggagaaacacataagaaggcagatctaagatggaagaaaaggcggattcgggttgaaacgccaagttgaggactgaagaaagcatttggataaagcagcctccaagctgggaaggagaaaagccaaacgagtatagccaccaaagacccagaaaggccaatatatcatgcagtgagtcggttgaactgaaaggcggtttccttttcctccatttgctcagtcccaattggaagcgcactgcgcggcctccaccgcgctctcggcccgggttcggcgtgggggcggggaggtaagtacggtaatgggcggggccgagcgcgggcgcgctccggctttcctcctgcgcagtgctcccgtcagcgcagggggcggggcgcctatattacgtgcgcggcgccgctcctgcgagaggacgttgcgtgctcgctcgcgccaggcgagtctccgcgtctccctcgcgaactcggtgaaaggaattggcgccgttcgacaccaggcggatccgctctgcagcacgaacccatctccagccgcagccgcagcccccctgggaatcgtggcggatataataggaggggcaacatgccacagagaggtggtggcggtggaggaagtggtggaatcggctatccataccctcgtgcccctgtttttcctggccgtggtagttactcaaacagagggaactacaacagaggtggaatgcccaacagagggaactacaaccagaacttcagaggacgaggaaacaatcgtggctacaaaaatcaatctcagggctacaaccagtggcagcagggtcaattctggggtcagaagccatggagtcagcattatcaccaaggatattattgaatacccaaataaaacgaactgatacatatttctccaaaaccttcacaagaagtcgactgttttctttagtaggctaactttttaaacattccacaagaggaagtgcctgcgggttccttttttagaagctttgtgggttgattttttttcttttcttttttgtacatttttaattgcagtttaaaagtgaatcgtaagagaacctcagcattgtgcacgataagagaatgtgtcagtatttcagggttctacattttatctgtaaaatgtgacttttttttttttttatcacaacagaagtaaaatgttgctttgtacctggtgtcttttattaagaatttactccccccatttctcacagagaataacagtcgggagtcattgtcacaatataatagaaatgttagcaaccagattcatgtaaggactaagtggtcctcatgaattgcattaagactctgtactgctcatattacactccatcctctctgtagtttgctgggtagtggagggggtaagctaaatcatagtttctgacaataactgggaaggttttttcttaaaataacaatggaattggtataattgggattgaaaactaaaacttggaactaagatagagaagatggagtgtatgtagaagggctgttaaaaatgtaaaacttggttgcattatttgtggaggctcaaacttgtgaaggttaataccataatttttccatttgttctgcattttgattctgaaaagaaagctggctttgcccatttcttattaaaaaaacttgttgtaaatcc

SEQ ID NO: 2115 - protein, 191 aa, Homo sapiens; identical to SEQ ID NO: 2093

SEQ ID NO: 2116 - DNA, 3008 bp, Homo sapiens
agagtgtcaatgtaaaactctttcttactggaatatcctttacagaaggttgagatagtcatctgagcctttttaaaagaaaaaactgcaggtgaaaaaggagttagttgatgtgaaagttttagtgaaattctgggttgtataaataagttgctaggaattggcaaggtagtgaagtggtgactcacacaggtaatgtaattgttagattttttagcaaatcaggaatatgtcaatataagtacaatgttgaattcaaacaatctgttgaattaaattctgttgattagaataactctaatttaagaaaaattccaaactgtagatttatttttctctgatcagtaaaaagaaaatgagttccagcttgactttagctgttcaagtgagaagtctgaggaagtgcatgttaatgagccagtgacccataggtagctgggttaaagacactttggatttggataatccgggaagcaattaatccctaattgttgaacaggcagtcctgggtaaagaggacctaaaatgctgcactattaacagcattagacggccaggtttgtacttcatagttttaggctgtcttcttcacaagttttagaaaaagaatttaggagctagagccctggtgcaggatcaacagcagctcatactcctattttaaaataatttggtcgtggcctcccttcagttttaatgtggcactggtaaatctacctggttctggcatgcttcactttgatttcctgctatcctctactgcttgcctctaaatcaaggtaaagagcagagcaggtatgtattaatgtcacattgtcttgattattttaaatacttaaaatatacatgttaaaccttggtattagtttcacaggcagtttacttttcagtacataatttaacaggagtgacttggtgggagtggggctttaaactgaaaattggaacaacagcatgatgtggagaaaagttgtgcagcattaagaagtacatgcaaaaattaagtaaccaagttttgtctacatagcagatatgtttacattggatgtcaaaagtaacacagtatttgatataattacagataattgtgatctacattttaaaatatcaagagatcgtctcagtgcttcttcccttacaatggagagttttgcttttctttgggctggaggaagagcatcctatggtgtgtcaaaaggcaaagtgtgttttgagatgaaggttacagagaagatcccagtaaggcatttatatacaaaagatattgacatacatgaagttcgtattggctggtcactaactacaagtggaatgttacttggtgaagaagaattttcttatgggtattctctaaaaggaataaaaacatgcaactgtgagactgaagattatggagaaaagtttgatgaaaatgatgtgattacatgttttgctaactttgaaagtgatgaagtagaactctcgtatgctaagaatggacaagatcttggcgttgccttcaaaatcagtaaggaagttcttgctggacggccactgttcccgcatgttctctgccacaactgtgcagttgaatttaattttggtcagaaggaaaagccatattttccaatacctgaagagtatactttcatccagaacgtccccttagaggatcgagttagaggaccaaaggggcctgaagagaagaaagattgtgaagttgtgatgatgattggcttgccaggagctggaaaaactacctgggttactaaacatgcagcagaaaatccagggaaatataacattcttggcacaaatactattatggataagatgatggtggcaggttttaagaagcaaatggcagatactggaaaactgaacacactgttgcagagagccccccagtgtcttgggaaatttattgagattgctgcccgaaagaagcgaaattttattctggatcagacaaatgtgtctgctgctgcccagaggagaaaaatgtgcctgtttgcaggcttccagcgaaaagctgttgtagtttgcccaaaagatgaagactataagcaaagaacacagaagaaagcagaagtagaggggaaagacctaccagaacatgcggtcctcaaaatgaaaggaaactttaccctcccagaggtagctgagtgctttgatgaaataacctatgttgaacttcagaaggaagaagcccaaaaactcttggagcaatataaggaagaaagcaaaaaggctcttccaccagaaaagaaacagaacactggctcaaagaaaagcaataaaaataagagtggcaagaaccagtttaacagaggtggtggccatagaggacgtggaggattcaatatgcgtggtggaaatttcagaggaggaggcaacccctgggaatcgtggcggatataataggaggggcaacatgccacagagaggtggtggcggtggaggaagtggtggaatcggctatccataccctcgtgcccctgtttttcctggccgtggtagttactcaaacagagggaactacaacagaggtggaatgcccaacagagggaactacaaccagaacttcagaggacgaggaaacaatcgtggctacaaaaatcaatctcagggctacaaccagtggcagcagggtcaattctggggtcagaagccatggagtcagcattatcaccaaggatattattgaatacccaaataaaacgaactgatacatatttctccaaaaccttcacaagaagtcgactgttttctttagtaggctaactttttaaacattccacaagaggaagtgcctgcgggttccttttttagaagctttgtgggttgattttttttcttttcttttttgtacatttttaattgcagtttaaaagtgaatcgtaagagaacctcagcattgtgcacgataagagaatgtgtcagtatttcagggttctacattttatctgtaaaatgtgacttttttttttttttatcacaacagaagtaaaatgttgctttgtacctgg

SEQ ID NO: 2117 - protein, 455 aa, Homo sapiens
MFTLDVKSNTVFDIITDNCDLHFKISRDRLSASSLTMESFAFLWAGGRASYGVSKGKVCFEMKVTEKIPVRHLYTKDIDIHEVRIGWSLTTSGMLLGEEEFSYGYSLKGIKTCNCETEDYGEKFDENDVITCFANFESDEVELSYAKNGQDLGVAFKISKEVLAGRPLFPHVLCHNCAVEFNFGQKEKPYFPIPEEYTFIQNVPLEDRVRGPKGPEEKKDCEVVMMIGLPGAGKTTWVTKHAAENPGKYNILGTNTIMDKMMVAGFKKQMADTGKLNTLLQRAPQCLGKFIEIAARKKRNFILDQTNVSAAAQRRKMCLFAGFQRKAVVVCPKDEDYKQRTQKKAEVEGKDLPEHAVLKMKGNFTLPEVAECFDEITYVELQKEEAQKLLEQYKEESKKALPPEKKQNTGSKKSNKNKSGKNQFNRGGGHRGRGGFNMRGGNFRGGGNPWESWRI

SEQ ID NO: 2118 - DNA, 3401 bp, Homo sapiens
acgaagagctggagaaacacataagaaggcagatctaagatggaagaaaaggcggattcgggttgaaacgccaagttgaggactgaagaaagcatttggataaagcagcctccaagctgggaaggagaaaagccaaacgagtatagccaccaaagacccagaaaggccaatatatcatgcagtgagtcggttgaactgaaaggcggtttccttttcctccatttgctcagtcccaattggaagcgcactgcgcggcctccaccgcgctctcggcccgggttcggcgtgggggcggggaggtaagtacggtaatgggcggggccgagcgcgggcgcgctccggctttcctcctgcgcagtgctcccgtcagcgcagggggcggggcgcctatattacgtgcgcggcgccgctcctgcgagaggacgttgcgtgctcgctcgcgccaggcgagtctccgcgtctccctcgcgaactcggtgaaaggaattggcgccgttcgacaccaggcggatccgctctgcagcacgaacccatctccagccgcagccgcagccgccgcccgggccgaggagcagccgcagcagccgccaccagtggccgagtgagcggagccgagtttgaggcagcgcctagcggtgaatcggggccctcaccatgagttcctcgcctgttaatgtaaaaaagctgaaggtgtcggagctgaaagaggagctcaagaagcgacgcctttctgacaagggtctcaaggccgagctcatggagcgactccaggctgcgctggacgacgaggaggccgggggccgccccgccatggagcccgggaacggcagcctagacctgggcggggattccgctgggcgctcgggagcaggcctcgagcaggaggccgcggccggcggcgatgaagaggaggaggaagaggaagaggaggaggaaggaatctccgctctggacggcgaccagatggagctaggagaggagaacggggccgcgggggcggccgactcgggcccgatggaggaggaggaggccgcctcggaagacgagaacggcgacgatcagggtttccaggaaggggaagatgagctcggggacgaagaggaaggcgcgggcgacgagaacgggcacggggagcagcagcctcaaccgccggcgacgcagcagcaacagccccaacagcagcgcggggccgccaaggaggccgcggggaagagcagcggccccacctcgctgttcgcggtgacggtggcgccgcccggggcgaggcagggccagcagcaggcgggaggggacggcaaaacagaacagaaaggcggagataaaaagaggggtgttaaaagaccacgagaagatcatggccgtggatattttgagtacattgaagagaacaagtatagcagagccaaatctcctcagccacctgttgaagaagaagatgaacacttcgatgacacagtggtttgtcttgatacttataattgtgatctacattttaaaatatcaagagatcgtctcagtgcttcttcccttacaatggagagttttgcttttctttgggctggaggaagagcatcctatggtgtgtcaaaaggcaaagtgtgttttgagatgaaggttacagagaagatcccagtaaggcatttatatacaaaagatattgacatacatgaagttcgtattggctggtcactaactacaagtggaatgttacttggtgaagaagaattttcttatgggtattctctaaaaggaataaaaacatgcaactgtgagactgaagattatggagaaaagtttgatgaaaatgatgtgattacatgttttgctaactttgaaagtgatgaagtagaactctcgtatgctaagaatggacaagatcttggcgttgccttcaaaatcagtaaggaagttcttgctggacggccactgttcccgcatgttctctgccacaactgtgcagttgaatttaattttggtcagaaggaaaagccatattttccaatacctgaagagtatactttcatccagaacgtccccttagaggatcgagttagaggaccaaaggggcctgaagagaagaaagattgtgaagttgtgatgatgattggcttgccaggagctggaaaaactacctgggttactaaacatgcagcagaaaatccagggaaatataacattcttggcacaaatactattatggataagatgatggtggcaggttttaagaagcaaatggcagatactggaaaactgaacacactgttgcagagagccccccagtgtcttgggaaatttattgagattgctgcccgaaagaagcgaaattttattctggatcagacaaatgtgtctgctgctgcccagaggagaaaaatgtgcctgtttgcaggcttccagcgaaaagctgttgtagtttgcccaaaagatgaagactataagcaaagaacacagaagaaagcagaagtagaggggaaagacctaccagaacatgcggtcctcaaaatgaaaggaaactttaccctcccagaggtagctgagtgctttgatgaaataacctatgttgaacttcagaaggaagaagcccaaaaactcttggagcaatataaggaagaaagcaaaaaggctcttccaccagaaaagaaacagaacactggctcaaagaaaagcaataaaaataagagtggcaagaaccagtttaacagaggtggtggccatagaggacgtggaggattcaatatgcgtggtggaaatttcagaggaggaggcaacccctgggaatcgtggcggatataataggaggggcaacatgccacagagaggtggtggcggtggaggaagtggtggaatcggctatccataccctcgtgcccctgtttttcctggccgtggtagttactcaaacagagggaactacaacagaggtggaatgcccaacagagggaactacaaccagaacttcagaggacgaggaaacaatcgtggctacaaaaatcaatctcagggctacaaccagtggcagcagggtcaattctggggtcagaagccatggagtcagcattatcaccaaggatattattgaatacccaaataaaacgaactgatacatatttctccaaaaccttcacaagaagtcgactgttttctttagtaggctaactttttaaacattccacaagaggaagtgcctgcgggttccttttttagaagctttgtgggttgattttttttcttttcttttttgtacatttttaattgcagtttaaaagtgaatcgtaagagaacctcagcattgtgcacgataagagaatgtgtcagtatttcagggttctacattttatctgtaaaatgtgacttttttttttttttatcacaacagaagtaaaatgttgctttgtacctgg

SEQ ID NO: 2119 - protein, 712 aa, Homo sapiens; identical to SEQ ID NO: 2095

SEQ ID NO: 2120 - DNA, 1187 bp, Homo sapiens
acgaagagctggagaaacacataagaaggcagatctaagatggaagaaaaggcggattcgggttgaaacgccaagttgaggactgaagaaagcatttggataaagcagcctccaagctgggaaggagaaaagccaaacgagtatagccaccaaagacccagaaaggccaatatatcatgcagtgagtcggttgaactgaaaggcggtttccttttcctccatttgctcagtcccaattggaagcgcactgcgcggcctccaccgcgctctcggcccgggttcggcgtgggggcggggaggtaagtacggtaatgggcggggccgagcgcgggcgcgctccggctttcctcctgcgcagtgctcccgtcagcgcagggggcggggcgcctatattacgtgcgcggcgccgctcctgcgagaggacgttgcgtgctcgctcgcgccaggcgagtctccgcgtctccctcgcgaactcggtgaaaggaattggcgccgttcgacaccaggcggatccgctctgcagcacgaacccatctccagccgcagccgcagcccccctgggaatcgtggcggatataataggaggggcaacatgccacagagaggtggtggcggtggaggaagtggtggaatcggctatccataccctcgtgcccctgtttttcctggccgtggtagttactcaaacagagggaactacaacagaggtggaatgcccaacagagggaactacaaccagaacttcagaggacgaggaaacaatcgtggctacaaaaatcaatctcagggctacaaccagtggcagcagggtcaattctggggtcagaagccatggagtcagcattatcaccaaggatattattgaatacccaaataaaacgaactgatacatatttctccaaaaccttcacaagaagtcgactgttttctttagtaggctaactttttaaacattccacaagaggaagtgcctgcgggttccttttttagaagctttgtgggttgattttttttcttttcttttttgtacatttttaattgcagtttaaaagtgaatcgtaagagaacctcagcattgtgcacgataagagaatgtgtcagtatttcagggttctacattttatctgtaaaatgtgacttttttttttttttatcacaacagaagtaaaatgttgctttgtacctgg

SEQ ID NO: 2121 - protein, 191 aa, Homo sapiens; identical to SEQ ID NO: 2093

SEQ ID NO: 2122 - DNA, 3123 bp, Homo sapiens
acgaagagctggagaaacacataagaaggcagatctaagatggaagaaaaggcggattcgggttgaaacgccaagttgaggactgaagaaagcatttggataaagcagcctccaagctgggaaggagaaaagccaaacgagtatagccaccaaagacccagaaaggccaatatatcatgcagtgagtcggttgaactgaaaggcggtttccttttcctccatttgctcagtcccaattggaagcgcactgcgcggcctccaccgcgctctcggcccgggttcggcgtgggggcggggaggtaagtacggtaatgggcggggccgagcgcgggcgcgctccggctttcctcctgcgcagtgctcccgtcagcgcagggggcggggcgcctatattacgtgcgcggcgccgctcctgcgagaggacgttgcgtgctcgctcgcgccaggcgagtctccgcgtctccctcgcgaactcggtgaaaggaattggcgccgttcgacaccaggcggatccgctctgcagcacgaacccatctccagccgcagccgcagccgccgcccgggccgaggagcagccgcagcagccgccaccagtggccgagtgagcggagccgagtttgaggcagcgcctagcggtgaatcggggccctcaccatgagttcctcgcctgttaatgtaaaaaagctgaaggtgtcggagctgaaagaggagctcaagaagcgacgcctttctgacaagggtctcaaggccgagctcatggagcgactccaggctgcgctggacgacgaggaggccgggggccgccccgccatggagcccgggaacggcagcctagacctgggcggggattccgctgggcgctcgggagcaggcctcgagcaggaggccgcggccggcggcgatgaagaggaggaggaagaggaagaggaggaggaaggaatctccgctctggacggcgaccagatggagctaggagaggagaacggggccgcgggggcggccgactcgggcccgatggaggaggaggaggccgcctcggaagacgagaacggcgacgatcagggtttccaggaaggggaagatgagctcggggacgaagaggaaggcgcgggcgacgagaacgggcacggggagcagcagcctcaaccgccggcgacgcagcagcaacagccccaacagcagcgcggggccgccaaggaggccgcggggaagagcagcggccccacctcgctgttcgcggtgacggtggcgccgcccggggcgaggcagggccagcagcaggcgggaggggacggcaaaacagaacagaaaggcggagataaaaagaggggtgttaaaagaccacgagaagatcatggccgtggatattttgagtacattgaagagaacaagtatagcagagccaaatctcctcagccacctgttgaagaagaagatgaacacttcgatgacacagtggtttgtcttgatacttataattgtgatctacattttaaaatatcaagagatcgtctcagtgcttcttcccttacaatggagagttttgcttttctttgggctggaggaagagcatcctatggtgtgtcaaaaggcaaagtgtgttttgagatgaaggttacagagaagatcccagtaaggcatttatatacaaaagatattgacatacatgaagttcgtattggctggtcactaactacaagtggaatgttacttggtgaagaagaattttcttatgggtattctctaaaaggaataaaaacatgcaactgtgagactgaagattatggagaaaagtttgatgaaaatgatgtgattacatgttttgctaactttgaaagtgatgaagtagaactctcgtatgctaagaatggacaagatcttggcgttgccttcaaaatcagtaaggaagttcttgctggacggccactgttcccgcatgttctctgccacaactgtgcagttgaatttaattttggtcagaaggaaaagccatattttccaatacctgaagagtatactttcatccagaacgtccccttagaggatcgagttagaggaccaaaggggcctgaagagaagaaagattgtgaagttgtgatgatgattggcttgccaggagctggaaaaactacctgggttactaaacatgcagcagaaaatccagggaaatataacattcttggcacaaatactattatggataagatgatggtggcaggttttaagaagcaaatggcagatactggaaaactgaacacactgttgcagagagccccccagtgtcttgggaaatttattgagattgctgcccgaaagaagcgaaattttattctggatcagacaaatgtgtctgctgctgcccagaggagaaaaatgtgcctgtttgcaggcttccagcgaaaagctgttgtagtttgcccaaaagatgaagactataagcaaagaacacagaagaaagcagaagtagaggggaaagacctaccagaacatgcggtcctcaaaatgaaaggaaactttaccctcccagaggtagctgagtgctttgatgaaataacctatgttgaacttcagaaggaagaagcccaaaaactcttggagcaatataaggaagaaagcaaaaaggctcttccaccagaaaagaaacagaacactggctcaaagaaaagcaataaaaataagagtggcaagaaccagtttaacagaggtggtggccatagaggacgtggaggattcaatatgcgtggtggaaatttcagaggaggaggcaacccctgggaatcgtggcggatataataggaggggcaacatgccacagagaggtggtggcggtggaggaagtggtggaatcggctatccataccctcgtgcccctgtttttcctggccgtggtagttactcaaacagagggaactacaacagaggtggaatgcccaacagagggaactacaaccagaacttcagaggacgaggaaacaatcgtggctacaaaaatcaatctcagggctacaaccagtggcagcagggtcaattctggggtcagaagccatggagtcagcattatcaccaaggatattattgaatacccaaataaaacgaactgatacatatttctccaaaaccttc

SEQ ID NO: 2123 - protein, 712 aa, Homo sapiens; identical to SEQ ID NO: 2095

SEQ ID NO: 2124 - DNA, 852 bp, Homo sapiens
ttatagaccgggaggtattctaggtaaactttttgtctttgtctctatccattttgttagtatcttaaagagatgggaggaaaggcaagattaagttggttctttcaactctgagggtaaactgccttccactggctaggcttctgtttttttccgtagtgtttttgagctcttaacatctagcagctaaaaagaattgagtaagtgtaaggtcttgttacatagtttaagtgaccctgtttttgtagcaataatggacaaaggtaatatttaaattataaaatgttgcctgctttacatatagatatgagttgaattttaaaaagcataacttattaaaattcacaagttcaaggggaaattttaacttttgaatataggtggcaggttttaagaagcaaatggcagatactggaaaactgaacacactgttgcagagagccccccagtgtcttgggaaatttattgagattgctgcccgaaagaagcgaaattttattctggatcagacaaatgtgtctgctgctgcccagaggagaaaaatgtgcctgtttgcaggcttccagcgaaaagctgttgtagtttgcccaaaagatgaagactataagcaaagaacacagaagaaagcagaagtagaggggaaagacctaccagaacatgcggtcctcaaaatgaaaggcatggaattttaattctgttactgtgtgaaatcttctttttaaaagaatgtttttcctacatattctgcttgtgtaactatgttaaatctattaggacttaggcctcctgaaagttaacattttttccagcaatactgcttcaggaattaaaattgcagttgttacatatgca

SEQ ID NO: 2125 - protein, 96 aa, Homo sapiens
MADTGKLNTLLQRAPQCLGKFIEIAARKKRNFILDQTNVSAAAQRRKMCLFAGFQRKAVVVCPKDEDYKQRTQKKAEVEGKDLPEHAVLKMKGMEF

SEQ ID NO: 2126 - DNA, 1682 bp, Homo sapiens
acgaagagctggagaaacacataagaaggcagatctaagatggaagaaaaggcggattcgggttgaaacgccaagttgaggactgaagaaagcatttggataaagcagcctccaagctgggaaggagaaaagccaaacgagtatagccaccaaagacccagaaaggccaatatatcatgcagtgagtcggttgaactgaaaggcggtttccttttcctccatttgctcagtcccaattggaagcgcactgcgcggcctccaccgcgctctcggcccgggttcggcgtgggggcggggaggtaagtacggtaatgggcggggccgagcgcgggcgcgctccggctttcctcctgcgcagtgctcccgtcagcgcagggggcggggcgcctatattacgtgcgcggcgccgctcctgcgagaggacgttgcgtgctcgctcgcgccaggcgagtctccgcgtctccctcgcgaactcggtgaaaggaattggcgccgttcgacaccaggcggatccgctctgcagcacgaacccatctccagccgcagccgcagccgccgcccgggccgaggagcagccgcagcagccgccaccagtggccgagtgagcggagccgagtttgaggcagcgcctagcggtgaatcggggattccgctgggcgctcgggagcaggcctcgagcaggaggccgcggccggcggcgatgaagaggaggaggaagaggaagaggaggaggaaggaatctccgctctggacggcgaccagatggagctaggagaggagaacggggccgcgggggcggccgactcgggcccgatggaggaggaggaggccgcctcggaagacgagaacggcgacgatcagggtttccaggaaggggaagatgagctcggggacgaagaggaaggcgcgggcgacgagaacgggcacggggagcagcagcctcaaccgccggcgacgcagcagcaacagccccaacagcagcgcggggccgccaaggaggccgcggggaagagcagcggccccacctcgctgttcgcggtgacggtggcgccgcccggggcgaggcagggccagcagcaggcgggaggtaagaagaaggcggaaggcggcggaggcggcggtcgccccggggctccggcggcgggtgagtgctgcgttgtacgttgcgcgcggcgggaggcccgcgcggggtggggaccgtgccccaggcctgccggagccccgcagggggagggagccccgggcgggagggcgccgcggtgagggtgggggagggggcgcggggaatcccagattagccgagaggcctcgggctcggggcgtgtgtgtgcgcgcgcgcgtgtgtgtgtgtgtgtgtgtgtgtgtcggcggtggcagcgcctccattatgtggctcgagagccggggggagctgcagctgccgctgtagggggaggagccgcgggcgggcggcgggagggagcccggtcggcccgcggtggcgccgtcgcgctgcgtgcgcgcggtgcgggcacatgtctcggggggaggggagaggccccaggtcccggggcgggcgcgctttggcggctcctcgccgctgtattgtgcaaggagcgcaggggctcggcgtgacgtcacttccggcgggaggagccgggcggggcggggcggggggcggaagatcagtacaatgcggccgc

SEQ ID NO: 2127 - protein, 166 aa, Homo sapiens
MELGEENGAAGAADSGPMEEEEAASEDENGDDQGFQEGEDELGDEEEGAGDENGHGEQQPQPPATQQQQPQQQRGAAKEAAGKSSGPTSLFAVTVAPPGARQGQQQAGGKKKAEGGGGGGRPGAPAAGECCVVRCARREARAGWGPCPRPAGAPQGEGAPGGRAPR

SEQ ID NO: 2128 - DNA, 1538 bp, Homo sapiens
acgaagagctggagaaacacataagaaggcagatctaagatggaagaaaaggcggattcgggttgaaacgccaagttgaggactgaagaaagcatttggataaagcagcctccaagctgggaaggagaaaagccaaacgagtatagccaccaaagacccagaaaggccaatatatcatgcagtgagtcggttgaactgaaaggcggtttccttttcctccatttgctcagtcccaattggaagcgcactgcgcggcctccaccgcgctctcggcccgggttcggcgtgggggcggggaggtaagtacggtaatgggcggggccgagcgcgggcgcgctccggctttcctcctgcgcagtgctcccgtcagcgcagggggcggggcgcctatattacgtgcgcggcgccgctcctgcgagaggacgttgcgtgctcgctcgcgccaggcgagtctccgcgtctccctcgcgaactcggtgaaaggaattggcgccgttcgacaccaggcggatccgctctgcagcacgaacccatctccagccgcagccgcagccgccgcccgggccgaggagcagccgcagcagccgccaccagtggccgagtgagcggagccgagtttgaggcagcgcctagcggtgaatcggggccctcaccatgagttcctcgcctgttaatgtaaaaaagctgaaggtgtcggaggagaacggcgacgatcagggtttccaggaaggggaagatgagctcggggacgaagaggaaggcgcgggcgacgagaacgggcacggggagcagcagcctcaaccgccggcgacgcagcagcaacagccccaacagcagcgcggggccgccaaggaggccgcggggaagagcagcggccccacctcgctgttcgcggtgacggtggcgccgcccggggcgaggcagggccagcagcaggcgggaggtaagaagaaggcggaaggcggcggaggcggcggtcgccccggggctccggcggcgggtgagtgctgcgttgtacgttgcgcgcggcgggaggcccgcgcggggtggggaccgtgccccaggcctgccggagccccgcagggggagggagccccgggcgggagggcgccgcggtgagggtgggggagggggcgcggggaatcccagattagccgagaggcctcgggctcggggcgtgtgtgtgcgcgcgcgcgtgtgtgtgtgtgtgtgtgtgtgtgtcggcggtggcagcgcctccattatgtggctcgagagccggggggagctgcagctgccgctgtagggggaggagccgcgggcgggcggcgggagggagcccggtcggcccgcggtggcgccgtcgcgctgcgtgcgcgcggtgcgggcacatgtctcggggggaggggagaggccccaggtcccggggcgggcgcgctttggcggctcctcgccgctgtattgtgcaaggagcgcaggggctcggcgtgacgtcacttccggcgggaggagccgggcggggcggggcggggggcggaagatcagtacaatgcggccgc

SEQ ID NO: 2129 - protein, 154 aa, Homo sapiens
MSSSPVNVKKLKVSEENGDDQGFQEGEDELGDEEEGAGDENGHGEQQPQPPATQQQQPQQQRGAAKEAAGKSSGPTSLFAVTVAPPGARQGQQQAGGKKKAEGGGGGGRPGAPAAGECCVVRCARREARAGWGPCPRPAGAPQGEGAPGGRAPR

SEQ ID NO: 2130 - DNA, 1724 bp, Homo sapiens
acgaagagctggagaaacacataagaaggcagatctaagatggaagaaaaggcggattcgggttgaaacgccaagttgaggactgaagaaagcatttggataaagcagcctccaagctgggaaggagaaaagccaaacgagtatagccaccaaagacccagaaaggccaatatatcatgcagtgagtcggttgaactgaaaggcggtttccttttcctccatttgctcagtcccaattggaagcgcactgcgcggcctccaccgcgctctcggcccgggttcggcgtgggggcggggaggtaagtacggtaatgggcggggccgagcgcgggcgcgctccggctttcctcctgcgcagtgctcccgtcagcgcagggggcggggcgcctatattacgtgcgcggcgccgctcctgcgagaggacgttgcgtgctcgctcgcgccaggcgagtctccgcgtctccctcgcgaactcggtgaaaggaattggcgccgttcgacaccaggcggatccgctctgcagcacgaacccatctccagccgcagccgcagccgccgcccgggccgaggagcagccgcagcagccgccaccagtggccgagtgagcggagccgagtttgaggcagcgcctagcggtgaatcggggccctcaccatgagttcctcgcctgttaatgtaaaaaagctgaaggtgtcggagctgaaagaggagctcaagaagcgacgcctttctgacaagggtctcaaggccgagctcatggagcgactccaggctgcgctggacgacgaggaggccgggggccgccccgccatggagcccgggaacggcagcctagacctgggcggggattccgctgggcgctcgggagcaggcctcgagcaggaggccgcggccggcggcgatgaagaggaggaggaagaggaagaggaggaggaaggaatctccgctctggacggcgaccagatggagctaggagagcagcctcaaccgccggcgacgcagcagcaacagccccaacagcagcgcggggccgccaaggaggccgcggggaagagcagcggccccacctcgctgttcgcggtgacggtggcgccgcccggggcgaggcagggccagcagcaggcgggaggtaagaagaaggcggaaggcggcggaggcggcggtcgccccggggctccggcggcgggtgagtgctgcgttgtacgttgcgcgcggcgggaggcccgcgcggggtggggaccgtgccccaggcctgccggagccccgcagggggagggagccccgggcgggagggcgccgcggtgagggtgggggagggggcgcggggaatcccagattagccgagaggcctcgggctcggggcgtgtgtgtgcgcgcgcgcgtgtgtgtgtgtgtgtgtgtgtgtgtcggcggtggcagcgcctccattatgtggctcgagagccggggggagctgcagctgccgctgtagggggaggagccgcgggcgggcggcgggagggagcccggtcggcccgcggtggcgccgtcgcgctgcgtgcgcgcggtgcgggcacatgtctcggggggaggggagaggccccaggtcccggggcgggcgcgctttggcggctcctcgccgctgtattgtgcaaggagcgcaggggctcggcgtgacgtcacttccggcgggaggagccgggcggggcggggcggggggcggaagatcagtacaatgcggccgc

SEQ ID NO: 2131 - protein, 216 aa, Homo sapiens
MSSSPVNVKKLKVSELKEELKKRRLSDKGLKAELMERLQAALDDEEAGGRPAMEPGNGSLDLGGDSAGRSGAGLEQEAAAGGDEEEEEEEEEEEGISALDGDQMELGEQPQPPATQQQQPQQQRGAAKEAAGKSSGPTSLFAVTVAPPGARQGQQQAGGKKKAEGGGGGGRPGAPAAGECCVVRCARREARAGWGPCPRPAGAPQGEGAPGGRAPR

SEQ ID NO: 2132 - DNA, 1036 bp, Homo sapiens
acgaagagctggagaaacacataagaaggcagatctaagatggaagaaaaggcggattcgggttgaaacgccaagttgaggactgaagaaagcatttggataaagcagcctccaagctgggaaggagaaaagccaaacgagtatagccaccaaagacccagaaaggccaatatatcatgcagtgagtcggttgaactgaaaggcggtttccttttcctccatttgctcagtcccaattggaagcgcactgcgcggcctccaccgcgctctcggcccgggttcggcgtgggggcggggaggtaagtacggtaatgggcggggccgagcgcgggcgcgctccggctttcctcctgcgcagtgctcccgtcagcgcagggggcggggcgcctatattacgtgcgcggcgccgctcctgcgagaggacgttgcgtgctcgctcgcgccaggcgagtctccgcgtctccctcgcgaactcggtgaaaggaattggcgccgttcgacaccaggcggatccgctctgcagcacgaacccatctccagccgcagccgcagccgccgcccgggccgaggagcagccgcagcagccgccaccagtggccgagtgagcggagccgagtttgaggcagcgcctagcggtgaatcggggccctcaccatgagttcctcgcctgttaatgtaaaaaagctgaaggtgtcggagctgaaagaggagctcaagaagcgacgcctttctgacaagggtctcaaggccgagctcatggagcgactccaggctgcgctggacgacgaggaggccgggggccgccccgccatggagcccgggaacggcagcctagacctgggcggggattccgctgggcgctcgggagcaggcctcgagcaggaggccgcggccggcggcgatgaagaggaggccgcctcggaagacgagaacggcgacgatcagggtttccaggaaggggaagatgagctcggggacgaagaggaaggcgcgggcgacgagaacgggcacggggagcagcagcctcaaccgccgg

SEQ ID NO: 2133 - protein, 126 aa, Homo sapiens
MSSSPVNVKKLKVSELKEELKKRRLSDKGLKAELMERLQAALDDEEAGGRPAMEPGNGSLDLGGDSAGRSGAGLEQEAAAGGDEEEAASEDENGDDQGFQEGEDELGDEEEGAGDENGHGEQQPQP

SEQ ID NO: 2134 - DNA, 508 bp, Homo sapiens
gagaggacgttgcgtgctcgctcgcgccaggcgagtctccgcgtctccctcgcgaactcggtgaaaggaattggcgccgttcgacaccaggcggatccgctctgcagcacgaacccatctccagccgcagccgcagccgccgcccgggccgaggagcagccgcagcagccgccaccagtggccgagtgagcggagccgagtttgaggcagcgcctagcggtgaatcggggccctcaccatgagttcctcgcctgttaatgtaaaaaagctgaaggtgtcggagctgaaagaggagctcaagaagcgacgcctttctgacaagggtctcaaggccgagctcatggagcgactccaggctgcgctggacgacgaggaggccgactcgggcccgatggaggaggaggaggccgcctcggaagacgagaacggcgacgatcagggtttccaggaaggggaagatgagctcggggacgaagaggaaggcgcgggcgacgagaacgggcacggg

SEQ ID NO: 2135 - protein, 89 aa, Homo sapiens
MSSSPVNVKKLKVSELKEELKKRRLSDKGLKAELMERLQAALDDEEADSGPMEEEEAASEDENGDDQGFQEGEDELGDEEEGAGDENGH

SEQ ID NO: 2136 - DNA, 2598 bp, Homo sapiens
aaattggatggaaagaaattctgtgtgctcccaggattccagttccttaccggaggttggtgccgtctgagtctgaaaagctgccctcttgccgtgttcatgctttggtagaacaccttcagagccttggcaagctctcggtcagagccggcttgctgtgtgcacatttggctcatctccccggcggatggcagttgcgcagtcatcccgctgatcttcagagtgttggaaggcttcggggctgaggtggaaaaaggtaacattgatttatgtatctctttctctgggcatctctatatttattttggtggcattctactgcatcagcatttatcaggcaccagtttggatccatccaagggaaaggggaaatctcacagggcagaagaaatgtccggcattttttgtttatgaaagaagatacgaattaactcatttaaaagtttgtttcttaaaagacaaatacacatcccaaatgtaggagtctagggataagctaaacagccaagactggagcagtctctcaccttgaccagaagcagttttcgcaagtgatgctttgagaagcacgttctcctctctcagggctctgttaatgttcctgagcggttccgtctcctgctctagcttgagcagcttcagataaagttctggtatctggtttgatgctgcctaccagaaaacatgtcagtttcgtcttttgttgtatcatctgcatatcctttgagactggcaatgtttgctaccatgggaaaatcaaatgggatgggagtgtgtgtatggtgagcagagtttaagcccctcagggtacacaggagtaaataaagaaaacgtttgttaagggggaaggaacgtcaagcagccgtcctcagagattttctagccacctgggatgcccactttagtgtcctatgtacacacctggcttatatccttcacagtggaaattttcttggtgtctaccaggatgtggccttcacctgtgaccatgaggcccagctgagagcagctcagctcggtgcagccttctgtaatggggagagacacagtcaaagaaagaaacatcccagtcgcccagctccagtgtcagcttcatgcagtaggccagcgactggagccagatgtgagctgagcccaagcggacgacctcgacaggatcccagaaagggtcgtcatctcgagccacagggccgtgatctccatctagaaagcgctggtaaagttcctgcattaggaatttcctattgatgaacttggcttttgaccatatccacacctggaaacacagaggggtccacacccagtgcacagcagatccaggacaacagcctgccgctgtcttcctcctcactgggtgaggacagggcctctgtcagcactggctctggagaggaaacaaacctgaagccacaggaggagggattccagagggattccagccgccctctccagctggaagaagtcgtaatcgaacctgctcaggtcctcactgccccactccgaaggaaaccccacgtacaggtgaggtcagaggagtgaagtgacttgcccaagaccacacagtgagtcaggagcaggcctgtccctccagcagtggtgccatgttgtccccaagccatggtggcagaggagctggtgtgaacgccccatcctgccacgtctgtgatgtgggcacctcacatgactgtcccctcccagctcttgggggggacctaggacattctgtgagcctgcaggaaagtttaccaaatgctgcagctttgtcctggtggtgatgggcaccccgttaacggcaaccttgcatttgctatgtggagtgaccgtcactttaccgtcggcatttgtgaaggaagcgtgtttatctgaaattctaagaagatgagagtcaaagacacccagcaaacggcggtttccgtgagcaggtaggctgacctttctcatgtgcacaggagggaaggtctacagctgcggaggatggcaggtggcatctcggggcctcctgtgtgctgtggcccatgatgcatggggacagcagcgggcgcagaaggaccctgcccttggggagcacggggagctgggagacagcaggcaagggcttcattaacagaacgaacaccagctgagggcctagcactgcggggagccggccaaggccacactggagtcctcccgctcccaggccagcgggatggggtggtgggaagatggcagcaagcaagcttcagaagagacgctcaggaggcgactcttaacgagcctcacctactccggggttggagcccaggaagcaaaccagcactgcaccctagatttcagccagaggacgaaagccctgccctcagctttctcagaccagccctggagtaggtggcccggggagacctgggcagtgtccctgcttgtcctgcagactgtgtggctctgcagacctctagatggaggaggcacaattctctaatgctggacgaggacactgatcatggaaactcaccccaaaccttgaatcgtgatagcatttgaggcagcctgaccggtgccacatgaacctgaaaggaatcaagatataatttattttgaaaataaatcagacactttcag

SEQ ID NO: 2137 - protein, 114 aa, Homo sapiens
MGTAAGAEGPCPWGARGAGRQQARASLTERTPAEGLALRGAGQGHTGVLPLPGQRDGVVGRWQQASFRRDAQEATLNEPHLLRGWSPGSKPALHPRFQPEDESPALSFLRPALE

SEQ ID NO: 2138 - DNA, 2976 bp, Homo sapiens
aaattggatggaaagaaattctgtgtgctcccaggattccagttccttaccggaggttggtgccgtctgagtctgaaaagctgccctcttgccgtgttcatgctttggtagaacaccttcagagccttggcaagctctcggtcagagccggcttgctgtgtgcacatttggctcatctccccggcggatggcagttgcgcagtcatcccgctgatcttcagagtgttggaaggcttcggggctgaggtggaaaaaggtaacattgatttatgtatctctttctctgggcatctctatatttattttggtggcattctactgcatcagcatttatcaggcaccagtttggatccatccaagggaaaggggaaatctcacagggcagaagaaatgtccggcattttttgtttatgaaagaagatacgaattaactcatttaaaagtttgtttcttaaaagacaaatacacatcccaaatgtaggagtctagggataagctaaacagccaagactggagcagtctctcaccttgaccagaagcagttttcgcaagtgatgctttgagaagcacgttctcctctctcagggctctgttaatgttcctgagcggttccgtctcctgctctagcttgagcagcttcagataaagttctggtatctggtttgatgctgcctaccagaaaacatgtcagtttcgtcttttgttgtatcatctgcatatcctttgagactggcaatgtttgctaccatgggaaaatcaaatgggatgggagtgtgtgtatggtgagcagagtttaagcccctcagggtacacaggagtaaataaagaaaacgtttgttaagggggaaggaacgtcaagcagccgtcctcagagattttctagccacctgggatgcccactttagtgtcctatgtacacacctggcttatatccttcacagtggaaattttcttggtgtctaccaggatgtggccttcacctgtgaccatgaggcccagctgagagcagctcagctcggtgcagccttctgtaatggggagagacacagtcaaagaaagaaacatcccagtcgcccagctccagtgtcagcttcatgcagtaggccagcgactggagccagatgtgagctgagcccaagcggacgacctcgacaggatcccagaaagggtcgtcatctcgagccacagggccgtgatctccatctagaaagcgctggtaaagttcctgcattaggaatttcctattgatgaacttggcttttgaccatatccacacctggaaacacagaggggtccacacccagtgcacagcagatccaggacaacagcctgccgctgtcttcctcctcactgggtgaggacagggcctctgtcagcactggctctggagaggaaacaaacctgaagccacaggaggagggattccagagggattccagccgccctctccagctggaagaagtcgtaatcgaacctgctcaggtcctcactgccccactccgaaggaaaccccacgtacaggtgaggtcagaggagtgaagtgacttgcccaagaccacacagtgagtcaggagcaggcctgtccctccagcagtggtgccatgttgtccccaagccatggtggcagaggagctggtgtgaacgccccatcctgccacgtctgtgatgtgggcacctcacatgactgtcccctcccagctcttgggggggacctaggacattctgtgagcctgcaggaaagtttaccaaatgctgcagctttgtcctggtggtgatgggcaccccgttaacggcaaccttgcatttgctatgtggagtgaccgtcactttaccgtcggcatttgtgaaggaagcgtgtttatctgaaattctaagaagatgagagtcaaagacacccagcaaacggcggtttccgtgagcaggtaggctgacctttctcatgtgcacaggagggaaggtctacagctgcggaggatggcaggtggcatctcggggcctcctgtgtgctgtggcccatgatgcatggggacagcagcgggcgcagaaggaccctgcccttggggagcacggggagctgggagacagcaggcaagggcttcattaacagaacgaacaccagctgagggcctagcactgcggggagccggccaaggccacactggagtcctcccgctcccaggccagcgggatggggtggtgggaagatggcagcaagcaagcttcagaagagacgctcaggaggcgactcttaacgagcctcacctactccggggttggagcccaggaagcaaaccagcactgcaccctagatttcagccagaggacgaaagccctgccctcagctttctcagaccagccctggagtaggtggcccggggagacctgggcagtgtccctgcttgtcctgcagactgtgtggctctgcagacctctagatggaggaggcacaattctctaatgctggacgaggacactgatcatggaaactcaccccaaaccttgaatcgtgatagcatttgaggcagcctgaccggtgccacatgaacctgaaaggaatcaagatataatttattttgaaaataaatcagacactttcagaatttgagcgtaagaagttaacatgtctgatgcgttggaagtgacgttttctctacagtgggatggtactgaagggatttttccagttgggattttcaatcataatggtacttagacatacttttctttctgccttgtgtgtggggggaagagcggggatgttcctaacttttaaaaagttccaccttcttcatgagcattctggaggaagacaccattaggtctgggccttaggagacccactgaatactggccacagcagaggttctggtgtttgaagctccgtttctgtgtagtgactgaccccaaggagtgcagacatgtcaccccccacatccccacatcccacggccatctcgcacggagccctcgcggccg

SEQ ID NO: 2139 - protein, 114 aa, Homo sapiens; identical to SEQ ID NO: 2137

SEQ ID NO: 2140 - DNA, 595 bp, Homo sapiens
agctgccctcttgccgtgttcatgctttggtagaacaccttcagagccttggcaagctctcggtcagagccggcttgctgtgtgcacatttggctcatctccccggcggatggcagttgcgcagtcatcccgctgatcttcagagtgttggaaggcttcggggctgaggtggaaaaaggatgtggccttcacctgtgaccatgaggcccagctgagagcagctcagctcggtgcagccttctgtaatggggagagacacagtcaaagaaagaaacatcccagtcgcccagctccagtgtcagcttcatgcagtaggccagcgactggagccagatgtgagctgagcccaagcggacgacctcgacaggatcccagaaagggtcgtcatctcgagccacagggccgtgatctccatctagaaagcgctggtaaagttcctgcattaggaatttcctattgatgaacttggcttttgaccatatccacacctggaaacacagaggaaagcagagagacacagtgtgaaatcgctgctctcagatcagcacacgggagaggccagcagtcaggagggggctcaccgagtttgtctgca

SEQ ID NO: 2141 - protein, 32 aa, Homo sapiens
MGRDTVKERNIPVAQLQCQLHAVGQRLEPDVS

SEQ ID NO: 2142 - DNA, 558 bp, Homo sapiens
agggacttaacatggaattgaaggtgaaaaatttggcatcgtcagattccaggggctatgacctacagaaggaggtcttggtgaaggtgacccaccacgggtctcacgaggcattatcctatctctgaccctctcttctgcttctctcggccatattgaagacccttgtgatttcattggggccacctggatactccaggctaatctccgtattttaaggtgtggatatggtcaaaagccaagttcatcaataggaaattcctaatgcaggaactttaccagcgctttctagatggagatcacggccctgtggctcgagatgacgaccctttctgggatcctgtcgaggtcgtccgcttgggctcagctcacatctggctccagtcgctggcctactgcatgaagctggaggagcaagtggagtttctgaactgtgatgggctggaggaggcggtgctgcatacctgcatagcaccctgctccccaacaggacaaacgcatggcgaggaggatgtggttattgaccctttggagctgctgggcaagaggatggatttt

SEQ ID NO: 2143 - protein, 97 aa, Homo sapiens
MQELYQRFLDGDHGPVARDDDPFWDPVEVVRLGSAHIWLQSLAYCMKLEEQVEFLNCDGLEEAVLHTCIAPCSPTGQTHGEEDVVIDPLELLGKRMD

SEQ ID NO: 2144 - DNA, 554 bp, Homo sapiens
gtgtagatggaggcttctggaaggctgtggtctgggggtctcttgtgacacgtattcacccaacagctgttggctctggtgagcagcacatcctgccagggaactctgagccaggcctgcagagcccacccgggagcaggcgggagtcagcatgggctcgcagcctatcctggagcctcgccgacctgtttcctcctcaggccaaggatgacatgcaattttaactgacaccaggcctgtggtctgatatccagagttgctcagaaaaggagttgctagttttacctgatatttatggtctaaaaacgacctacctggaatccctctggaatccctcctcctgtggcttcaggcattatcctatctctgaccctctcttctgcttctctcggccatattgaagacccttgtgatttcattggggccacctggatactccaggctaatctccgtattttaaggtgtggatatggtcaaaagccaagttcatcaataggaaattcctaatgcaggaactttaccagcgctttctagatggagatcacggccctgtg

SEQ ID NO: 2145 - protein, 67 aa, Homo sapiens
KRPTWNPSGIPPPVASGIILSLTLSSASLGHIEDPCDFIGATWILQANLRILRCGYGQKPSSSIGNS

SEQ ID NO: 2146 - DNA, 278 bp, Homo sapiens
gagaggaaacaaacctgaagccacaggaggagggattccagagggattccaggtaggtcgtttttagaccataaatatcaggtaaaactagcaactccttttctgagcaactggaaaagcaaaagcaaaaatcagcagacaagtcgttccatgtatgatgtctcttcataaaaaggacattctcaggactctgaaaacagattccatctttgttggcctcaaagtgaagaaccgaatcaagatataatttattttgaaaataaatcagacactttcag

SEQ ID NO: 2147 - protein, 30 aa, Homo sapiens [sequence omitted]

SEQ ID NO: 2148 - DNA, 2921 bp, Homo sapiens
cagcagagaccggcagcggcgggcggcccgcgtgggctactgctgggggctgcgttcgggcgaggaggggagattctgtctcagaggcctcgggctgcacgttcttccgggccgcgcatttgcagcccacagcaggccccagccggcccctctggagttgggccactgcttctgcaggcccagcaggcccctgggggcggccggaggccactaactggcttctccagctcagcattcttctctcatttgctgggtaccccactctcttctctacccctttgaaccatctttaccctcattcctcagggaacgtttaacgagttgaatgtttaccatgtagtcactctatatggaaatcataattcaattttgtaaacatcagactttgacaaaacaaatgatgatgttcttaaggaaagcagagagacacagtgtgaaatcgctgctctcagatcagcacacgggagaggccagcagtcaggagggggctcaccgagtttgtctgcactcgctccctccgcagccgccctctccagctggaagaagtcgtaatcgaacctgctcaggtcctcactgccccactccgaaggaaaccccacgtacaggtgaggtcagaggagtgaagtgacttgcccaagaccacacagtgagtcaggagcaggcctgtccctccagcagtggtgccatgttgtccccaagccatggtggcagaggagctggtgtgaacgccccatcctgccacgtctgtgatgtgggcacctcacatgactgtcccctcccagctcttgggggggacctaggacattctgtgagcctgcaggaaagtttaccaaatgctgcagctttgtcctggtggtgatgggcaccccgttaacggcaaccttgcatttgctatgtggagtgaccgtcactttaccgtcggcatttgtgaaggaagcgtgtttatctgaaattctaagaagatgagagtcaaagacacccagcaaacggcggtttccgtgagcaggtaggctgacctttctcatgtgcacaggagggaaggtctacagctgcggaggatggcaggtggcatctcggggcctcctgtgtgctgtggcccatgatgcatggggacagcagcgggcgcagaaggaccctgcccttggggagcacggggagctgggagacagcaggcaagggcttcattaacagaacgaacaccagctgagggcctagcactgcggggagccggccaaggccacactggagtcctcccgctcccaggccagcgggatggggtggtgggaagatggcagcaagcaagcttcagaagagacgctcaggaggcgactcttaacgagcctcacctactccgggtacgttttgatctgtttctgcgccctcgccgtataaattcagaccttataggatttggggctggacgtcggggtgtcaggttggcatcccctctccccgccctgctcccctgcaccgatgtcatctgtgtgtcctgaatgactggctccctgccttagcatgttccatgttcctgcactccttggccatcatggaatgttctggatgtggagacccgtgtgcatccaaacccttttttgcatggggcccagggatcctgtgggaaaggttgcggcctcatcactggagttcagacatttacgcacctgtgcgttggactaaggacgtgttctggaaagggacttgagggggatccccaggaagatgtcccaagaaggaggctggcagtgcaggacgaggcggggccagccggcccctgggtcagcacccctccagccacgacggcccgtgggctttcgtacgggggcagggggtgatctgtctgaaggatgtaggtgatggtgcttcccagctggagagctggaagcaggaggaggacactccagcagcagcctcccaggcagggcagccacagagctggggacagctcttgactgggtgaggcccggcatggggtttcccagggctcctgcggggcctcctgagggagcccttggggtcactccacagtctgggctttctgtagtccggtgggtcagggctccaagcaccaggagagatccagggatgcgcttatgtttgggccacccccggtgggcttgttcgttcagcccccttcgtttcctggcctgctctacttatatctgtttgtgaagaattattacacagaatctagaaaccagctttcccttttctcccagggttggagcccaggaagcaaaccagcactgcaccctagatttcagccagaggacgaaagccctgccctcagctttctcagaccagccctggagtaggtggcccggggagacctgggcagtgtccctgcttgtcctgcagactgtgtggctctgcagacctctagatggaggaggcacaattctctaatgctggacgaggacactgatcatggaaactcaccccaaaccttgaatcgtgatagcatttgaggcagcctgaccggtgccacatgaacctgaaaggaatcaagatataatttattttgaaaataaatcagacactttcagaatttgagcgtaagaagttaacatgtctgatgcgttggaagtgacgttttctctacagtgggatggtactgaagggatttttccagttgggattttcaatcataatggtacttagacatacttttctttctgccttgtgtgtggggggaagagcggggatgttcctaacttttaaaaagttccaccttcttcatgagcattctggaggaagacaccattaggtctgggccttaggagacccactgaatactggccacagcagaggttctggtgtttgaagctccgtttctgtgtagtgactgaccccaaggagtgcagacatgtcaccccccacatccccacatcccacggccatctcgcacggagccctcgcggccg

SEQ ID NO: 2149 - protein, 92 aa, Homo sapiens
MEIIIQFCKHQTLTKQMMMFLRKAERHSVKSLLSDQHTGEASSQEGAHRVCLHSLPPQPPSPAGRSRNRTCSGPHCPTPKETPRTGEVRGVK

SEQ ID NO: 2150 - DNA, 928 bp, Homo sapiens
tcttgggggggacctaggacattctgtgagcctgcaggaaagtttaccaaatgctgcagctttgtcctggtggtgatgggcaccccgttaacggcaaccttgcatttgctatgtggagtgaccgtcactttaccgtcggcatttgtgaaggaagcgtgtttatctgaaattctaagaagatgagagtcaaagacacccagcaaacggcggtttccgtgagcagggttggagcccaggaagcaaaccagcactgcaccctagatttcagccagaggacgaaagccctgccctcagctttctcagaccagccctggagtaggtggcccggggagacctgggcagtgtccctgcttgtcctgcagactgtgtggctctgcagacctctagatggaggaggcacaattctctaatgctggacgaggacactgatcatggaaactcaccccaaaccttgaatcgtgatagcatttgaggcagcctgaccggtgccacatgaacctgaaaggaatcaagatataatttattttgaaaataaatcagacactttcagaatttgagcgtaagaagttaacatgtctgatgcgttggaagtgacgttttctctacagtgggatggtactgaagggatttttccagttgggattttcaatcataatggtacttagacatacttttctttctgccttgtgtgtggggggaagagcggggatgttcctaacttttaaaaagttccaccttcttcatgagcattctggaggaagacaccattaggtctgggccttaggagacccactgaatactggccacagcagaggttctggtgtttgaagctccgtttctgtgtagtgactgaccccaaggagtgcagacatgtcaccccccacatccccacatcccacggccatctcgcacggagccctcgcggccg

SEQ ID NO: 2151 - protein, 76 aa, Homo sapiens
MRVKDTQQTAVSVSRVGAQEANQHCTLDFSQRTKALPSAFSDQPWSRWPGETWAVSLLVLQTVWLCRPLDGGGTIL

SEQ ID NO: 2152 - DNA, 535 bp, Homo sapiens
aggacattctgtgagcctgcaggaaagtttaccaaatgctgcagctttgtcctggtggtgatgggcaccccgttaacggcaaccttgcatttgctatgtggagtgaccgtcactttaccgtcggcatttgtgaaggaagcgtgtttatctgaaattctaagaagatgagagtcaaagacacccagcaaacggcggtttccgtgagcagggttggagcccaggaagcaaaccagcactgcaccctagatttcagccagaggacgaaagccctgccctcagctttctcagaccagccctggagtaggtggcccggggagacctgggcagtgtccctgcttgtcctgcagactgtgtggctctgcagacctctagatggaggaggcacaattctctaatgctggacgaggacactgatcatggaaactcaccccaaaccttgaatcgtgatagcatttgaggcagcctgaccggtgccacatgaacctgaaaggaatcaagatataatttattttgaaaataaatcagacactttcag

SEQ ID NO: 2153 - protein, 76 aa, Homo sapiens; identical to SEQ ID NO: 2151

SEQ ID NO: 2154 - DNA, 2969 bp, Homo sapiens
tacgcctaggagaggaaggagaaagaaagaagttaatcaggacatactagaaaacaccagttctgtggaacaagaattacagatcactacaggtagggaatcaaaaagattaaaatcatctcagctgttggaaccagcagttgaagaaactactaaaaaagaagttaaggtttcatctgttacaaaaaggactcctagaagaattaaaagatctgtagaaaatcaggaaagtgttgaaattataaatgatctaaaagttagtacggtaacaagtcctagcagaatgatcagaaaattgagaagtactaatttagatgcttctgaaaatacaggaaataagcaagatgataaatccagtgacaagcagctgcgtattaaacatgttagaagggtcagagggagagaagttagtccatcagatgtgagagaagactccaaccttgagtcatctcagttgactgttcaagcagaatttgatatgtctgccatacctagaaaacgtggtagaccaagaaaaatcaatccatctgaagatgtaggatctaaggctgttaaggaagagagaagccccaagaagaaagaagctcccagcattagaaggagatctacaagaaataccccagctaaaagtgaaaatgttgatgttggaaaaccagctttaggaaaatccattttagtgccaaacgaggaactttcgatggtgatgagctctaagaaaaaacttacaaaaaagactgaaagtcaaagccaaaaacgttcattgcactcagtatcagaagaacgcacagatgaaatgacacataaagaaacaaatgagcaggaagaaagattgctcgccacagcttccttcactaaatcatcccgcagcagcaggactcggtctagcaaggccatcttgttgccggacctttctgaaccaaacaatgagcctttattttctccagcgtcagaagttccaaggaaagcaaaagaaagatgatgcacaatcagtagaaactctgggaaagccaaaagcgaaacgaatcaggacgtcaaaaacaaaacaagcaagcaaaaacacagaaaaagaaagtgcttggtcacctcctcccatagaaattcggctgatttcccccttggctagcccagctgacggagtcaagagcaaaccaagaaaaactacagaagtgacaggaacaggtcttggaaggaacagaaagaaactgtcttcctatccaaagcaaattttacgcagaaaaatgctgtaatttcttgggaagattttaatgtacacctatttgtaaagtcatcagaatagtgtggattattaaatatctagtttggaagaaaataatttatataaattattgtaaatttttatgtaaacagaaggtcttcaataagtaaagtaactccatatggagtgattgtttcagtccaggcaatttttctattttatattaagacttcatacatttatatatgtaaatatggcttattaatggaatgttaaataaaatgtatacttcacagtcgtttgtgtcttggatttttgaaagggaggggatatctgtttaaatagttttatatgctcattggtctcattttctctataattaaaatactagaccagtcttaaaatggggatgattgaagtattgatatttctttttacagttactattttataatttatgcactttgattctgtgattcagatttctaatcagaaaatgtatttttttgtttttggctgttactatgttaaaattgaattatgggcatgtcattttgccatctttgtagtttcacaaattttgtgtaatctacctcaaatgaataatccaagtattggttaactataatgttggcatctcttattcggcaagcttaaaggctctttaaagtcttaattagtcaaagactaatccaggttagattgaccggttcactgctcacttgcaaccttatcaaagggtttgacaaagggaaatgtaaaataaatctgtttatggatattgagtgcatcttgtatgtgcctaatattgataggatgagatgtctgaacaaatttttataatattgctgtgaaggagcttgctattgaaccacagaaatcccttaatattcaggttttaaaactggcaaattctcacaggacctcaggcacagattattgaggttgggagagagtgagtagatgtagaaaaggagaaaaacaacacacgccctgttctctacagtacaactgtgtgcaattaagcaatggtacttgatgtaggctctaacactcatcaataaataagtgttgtaaaataatttataacaggtaatcgatagtgtgtaatgaatggactattaataattgattatctagaaacgaactgctttcgtgggcttttaatattttaatgtgaagcatatgcagtgtgctttctgcatttatttttctaccaaataatacagataatgagaaattggtgaaaatgcctacgcaaagtgttgacagtgtgaaagcagtgcgagtgcggccttttagtcaggttagtgatggatgttacgctgccttgttgaaaatttcactgactttgattttattacttttttaatgatagttatcaaacttgtatttaagctgcttgtcatttatggaatattgaacttatttaaatgaacttgttaaatgaataaagagctaaacataattcagtaaacaattcctttgcgcaagtagcacaataaacatggatgcaacgtatgtcaagttaatacttttttaaaccaacgcaatttggtgaatatagatgtgtggtacctgtttttaataagtgtactttttttcccccctccgtgaatgtagatcataagcaaacaaattgcctgttctaaatgaactttacatatattttaaatgaatgtatgtacttacgtataaatgtctttatatagcttgaataaaaacactgctcattaaaatgtgttgctacaac

SEQ ID NO: 2155 - protein, 231 aa, Homo sapiens
MIRKLRSTNLDASENTGNKQDDKSSDKQLRIKHVRRVRGREVSPSDVREDSNLESSQLTVQAEFDMSAIPRKRGRPRKINPSEDVGSKAVKEERSPKKKEAPSIRRRSTRNTPAKSENVDVGKPALGKSILVPNEELSMVMSSKKKLTKKTESQSQKRSLHSVSEERTDEMTHKETNEQEERLLATASFTKSSRSSRTRSSKAILLPDLSEPNNEPLFSPASEVPRKAKER

SEQ ID NO: 2156 - DNA, 2951 bp, Homo sapiens
tacgcctaggagaggaaggagaaagaaagaagttaatcaggacatactagaaaacaccagttctgtggaacaagaattacagatcactacaggtagggaatcaaaaagattaaaatcatctcagctgttggaaccagcagttgaagaaactactaaaaaagaagttaaggtttcatctgttacaaaaaggactcctagaagaattaaaagatctgtagaaaatcaggaaagtgttgaaattataaatgatctaaaagttagtacggtaacaagtcctagcagaatgatcagaaaattgagaagtactaatttagatgcttctgaaaatacaggaaataagcaagatgataaatccagtgacaagcagctgcgtattaaacatgttagaagggtcagagggagagaagttagtccatcagatgtgagagaagactccaaccttgagtcatctcagttgactgttcaagcagaatttgatatgtctgccatacctagaaaacgtggtagaccaagaaaaatcaatccatctgaagatgtaggatctaaggctgttaaggaagagagaagccccaagaagaaagaagctcccagcattagaaggagatctacaagaaataccccagctaaaagtgaaaatgttgatgttggaaaaccagctttaggaaaatccattttagtgccaaacgaggaactttcgatggtgatgagctctaagaaaaaacttacaaaaaagactgaaagtcaaagccaaaaacgttcattgcactcagtatcagaagaacgcacagatgaaatgacacataaagaaacaaatgagcaggaagaaagattgctcgccacagcttccttcactaaatcatcccgcagcagcaggactcggtctagcaaggccatcttgttgccggacctttctgaaccaaacaatgagcctttattttctccagcgtcagaagttccaaggaaagcaaaagaaagatgatgcacaatcagtagaaactctgggaaagccaaaagcgaaacgaatcaggacgtcaaaaacaaaacaagcaagcaaaaacacagaaaaagaaagtgcttggtcacctcctcccatagaaattcggctgatttcccccttggctagcccagctgacggagtcaagagcaaaccaagaaaaactacagaagtgacaggaacaggtcttggaaggaacagaaagaaactgtcttcctatccaaagcaaattttacgcagaaaaatgctgtaatttcttgggaagattttaatgtacacctatttgtaaagtcatcagaatagtgtggattattaaatatctagtttggaagaaaataatttatataaattattgtaaatttttatgtaaacagaaggtcttcaataagtaaagtaactccatatggagtgattgtttcagtccaggcaatttttctattttatattaagacttcatacatttatatatgtaaatatggcttattaatggaatgttaaataaaatgtatacttcacagtcgtttgtgtcttggatttttgaaagggaggggatatctgtttaaatagttttatatgctcattggtctcattttctctataattaaaatactagaccagtcttaaaatggggatgattgaagtattgatatttctttttacagttactattttataatttatgcactttgattctgtgattcagatttctaatcagaaaatgtatttttttgtttttggctgttactatgttaaaattgaattatgggcatgtcattttgccatctttgtagtttcacaaattttgtgtaatctacctcaaatgaataatccaagtattggttaactataatgttggcatctcttattcggcaagcttaaaggctctttaaagtcttaattagtcaaagactaatccaggttagattgaccggttcactgctcacttgcaaccttatcaaagggtttgacaaagggaaatgtaaaataaatctgtttatggatattgagtgcatcttgtatgtgcctaatattgataggatgagatgtctgaacaaatttttataatattgctgtgaaggagcttgctattgaaccacagaaatcccttaatattcaggttttaaaactggcaaattctcacaggacctcaggcacagattattgaggttgggagagagtgagtagatgtagaaaaggagaaaaacaacacacgccctgttctctacagtacaactgtgtgcaattaagcaatggtacttgatgtaggctctaacactcatcaataaataagtgttgtaaaataatttataacaggtaatcgatagtgtgtaatgaatggactattaataattgattatctagaaacgaactgctttcgtgggcttttaatattttaatgtgaagcatatgcagtgtgctttctgcatttatttttctaccaaataatacagataatgagaaattggtgaaaatgcctacgcaaagtgttgacagtgtgaaagcagtgcgagtgcggccttttagtcaggttagtgatggatgttacgctgccttgttgaaaatttcactgactttgattttattacttttttaatgatagttatcaaacttgtatttaagctgcttgtcatttatggaatattgaacttatttaaatgaacttgttaaatgaataaagagctaaacataattcagtaaacaattcctttgcgcaagtagcacaataaacatggatgcaacgtatgtcaagttaatacttttttaaaccaacgcaatttggtgaatatagatgtgtggtacctgtttttaataagtgtactttttttcccccctccgtgaatgtagatcataagcaaacaaattgcctgttctaaatgaactttacatatattttaaatgaatgtatgtacttacgtataaatgtctttatatagcttgaataaaaacactgctcatt

SEQ ID NO: 2157 - protein, 231 aa, Homo sapiens; identical to SEQ ID NO: 2155

SEQ ID NO: 2158 - DNA, 8742 bp, Homo sapiens
acataatctcggaccggaggagcggcggcacatggcggcggagcggcgctggtggttcgcgtcctgcgccggcagtcgggtccctttacggacggccggggccgcgaccctttcccactgttctcccacgcgatggactcgttggcgggcctttccccgagggaagcggccggcgtgctgagcctgtcctgtgttggcgtgtgttccacatgcgcttgggcctggccacatggaagtatgcgagacttaagagctcaagtgactagtggtctcctgccatttccagaagtgactcttcaagcccttggagaagacgaaataacattagaatctgtgcttcgtggaaagtttgctgcagggaaaaatggacttgcttgcttggcttgtggtccacaacttgaggtagtaaactctataacaggagagcgattgtctgcttacagattcagtggagtcaatgaacagcctcctgtagttttagctgtgaaagaattctcttggcagaagagaactggattattaataggattggaagaaacagaagggagtgttctctgtctttatgaccttggaatatcaaaagtagttaaagcagttgttcttcctggaagggtaacagctattgaacctataattaatcatggaggagccagtgcaagcactcagcatttacatccaagtctgcgatggctttttggagtggcagctgtggtcactgatgttggacagatccttcttgttgacctatgtttggatgacttgtcatgcaatcaaaatgaagttgaagcatcagatcttgaagttctaactggtatcccagctgaagtaccacacattagagaaagtgtaatgagacaagggcgccatctgtgtttccagttagtaagtccaacaggaacagctgtttcaactcttagttacataagcaggacaaatcagcttgctgtaggtttttctgatggctatctagcactttggaacatgaaaagcatgaaaagagaatattacatacaattggaaagtggacaagttcctgtatatgctgtcacttttcaagaacctgagaatgatcctcggaattgctgttacttgtgggctgttcagtctacacaagatagtgaaggggatgttttgagtttgcatctgctgcagctggcctttggtaatagaaagtgtttggcatcaggacaaatcttatatgaggggttagaatactgtgaagaaagatacaccctggacctgacaggtggcatgttccctttgaggggacagacgagtaataccaaattgttgggatgccagagtatagagaaatttcgatctcatggtgacagggaggaaggcgtgaatgaagctctatcgcctgacactagtgtttcagtctttacctggcaggtgaatatatatggacagggaaagccttctgtatatttggggctttttgatataaatcgttggtatcatgcacaaatgccagattcgttaaggtcaggagaatatctacataattgctcttattttgcactgtggtcattggagtctgttgtaagtaggacttctccacatggcatcttggatatattagtacatgagagaagtttaaatagaggagtccctccttcatatccacctcccgagcagttttttaatccaagcacttataattttgatgccacttgtttgttaaactcgggagttgttcatttaacttgtactggctttcagaaggagactttgacttttttaaagaaatcaggtccatcactcaatgaactcattcctgatggttataatcgatgtcttgtagctggccttctttccccaagatttgttgatgttcagccttccagtttaagccaagaagaacagttagaagctatattgtcagcagcaattcagactagttccctgggacttttgactggttatatccgaagatggataacagaagaacaaccaaattctgccactaatttgcgctttgttcttgaatggacgtggaataaagtggttctcacaaaagaggaatttgacagactatgtgtgccattatttgatggttcgtgtcatttcatggatccacaaactatacagtctatccagcaatgctatttgcttcttagcaatcttaatatagtcttgagctgttttgcatcagaagcccgagagatcactgagagaggactgatagacttaagcaataagtttgtggtttcccacctcatctgtcagtatgcacaagtggttctttggttctctcattctgggcttttaccagaaggcatagatgattctgtgcagttgtcaaggttatgctacaactaccctgtaattcagaactactacaccagtcgtcgacagaagtttgagcgtttatcaagagggaagtggaatcccgattgcttgatgattgatggactggtttctcagttaggagagcgaattgagaagttgtggaaacgagatgaaggaggcacaggaaaatatcctcctgctagtctgcatgcagtacttgatatgtacctattagacggcgttactgaagcagccaaacactctattaccatttatttgctacttgatattatgtattcctttcccaacaaaacagacactcccattgaatctttcccaactgtatttgccatttcttggggccaagttaaacttattcaggggttttggttgatagatcataatgactatgagagtggtttggatcttttgtttcatccagctactgcaaaacctttgtcatggcaacattcaaagattattcaggcattcatgagtcagggcgagcacagacaagccctcagatatattcagacaatgaagccaacagtgtccagtggtaacgatgttatccttcacctcactgttttgctttttaataggtgtatggttgaagcctggaattttttgcggcaacattgcaataggttgaatatagaggagttactgaagcacatgtatgaagtctgtcaggaaatgggcttgatggaagatttactgaagttaccatttacagacactgagcaggaatgtttagtgaaatttttgcagtccagtgccagcgttcagaatcatgaattccttttagtgcaccatttgcagcgtgccaattatgtgcctgccttgaagctgaaccaaactctgaagattaatgttatgaatgatcgtgatcctcgtttgcgggagagatcactggctcgaaattctatattagaccagtatggaaaaatccttcctagagtccatcgaaaattagccattgaacgagctaagccttatcatctgtcaacatcatcagtttttcgattagtttctagacccaaaccattatcagcagttccaaagcaagttgtaacaggaactgtgttgacaagatctgttttcatcaacaatgtgttatctaaaattggagaagtttgggcaagcaaagaacctataaatagcaccacacctttcaatagttctaaaatagaagaaccatctcctatagtgtattcgctcccagctccagagctgcctgaggcattttttggaacaccaatttcaaaagcatcacaaaaaatttctagactgctagatttggttgttcagcctgtcccccggccttctcagtgttcggagtttattcagcaaagctccatgaaatctcctttgtacctagtatcccgttcactgccctcaagttcgcaattaaaaggatcgcctcaggccatctccagggcttcagaattacatttgcttgaaactcctcttgtagttaagaaagctaaaagtttggccatgtcagttactacttctggattttctgagttcactcctcagtccatcctgaggtctactcttcgatcaacacctttagcatctccctctccatcacctggaaggtctcctcaacgacttaaagaaactagaatttcatttgtggaagaagatgtccacccaaaatggattcctggggctgcagatgatagcaaattagaagtatttactacacctaaaaaatgtgcagttccagtggaaactgaatggctgaagagcaaagataggaccacatcttttttcctgaacagccctgaaaaggagcatcaagaaatggatgaggggtcacaaagtttagagaaactggatgtgagcaaaggaaacagcagtgtttcaatcacatccgatgagactaccttagagtatcaggatgcaccgtcaccggaagaccttgaagagactgttttcacggcctctaagcccaaaagctcttccactgcactaactactaatgtaactgaacaaactgaaaaggatggagataaagatgtatttgcatcagaagtaactccttcagacctacagaaacaaatgggcaatttagaagatgcagaaacaaaggatctcttagttgcagcagaggcattttcagaattgaatcacttaagcccggttcaaggaactgaagcttctctttgtgcaccatcagtctatgaagggaaaatcttcacccagaagtccaaggtaccagtgttggacgaaggattaacatctgttgaaacctacacccctgcaattagagcaaatgacaataaatctatggctgatgtccttggtgatggtggaaactcctcgctcactatctctgaaggtcctattgtctctgagcgcaggcttaaccaggaagtagcgctgaacttaaaagaagatcatgaagtagaagttggtgtactaaaagaaagtgttgacttaccagaagaaaagcttccaatttctgacagccctcctgatactcaagaaattcatgtgattgaacaagaaaagcttgaagctcaagattcaggagaagaggctaggaatctttcatttaatgagttatatccctctggaacacttaagcttcagtacaattttgatactattgaccaacagttttgtgacttagctgataacaaagacactgctgaatgtgacattgctgaagtagatggggaactttttgtggctcaaagcaactttaccttgatattggaaggtgaagaaggagaagttgagccaggtgattttgcatcatctgatgtgttacctaaagcagctaacacagcaactgaagaaaaacttgtatgcagtggggaaaatgataatcatggacaaattgcaaatttgccatctgccgtaactagtgaccaaaagtcccaaaaagtagacactttaccatatgtgcctgaacctattaaagtagcaattgcagaaaatttactagatgtaattaaagacacaagaagtaaagaaattacttcagatacaatggaacagtccattcatgaaacaatacctttagtgagccaaaacataatgtgtcccactaaattggtcaaatctgcatttaagactgctcaggaaacaagcacaatgactatgaatgtcagccaggttgatgacgtggtttcctccaaaactcgtacgagaggtcaacgtatccaaaacgtgaatgtcaaatcagcacaacaggaagcatcagcagatgttgctactcctaagatgccagggcagtcagtcaggaagaaaactaggaaggcaaaagaaatttctgaagcttctgaaaacatctattctgatgtcagaggactatctcagaaccagcaaatacctcaaaattctgttacgcctaggagaggaaggagaaagaaagaagttaatcaggacatactagaaaacaccagttctgtggaacaagaattacagatcactacaggtagggaatcaaaaagattaaaatcatctcagctgttggaaccagcagttgaagaaactactaaaaaagaagttaaggtttcatctgttacaaaaaggactcctagaagaattaaaagatctgtagaaaatcaggaaagtgttgaaattataaatgatctaaaagttagtacggtaacaagtcctagcagaatgatcagaaaattgagaagtactaatttagatgcttctgaaaatacaggaaataagcaagatgataaatccagtgacaagcagctgcgtattaaacatgttagaagggtcagagggagagaagttagtccatcagatgtgagagaagactccaaccttgagtcatctcagttgactgttcaagcagaatttgatatgtctgccatacctagaaaacgtggtagaccaagaaaaatcaatccatctgaagatgtaggatctaaggctgttaaggaagagagaagccccaagaagaaagaagctcccagcattagaaggagatctacaagaaataccccagctaaaagtgaaaatgttgatgttggaaaaccagctttaggaaaatccattttagtgccaaacgaggaactttcgatggtgatgagctctaagaaaaaacttacaaaaaagactgaaagtcaaagccaaaaacgttcattgcactcagtatcagaagaacgcacagatgaaatgacacataaagaaacaaatgagcaggaagaaagattgctcgccacagcttccttcactaaatcatcccgcagcagcaggactcggtctagcaaggccatcttgttgccggacctttctgaaccaaacaatgagcctttattttctccagcgtcagaagttccaaggaaagcaaaagctaaaaaaatagaggttcctgcacagctgaaagaattagtttcggatttatcttctcagtttgtcatctcacctcctgctttaaggagcagacaaaaaaacacatccaataagaacaagcttgaagatgaactgaaagatgatgcacaatcagtagaaactctgggaaagccaaaagcgaaacgaatcaggacgtcaaaaacaaaacaagcaagcaaaaacacagaaaaagaaagtgcttggtcacctcctcccatagaaattcggctgatttcccccttggctagcccagctgacggagtcaagagcaaaccaagaaaaactacagaagtgacaggaacaggtcttggaaggaacagaaagaaactgtcttcctatccaaagcaaattttacgcagaaaaatgctgtaatttcttgggaagattttaatgtacacctatttgtaaagtcatcagaatagtgtggattattaaatatctagtttggaagaaaataatttatataaattattgtaaatttttatgtaaacagaaggtcttcaataagtaaagtaactccatatggagtgattgtttcagtccaggcaatttttctattttatattaagacttcatacatttatatatgtaaatatggcttattaatggaatgttaaataaaatgtatacttcacagtcgtttgtgtcttggatttttgaaagggaggggatatctgtttaaatagttttatatgctcattggtctcattttctctataattaaaatactagaccagtcttaaaatggggatgattgaagtattgatatttctttttacagttactattttataatttatgcactttgattctgtgattcagatttctaatcagaaaatgtatttttttgtttttggctgttactatgttaaaattgaattatgggcatgtcattttgccatctttgtagtttcacaaattttgtgtaatctacctcaaatgaataatccaagtattggttaactataatgttggcatctcttattcggcaagcttaaaggctctttaaagtcttaattagtcaaagactaatccaggttagattgaccggttcactgctcacttgcaaccttatcaaagggtttgacaaagggaaatgtaaaataaatctgtttatggatattgagtgcatcttgtatgtgcctaatattgataggatgagatgtctgaacaaatttttataatattgctgtgaaggagcttgctattgaaccacagaaatcccttaatattcaggttttaaaactggcaaattctcacaggacctcaggcacagattattgaggttgggagagagtgagtagatgtagaaaaggagaaaaacaacacacgccctgttctctacagtacaactgtgtgcaattaagcaatggtacttgatgtaggctctaacactcatcaataaataagtgttgtaaaataatttataacaggtaatcgatagtgtgtaatgaatggactattaataattgattatctagaaacgaactgctttcgtgggcttttaatattttaatgtgaagcatatgcagtgtgctttctgcatttatttttctaccaaataatacagataatgagaaattggtgaaaatgcctacgcaaagtgttgacagtgtgaaagcagtgcgagtgcggccttttagtcaggttagtgatggatgttacgctgccttgttgaaaatttcactgactttgattttattacttttttaatgatagttatcaaacttgtatttaagctgcttgtcatttatggaatattgaacttatttaaatgaacttgttaaatgaataaagagctaaacataattcagtaaacaattcctttgcgcaagtagcacaataaacatggatgcaacgtatgtcaagttaatacttttttaaaccaacgcaatttggtgaatatagatgtgtggtacctgtttttaataagtgtactttttttcccccctccgtgaatgtagatcataagcaaacaaattgcctgttctaaatgaactttacatatattttaaatgaatgtatgtacttacgtataaatgtctttatatagcttgaataaaaacactgctcatt

SEQ ID NO: 2159 - protein, 2301 aa, Homo sapiens
MDSLAGLSPREAAGVLSLSCVGVCSTCAWAWPHGSMRDLRAQVTSGLLPFPEVTLQALGEDEITLESVLRGKFAAGKNGLACLACGPQLEVVNSITGERLSAYRFSGVNEQPPVVLAVKEFSWQKRTGLLIGLEETEGSVLCLYDLGISKVVKAVVLPGRVTAIEPIINHGGASASTQHLHPSLRWLFGVAAVVTDVGQILLVDLCLDDLSCNQNEVEASDLEVLTGIPAEVPHIRESVMRQGRHLCFQLVSPTGTAVSTLSYISRTNQLAVGFSDGYLALWNMKSMKREYYIQLESGQVPVYAVTFQEPENDPRNCCYLWAVQSTQDSEGDVLSLHLLQLAFGNRKCLASGQILYEGLEYCEERYTLDLTGGMFPLRGQTSNTKLLGCQSIEKFRSHGDREEGVNEALSPDTSVSVFTWQVNIYGQGKPSVYLGLFDINRWYHAQMPDSLRSGEYLHNCSYFALWSLESVVSRTSPHGILDILVHERSLNRGVPPSYPPPEQFFNPSTYNFDATCLLNSGVVHLTCTGFQKETLTFLKKSGPSLNELIPDGYNRCLVAGLLSPRFVDVQPSSLSQEEQLEAILSAAIQTSSLGLLTGYIRRWITEEQPNSATNLRFVLEWTWNKVVLTKEEFDRLCVPLFDGSCHFMDPQTIQSIQQCYLLLSNLNIVLSCFASEAREITERGLIDLSNKFVVSHLICQYAQVVLWFSHSGLLPEGIDDSVQLSRLCYNYPVIQNYYTSRRQKFERLSRGKWNPDCLMIDGLVSQLGERIEKLWKRDEGGTGKYPPASLHAVLDMYLLDGVTEAAKHSITIYLLLDIMYSFPNKTDTPIESFPTVFAISWGQVKLIQGFWLIDHNDYESGLDLLFHPATAKPLSWQHSKIIQAFMSQGEHRQALRYIQTMKPTVSSGNDVILHLTVLLFNRCMVEAWNFLRQHCNRLNIEELLKHMYEVCQEMGLMEDLLKLPFTDTEQECLVKFLQSSASVQNHEFLLVHHLQRANYVPALKLNQTLKINVMNDRDPRLRERSLARNSILDQYGKILPRVHRKLAIERAKPYHLSTSSVFRLVSRPKPLSAVPKQVVTGTVLTRSVFINNVLSKIGEVWASKEPINSTTPFNSSKIEEPSPIVYSLPAPELPEAFFGTPISKASQKISRLLDLVVQPVPRPSQCSEFIQQSSMKSPLYLVSRSLPSSSQLKGSPQAISRASELHLLETPLVVKKAKSLAMSVTTSGFSEFTPQSILRSTLRSTPLASPSPSPGRSPQRLKETRISFVEEDVHPKWIPGAADDSKLEVFTTPKKCAVPVETEWLKSKDRTTSFFLNSPEKEHQEMDEGSQSLEKLDVSKGNSSVSITSDETTLEYQDAPSPEDLEETVFTASKPKSSSTALTTNVTEQTEKDGDKDVFASEVTPSDLQKQMGNLEDAETKDLLVAAEAFSELNHLSPVQGTEASLCAPSVYEGKIFTQKSKVPVLDEGLTSVETYTPAIRANDNKSMADVLGDGGNSSLTISEGPIVSERRLNQEVALNLKEDHEVEVGVLKESVDLPEEKLPISDSPPDTQEIHVIEQEKLEAQDSGEEARNLSFNELYPSGTLKLQYNFDTIDQQFCDLADNKDTAECDIAEVDGELFVAQSNFTLILEGEEGEVEPGDFASSDVLPKAANTATEEKLVCSGENDNHGQIANLPSAVTSDQKSQKVDTLPYVPEPIKVAIAENLLDVIKDTRSKEITSDTMEQSIHETIPLVSQNIMCPTKLVKSAFKTAQETSTMTMNVSQVDDVVSSKTRTRGQRIQNVNVKSAQQEASADVATPKMPGQSVRKKTRKAKEISEASENIYSDVRGLSQNQQIPQNSVTPRRGRRKKEVNQDILENTSSVEQELQITTGRESKRLKSSQLLEPAVEETTKKEVKVSSVTKRTPRRIKRSVENQESVEIINDLKVSTVTSPSRMIRKLRSTNLDASENTGNKQDDKSSDKQLRIKHVRRVRGREVSPSDVREDSNLESSQLTVQAEFDMSAIPRKRGRPRKINPSEDVGSKAVKEERSPKKKEAPSIRRRSTRNTPAKSENVDVGKPALGKSILVPNEELSMVMSSKKKLTKKTESQSQKRSLHSVSEERTDEMTHKETNEQEERLLATASFTKSSRSSRTRSSKAILLPDLSEPNNEPLFSPASEVPRKAKAKKIEVPAQLKELVSDLSSQFVISPPALRSRQKNTSNKNKLEDELKDDAQSVETLGKPKAKRIRTSKTKQASKNTEKESAWSPPPIEIRLISPLASPADGVKSKPRKTTEVTGTGLGRNRKKLSSYPKQILRRKML

SEQ ID NO: 2160 - DNA, 8913 bp, Homo sapiens
gctccctcccttccggggcgtgtggaactcggttttgtcggcgcagggtaatgcgcagagcggggccggcgctgtccgaggcgagcaggcagcgttgcaaggggaaggacccagaagcgcggcgggagcagcgactgcgttttagccgctgagcggtctgcaggcctacagcccgcgaaggcactctcgggggcgtgtggctctgaggtggccggggaggtcgcaggcggcggccggagcgcagaggagcggcttcagccgggcggaggggtgtgagcccggcccgtggcggccacgtctcccgggagatgctgtgacggacccgcacgggaggagctcgcgcctggcctggcgacccggtggactcggcccgcggcggcgcgctcacccgccccgttcagtggaagtatgcgagacttaagagctcaagtgactagtggtctcctgccatttccagaagtgactcttcaagcccttggagaagacgaaataacattagaatctgtgcttcgtggaaagtttgctgcagggaaaaatggacttgcttgcttggcttgtggtccacaacttgaggtagtaaactctataacaggagagcgattgtctgcttacagattcagtggagtcaatgaacagcctcctgtagttttagctgtgaaagaattctcttggcagaagagaactggattattaataggattggaagaaacagaagggagtgttctctgtctttatgaccttggaatatcaaaagtagttaaagcagttgttcttcctggaagggtaacagctattgaacctataattaatcatggaggagccagtgcaagcactcagcatttacatccaagtctgcgatggctttttggagtggcagctgtggtcactgatgttggacagatccttcttgttgacctatgtttggatgacttgtcatgcaatcaaaatgaagttgaagcatcagatcttgaagttctaactggtatcccagctgaagtaccacacattagagaaagtgtaatgagacaagggcgccatctgtgtttccagttagtaagtccaacaggaacagctgtttcaactcttagttacataagcaggacaaatcagcttgctgtaggtttttctgatggctatctagcactttggaacatgaaaagcatgaaaagagaatattacatacaattggaaagtggacaagttcctgtatatgctgtcacttttcaagaacctgagaatgatcctcggaattgctgttacttgtgggctgttcagtctacacaagatagtgaaggggatgttttgagtttgcatctgctgcagctggcctttggtaatagaaagtgtttggcatcaggacaaatcttatatgaggggttagaatactgtgaagaaagatacaccctggacctgacaggtggcatgttccctttgaggggacagacgagtaataccaaattgttgggatgccagagtatagagaaatttcgatctcatggtgacagggaggaaggcgtgaatgaagctctatcgcctgacactagtgtttcagtctttacctggcaggtgaatatatatggacagggaaagccttctgtatatttggggctttttgatataaatcgttggtatcatgcacaaatgccagattcgttaaggtcaggagaatatctacataattgctcttattttgcactgtggtcattggagtctgttgtaagtaggacttctccacatggcatcttggatatattagtacatgagagaagtttaaatagaggagtccctccttcatatccacctcccgagcagttttttaatccaagcacttataattttgatgccacttgtttgttaaactcgggagttgttcatttaacttgtactggctttcagaaggagactttgacttttttaaagaaatcaggtccatcactcaatgaactcattcctgatggttataatcgatgtcttgtagctggccttctttccccaagatttgttgatgttcagccttccagtttaagccaagaagaacagttagaagctatattgtcagcagcaattcagactagttccctgggacttttgactggttatatccgaagatggataacagaagaacaaccaaattctgccactaatttgcgctttgttcttgaatggacgtggaataaagtggttctcacaaaagaggaatttgacagactatgtgtgccattatttgatggttcgtgtcatttcatggatccacaaactatacagtctatccagcaatgctatttgcttcttagcaatcttaatatagtcttgagctgttttgcatcagaagcccgagagatcactgagagaggactgatagacttaagcaataagtttgtggtttcccacctcatctgtcagtatgcacaagtggttctttggttctctcattctgggcttttaccagaaggcatagatgattctgtgcagttgtcaaggttatgctacaactaccctgtaattcagaactactacaccagtcgtcgacagaagtttgagcgtttatcaagagggaagtggaatcccgattgcttgatgattgatggactggtttctcagttaggagagcgaattgagaagttgtggaaacgagatgaaggaggcacaggaaaatatcctcctgctagtctgcatgcagtacttgatatgtacctattagacggcgttactgaagcagccaaacactctattaccatttatttgctacttgatattatgtattcctttcccaacaaaacagacactcccattgaatctttcccaactgtatttgccatttcttggggccaagttaaacttattcaggggttttggttgatagatcataatgactatgagagtggtttggatcttttgtttcatccagctactgcaaaacctttgtcatggcaacattcaaagattattcaggcattcatgagtcagggcgagcacagacaagccctcagatatattcagacaatgaagccaacagtgtccagtggtaacgatgttatccttcacctcactgttttgctttttaataggtgtatggttgaagcctggaattttttgcggcaacattgcaataggttgaatatagaggagttactgaagcacatgtatgaagtctgtcaggaaatgggcttgatggaagatttactgaagttaccatttacagacactgagcaggaatgtttagtgaaatttttgcagtccagtgccagcgttcagaatcatgaattccttttagtgcaccatttgcagcgtgccaattatgtgcctgccttgaagctgaaccaaactctgaagattaatgttatgaatgatcgtgatcctcgtttgcgggagagatcactggctcgaaattctatattagaccagtatggaaaaatccttcctagagtccatcgaaaattagccattgaacgagctaagccttatcatctgtcaacatcatcagtttttcgattagtttctagacccaaaccattatcagcagttccaaagcaagttgtaacaggaactgtgttgacaagatctgttttcatcaacaatgtgttatctaaaattggagaagtttgggcaagcaaagaacctataaatagcaccacacctttcaatagttctaaaatagaagaaccatctcctatagtgtattcgctcccagctccagagctgcctgaggcattttttggaacaccaatttcaaaagcatcacaaaaaatttctagactgctagatttggttgttcagcctgtcccccggccttctcagtgttcggagtttattcagcaaagctccatgaaatctcctttgtacctagtatcccgttcactgccctcaagttcgcaattaaaaggatcgcctcaggccatctccagggcttcagaattacatttgcttgaaactcctcttgtagttaagaaagctaaaagtttggccatgtcagttactacttctggattttctgagttcactcctcagtccatcctgaggtctactcttcgatcaacacctttagcatctccctctccatcacctggaaggtctcctcaacgacttaaagaaactagaatttcatttgtggaagaagatgtccacccaaaatggattcctggggctgcagatgatagcaaattagaagtatttactacacctaaaaaatgtgcagttccagtggaaactgaatggctgaagagcaaagataggaccacatcttttttcctgaacagccctgaaaaggagcatcaagaaatggatgaggggtcacaaagtttagagaaactggatgtgagcaaaggaaacagcagtgtttcaatcacatccgatgagactaccttagagtatcaggatgcaccgtcaccggaagaccttgaagagactgttttcacggcctctaagcccaaaagctcttccactgcactaactactaatgtaactgaacaaactgaaaaggatggagataaagatgtatttgcatcagaagtaactccttcagacctacagaaacaaatgggcaatttagaagatgcagaaacaaaggatctcttagttgcagcagaggcattttcagaattgaatcacttaagcccggttcaaggaactgaagcttctctttgtgcaccatcagtctatgaagggaaaatcttcacccagaagtccaaggtaccagtgttggacgaaggattaacatctgttgaaacctacacccctgcaattagagcaaatgacaataaatctatggctgatgtccttggtgatggtggaaactcctcgctcactatctctgaaggtcctattgtctctgagcgcaggcttaaccaggaagtagcgctgaacttaaaagaagatcatgaagtagaagttggtgtactaaaagaaagtgttgacttaccagaagaaaagcttccaatttctgacagccctcctgatactcaagaaattcatgtgattgaacaagaaaagcttgaagctcaagattcaggagaagaggctaggaatctttcatttaatgagttatatccctctggaacacttaagcttcagtacaattttgatactattgaccaacagttttgtgacttagctgataacaaagacactgctgaatgtgacattgctgaagtagatggggaactttttgtggctcaaagcaactttaccttgatattggaaggtgaagaaggagaagttgagccaggtgattttgcatcatctgatgtgttacctaaagcagctaacacagcaactgaagaaaaacttgtatgcagtggggaaaatgataatcatggacaaattgcaaatttgccatctgccgtaactagtgaccaaaagtcccaaaaagtagacactttaccatatgtgcctgaacctattaaagtagcaattgcagaaaatttactagatgtaattaaagacacaagaagtaaagaaattacttcagatacaatggaacagtccattcatgaaacaatacctttagtgagccaaaacataatgtgtcccactaaattggtcaaatctgcatttaagactgctcaggaaacaagcacaatgactatgaatgtcagccaggttgatgacgtggtttcctccaaaactcgtacgagaggtcaacgtatccaaaacgtgaatgtcaaatcagcacaacaggaagcatcagcagatgttgctactcctaagatgccagggcagtcagtcaggaagaaaactaggaaggcaaaagaaatttctgaagcttctgaaaacatctattctgatgtcagaggactatctcagaaccagcaaatacctcaaaattctgttacgcctaggagaggaaggagaaagaaagaagttaatcaggacatactagaaaacaccagttctgtggaacaagaattacagatcactacaggtagggaatcaaaaagattaaaatcatctcagctgttggaaccagcagttgaagaaactactaaaaaagaagttaaggtttcatctgttacaaaaaggactcctagaagaattaaaagatctgtagaaaatcaggaaagtgttgaaattataaatgatctaaaagttagtacggtaacaagtcctagcagaatgatcagaaaattgagaagtactaatttagatgcttctgaaaatacaggaaataagcaagatgataaatccagtgacaagcagctgcgtattaaacatgttagaagggtcagagggagagaagttagtccatcagatgtgagagaagactccaaccttgagtcatctcagttgactgttcaagcagaatttgatatgtctgccatacctagaaaacgtggtagaccaagaaaaatcaatccatctgaagatgtaggatctaaggctgttaaggaagagagaagccccaagaagaaagaagctcccagcattagaaggagatctacaagaaataccccagctaaaagtgaaaatgttgatgttggaaaaccagctttaggaaaatccattttagtgccaaacgaggaactttcgatggtgatgagctctaagaaaaaacttacaaaaaagactgaaagtcaaagccaaaaacgttcattgcactcagtatcagaagaacgcacagatgaaatgacacataaagaaacaaatgagcaggaagaaagattgctcgccacagcttccttcactaaatcatcccgcagcagcaggactcggtctagcaaggccatcttgttgccggacctttctgaaccaaacaatgagcctttattttctccagcgtcagaagttccaaggaaagcaaaagctaaaaaaatagaggttcctgcacagctgaaagaattagtttcggatttatcttctcagtttgtcatctcacctcctgctttaaggagcagacaaaaaaacacatccaataagaacaagcttgaagatgaactgaaagatgatgcacaatcagtagaaactctgggaaagccaaaagcgaaacgaatcaggacgtcaaaaacaaaacaagcaagcaaaaacacagaaaaagaaagtgcttggtcacctcctcccatagaaattcggctgatttcccccttggctagcccagctgacggagtcaagagcaaaccaagaaaaactacagaagtgacaggaacaggtcttggaaggaacagaaagaaactgtcttcctatccaaagcaaattttacgcagaaaaatgctgtaatttcttgggaagattttaatgtacacctatttgtaaagtcatcagaatagtgtggattattaaatatctagtttggaagaaaataatttatataaattattgtaaatttttatgtaaacagaaggtcttcaataagtaaagtaactccatatggagtgattgtttcagtccaggcaatttttctattttatattaagacttcatacatttatatatgtaaatatggcttattaatggaatgttaaataaaatgtatacttcacagtcgtttgtgtcttggatttttgaaagggaggggatatctgtttaaatagttttatatgctcattggtctcattttctctataattaaaatactagaccagtcttaaaatggggatgattgaagtattgatatttctttttacagttactattttataatttatgcactttgattctgtgattcagatttctaatcagaaaatgtatttttttgtttttggctgttactatgttaaaattgaattatgggcatgtcattttgccatctttgtagtttcacaaattttgtgtaatctacctcaaatgaataatccaagtattggttaactataatgttggcatctcttattcggcaagcttaaaggctctttaaagtcttaattagtcaaagactaatccaggttagattgaccggttcactgctcacttgcaaccttatcaaagggtttgacaaagggaaatgtaaaataaatctgtttatggatattgagtgcatcttgtatgtgcctaatattgataggatgagatgtctgaacaaatttttataatattgctgtgaaggagcttgctattgaaccacagaaatcccttaatattcaggttttaaaactggcaaattctcacaggacctcaggcacagattattgaggttgggagagagtgagtagatgtagaaaaggagaaaaacaacacacgccctgttctctacagtacaactgtgtgcaattaagcaatggtacttgatgtaggctctaacactcatcaataaataagtgttgtaaaataatttataacaggtaatcgatagtgtgtaatgaatggactattaataattgattatctagaaacgaactgctttcgtgggcttttaatattttaatgtgaagcatatgcagtgtgctttctgcatttatttttctaccaaataatacagataatgagaaattggtgaaaatgcctacgcaaagtgttgacagtgtgaaagcagtgcgagtgcggccttttagtcaggttagtgatggatgttacgctgccttgttgaaaatttcactgactttgattttattacttttttaatgatagttatcaaacttgtatttaagctgcttgtcatttatggaatattgaacttatttaaatgaacttgttaaatgaataaagagctaaacataattcagtaaacaattcctttgcgcaagtagcacaataaacatggatgcaacgtatgtcaagttaatacttttttaaaccaacgcaatttggtgaatatagatgtgtggtacctgtttttaataagtgtactttttttcccccctccgtgaatgtagatcataagcaaacaaattgcctgttctaaatgaactttacatatattttaaatgaatgtatgtacttacgtataaatgtctttatatagcttgaataaaaacactgctcatt

SEQ ID NO: 2161 - protein, 2266 aa, Homo sapiens; identical to SEQ ID NO: 119

SEQ ID NO: 2162 - DNA, 2736 bp, Homo sapiens
tacgcctaggagaggaaggagaaagaaagaagttaatcaggacatactagaaaacaccagttctgtggaacaagaattacagatcactacaggtagggaatcaaaaagattaaaatcatctcagctgttggaaccagcagttgaagaaactactaaaaaagaagttaaggtttcatctgttacaaaaaggactcctagaagaattaaaagatctgtagaaaatcaggaaagtgttgaaattataaatgatctaaaagttagtacggtaacaagtcctagcagaatgatcagaaaattgagaagtactaatttagatgcttctgaaaatacaggaaataagcaagatgataaatccagtgacaagcagctgcgtattaaacatgttagaagggtcagagggagagaagttagtccatcagatgtgagagaagactccaaccttgagtcatctcagttgactgttcaagcagaatttgatatgtctgccatacctagaaaacgtggtagaccaagaaaaatcaatccatctgaagatgtaggatctaaggctgttaaggaagagagaagccccaagaagaaagaagctcccagcattagaaggagatctacaagaaataccccagctaaaagtgaaaatgttgatgttggaaaaccagctttaggaaaatccattttagtgccaaacgaggaactttcgatggtgatgagctctaagaaaaaacttacaaaaaagactgaaagtcaaagccaaaaacgttcattgcactcagtatcagaagaacgcacagatgaaatgacacataaagaaacaaatgagcaggaagaaagattgctcgccacagcttccttcactaaatcatcccgcagcagcaggactcggtctagcaaggccatcttgttgccggacctttctgaaccaaacaatgagcctttattttctccagcgtcagaagttccaaggaaagcaaaagaaagatgatgcacaatcagtagaaactctgggaaagccaaaagcgaaacgaatcaggacgtcaaaaacaaaacaagcaagcaaaaacacagaaaaagaaagtgcttggtcacctcctcccatagaaattcggctgatttcccccttggctagcccagctgacggagtcaagagcaaaccaagaaaaactacagaagtgacaggaacaggtcttggaaggaacagaaagaaactgtcttcctatccaaagcaaattttacgcagaaaaatgctgtaatttcttgggaagattttaatgtacacctatttgtaaagtcatcagaatagtgtggattattaaatatctagtttggaagaaaataatttatataaattattgtaaatttttatgtaaacagaaggtcttcaataagtaaagtaactccatatggagtgattgtttcagtccaggcaatttttctattttatattaagacttcatacatttatatatgtaaatatggcttattaatggaatgttaaataaaatgtatacttcacagtcgtttgtgtcttggatttttgaaagggaggggatatctgtttaaatagttttatatgctcattggtctcattttctctataattaaaatactagaccagtcttaaaatggggatgattgaagtattgatatttctttttacagttactattttataatttatgcactttgattctgtgattcagatttctaatcagaaaatgtatttttttgtttttggctgttactatgttaaaattgaattatgggcatgtcattttgccatctttgtagtttcacaaattttgtgtaatctacctcaaatgaataatccaagtattggttaactataatgttggcatctcttattcggcaagcttaaaggctctttaaagtcttaattagtcaaagactaatccaggttagattgaccggttcactgctcacttgcaaccttatcaaagggtttgacaaagggaaatgtaaaataaatctgtttatggatattgagtgcatcttgtatgtgcctaatattgataggatgagatgtctgaacaaatttttataatattgctgtgaaggagcttgctattgaaccacagaaatcccttaatattcaggttttaaaactggcaaattctcacaggacctcaggcacagattattgaggttgggagagagtgagtagatgtagaaaaggagaaaaacaacacacgccctgttctctacagtacaactgtgtgcaattaagcaatggtacttgatgtaggctctaacactcatcaataaataagtgttgtaaaataatttataacaggtaatcgatagtgtgtaatgaatggactattaataattgattatctagaaacgaactgctttcgtgggcttttaatattttaatgtgaagcatatgcagtgtgctttctgcatttatttttctaccaaataatacagataatgagaaattggtgaaaatgcctacgcaaagtgttgacagtgtgaaagcagtgcgagtgcggccttttagtcaggttagtgatggatgttacgctgccttgttgaaaatttcactgactttgattttattacttttttaatgatagttatcaaacttgtatttaagctgcttgtcatttatggaatattgaacttatttaaatgaacttgttaaatgaataaagagctaaacataattcagtaaacaattcctttgcgcaagtagcacaataaacatggatgcaacgt

SEQ ID NO: 2163 - protein, 231 aa, Homo sapiens; identical to SEQ ID NO: 2155

SEQ ID NO: 2164 - DNA, 6794 bp, Homo sapiens
agactttgacttttttaaagaaatcaggtccatcactcaatgaactcattcctgatggttataatcgatgtcttgtagctggccttctttccccaagatttgttgatgttcagccttccagtttaagccaagaagaacagttagaagctatattgtcagcagcaattcagactagttccctgggacttttgactggttatatccgaagatggataacagaagaacaaccaaattctgccactaatttgcgctttgttcttgaatggacgtggaataaagtggttctcacaaaagaggaatttgacagactatgtgtgccattatttgatggttcgtgtcatttcatggatccacaaactatacagtctatccagcaatgctatttgcttcttagcaatcttaatatagtcttgagctgttttgcatcagaagcccgagagatcactgagagaggactgatagacttaagcaataagtttgtggtttcccacctcatctgtcagtatgcacaagtggttctttggttctctcattctgggcttttaccagaaggcatagatgattctgtgcagttgtcaaggttatgctacaactaccctgtaattcagaactactacaccagtcgtcgacagaagtttgagcgtttatcaagagggaagtggaatcccgattgcttgatgattgatggactggtttctcagttaggagagcgaattgagaagttgtggaaacgagatgaaggaggcacaggaaaatatcctcctgctagtctgcatgcagtacttgatatgtacctattagacggcgttactgaagcagccaaacactctattaccatttatttgctacttgatattatgtattcctttcccaacaaaacagacactcccattgaatctttcccaactgtatttgccatttcttggggccaagttaaacttattcaggggttttggttgatagatcataatgactatgagagtggtttggatcttttgtttcatccagctactgcaaaacctttgtcatggcaacattcaaagattattcaggcattcatgagtcagggcgagcacagacaagccctcagatatattcagacaatgaagccaacagtgtccagtggtaacgatgttatccttcacctcactgttttgctttttaataggtgtatggttgaagcctggaattttttgcggcaacattgcaataggttgaatatagaggagttactgaagcacatgtatgaagtctgtcaggaaatgggcttgatggaagatttactgaagttaccatttacagacactgagcaggaatgtttagtgaaatttttgcagtccagtgccagcgttcagaatcatgaattccttttagtgcaccatttgcagcgtgccaattatgtgcctgccttgaagctgaaccaaactctgaagattaatgttatgaatgatcgtgatcctcgtttgcgggagagatcactggctcgaaattctatattagaccagtatggaaaaatccttcctagagtccatcgaaaattagccattgaacgagctaagccttatcatctgtcaacatcatcagtttttcgattagtttctagacccaaaccattatcagcagttccaaagcaagttgtaacaggaactgtgttgacaagatctgttttcatcaacaatgtgttatctaaaattggagaagtttgggcaagcaaagaacctataaatagcaccacacctttcaatagttctaaaatagaagaaccatctcctatagtgtattcgctcccagctccagagctgcctgaggcattttttggaacaccaatttcaaaagcatcacaaaaaatttctagaatgacaaggaaggtactgcaactacaagtttttatttctgggctccaaagcatactctccttttctggttattctcagactgctagatttggttgttcagcctgtcccccggccttctcagtgttcggagtttattcagcaaagctccatgaaatctcctttgtacctagtatcccgttcactgccctcaagttcgcaattaaaaggatcgcctcaggccatctccagggcttcagaattacatttgcttgaaactcctcttgtagttaagaaagctaaaagtttggccatgtcagttactacttctggattttctgagttcactcctcagtccatcctgaggtctactcttcgatcaacacctttagcatctccctctccatcacctggaaggtctcctcaacgacttaaagaaactagaatttcatttgtggaagaagatgtccacccaaaatggattcctggggctgcagatgatagcaaattagaagtatttactacacctaaaaaatgtgcagttccagtggaaactgaatggctgaagagcaaagataggaccacatcttttttcctgaacagccctgaaaaggagcatcaagaaatggatgaggggtcacaaagtttagagaaactggatgtgagcaaaggaaacagcagtgtttcaatcacatccgatgagactaccttagagtatcaggatgcaccgtcaccggaagaccttgaagagactgttttcacggcctctaagcccaaaagctcttccactgcactaactactaatgtaactgaacaaactgaaaaggatggagataaagatgtatttgcatcagaagtaactccttcagacctacagaaacaaatgggcaatttagaagatgcagaaacaaaggatctcttagttgcagcagaggcattttcagaattgaatcacttaagcccggttcaaggaactgaagcttctctttgtgcaccatcagtctatgaagggaaaatcttcacccagaagtccaaggtaccagtgttggacgaaggattaacatctgttgaaacctacacccctgcaattagagcaaatgacaataaatctatggctgatgtccttggtgatggtggaaactcctcgctcactatctctgaaggtcctattgtctctgagcgcaggcttaaccaggaagtagcgctgaacttaaaagaagatcatgaagtagaagttggtgtactaaaagaaagtgttgacttaccagaagaaaagcttccaatttctgacagccctcctgatactcaagaaattcatgtgattgaacaagaaaagcttgaagctcaagattcaggagaagaggctaggaatctttcatttaatgagttatatccctctggaacacttaagcttcagtacaattttgatactattgaccaacagttttgtgacttagctgataacaaagacactgctgaatgtgacattgctgaagtagatggggaactttttgtggctcaaagcaactttaccttgatattggaaggtgaagaaggagaagttgagccaggtgattttgcatcatctgatgtgttacctaaagcagctaacacagcaactgaagaaaaacttgtatgcagtggggaaaatgataatcatggacaaattgcaaatttgccatctgccgtaactagtgaccaaaagtcccaaaaagtagacactttaccatatgtgcctgaacctattaaagtagcaattgcagaaaatttactagatgtaattaaagacacaagaagtaaagaaattacttcagatacaatggaacagtccattcatgaaacaatacctttagtgagccaaaacataatgtgtcccactaaattggtcaaatctgcatttaagactgctcaggaaacaagcacaatgactatgaatgtcagccaggttgatgacgtggtttcctccaaaactcgtacgagaggtcaacgtatccaaaacgtgaatgtcaaatcagcacaacaggaagcatcagcagatgttgctactcctaagatgccagggcagtcagtcaggaagaaaactaggaaggcaaaagaaatttctgaagcttctgaaaacatctattctgatgtcagaggactatctcagaaccagcaaatacctcaaaattctgttacgcctaggagaggaaggagaaagaaagaagttaatcaggacatactagaaaacaccagttctgtggaacaagaattacagatcactacaggtagggaatcaaaaagattaaaatcatctcagctgttggaaccagcagttgaagaaactactaaaaaagaagttaaggtttcatctgttacaaaaaggactcctagaagaattaaaagatctgtagaaaatcaggaaagtgttgaaattataaatgatctaaaagttagtacggtaacaagtcctagcagaatgatcagaaaattgagaagtactaatttagatgcttctgaaaatacaggaaataagcaagatgataaatccagtgacaagcagctgcgtattaaacatgttagaagggtcagagggagagaagttagtccatcagatgtgagagaagactccaaccttgagtcatctcagttgactgttcaagcagaatttgatatgtctgccatacctagaaaacgtggtagaccaagaaaaatcaatccatctgaagatgtaggatctaaggctgttaaggaagagagaagccccaagaagaaagaagctcccagcattagaaggagatctacaagaaataccccagctaaaagtgaaaatgttgatgttggaaaaccagctttaggaaaatccattttagtgccaaacgaggaactttcgatggtgatgagctctaagaaaaaacttacaaaaaagactgaaagtcaaagccaaaaacgttcattgcactcagtatcagaagaacgcacagatgaaatgacacataaagaaacaaatgagcaggaagaaagattgctcgccacagcttccttcactaaatcatcccgcagcagcaggactcggtctagcaaggccatcttgttgccggacctttctgaaccaaacaatgagcctttattttctccagcgtcagaagttccaaggaaagcaaaagctaaaaaaatagaggttcctgcacagctgaaagaattagtttcggatttatcttctcagtttgtcatctcacctcctgctttaaggagcagacaaaaaaacacatccaataagaacaagcttgaagatgaactgaaacacagaaaaagaaagtgcttggtcacctcctcccatagaaattcggctgatttcccccttggctagcccagctgacggagtcaagagcaaaccaagaaaaactacagaagtgacaggaacaggtcttggaaggaacagaaagaaactgtcttcctatccaaagcaaattttacgcagaaaaatgctgtaatttcttgggaagattttaatgtacacctatttgtaaagtcatcagaatagtgtggattattaaatatctagtttggaagaaaataatttatataaattattgtaaatttttatgtaaacagaaggtcttcaataagtaaagtaactccatatggagtgattgtttcagtccaggcaatttttctattttatattaagacttcatacatttatatatgtaaatatggcttattaatggaatgttaaataaaatgtatacttcacagtcgtttgtgtcttggatttttgaaagggaggggatatctgtttaaatagttttatatgctcattggtctcattttctctataattaaaatactagaccagtcttaaaatggggatgattgaagtattgatatttctttttacagttactattttataatttatgcactttgattctgtgattcagatttctaatcagaaaatgtatttttttgtttttggctgttactatgttaaaattgaattatgggcatgtcattttgccatctttgtagtttcacaaattttgtgtaatctacctcaaatgaataatccaagtattggttaactataatgttggcatctcttattcggcaagcttaaaggctctttaaagtcttaattagtcaaagactaatccaggttagattgaccggttcactgctcacttgcaaccttatcaaagggtttgacaaagggaaatgtaaaataaatctgtttatggatattgagtgcatcttgtatgtgcctaatattgataggatgagatgtctgaacaaatttttataatattgctgtgaaggagcttgctattgaaccacagaaatcccttaatattcaggttttaaaactggcaaattctcacaggacctcaggcacagattattgaggttgggagagagtgagtagatgtagaaaaggagaaaaacaacacacgccctgttctctacagtacaactgtgtgcaattaagcaatggtacttgatgtaggctctaacactcatcaataaataagtgttgtaaaataatttataacaggtaatcgatagtgtgtaatgaatggactattaataattgattatctagaaacgaactgctttcgtgggcttttaatattttaatgtgaagcatatgcagtgtgctttctgcatttatttttctaccaaataatacagataatgagaaattggtgaaaatgcctacgcaaagtgttgacagtgtgaaagcagtgcgagtgcggccttttagtcaggttagtgatggatgttacgctgccttgttgaaaatttcactgactttgattttattacttttttaatgatagttatcaaacttgtatttaagctgcttgtcatttatggaatattgaacttatttaaatgaacttgttaaatgaataaagagctaaacataattcagtaaacaattcctttgcgcaagtagcacaataaacatggatgcaacgt

SEQ ID NO: 2165 - protein, 1058 aa, Homo sapiens
MKSPLYLVSRSLPSSSQLKGSPQAISRASELHLLETPLVVKKAKSLAMSVTTSGFSEFTPQSILRSTLRSTPLASPSPSPGRSPQRLKETRISFVEEDVHPKWIPGAADDSKLEVFTTPKKCAVPVETEWLKSKDRTTSFFLNSPEKEHQEMDEGSQSLEKLDVSKGNSSVSITSDETTLEYQDAPSPEDLEETVFTASKPKSSSTALTTNVTEQTEKDGDKDVFASEVTPSDLQKQMGNLEDAETKDLLVAAEAFSELNHLSPVQGTEASLCAPSVYEGKIFTQKSKVPVLDEGLTSVETYTPAIRANDNKSMADVLGDGGNSSLTISEGPIVSERRLNQEVALNLKEDHEVEVGVLKESVDLPEEKLPISDSPPDTQEIHVIEQEKLEAQDSGEEARNLSFNELYPSGTLKLQYNFDTIDQQFCDLADNKDTAECDIAEVDGELFVAQSNFTLILEGEEGEVEPGDFASSDVLPKAANTATEEKLVCSGENDNHGQIANLPSAVTSDQKSQKVDTLPYVPEPIKVAIAENLLDVIKDTRSKEITSDTMEQSIHETIPLVSQNIMCPTKLVKSAFKTAQETSTMTMNVSQVDDVVSSKTRTRGQRIQNVNVKSAQQEASADVATPKMPGQSVRKKTRKAKEISEASENIYSDVRGLSQNQQIPQNSVTPRRGRRKKEVNQDILENTSSVEQELQITTGRESKRLKSSQLLEPAVEETTKKEVKVSSVTKRTPRRIKRSVENQESVEIINDLKVSTVTSPSRMIRKLRSTNLDASENTGNKQDDKSSDKQLRIKHVRRVRGREVSPSDVREDSNLESSQLTVQAEFDMSAIPRKRGRPRKINPSEDVGSKAVKEERSPKKKEAPSIRRRSTRNTPAKSENVDVGKPALGKSILVPNEELSMVMSSKKKLTKKTESQSQKRSLHSVSEERTDEMTHKETNEQEERLLATASFTKSSRSSRTRSSKAILLPDLSEPNNEPLFSPASEVPRKAKAKKIEVPAQLKELVSDLSSQFVISPPALRSRQKNTSNKNKLEDELKHRKRKCLVTSSHRNSADFPLG

SEQ ID NO: 2166 - DNA, 2682 bp, Homo sapiens
tacgcctaggagaggaaggagaaagaaagaagttaatcaggacatactagaaaacaccagttctgtggaacaagaattacagatcactacaggtagggaatcaaaaagattaaaatcatctcagctgttggaaccagcagttgaagaaactactaaaaaagaagttaaggtttcatctgttacaaaaaggactcctagaagaattaaaagatctgtagaaaatcaggaaagtgttgaaattataaatgatctaaaagttagtacggtaacaagtcctagcagaatgatcagaaaattgagaagtactaatttagatgcttctgaaaatacaggaaataagcaagatgataaatccagtgacaagcagctgcgtattaaacatgttagaagggtcagagggagagaagttagtccatcagatgtgagagaagactccaaccttgagtcatctcagttgactgttcaagcagaatttgatatgtctgccatacctagaaaacgtggtagaccaagaaaaatcaatccatctgaagatgtaggatctaaggctgttaaggaagagagaagccccaagaagaaagaagctcccagcattagaaggagatctacaagaaataccccagctaaaagtgaaaatgttgatgttggaaaaccagctttaggaaaatccattttagtgccaaacgaggaactttcgatggtgatgagctctaagaaaaaacttacaaaaaagactgaaagtcaaagccaaaaacgttcattgcactcagtatcagaagaacgcacagatgaaatgacacataaagaaacaaatgagcaggaagaaagattgctcgccacagcttccttcactaaatcatcccgcagcagcaggactcggtctagcaaggccatcttgttgccggacctttctgaaccaaacaatgagcctttattttctccagcgtcagaagttccaaggaaagcaaaagaaagatgatgcacaatcagtagaaactctgggaaagccaaaagcgaaacgaatcaggacgtcaaaaacaaaacaagcaagcaaaaacacagaaaaagaaagtgcttggtcacctcctcccatagaaattcggctgatttcccccttggctagcccagctgacggagtcaagagcaaaccaagaaaaactacagaagtgacaggaacaggtcttggaaggaacagaaagaaactgtcttcctatccaaagcaaattttacgcagaaaaatgctgtaatttcttgggaagattttaatgtacacctatttgtaaagtcatcagaatagtgtggattattaaatatctagtttggaagaaaataatttatataaattattgtaaatttttatgtaaacagaaggtcttcaataagtaaagtaactccatatggagtgattgtttcagtccaggcaatttttctattttatattaagacttcatacatttatatatgtaaatatggcttattaatggaatgttaaataaaatgtatacttcacagtcgtttgtgtcttggatttttgaaagggaggggatatctgtttaaatagttttatatgctcattggtctcattttctctataattaaaatactagaccagtcttaaaatggggatgattgaagtattgatatttctttttacagttactattttataatttatgcactttgattctgtgattcagatttctaatcagaaaatgtatttttttgtttttggctgttactatgttaaaattgaattatgggcatgtcattttgccatctttgtagtttcacaaattttgtgtaatctacctcaaatgaataatccaagtattggttaactataatgttggcatctcttattcggcaagcttaaaggctctttaaagtcttaattagtcaaagactaatccaggttagattgaccggttcactgctcacttgcaaccttatcaaagggtttgacaaagggaaatgtaaaataaatctgtttatggatattgagtgcatcttgtatgtgcctaatattgataggatgagatgtctgaacaaatttttataatattgctgtgaaggagcttgctattgaaccacagaaatcccttaatattcaggttttaaaactggcaaattctcacaggacctcaggcacagattattgaggttgggagagagtgagtagatgtagaaaaggagaaaaacaacacacgccctgttctctacagtacaactgtgtgcaattaagcaatggtacttgatgtaggctctaacactcatcaataaataagtgttgtaaaataatttataacaggtaatcgatagtgtgtaatgaatggactattaataattgattatctagaaacgaactgctttcgtgggcttttaatattttaatgtgaagcatatgcagtgtgctttctgcatttatttttctaccaaataatacagataatgagaaattggtgaaaatgcctacgcaaagtgttgacagtgtgaaagcagtgcgagtgcggccttttagtcaggttagtgatggatgttacgctgccttgttgaaaatttcactgactttgattttattacttttttaatgatagttatcaaacttgtatttaagctgcttgtcatttatggaatattgaacttatttaaatgaacttgttaaatgaataaagagctaaacat

SEQ ID NO: 2167 - protein, 231 aa, Homo sapiens; identical to SEQ ID NO: 2155

SEQ ID NO: 2168 - DNA, 8478 bp, Homo sapiens
tcgttacataatctcggaccggaggagcggcggcacatggcggcggagcggcgctggtggttcgcgtcctgcgccggcagtcgggtccctttacggacggccggggccgcgaccctttcccactgttctcccacgcgatggactcgttggcgggcctttccccgagggaagcggccggcgtgctgagcctgtcctgtgttggcgtgtgttccacatgcgcttgggcctggccacatggaagtatgcgagacttaagagctcaagtgactagtggtctcctgccatttccagaagtgactcttcaagcccttggagaagacgaaataacattagaatctgtgcttcgtggaaagtttgctgcagggaaaaatggacttgcttgcttggcttgtggtccacaacttgaggtagtaaactctataacaggagagcgattgtctgcttacagattcagtggagtcaatgaacagcctcctgtagttttagctgtgaaagaattctcttggcagaagagaactggattattaataggattggaagaaacagaagggagtgttctctgtctttatgaccttggaatatcaaaagtagttaaagcagttgttcttcctggaagggtaacagctattgaacctataattaatcatggaggagccagtgcaagcactcagcatttacatccaagtctgcgatggctttttggagtggcagctgtggtcactgatgttggacagatccttcttgttgacctatgtttggatgacttgtcatgcaatcaaaatgaagttgaagcatcagatcttgaagttctaactggtatcccagctgaagtaccacacattagagaaagtgtaatgagacaagggcgccatctgtgtttccagttagtaagtccaacaggaacagctgtttcaactcttagttacataagcaggacaaatcagcttgctgtaggtttttctgatggctatctagcactttggaacatgaaaagcatgaaaagagaatattacatacaattggaaagtggacaagttcctgtatatgctgtcacttttcaagaacctgagaatgatcctcggaattgctgttacttgtgggctgttcagtctacacaagatagtgaaggggatgttttgagtttgcatctgctgcagctggcctttggtaatagaaagtgtttggcatcaggacaaatcttatatgaggggttagaatactgtgaagaaagatacaccctggacctgacaggtggcatgttccctttgaggggacagacgagtaataccaaattgttgggatgccagagtatagagaaatttcgatctcatggtgacagggaggaaggcgtgaatgaagctctatcgcctgacactagtgtttcagtctttacctggcaggtgaatatatatggacagggaaagccttctgtatatttggggctttttgatataaatcgttggtatcatgcacaaatgccagattcgttaaggtcaggagaatatctacataattgctcttattttgcactgtggtcattggagtctgttgtaagtaggacttctccacatggcatcttggatatattagtacatgagagaagtttaaatagaggagtccctccttcatatccacctcccgagcagttttttaatccaagcacttataattttgatgccacttgtttgttaaactcgggagttgttcatttaacttgtactggctttcagaaggagactttgacttttttaaagaaatcaggtccatcactcaatgaactcattcctgatggttataatcgatgtcttgtagctggccttctttccccaagatttgttgatgttcagccttccagtttaagccaagaagaacagttagaagctatattgtcagcagcaattcagactagttccctgggacttttgactggttatatccgaagatggataacagaagaacaaccaaattctgccactaatttgcgctttgttcttgaatggacgtggaataaagtggttctcacaaaagaggaatttgacagactatgtgtgccattatttgatggttcgtgtcatttcatggatccacaaactatacagtctatccagcaatgctatttgcttcttagcaatcttaatatagtcttgagctgttttgcatcagaagcccgagagatcactgagagaggactgatagacttaagcaataagtttgtggtttcccacctcatctgtcagtatgcacaagtggttctttggttctctcattctgggcttttaccagaaggcatagatgattctgtgcagttgtcaaggttatgctacaactaccctgtaattcagaactactacaccagtcgtcgacagaagtttgagcgtttatcaagagggaagtggaatcccgattgcttgatgattgatggactggtttctcagttaggagagcgaattgagaagttgtggaaacgagatgaaggaggcacaggaaaatatcctcctgctagtctgcatgcagtacttgatatgtacctattagacggcgttactgaagcagccaaacactctattaccatttatttgctacttgatattatgtattcctttcccaacaaaacagacactcccattgaatctttcccaactgtatttgccatttcttggggccaagttaaacttattcaggggttttggttgatagatcataatgactatgagagtggtttggatcttttgtttcatccagctactgcaaaacctttgtcatggcaacattcaaagattattcaggcattcatgagtcagggcgagcacagacaagccctcagatatattcagacaatgaagccaacagtgtccagtggtaacgatgttatccttcacctcactgttttgctttttaataggtgtatggttgaagcctggaattttttgcggcaacattgcaataggttgaatatagaggagttactgaagcacatgtatgaagtctgtcaggaaatgggcttgatggaagatttactgaagttaccatttacagacactgagcaggaatgtttagtgaaatttttgcagtccagtgccagcgttcagaatcatgaattccttttagtgcaccatttgcagcgtgccaattatgtgcctgccttgaagctgaaccaaactctgaagattaatgttatgaatgatcgtgatcctcgtttgcgggagagatcactggctcgaaattctatattagaccagtatggaaaaatccttcctagagtccatcgaaaattagccattgaacgagctaagccttatcatctgtcaacatcatcagtttttcgattagtttctagacccaaaccattatcagcagttccaaagcaagttgtaacaggaactgtgttgacaagatctgttttcatcaacaatgtgttatctaaaattggagaagtttgggcaagcaaagaacctataaatagcaccacacctttcaatagttctaaaatagaagaaccatctcctatagtgtattcgctcccagctccagagctgcctgaggcattttttggaacaccaatttcaaaagcatcacaaaaaatttctagactgctagatttggttgttcagcctgtcccccggccttctcagtgttcggagtttattcagcaaagctccatgaaatctcctttgtacctagtatcccgttcactgccctcaagttcgcaattaaaaggatcgcctcaggccatctccagggcttcagaattacatttgcttgaaactcctcttgtagttaagaaagctaaaagtttggccatgtcagttactacttctggattttctgagttcactcctcagtccatcctgaggtctactcttcgatcaacacctttagcatctccctctccatcacctggaaggtctcctcaacgacttaaagaaactagaatttcatttgtggaagaagatgtccacccaaaatggattcctggggctgcagatgatagcaaattagaagtatttactacacctaaaaaatgtgcagttccagtggaaactgaatggctgaagagcaaagataggaccacatcttttttcctgaacagccctgaaaaggagcatcaagaaatggatgaggggtcacaaagtttagagaaactggatgtgagcaaaggaaacagcagtgtttcaatcacatccgatgagactaccttagagtatcaggatgcaccgtcaccggaagaccttgaagagactgttttcacggcctctaagcccaaaagctcttccactgcactaactactaatgtaactgaacaaactgaaaaggatggagataaagatgtatttgcatcagaagtaactccttcagacctacagaaacaaatgggcaatttagaagatgcagaaacaaaggatctcttagttgcagcagaggcattttcagaattgaatcacttaagcccggttcaaggaactgaagcttctctttgtgcaccatcagtctatgaagggaaaatcttcacccagaagtccaaggtaccagtgttggacgaaggattaacatctgttgaaacctacacccctgcaattagagcaaatgacaataaatctatggctgatgtccttggtgatggtggaaactcctcgctcactatctctgaaggtcctattgtctctgagcgcaggcttaaccaggaagtagcgctgaacttaaaagaagatcatgaagtagaagttggtgtactaaaagaaagtgttgacttaccagaagaaaagcttccaatttctgacagccctcctgatactcaagaaattcatgtgattgaacaagaaaagcttgaagctcaagattcaggagaagaggctaggaatctttcatttaatgagttatatccctctggaacacttaagcttcagtacaattttgatactattgaccaacagttttgtgacttagctgataacaaagacactgctgaatgtgacattgctgaagtagatggggaactttttgtggctcaaagcaactttaccttgatattggaaggtgaagaaggagaagttgagccaggtgattttgcatcatctgatgtgttacctaaagcagctaacacagcaactgaagaaaaacttgtatgcagtggggaaaatgataatcatggacaaattgcaaatttgccatctgccgtaactagtgaccaaaagtcccaaaaagtagacactttaccatatgtgcctgaacctattaaagtagcaattgcagaaaatttactagatgtaattaaagacacaagaagtaaagaaattacttcagatacaatggaacagtccattcatgaaacaatacctttagtgagccaaaacataatgtgtcccactaaattggtcaaatctgcatttaagactgctcaggaaacaagcacaatgactatgaatgtcagccaggttgatgacgtggtttcctccaaaactcgtacgagaggtcaacgtatccaaaacgtgaatgtcaaatcagcacaacaggaagcatcagcagatgttgctactcctaagatgccagggcagtcagtcaggaagaaaactaggaaggcaaaagaaatttctgaagcttctgaaaacatctattctgatgtcagaggactatctcagaaccagcaaatacctcaaaattctgttacgcctaggagaggaaggagaaagaaagaagttaatcaggacatactagaaaacaccagttctgtggaacaagaattacagatcactacaggtagggaatcaaaaagattaaaatcatctcagctgttggaaccagcagttgaagaaactactaaaaaagaagttaaggtttcatctgttacaaaaaggactcctagaagaattaaaagatctgtagaaaatcaggaaagtgttgaaattataaatgatctaaaagttagtacggtaacaagtcctagcagaatgatcagaaaattgagaagtactaatttagatgcttctgaaaatacaggaaataagcaagatgataaatccagtgacaagcagctgcgtattaaacatgttagaagggtcagagggagagaagttagtccatcagatgtgagagaagactccaaccttgagtcatctcagttgactgttcaagcagaatttgatatgtctgccatacctagaaaacgtggtagaccaagaaaaatcaatccatctgaagatgtaggatctaaggctgttaaggaagagagaagccccaagaagaaagaagctcccagcattagaaggagatctacaagaaataccccagctaaaagtgaaaatgttgatgttggaaaaccagctttaggaaaatccattttagtgccaaacgaggaactttcgatggtgatgagctctaagaaaaaacttacaaaaaagactgaaagtcaaagccaaaaacgttcattgcactcagtatcagaagaacgcacagatgaaatgacacataaagaaacaaatgagcaggaagaaagattgctcgccacagcttccttcactaaatcatcccgcagcagcaggactcggtctagcaaggccatcttgttgccggacctttctgaaccaaacaatgagcctttattttctccagcgtcagaagttccaaggaaagcaaaagctaaaaaaatagaggttcctgcacagctgaaagaattagtttcggatttatcttctcagtttgtcatctcacctcctgctttaaggagcagacaaaaaaacacatccaataagaacaagcttgaagatgaactgaaagatgatgcacaatcagtagaaactctgggaaagccaaaagcgaaacgaatcaggacgtcaaaaacaaaacaagcaagcaaaaacacagaaaaagaaagtgcttggtcacctcctcccatagaaattcggctgatttcccccttggctagcccagctgacggagtcaagagcaaaccaagaaaaactacagaagtgacaggaacaggtcttggaaggaacagaaagaaactgtcttcctatccaaagcaaattttacgcagaaaaatgctgtaatttcttgggaagattttaatgtacacctatttgtaaagtcatcagaatagtgtggattattaaatatctagtttggaagaaaataatttatataaattattgtaaatttttatgtaaacagaaggtcttcaataagtaaagtaactccatatggagtgattgtttcagtccaggcaatttttctattttatattaagacttcatacatttatatatgtaaatatggcttattaatggaatgttaaataaaatgtatacttcacagtcgtttgtgtcttggatttttgaaagggaggggatatctgtttaaatagttttatatgctcattggtctcattttctctataattaaaatactagaccagtcttaaaatggggatgattgaagtattgatatttctttttacagttactattttataatttatgcactttgattctgtgattcagatttctaatcagaaaatgtatttttttgtttttggctgttactatgttaaaattgaattatgggcatgtcattttgccatctttgtagtttcacaaattttgtgtaatctacctcaaatgaataatccaagtattggttaactataatgttggcatctcttattcggcaagcttaaaggctctttaaagtcttaattagtcaaagactaatccaggttagattgaccggttcactgctcacttgcaaccttatcaaagggtttgacaaagggaaatgtaaaataaatctgtttatggatattgagtgcatcttgtatgtgcctaatattgataggatgagatgtctgaacaaatttttataatattgctgtgaaggagcttgctattgaaccacagaaatcccttaatattcaggttttaaaactggcaaattctcacaggacctcaggcacagattattgaggttgggagagagtgagtagatgtagaaaaggagaaaaacaacacacgccctgttctctacagtacaactgtgtgcaattaagcaatggtacttgatgtaggctctaacactcatcaataaataagtgttgtaaaataatttataacaggtaatcgatagtgtgtaatgaatggactattaataattgattatctagaaacgaactgctttcgtgggcttttaatattttaatgtgaagcatatgcagtgtgctttctgcatttatttttctaccaaataatacagataatgagaaattggtgaaaatgcctacgcaaagtgttgacagtgtgaaagcagtgcgagtgcggccttttagtcaggttagtgatggatgttacgctgccttgttgaaaatttcactgactttgattttattacttttttaatgatagttatcaaacttgtatttaagctgcttgtcatttatggaatattgaacttatttaaatgaacttgttaaatgaataaagagctaaacat

SEQ ID NO: 2169 - protein, 2301 aa, Homo sapiens; identical to SEQ ID NO: 2159

SEQ ID NO: 2170 - DNA, 1514 bp, Homo sapiens
tacgcctaggagaggaaggagaaagaaagaagttaatcaggacatactagaaaacaccagttctgtggaacaagaattacagatcactacaggtagggaatcaaaaagattaaaatcatctcagctgttggaaccagcagttgaagaaactactaaaaaagaagttaaggtttcatctgttacaaaaaggactcctagaagaattaaaagatctgtagaaaatcaggaaagtgttgaaattataaatgatctaaaagttagtacggtaacaagtcctagcagaatgatcagaaaattgagaagtactaatttagatgcttctgaaaatacaggaaataagcaagatgataaatccagtgacaagcagctgcgtattaaacatgttagaagggtcagagggagagaagttagtccatcagatgtgagagaagactccaaccttgagtcatctcagttgactgttcaagcagaatttgatatgtctgccatacctagaaaacgtggtagaccaagaaaaatcaatccatctgaagatgtaggatctaaggctgttaaggaagagagaagccccaagaagaaagaagctcccagcattagaaggagatctacaagaaataccccagctaaaagtgaaaatgttgatgttggaaaaccagctttaggaaaatccattttagtgccaaacgaggaactttcgatggtgatgagctctaagaaaaaacttacaaaaaagactgaaagtcaaagccaaaaacgttcattgcactcagtatcagaagaacgcacagatgaaatgacacataaagaaacaaatgagcaggaagaaagattgctcgccacagcttccttcactaaatcatcccgcagcagcaggactcggtctagcaaggccatcttgttgccggacctttctgaaccaaacaatgagcctttattttctccagcgtcagaagttccaaggaaagcaaaagaaagatgatgcacaatcagtagaaactctgggaaagccaaaagcgaaacgaatcaggacgtcaaaaacaaaacaagcaagcaaaaacacagaaaaagaaagtgcttggtcacctcctcccatagaaattcggctgatttcccccttggctagcccagctgacggagtcaagagcaaaccaagaaaaactacagaagtgacaggaacaggtcttggaaggaacagaaagaaactgtcttcctatccaaagcaaattttacgcagaaaaatgctgtaatttcttgggaagattttaatgtacacctatttgtaaagtcatcagaatagtgtggattattaaatatctagtttggaagaaaataatttatataaattattgtaaatttttatgtaaacagaaggtcttcaataagtaaagtaactccatatggagtgattgtttcagtccaggcaatttttctattttatattaagacttcatacatttatatatgtaaatatggcttattaatggaatgttaaataaaatgtatacttcacagtc

SEQ ID NO: 2171 - protein, 231 aa, Homo sapiens; identical to SEQ ID NO: 2155

SEQ ID NO: 2172 - DNA, 7192 bp, Homo sapiens
tggggctcgagggggcgagcggtggcggtggcgggtacggcaggctcgcgggcgccgggcttcgttacataatctcggaccggaggagcggcggcacatggcggcggagcggcgctgtggaagtatgcgagacttaagagctcaagtgactagtggtctcctgccatttccagaagtgactcttcaagcccttggagaagacgaaataacattagaatctgtgcttcgtggaaagtttgctgcagggaaaaatggacttgcttgcttggcttgtggtccacaacttgaggtagtaaactctataacaggagagcgattgtctgcttacagattcagtggagtcaatgaacagcctcctgtagttttagctgtgaaagaattctcttggcagaagagaactggattattaataggattggaagaaacagaagggagtgttctctgtctttatgaccttggaatatcaaaagtagttaaagcagttgttcttcctggaagggtaacagctattgaacctataattaatcatggaggagccagtgcaagcactcagcatttacatccaagtctgcgatggctttttggagtggcagctgtggtcactgatgttggacagatccttcttgttgacctatgtttggatgacttgtcatgcaatcaaaatgaagttgaagcatcagatcttgaagttctaactggtatcccagctgaagtaccacacattagagaaagtgtaatgagacaagggcgccatctgtgtttccagttagtaagtccaacaggaacagctgtttcaactcttagttacataagcaggacaaatcagcttgctgtaggtttttctgatggctatctagcactttggaacatgaaaagcatgaaaagagaatattacatacaattggaaagtggacaagttcctgtatatgctgtcacttttcaagaacctgagaatgatcctcggaattgctgttacttgtgggctgttcagtctacacaagatagtgaaggggatgttttgagtttgcatctgctgcagctggcctttggtaatagaaagtgtttggcatcaggacaaatcttatatgaggggttagaatactgtgaagaaagatacaccctggacctgacaggtggcatgttccctttgaggggacagacgagtaataccaaattgttgggatgccagagtatagagaaatttcgatctcatggtgacagggaggaaggcgtgaatgaagctctatcgcctgacactagtgtttcagtctttacctggcaggtgaatatatatggacagggaaagccttctgtatatttggggctttttgatataaatcgttggtatcatgcacaaatgccagattcgttaaggtcaggagaatatctacataattgctcttattttgcactgtggtcattggagtctgttgtaagtaggacttctccacatggcatcttggatatattagtacatgagagaagtttaaatagaggagtccctccttcatatccacctcccgagcagttttttaatccaagcacttataattttgatgccacttgtttgttaaactcgggagttgttcatttaacttgtactggctttcagaaggagactttgacttttttaaagaaatcaggtccatcactcaatgaactcattcctgatggttataatcgatgtcttgtagctggccttctttccccaagatttgttgatgttcagccttccagtttaagccaagaagaacagttagaagctatattgtcagcagcaattcagactagttccctgggacttttgactggttatatccgaagatggataacagaagaacaaccaaattctgccactaatttgcgctttgttcttgaatggacgtggaataaagtggttctcacaaaagaggaatttgacagactatgtgtgccattatttgatggttcgtgtcatttcatggatccacaaactatacagtctatccagcaatgctatttgcttcttagcaatcttaatatagtcttgagctgttttgcatcagaagcccgagagatcactgagagaggactgatagacttaagcaataagtttgtggtttcccacctcatctgtcagtatgcacaagtggttctttggttctctcattctgggcttttaccagaaggcatagatgattctgtgcagttgtcaaggttatgctacaactaccctgtaattcagaactactacaccagtcgtcgacagaagtttgagcgtttatcaagagggaagtggaatcccgattgcttgatgattgatggactggtttctcagttaggagagcgaattgagaagttgtggaaacgagatgaaggaggcacaggaaaatatcctcctgctagtctgcatgcagtacttgatatgtacctattagacggcgttactgaagcagccaaacactctattaccatttatttgctacttgatattatgtattcctttcccaacaaaacagacactcccattgaatctttcccaactgtatttgccatttcttggggccaagttaaacttattcaggggttttggttgatagatcataatgactatgagagtggtttggatcttttgtttcatccagctactgcaaaacctttgtcatggcaacattcaaagattattcaggcattcatgagtcagggcgagcacagacaagccctcagatatattcagacaatgaagccaacagtgtccagtggtaacgatgttatccttcacctcactgttttgctttttaataggtgtatggttgaagcctggaattttttgcggcaacattgcaataggttgaatatagaggagttactgaagcacatgtatgaagtctgtcaggaaatgggcttgatggaagatttactgaagttaccatttacagacactgagcaggaatgtttagtgaaatttttgcagtccagtgccagcgttcagaatcatgaattccttttagtgcaccatttgcagcgtgccaattatgtgcctgccttgaagctgaaccaaactctgaagattaatgttatgaatgatcgtgatcctcgtttgcgggagagatcactggctcgaaattctatattagaccagtatggaaaaatccttcctagagtccatcgaaaattagccattgaacgagctaagccttatcatctgtcaacatcatcagtttttcgattagtttctagacccaaaccattatcagcagttccaaagcaagttgtaacaggaactgtgttgacaagatctgttttcatcaacaatgtgttatctaaaattggagaagtttgggcaagcaaagaacctataaatagcaccacacctttcaatagttctaaaatagaagaaccatctcctatagtgtattcgctcccagctccagagctgcctgaggcattttttggaacaccaatttcaaaagcatcacaaaaaatttctagactgctagatttggttgttcagcctgtcccccggccttctcagtgttcggagtttattcagcaaagctccatgaaatctcctttgtacctagtatcccgttcactgccctcaagttcgcaattaaaaggatcgcctcaggccatctccagggcttcagaattacatttgcttgaaactcctcttgtagttaagaaagctaaaagtttggccatgtcagttactacttctggattttctgagttcactcctcagtccatcctgaggtctactcttcgatcaacacctttagcatctccctctccatcacctggaaggtctcctcaacgacttaaagaaactagaatttcatttgtggaagaagatgtccacccaaaatggattcctggggctgcagatgatagcaaattagaagtatttactacacctaaaaaatgtgcagttccagtggaaactgaatggctgaagagcaaagataggaccacatcttttttcctgaacagccctgaaaaggagcatcaagaaatggatgaggggtcacaaagtttagagaaactggatgtgagcaaaggaaacagcagtgtttcaatcacatccgatgagactaccttagagtatcaggatgcaccgtcaccggaagaccttgaagagactgttttcacggcctctaagcccaaaagctcttccactgcactaactactaatgtaactgaacaaactgaaaaggatggagataaagatgtatttgcatcagaagtaactccttcagacctacagaaacaaatgggcaatttagaagatgcagaaacaaaggatctcttagttgcagcagaggcattttcagaattgaatcacttaagcccggttcaaggaactgaagcttctctttgtgcaccatcagtctatgaagggaaaatcttcacccagaagtccaaggtaccagtgttggacgaaggattaacatctgttgaaacctacacccctgcaattagagcaaatgacaataaatctatggctgatgtccttggtgatggtggaaactcctcgctcactatctctgaaggtcctattgtctctgagcgcaggcttaaccaggaagtagcgctgaacttaaaagaagatcatgaagtagaagttggtgtactaaaagaaagtgttgacttaccagaagaaaagcttccaatttctgacagccctcctgatactcaagaaattcatgtgattgaacaagaaaagcttgaagctcaagattcaggagaagaggctaggaatctttcatttaatgagttatatccctctggaacacttaagcttcagtacaattttgatactattgaccaacagttttgtgacttagctgataacaaagacactgctgaatgtgacattgctgaagtagatggggaactttttgtggctcaaagcaactttaccttgatattggaaggtgaagaaggagaagttgagccaggtgattttgcatcatctgatgtgttacctaaagcagctaacacagcaactgaagaaaaacttgtatgcagtggggaaaatgataatcatggacaaattgcaaatttgccatctgccgtaactagtgaccaaaagtcccaaaaagtagacactttaccatatgtgcctgaacctattaaagtagcaattgcagaaaatttactagatgtaattaaagacacaagaagtaaagaaattacttcagatacaatggaacagtccattcatgaaacaatacctttagtgagccaaaacataatgtgtcccactaaattggtcaaatctgcatttaagactgctcaggaaacaagcacaatgactatgaatgtcagccaggttgatgacgtggtttcctccaaaactcgtacgagaggtcaacgtatccaaaacgtgaatgtcaaatcagcacaacaggaagcatcagcagatgttgctactcctaagatgccagggcagtcagtcaggaagaaaactaggaaggcaaaagaaatttctgaagcttctgaaaacatctattctgatgtcagaggactatctcagaaccagcaaatacctcaaaattctgttacgcctaggagaggaaggagaaagaaagaagttaatcaggacatactagaaaacaccagttctgtggaacaagaattacagatcactacaggtagggaatcaaaaagattaaaatcatctcagctgttggaaccagcagttgaagaaactactaaaaaagaagttaaggtttcatctgttacaaaaaggactcctagaagaattaaaagatctgtagaaaatcaggaaagtgttgaaattataaatgatctaaaagttagtacggtaacaagtcctagcagaatgatcagaaaattgagaagtactaatttagatgcttctgaaaatacaggaaataagcaagatgataaatccagtgacaagcagctgcgtattaaacatgttagaagggtcagagggagagaagttagtccatcagatgtgagagaagactccaaccttgagtcatctcagttgactgttcaagcagaatttgatatgtctgccatacctagaaaacgtggtagaccaagaaaaatcaatccatctgaagatgtaggatctaaggctgttaaggaagagagaagccccaagaagaaagaagctcccagcattagaaggagatctacaagaaataccccagctaaaagtgaaaatgttgatgttggaaaaccagctttaggaaaatccattttagtgccaaacgaggaactttcgatggtgatgagctctaagaaaaaacttacaaaaaagactgaaagtcaaagccaaaaacgttcattgcactcagtatcagaagaacgcacagatgaaatgacacataaagaaacaaatgagcaggaagaaagattgctcgccacagcttccttcactaaatcatcccgcagcagcaggactcggtctagcaaggccatcttgttgccggacctttctgaaccaaacaatgagcctttattttctccagcgtcagaagttccaaggaaagcaaaagctaaaaaaatagaggttcctgcacagctgaaagaattagtttcggatttatcttctcagtttgtcatctcacctcctgctttaaggagcagacaaaaaaacacatccaataagaacaagcttgaagatgaactgaaagatgatgcacaatcagtagaaactctgggaaagccaaaagcgaaacgaatcaggacgtcaaaaacaaaacaagcaagcaaaaacacagaaaaagaaagtgcttggtcacctcctcccatagaaattcggctgatttcccccttggctagcccagctgacggagtcaagagcaaaccaagaaaaactacagaagtgacaggaacaggtcttggaaggaacagaaagaaactgtcttcctatccaaagcaaattttacgcagaaaaatgctgtaatttcttgggaagattttaatgtacacctatttgtaaagtcatcagaatagtgtggattattaaatatctagtttggaagaaaataatttatataaattattgtaaatttttatgtaaacagaaggtcttcaataagtaaagtaactccatatggagtgattgtttcagtccaggcaatttttctattttatattaagacttcatacatttatatatgtaaatatggcttattaatggaatgttaaataaaatgtatacttcacagtc

SEQ ID NO: 2173 - protein, 2275 aa, Homo sapiens
MAAERRCGSMRDLRAQVTSGLLPFPEVTLQALGEDEITLESVLRGKFAAGKNGLACLACGPQLEVVNSITGERLSAYRFSGVNEQPPVVLAVKEFSWQKRTGLLIGLEETEGSVLCLYDLGISKVVKAVVLPGRVTAIEPIINHGGASASTQHLHPSLRWLFGVAAVVTDVGQILLVDLCLDDLSCNQNEVEASDLEVLTGIPAEVPHIRESVMRQGRHLCFQLVSPTGTAVSTLSYISRTNQLAVGFSDGYLALWNMKSMKREYYIQLESGQVPVYAVTFQEPENDPRNCCYLWAVQSTQDSEGDVLSLHLLQLAFGNRKCLASGQILYEGLEYCEERYTLDLTGGMFPLRGQTSNTKLLGCQSIEKFRSHGDREEGVNEALSPDTSVSVFTWQVNIYGQGKPSVYLGLFDINRWYHAQMPDSLRSGEYLHNCSYFALWSLESVVSRTSPHGILDILVHERSLNRGVPPSYPPPEQFFNPSTYNFDATCLLNSGVVHLTCTGFQKETLTFLKKSGPSLNELIPDGYNRCLVAGLLSPRFVDVQPSSLSQEEQLEAILSAAIQTSSLGLLTGYIRRWITEEQPNSATNLRFVLEWTWNKVVLTKEEFDRLCVPLFDGSCHFMDPQTIQSIQQCYLLLSNLNIVLSCFASEAREITERGLIDLSNKFVVSHLICQYAQVVLWFSHSGLLPEGIDDSVQLSRLCYNYPVIQNYYTSRRQKFERLSRGKWNPDCLMIDGLVSQLGERIEKLWKRDEGGTGKYPPASLHAVLDMYLLDGVTEAAKHSITIYLLLDIMYSFPNKTDTPIESFPTVFAISWGQVKLIQGFWLIDHNDYESGLDLLFHPATAKPLSWQHSKIIQAFMSQGEHRQALRYIQTMKPTVSSGNDVILHLTVLLFNRCMVEAWNFLRQHCNRLNIEELLKHMYEVCQEMGLMEDLLKLPFTDTEQECLVKFLQSSASVQNHEFLLVHHLQRANYVPALKLNQTLKINVMNDRDPRLRERSLARNSILDQYGKILPRVHRKLAIERAKPYHLSTSSVFRLVSRPKPLSAVPKQVVTGTVLTRSVFINNVLSKIGEVWASKEPINSTTPFNSSKIEEPSPIVYSLPAPELPEAFFGTPISKASQKISRLLDLVVQPVPRPSQCSEFIQQSSMKSPLYLVSRSLPSSSQLKGSPQAISRASELHLLETPLVVKKAKSLAMSVTTSGFSEFTPQSILRSTLRSTPLASPSPSPGRSPQRLKETRISFVEEDVHPKWIPGAADDSKLEVFTTPKKCAVPVETEWLKSKDRTTSFFLNSPEKEHQEMDEGSQSLEKLDVSKGNSSVSITSDETTLEYQDAPSPEDLEETVFTASKPKSSSTALTTNVTEQTEKDGDKDVFASEVTPSDLQKQMGNLEDAETKDLLVAAEAFSELNHLSPVQGTEASLCAPSVYEGKIFTQKSKVPVLDEGLTSVETYTPAIRANDNKSMADVLGDGGNSSLTISEGPIVSERRLNQEVALNLKEDHEVEVGVLKESVDLPEEKLPISDSPPDTQEIHVIEQEKLEAQDSGEEARNLSFNELYPSGTLKLQYNFDTIDQQFCDLADNKDTAECDIAEVDGELFVAQSNFTLILEGEEGEVEPGDFASSDVLPKAANTATEEKLVCSGENDNHGQIANLPSAVTSDQKSQKVDTLPYVPEPIKVAIAENLLDVIKDTRSKEITSDTMEQSIHETIPLVSQNIMCPTKLVKSAFKTAQETSTMTMNVSQVDDVVSSKTRTRGQRIQNVNVKSAQQEASADVATPKMPGQSVRKKTRKAKEISEASENIYSDVRGLSQNQQIPQNSVTPRRGRRKKEVNQDILENTSSVEQELQITTGRESKRLKSSQLLEPAVEETTKKEVKVSSVTKRTPRRIKRSVENQESVEIINDLKVSTVTSPSRMIRKLRSTNLDASENTGNKQDDKSSDKQLRIKHVRRVRGREVSPSDVREDSNLESSQLTVQAEFDMSAIPRKRGRPRKINPSEDVGSKAVKEERSPKKKEAPSIRRRSTRNTPAKSENVDVGKPALGKSILVPNEELSMVMSSKKKLTKKTESQSQKRSLHSVSEERTDEMTHKETNEQEERLLATASFTKSSRSSRTRSSKAILLPDLSEPNNEPLFSPASEVPRKAKAKKIEVPAQLKELVSDLSSQFVISPPALRSRQKNTSNKNKLEDELKDDAQSVETLGKPKAKRIRTSKTKQASKNTEKESAWSPPPIEIRLISPLASPADGVKSKPRKTTEVTGTGLGRNRKKLSSYPKQILRRKML

SEQ ID NO: 2174 - DNA, 1028 bp, Homo sapiens
cgtctgctgcctctcggagagtcccgggtgactgccgcaggctccatcgccctgtggcctgcaggtattgcgagatttatagggaggacgctgggacccccaaaagctgggaaatgggactattggcattcagggatgtggctctagaattctctccagaggagtgggaatgcctggacccagctcagcggagtttgtatagggatgtgatgttagagaactacagaaacctgatctcccttggtgaggatagcttcaatatgcaattcctatttcacagtcttgctatgtctaagccagaactgatcatctgtctggaggcaaggaaagagccctggaacgtgaacacagagaagacagccagacactcagttttgtcttcttatcttactgaagacattttgccagagcagggcctgcaagtttcattccaaaaagtgatgctgagaagatatgaaagatgttgtcttgagaaattacgcttaaggaatgactgggaaattgtgggtgaggtccagtcgtcgaccatcgagctgctttgaagaccctgcggaggttccgtcgctgcttgaacacagtgcctggactccctgctccgtgaggcgaatttacaccgggtccagctgcgtcagcccgagttctgaattaaaacatgcctcccacagaatctatttctgatgaatatgaaaggaagattgttcttccatgttggtttttattgagatatctctttttttcccttttcatttggttgtcctaactccatgaatagaaaagaaaatgtattaattcattttttaattttcttttttattattttgttagtgtttcactttttttctgcactacacagatgtagtgtattcattcatttttttaaaaaaaaaggctgggtgcagtggctcacacctgtgatcccagcactttgggaggctgaggcaggtgaatcacgaggtcagaagttcgagaccagcctggccaagatggtgaaagcccgtttctactaaaaataaaaaaaaaaaaattag

SEQ ID NO: 2175 - protein, 142 aa, Homo sapiens
MGLLAFRDVALEFSPEEWECLDPAQRSLYRDVMLENYRNLISLGEDSFNMQFLFHSLAMSKPELIICLEARKEPWNVNTEKTARHSVLSSYLTEDILPEQGLQVSFQKVMLRRYERCCLEKLRLRNDWEIVGEVQSSTIELL

SEQ ID NO: 2176 - DNA, 1019 bp, Homo sapiens
gtctccttgcggccggcggggtgctgggttcccgtctgctgcctctcggagagtcccgggtgactgccgcaggctccatcgccctgtggcctgcaggtattgcgagatttatagggaggacgctgggacccccaaaagctgggaaatgggactattggcattcagggatgtggctctagaattctctccagaggagtgggaatgcctggacccagctcagcggagtttgtatagggatgtgatgttagagaactacagaaacctgatctcccttggtgaggatagcttcaatatgcaattcctatttcacagtcttgctatgtctaagccagaactgatcatctgtctggaggcaaggaaagagccctggaacgtgaacacagagaagacagccagacactcagccatgtgaagatgtgcttgcttcccctttgccttctgccatgattctaagtttcctgaggcctccccagaagcagaagcatgtaaagcccacagaaccggtccagtcgtcgaccatcgagctgctttgaagaccctgcggaggttccgtcgctgcttgaacacagtgcctggactccctgctccgtgaggcgaatttacaccgggtccagctgcgtcagcccgagttctgaattaaaacatgcctcccacagaatctatttctgatgaatatgaaaggaagattgttcttccatgttggtttttattgagatatctctttttttcccttttcatttggttgtcctaactccatgaatagaaaagaaaatgtattaattcattttttaattttcttttttattattttgttagtgtttcactttttttctgcactacacagatgtagtgtattcattcatttttttaaaaaaaaaggctgggtgcagtggctcacacctgtgatcccagcactttgggaggctgaggcaggtgaatcacgaggtcagaagttcgagaccagcctggccaagatggtgaaagcccgtttctactaaaaataaaaaaaaaaaaattag

SEQ ID NO: 2177 - protein, 88 aa, Homo sapiens
MGLLAFRDVALEFSPEEWECLDPAQRSLYRDVMLENYRNLISLGEDSFNMQFLFHSLAMSKPELIICLEARKEPWNVNTEKTARHSAM

SEQ ID NO: 2178 - DNA, 1278 bp, Homo sapiens
tggcgagctcggtgcgtctccgctgctccttccccttatccctgggaggtccaagtggtcccgcggcagcttctgttgctctgggacctgcaggtcccggaaggtccttagggaggaccccagacaccggagactgggaaatgggactattggcattcagggatgtggctctagaattctctccagaggagtgggaatgcctggacccagctcagcggagtttgtatagggatgtgatgttagagaactacagaaacctgatctcccttggtcttgctatgtctaagccagaactgatcatctgtctggaggcaaggaaagagccctggaacgtgaacacagagaagacagccagacactcagttttgtcttcttatcttactgaagacattttgccagagcagggcctgcaagtttcattccaaaaagtgatgctgagaagatatgaaagatgttgtcttgagaaattacgcttaaggaatgactgggaaattgtggtagagacggggtttcaccgtgttagccaggatggtctcaatctcctgacctcgtgatccgcctgtctcggcctcccaaagtgctgggattacagacgtgagccactgcacccggccagcataagatttttatatgagtaattgggaaggcttctataaatataagccatgtgaagatgtgcttgcttcccctttgccttctgccatgattctaagtttcctgaggcctccccagaagcagaagcatgtaaagcccacagaaccggtccagtcgtcgaccatcgagctgctttgaagaccctgcggaggttccgtcgctgcttgaacacagtgcctggactccctgctccgtgaggcgaatttacaccgggtccagctgcgtcagcccgagttctgaattaaaacatgcctcccacagaatctatttctgatgaatatgaaaggaagattgttcttccatgttggtttttattgagatatctctttttttcccttttcatttggttgtcctaactccatgaatagaaaagaaaatgtattaattcattttttaattttcttttttattattttgttagtgtttcactttttttctgcactacacagatgtagtgtattcattcatttttttaaaaaaaaaggctgggtgcagtggctcacacctgtgatcccagcactttgggaggctgaggcaggtgaatcacgaggtcagaagttcgagaccagcctggccaagatggtgaaagcccgtttctactaaaaataaaaaaaaaaaaattag

SEQ ID NO: 2179 - protein, 137 aa, Homo sapiens
MGLLAFRDVALEFSPEEWECLDPAQRSLYRDVMLENYRNLISLGLAMSKPELIICLEARKEPWNVNTEKTARHSVLSSYLTEDILPEQGLQVSFQKVMLRRYERCCLEKLRLRNDWEIVVETGFHRVSQDGLNLLTS

SEQ ID NO: 2180 - DNA, 787 bp, Homo sapiens
cgtctgctgcctctcggagagtcccgggtgactgccgcaggctccatcgccctgtggcctgcaggtattgcgagatttatagggaggacgctgggacccccaaaagctgggaaatgggactattggcattcagggatgtggctctagaattctctccagaggagtgggaatgcctggacccagctcagcggagtttgtatagggatgtgatgttagagaactacagaaacctgatctcccttggtgaggatagcttcaatatgcaattcctatttcacagtcttgctatgtctaagccagaactgatcatctgtctggaggcaaggaaagagccctggaacgtgaacacagagaagacagccagacactcagttttgtcttcttatcttactgaagacattttgccagagcagggcctgcaagtttcattccaaaaagtgatgctgagaagatatgaaagatgttgtcttgagaaattacgcttaaggaatgactgggaaattgtgggtgaggtccagtcgtcgaccatcgagctgctttgaagaccctgcggaggttccgtcgctgcttgaacacagtgcctggactccctgctccgtgaggcgaatttacaccgggtccagctgcgtcagcccgagttctgaattaaaacatgcctcccacagaatctatttctgatgaatatgaaaggaagattgttcttccatgttggtttttattgagatatctctttttttcccttttcatttggttgtcctaactccatgaatagaaaagaaaatgtatt

SEQ ID NO: 2181 - protein, 142 aa, Homo sapiens; identical to SEQ ID NO: 2175

SEQ ID NO: 2182 - DNA, 672 bp, Homo sapiens
ctgggttcccgtctgctgcctctcggagagtcccgggtgactgccgcaggctccatcgccctgtggcctgcaggtattgcgagatttatagggaggacgctgggacccccaaaagctgggaaatgggactattggcattcagggatgtggctctagaattctctccagaggagtgggaatgcctggacccagctcagcggagtttgtatagggatgtgatgttagagaactacagaaacctgatctcccttggtgaggatagcttcaatatgcaattcctatttcacagtcttgctatgtctaagccagaactgatcatctgtctggaggcaaggaaagagccctggaacgtgaacacagagaagacagccagacactcagttttgtcttcttatcttactgaagacattttgccagagcagggcctgcaagtttcattccaaaaagtgatgctgagaagatatgaaagatgttgtcttgagaaattacgcttaaggaatgactgggaaattgtgggtgaggtccagtcgtcgaccatcgagctgctttgaagaccctgcggaggttccgtcgctgcttgaacacagtgcctggactccctgctccgtgaggcgaatttacaccgggtccagctgcgtcagcccgagttctgaattaaaacatgcctcccac

SEQ ID NO: 2183 - protein, 142 aa, Homo sapiens; identical to SEQ ID NO: 2175

SEQ ID NO: 2184 - DNA, 504 bp, Homo sapiens
gttcccgtctgctgcctctcggagagtcccgggtgactgccgcaggctccatcgccctgtggcctgcaggtattgcgagatttatagggaggacgctgggacccccaaaagctgggaaatgttttgtcttcttatcttactgaagacattttgccagagcagggcctgcaagtttcattccaaaaagtgatgctgagaagatatgaaagatgttgtcttgagaaattacgcttaaggaatgactgggaaattgtggccatgtgaagatgtgcttgcttcccctttgccttctgccatgattctaagtttcctgaggcctccccagaagcagaagcatgtaaagcccacagaaccggtccagtcgtcgaccatcgagctgctttgaagaccctgcggaggttccgtcgctgcttgaacacagtgcctggactccctgctccgtgaggcgaatttacaccgggtccagctgcgtcagcccgagttctgaattaaaacatgcctccc

SEQ ID NO: 2185 - protein, 48 aa, Homo sapiens
MTGKLWPCEDVLASPLPSAMILSFLRPPQKQKHVKPTEPVQSSTIELL

SEQ ID NO: 2186 - DNA, 2751 bp, Homo sapiens
actctcaagcgcgccgcgaaaggagggagcagcttccgggacctggcgcggcttttgtgttgggcagcgcgaatgtggcgagctcggtgcgtctccgctgctccttccccttatccctgggaggtccaagtggtcccgcggcagcttctgttgctctgggacctgcaggtcccggaaggtccttagggaggaccccagacaccggagactgggaaatgggactattggcattcagggatgtggctctagaattctctccagaggagtgggaatgcctggacccagctcagcggagtttgtatagggatgtgatgttagagaactacagaaacctgatctcccttggtcttgctatgtctaagccagaactgatcatctgtctggaggcaaggaaagagccctggaacgtgaacacagagaagacagccagacactcagtagagacgaggtttcgccatgttggccaggctggtctcaaactccttacctcaggtgatccacctgccttggcctcccaaagtgctgggattacaggcacgggccaccactgccagcctatttgtgtattctgaattatatttaaccattcatttggtgagttttgtcttcttatcttactgaagacattttgccagagcagggcctgcaagtttcattccaaaaagtgatgctgagaagatatgaaagatgttgtcttgagaaattacgcttaaggaatgactgggaaattgtggattatccagactcaggtagttctttataacaatgtgagaatgaactaatacagaaaagtggtaccagagagttgggacattgctataaagatacctgaaaatgtggaagtgactttggaactgggtaacaggcagaagttggaagagtttggagggctcagaagaagacaggaagataaggaaaagtttggaacttcctagagacttgttgaatggttgtaaccaaaatgctgatggtgatatggacaatgaagtccaggctgaggagttctcagatggagatgaggaccttattgggagctacagtaaaggtcactcttgctatgctttagcaaagagactagtggcattgtgcccctgctatagggatctgttgaactttgaacttgagagagatgatttagggtatctggcagaaaatatttctaagtagcaaagcattcaagatatggcctggctccttctaacagtgtatgctcatatttctgaggaaagagattatctgaaactggaacttacatttaaaagggaaatggagtattaaagtttggaaatgtgcagcctagccatgtattagaaaagaaaaaaccattttctggggaggaattcaacctagctgcaaaaatttgtgtaagtaaagaggagccgtatgttaacagccaagacaatgggaaaaatgcccccaagacatttcagagactttcgtggcagcccctctcatcacaggcctggaggcctaggagggaaaaacagttttgtgggtcaggcttagggccctgctattctgtgcagccttgggaccctgttccctgtgctttagctgctccagctccagccatggctaaaaggactccagatatgtttcaggttgctgctccagagggtataagacacaagccttggaggcttccagatggtgttaagcctgcaggtgctcagagggcaagagttgaggcttgggagcctccattctttcagatttctgaggatgtatggaaacaactggatatccaggcagaaatttgcttcaggggcggagcccttgtggagaacctctactagggtactgtggaggggaaatatggggttgaagtccccacaaagagtctccactggggcactgccaagtggagctgtgagaagagggccactgtcctccacaccccagaatggtagctccatcaacagtttgcactgtgtgcttggaaaagccacaggcactcaacaccagcctgtgagagcggccatggggcactaagccctgcagagccgccagaagcagagctgtccaagaccttgggagcctaccccttgcatcagtgtggcctggatgttagacatggaatcaaaggatattattttggagctctaagatttaatgactgccctgctgggtttcggacttgcatggggcctgtaacccctttgttttggccaatgtctcccttttggaacaggaacatttacccaatgcctgtacccttattgtatcctagatgtaactaacttgcttttgattttacaggctcataggcagaagggactgccttatctcagatgaaactttggacttggacttttgagttaatgctgaaatgagttaagactttgggagactgtttggaaagcataattgtgttttgaaatgtgaggacatgatatttgggatgggccaggagtggaatgatatggtttggctctgtgtccccacccaaatttcatgtcaaattgtaatcttcaatgttggaggagggtcctggtgggaaggtaattggatcatgggggcagacttctcctttgctgttctcatgatgagtgagttctcatgatacttgattgtttaaaagtgtatagcatttccccctttgctctctctctcctgccagccatgtgaagatgtgcttgcttcccctttgccttctgccatgattctaagtttcctgaggcctccccagaagcagaagcatgtaaagcccacagaaccgtgagttgattaaatctcttttctttataaatt

SEQ ID NO: 2187 - protein, 118 aa, Homo sapiens
MGLLAFRDVALEFSPEEWECLDPAQRSLYRDVMLENYRNLISLGLAMSKPELIICLEARKEPWNVNTEKTARHSVETRFRHVGQAGLKLLTSGDPPALASQSAGITGTGHHCQPICVF

SEQ ID NO: 2188 - DNA, 683 bp, Homo sapiens
agagaggaaggggcggccttggggatctggcggggcctttgtctccttgcggccggcggggtgctgggttcccgtctgctgcctctcggagagtcccgggtgactgccgcaggctccatcgccctgtggcctgcaggtattgcgagatttatagggaggacgctgggacccccaaaagctgggaaatgggactattggcattcagggatgtggctctagaattctctccagaggagtgggaatgcctggacccagctcagcggagtttgtatagggatgtgatgttagagaactacagaaacctgatctcccttggtgaggatagcttcaatatgcaattcctatttcacagtcttgctatgtctaagccagaactgatcatctgtctggaggcaaggaaagagccctggaacgtgaacacagagaagacagccagacactcagttttgtcttcttatcttactgaagacattttgccagagcagggcctgcaagtttcattccaaaaagtgatgctgagaagatatgaaagatgttgtcttgagaaattacgcttaaggaatgactgggaaattgtggccatgtgaagatgtgcttgcttcccctttgccttctgccatgattctaagtttcctgaggcctccccagaagcagaagcatgtaaagcccacagaaccgtgagt

SEQ ID NO: 2189 - protein, 133 aa, Homo sapiens
MGLLAFRDVALEFSPEEWECLDPAQRSLYRDVMLENYRNLISLGEDSFNMQFLFHSLAMSKPELIICLEARKEPWNVNTEKTARHSVLSSYLTEDILPEQGLQVSFQKVMLRRYERCCLEKLRLRNDWEIVAM

SEQ ID NO: 2190 - DNA, 589 bp, Homo sapiens
ggcggggtgctgggttcccgtctgctgcctctcggagagtcccgggtgactgccgcaggctccatcgccctgtggcctgcaggtattgcgagatttatagggaggacgctgggacccccaaaagctgggaaatgggactattggcattcagggatgtggctctagaattctctccagaggagtgggaatgcctggacccagctcagcggagtttgtatagggatgtgatgttagagaactacagaaacctgatctcccttggtgaggatagcttcaatatgcaattcctatttcacagtcttgctatgtctaagccagaactgatcatctgtctggaggcaaggaaagagccctggaacgtgaacacagagaagacagccagacactcagttttgtcttcttatcttactgaagacattttgccagagcagggcctgcaagtttcattccaaaaagtgatgctgagaagatatgaaagatgttgtcttgagaaattacgcttaaggaatgactgggaaattgtgggtgagtggaaagggcagaaggcaagttataatggacttgacctatgctcagcaactactcatag

SEQ ID NO: 2191 - protein, 151 aa, Homo sapiens
MGLLAFRDVALEFSPEEWECLDPAQRSLYRDVMLENYRNLISLGEDSFNMQFLFHSLAMSKPELIICLEARKEPWNVNTEKTARHSVLSSYLTEDILPEQGLQVSFQKVMLRRYERCCLEKLRLRNDWEIVGEWKGQKASYNGLDLCSATT

SEQ ID NO: 2192 - DNA, 2652 bp, Homo sapiens
caggatgcggggctggacccgcagccagaccccgggccgcctggcttgtccctgccccgccgcttcggccaggcccggaaccctttctgggcagctctgcctctgtagacccgcatctccctcggatcgtgcggtgccgacgggagggtcctcaggggagagtcccgacttggggttcggggttcctgcgtgggaggagctgtggattcagtgtcatttgaagatgtggctgtggcctttactcaggaggagtgggctttgctggatccttctcaaaagaatctctacagagatgtgatgcaagaaatcttcaggaacctggcttctgtaggaaacaaatcagaagaccagaatatccaagatgacttcaaaaatcctgggagaaatctaagcagtcatgtggtagagagactgtttgaaattaaagaaggcagtcaatatggagaaaccttcagccaggattcaaatttgaatctgaataagaaagtttctactggagtaaagccatgtgaatgcagtgtgtgtggaaaagtcttcatatgtcattcagcccttcataggcacatcctgtctcacattggaaacaaactatttgagtgtgaggaatgtccagagaagttatatcattgcaaacaatgtgggaaagcctttatctctctcaccagtgttgacagacacatggtaacacacactagtaatgggccttataagggtccagtgtatgagaagccttttgattttcctagtgtatttcaaatgcctcagagcacttacactggagagaaaacatataaatgtaaacattgtgataaagccttcaattattcaagttatcttcgtgaacatgaaagaactcatactggagagaaaccctatgcatgtaagaaatgtggtaaatcattcactttttccagttctcttcgccaacatgaaagatctcatactggagagaaaccctatgaatgtaaggaatgtggcaaagccttcagtcgttccacttacttgggaatacatgaaagaacgcatactggagaaaaaccctatgaatgtataaaatgtggcaaagcctttagatgttccagagtcctcagagtccatgaaaggactcacagtggagaaaagccctatgaatgtaaacaatgtggtaaagccttcaaatattctagtaacctatgtgagcatgaaagaactcacactggagtgaaaccttatggatgtaaggaatgtggtaagtcgtttacttcttccagtgcccttcgaagccatgaaaggactcatactggagaaaaaccctatgaatgtaagaaatgtggtaaagccttcagttgttccagttcccttcgaaagcatgaaagagcttatatgtggtaaaaaacaacaacaacaaaacacctctgtcaatgtaagaagtgtgttaaagctttcagttattctagtttcattagaacacgtgaaaaaattaaaaactcaaattagagagaaacccaacacatgtaaggaagattagaatgtatgcaattttcctagttcccttctaaaacttagaaggacccgtcctgggaaagaacgtcataaaatacgaaaaatgtgttagaacactttattttcccagccgctttcaaatatatttttatcagtggttcattgttaaagaaggtgtctatactttagattttcagttttttgcagggaatcatggagctgagaatttcacagatactttataagccatagtacatgagcttaataggctgtgttttgtttctcatcagttaacataatttttgtctattcatttaaaaatttgttggatccctagactaagttgaaatgtatttctaatagtaggcaattttaattttcatgtagttgtttaattgttctctaattaatggaccaatgaaaaatgagttcatgtgtgtgtgtgtgtgtgtgtgtgtgtgtgtgtattctacctttttatgggaaaactacttttttgttgtaaagattttcttctgttttctttgctaataaagaattgttattaatttgcatgtatgtgaagtttatatagtctcatgtacattgttattttcattttctttcctttattctgtcatgagttttggctgttacttgcatagttcacttttttaaaaaatgttatgtttttagagagggtctcactttgtcagctaggctgaagtgtagtggtaataatagtcttagctcactgcagcctcaaattcctgggctcaagtgattctcccaccttagcctcctatgtagctggagctacagacacatgccaccatgctcagctaattatataattttaaaaattttttatagagatgggatctcgctgtattgtctaggctggtattgaattcctggcctcaagctatcctcctgcctcagcctgtctacatgttggggttactgacatgagctaccacacctggcccactttttactttgaattaagaagagagaactgtgattggacagtatgcttgtctaatctgcgtgtgaaagcattcagtctcaccatcaagtatattgtggatttttcataaatattctcaaacaggctcaggaagttttcttgtgttttttatttattgtttcatggtaaaggagtgttgaactcttatgacatgttttttt

SEQ ID NO: 2193 - protein, 357 aa, Homo sapiens
MQEIFRNLASVGNKSEDQNIQDDFKNPGRNLSSHVVERLFEIKEGSQYGETFSQDSNLNLNKKVSTGVKPCECSVCGKVFICHSALHRHILSHIGNKLFECEECPEKLYHCKQCGKAFISLTSVDRHMVTHTSNGPYKGPVYEKPFDFPSVFQMPQSTYTGEKTYKCKHCDKAFNYSSYLREHERTHTGEKPYACKKCGKSFTFSSSLRQHERSHTGEKPYECKECGKAFSRSTYLGIHERTHTGEKPYECIKCGKAFRCSRVLRVHERTHSGEKPYECKQCGKAFKYSSNLCEHERTHTGVKPYGCKECGKSFTSSSALRSHERTHTGEKPYECKKCGKAFSCSSSLRKHERAYMW

SEQ ID NO: 2194 - DNA, 2519 bp, Homo sapiens
gcgaaaggagggagcagcttccgggacctggcgcggcttttgtgttgggcagcgcgaatgtggcgagctcggattcagtgtcatttgaagatgtggctgtggcctttactcaggaggagtgggctttgctggatccttctcaaaagaatctctacagagatgtgatgcaagaaatcttcaggaacctggcttctgtaggaaacaaatcagaagaccagaatatccaagatgacttcaaaaatcctgggagaaatctaagcagtcatgtggtagagagactgtttgaaattaaagaaggcagtcaatatggagaaaccttcagccaggattcaaatttgaatctgaataagaaagtttctactggagtaaagccatgtgaatgcagtgtgtgtggaaaagtcttcatatgtcattcagcccttcataggcacatcctgtctcacattggaaacaaactatttgagtgtgaggaatgtccagagaagttatatcattgcaaacaatgtgggaaagcctttatctctctcaccagtgttgacagacacatggtaacacacactagtaatgggccttataagggtccagtgtatgagaagccttttgattttcctagtgtatttcaaatgcctcagagcacttacactggagagaaaacatataaatgtaaacattgtgataaagccttcaattattcaagttatcttcgtgaacatgaaagaactcatactggagagaaaccctatgcatgtaagaaatgtggtaaatcattcactttttccagttctcttcgccaacatgaaagatctcatactggagagaaaccctatgaatgtaaggaatgtggcaaagccttcagtcgttccacttacttgggaatacatgaaagaacgcatactggagaaaaaccctatgaatgtataaaatgtggcaaagcctttagatgttccagagtcctcagagtccatgaaaggactcacagtggagaaaagccctatgaatgtaaacaatgtggtaaagccttcaaatattctagtaacctatgtgagcatgaaagaactcacactggagtgaaaccttatggatgtaaggaatgtggtaagtcgtttacttcttccagtgcccttcgaagccatgaaaggactcatactggagaaaaaccctatgaatgtaagaaatgtggtaaagccttcagttgttccagttcccttcgaaagcatgaaagagcttatatgtggtaaaaaacaacaacaacaaaacacctctgtcaatgtaagaagtgtgttaaagctttcagttattctagtttcattagaacacgtgaaaaaattaaaaactcaaattagagagaaacccaacacatgtaaggaagattagaatgtatgcaattttcctagttcccttctaaaacttagaaggacccgtcctgggaaagaacgtcataaaatacgaaaaatgtgttagaacactttattttcccagccgctttcaaatatatttttatcagtggttcattgttaaagaaggtgtctatactttagattttcagttttttgcagggaatcatggagctgagaatttcacagatactttataagccatagtacatgagcttaataggctgtgttttgtttctcatcagttaacataatttttgtctattcatttaaaaatttgttggatccctagactaagttgaaatgtatttctaatagtaggcaattttaattttcatgtagttgtttaattgttctctaattaatggaccaatgaaaaatgagttcatgtgtgtgtgtgtgtgtgtgtgtgtgtgtgtgtattctacctttttatgggaaaactacttttttgttgtaaagattttcttctgttttctttgctaataaagaattgttattaatttgcatgtatgtgaagtttatatagtctcatgtacattgttattttcattttctttcctttattctgtcatgagttttggctgttacttgcatagttcacttttttaaaaaatgttatgtttttagagagggtctcactttgtcagctaggctgaagtgtagtggtaataatagtcttagctcactgcagcctcaaattcctgggctcaagtgattctcccaccttagcctcctatgtagctggagctacagacacatgccaccatgctcagctaattatataattttaaaaattttttatagagatgggatctcgctgtattgtctaggctggtattgaattcctggcctcaagctatcctcctgcctcagcctgtctacatgttggggttactgacatgagctaccacacctggcccactttttactttgaattaagaagagagaactgtgattggacagtatgcttgtctaatctgcgtgtgaaagcattcagtctcaccatcaagtatattgtggatttttcataaatattctcaaacaggctcaggaagttttcttgtgttttttatttattgtttcatggtaaaggagtgttgaactcttatgacatgttttttt

SEQ ID NO: 2195 - protein, 357 aa, Homo sapiens; identical to SEQ ID NO: 2193

SEQ ID NO: 2196 - DNA, 2668 bp, Homo sapiens
gtactctcaagcgcgccgcgaaaggagggagcagcttccgggacctggcgcggcttttgtgttgggcagcgcgaatgtggcgagctcggtgcgtctccgctgctccttccccttatccctgggaggtccaagtggtcccgcggcagcttctgttgctctgggacctgcaggtcccggaaggtccttagggaggaccccagacaccggagactgggaaatggattcagtgtcatttgaagatgtggctgtggcctttactcaggaggagtgggctttgctggatccttctcaaaagaatctctacagagatgtgatgcaagaaatcttcaggaacctggcttctgtaggaaacaaatcagaagaccagaatatccaagatgacttcaaaaatcctgggagaaatctaagcagtcatgtggtagagagactgtttgaaattaaagaaggcagtcaatatggagaaaccttcagccaggattcaaatttgaatctgaataagaaagtttctactggagtaaagccatgtgaatgcagtgtgtgtggaaaagtcttcatatgtcattcagcccttcataggcacatcctgtctcacattggaaacaaactatttgagtgtgaggaatgtccagagaagttatatcattgcaaacaatgtgggaaagcctttatctctctcaccagtgttgacagacacatggtaacacacactagtaatgggccttataagggtccagtgtatgagaagccttttgattttcctagtgtatttcaaatgcctcagagcacttacactggagagaaaacatataaatgtaaacattgtgataaagccttcaattattcaagttatcttcgtgaacatgaaagaactcatactggagagaaaccctatgcatgtaagaaatgtggtaaatcattcactttttccagttctcttcgccaacatgaaagatctcatactggagagaaaccctatgaatgtaaggaatgtggcaaagccttcagtcgttccacttacttgggaatacatgaaagaacgcatactggagaaaaaccctatgaatgtataaaatgtggcaaagcctttagatgttccagagtcctcagagtccatgaaaggactcacagtggagaaaagccctatgaatgtaaacaatgtggtaaagccttcaaatattctagtaacctatgtgagcatgaaagaactcacactggagtgaaaccttatggatgtaaggaatgtggtaagtcgtttacttcttccagtgcccttcgaagccatgaaaggactcatactggagaaaaaccctatgaatgtaagaaatgtggtaaagccttcagttgttccagttcccttcgaaagcatgaaagagcttatatgtggtaaaaaacaacaacaacaaaacacctctgtcaatgtaagaagtgtgttaaagctttcagttattctagtttcattagaacacgtgaaaaaattaaaaactcaaattagagagaaacccaacacatgtaaggaagattagaatgtatgcaattttcctagttcccttctaaaacttagaaggacccgtcctgggaaagaacgtcataaaatacgaaaaatgtgttagaacactttattttcccagccgctttcaaatatatttttatcagtggttcattgttaaagaaggtgtctatactttagattttcagttttttgcagggaatcatggagctgagaatttcacagatactttataagccatagtacatgagcttaataggctgtgttttgtttctcatcagttaacataatttttgtctattcatttaaaaatttgttggatccctagactaagttgaaatgtatttctaatagtaggcaattttaattttcatgtagttgtttaattgttctctaattaatggaccaatgaaaaatgagttcatgtgtgtgtgtgtgtgtgtgtgtgtgtgtgtgtattctacctttttatgggaaaactacttttttgttgtaaagattttcttctgttttctttgctaataaagaattgttattaatttgcatgtatgtgaagtttatatagtctcatgtacattgttattttcattttctttcctttattctgtcatgagttttggctgttacttgcatagttcacttttttaaaaaatgttatgtttttagagagggtctcactttgtcagctaggctgaagtgtagtggtaataatagtcttagctcactgcagcctcaaattcctgggctcaagtgattctcccaccttagcctcctatgtagctggagctacagacacatgccaccatgctcagctaattatataattttaaaaattttttatagagatgggatctcgctgtattgtctaggctggtattgaattcctggcctcaagctatcctcctgcctcagcctgtctacatgttggggttactgacatgagctaccacacctggcccactttttactttgaattaagaagagagaactgtgattggacagtatgcttgtctaatctgcgtgtgaaagcattcagtctcaccatcaagtatattgtggatttttcataaatattctcaaacaggctcaggaagttttcttgtgttttttatttattgtttcatggtaaaggagtgttgaactcttatgacatgttttttt

SEQ ID NO: 2197 - protein, 389 aa, Homo sapiens; identical to SEQ ID NO: 123

SEQ ID NO: 2198 - DNA, 1527 bp, Homo sapiens
cgccggaaaggagagggcggcttccgggatctgcctggcggttgctttgtctctccttcgccggagccggctcttcctgttagtctccgctgctagttcttggctctgggaggcccaggtggctctgcagcagcctctgccaccctgtgacctgcgagtattgggacatccctagctgacgccaggacacccgggaagccgaggaatggactcggtggcttttgaggatgtggctgtgaactttacccaggaggaatgggctttgctagattcttctcagaagaatctctacagagaagtgatgcaggaaacctgcaggaacctggcttctgtaggaagccaatggaaagaccagaatattgaagatcacttcgaaaaacctgggaaagatataagaaatcatatcgtacagagactgtgtgaaagtaaagaagatggtcagtatggagaagttgtcagccaaattccaaatcttgatctgaacgagaacatttctactggattaaaaccatgtgaatgcagtatttgtggaaaagtctttgtacgtcattccctccttaataggcatatcctagctcactcaggatacaaaccatatggagagaagcaatataaatgtgaacagtgtgggaaattcttcgtttctgttccaggtgttagaagacacatgataatgcacagtggaaatccagcttataaatgtacgatatgtgggaaagctttttattttctcaattcagttgaaagacatcagagaactcacacaggagaaaaaccctataaatgtaaacaatgtggtaaagcattcactgtttccggttcttgtctaatacatgaacgaactcacactggagagaaaccctacgaatgtaaggaatgtgggaaaacattcagattttcttgttcttttaagacgcatgaaaggactcacactggagaaagaccctataaatgtaccaaatgtgataaagccttcagctgttccacttcccttcgttaccatggaagcattcatactggagagagaccctatgagtgtaaacaatgtggcaaagcctttagtcgtttgagttccctttgtaaccatagaagtactcataccggagagaaaccctatgaatgtaaacaatgtgatcaagccttcagtcgcctcagttcccttcacctccacgaaagaattcatactggagaaaaaccctatgaatgtaagaaatgcggtaaagcctacactcgttccagtcaccttactcgccatgaaagaagtcatgatatagaaaaataaaataaggagtaagtttaatttgtatgtattgttctgtgattaatggaccagtgagtaatgattgctaattgttgcgattttcttactagcctcacttggcaaattttggttatcccttgtccattatacacattccacctttttttattaaaggaaaaactactcttggtgtaaagatgtttattttttgctaataatgagttggtattaattcctaagtacataaagtttatcatagagtatca

SEQ ID NO: 2199 - protein, 358 aa, Homo sapiens
MDSVAFEDVAVNFTQEEWALLDSSQKNLYREVMQETCRNLASVGSQWKDQNIEDHFEKPGKDIRNHIVQRLCESKEDGQYGEVVSQIPNLDLNENISTGLKPCECSICGKVFVRHSLLNRHILAHSGYKPYGEKQYKCEQCGKFFVSVPGVRRHMIMHSGNPAYKCTICGKAFYFLNSVERHQRTHTGEKPYKCKQCGKAFTVSGSCLIHERTHTGEKPYECKECGKTFRFSCSFKTHERTHTGERPYKCTKCDKAFSCSTSLRYHGSIHTGERPYECKQCGKAFSRLSSLCNHRSTHTGEKPYECKQCDQAFSRLSSLHLHERIHTGEKPYECKKCGKAYTRSSHLTRHERSHDIEK

SEQ ID NO: 2200 - DNA, 1980 bp, Homo sapiens
gcctggcggttgctttgtctctccttcgccggagccggctcttcctgttagtctccgctgctagttcttggctctgggaggcccaggtggctctgcagcagcctctgccaccctgtgacctgcgagtattgggacatccctagctgacgccaggacacccgggaagccgaggaatggtgagtggactgcgcctggcttcccgaagtggagaagagggctggttgaaacctgctgtggcgcgactcgggcctccacgccatcggctccggaacctgcggaccgagtcgccgtggcgtagccggggctcagtcctcttctgttcagggccgggccgggcggggcgggcagcggaacccctgcatcctgtctgtacctgcgggcgccacttccgccggccggagccctgtcgggaacccctcgcctcccctatccaggactcggtggcttttgaggatgtggctgtgaactttacccaggaggaatgggctttgctagattcttctcagaagaatctctacagagaagtgatgcaggaaacctgcaggaacctggcttctgtaggaagccaatggaaagaccagaatattgaagatcacttcgaaaaacctgggaaagatataagaaatcatatcgtacagagactgtgtgaaagtaaagaagatggtcagtatggagaagttgtcagccaaattccaaatcttgatctgaacgagaacatttctactggattaaaaccatgtgaatgcagtatttgtggaaaagtctttgtacgtcattccctccttaataggcatatcctagctcactcaggatacaaaccatatggagagaagcaatataaatgtgaacagtgtgggaaattcttcgtttctgttccaggtgttagaagacacatgataatgcacagtggaaatccagcttataaatgtacgatatgtgggaaagctttttattttctcaattcagttgaaagacatcagagaactcacacaggagaaaaaccctataaatgtaaacaatgtggtaaagcattcactgtttccggttcttgtctaatacatgaacgaactcacactggagagaaaccctacgaatgtaaggaatgtgggaaaacattcagattttcttgttcttttaagacgcatgaaaggactcacactggagaaagaccctataaatgtaccaaatgtgataaagccttcagctgttccacttcccttcgttaccatggaagcattcatactggagagagaccctatgagtgtaaacaatgtggcaaagcctttagtcgtttgagttccctttgtaaccatagaagtactcataccggagagaaaccctatgaatgtaaacaatgtgatcaagccttcagtcgcctcagttcccttcacctccacgaaagaattcatactggagaaaaaccctatgaatgtaagaaatgcggtaaagcctacactcgttccagtcaccttactcgccatgaaagaagtcatgatatagaggctgggtgtagtgactcagcctataatcccagcactttgggaggccaaggcgtgtggattgcttgagcccaggagttcataaccagcctggattaaaacaatgtgaaacaacctgggcaacatggtgaaaccctgtctttacaaaaaataaaataatgccgggcacggtggcttacgcctgtaatcccagcactttgggaggccgaggcgggtggatcacgaggtcaggagatcgagaccatcctggccaacacggtgaaaccccgtctctactaaaaatacaaaaaattagctgggcgtggtggcagacgcctgtggtcccagttactcgggaggctgaggcaggagaatggcatgaacccgggaggcggaacttgcagtgagccgagatcgcaccactgcacttcagcctgggtgacagagtgagactctgtctcaaaaaataagataaaataaaataaaaaaataattagctggg

SEQ ID NO: 2201 - protein, 464 aa, Homo sapiens
MVSGLRLASRSGEEGWLKPAVARLGPPRHRLRNLRTESPWRSRGSVLFCSGPGRAGRAAEPLHPVCTCGRHFRRPEPCREPLASPIQDSVAFEDVAVNFTQEEWALLDSSQKNLYREVMQETCRNLASVGSQWKDQNIEDHFEKPGKDIRNHIVQRLCESKEDGQYGEVVSQIPNLDLNENISTGLKPCECSICGKVFVRHSLLNRHILAHSGYKPYGEKQYKCEQCGKFFVSVPGVRRHMIMHSGNPAYKCTICGKAFYFLNSVERHQRTHTGEKPYKCKQCGKAFTVSGSCLIHERTHTGEKPYECKECGKTFRFSCSFKTHERTHTGERPYKCTKCDKAFSCSTSLRYHGSIHTGERPYECKQCGKAFSRLSSLCNHRSTHTGEKPYECKQCDQAFSRLSSLHLHERIHTGEKPYECKKCGKAYTRSSHLTRHERSHDIEAGCSDSAYNPSTLGGQGVWIA

SEQ ID NO: 2202 - DNA, 489 bp, Homo sapiens
caggtggctctgcagcagcctctgccaccctgtgacctgcgagtattgggacatccctagctgacgccaggacacccgggaagccgaggaatggactcggtggcttttgaggatgtggctgtgaactttacccaggaggaatgggctttgctagattcttctcagaagaatctctacagagaagtgatgcaggaaacctgcaggaacctggcttctgtagaaatcatatcgtacagagactgtgtgaaagtaaagaagatggtcagtatggagaagttgtcagccaaattccaaatcttgatctgaacgagaacatttctactggattaaaaccatgtgaatgcagtatttgtggaaaagtctttgtacgtcattccctccttaataggcatatcctagctcactcaggatacaaaccatatggagagaagcaatataaatgtgaacagtgtgggaaattcttcgtttctgttccaggtgttagaagac

SEQ ID NO: 2203 - protein, 115 aa, Homo sapiens
MGFARFFSEESLQRSDAGNLQEPGFCRNHIVQRLCESKEDGQYGEVVSQIPNLDLNENISTGLKPCECSICGKVFVRHSLLNRHILAHSGYKPYGEKQYKCEQCGKFFVSVPGVR

SEQ ID NO: 2204 - DNA, 487 bp, Homo sapiens
ggcggttgctttgtctctccttcgccggagccggctcttcctgttagtctccgctgctagttcttggctctgggaggcccaggtggctctgcagcagcctctgccaccctgtgacctgcgagtattgggacatccctagctgacgccaggacacccgggaagccgaggaatggactcggtggcttttgaggatgtggctgtgaactttacccaggaggaatgggctttgctagattcttctcagaagaatctctacagagaagtgatgcaggaaacctgcaggaacctggcttctgtaggaagccaatggaaagaccagaatattgaagatcacttcgaaaaacctgggaaagatataagaaatcatatcgtacagagactgtgtgaaagtaaagaagatggtcagtatggagaagttgtcagccaaattccaaatcttgatctgaacgagaacatttctactggattaaaaccatgtgaatgcagt

SEQ ID NO: 2205 - protein, 105 aa, Homo sapiens
MDSVAFEDVAVNFTQEEWALLDSSQKNLYREVMQETCRNLASVGSQWKDQNIEDHFEKPGKDIRNHIVQRLCESKEDGQYGEVVSQIPNLDLNENISTGLKPCEC

SEQ ID NO: 2206 - DNA, 584 bp, Homo sapiens
ggttgctttgtctctccttcgccggagccggctcttcctgttagtctccgctgctagttcttggctctgggaggcccaggtggctctgcagcagcctctgccaccctgtgacctgcgagtattgggacatccctagctgacgccaggacacccgggaagccgaggaatggtgagtggactgcgcctggcttcccgaagtggagaagagggctggttgaaacctgctgtggcgcgactcgggcctccacgccatcggctccggaacctgcggaccgagtcgccgtggcgtagccggggctcagtcctcttctgttcagggccgggccgggcggggcgggcagcggaacccctgcatcctgtctgtacctgcgggcgccacttccgccggccggagccctgtcgggaacccctcgcctcccctatccaggactcggtggcttttgaggatgtggctgtgaactttacccaggaggaatgggctttgctagattcttctcagaagaatctctacagagaagtgatgcaggaaacctgcaggaacctggcttctgtagaaatcatatcgtacagagactgtgtgaaag

SEQ ID NO: 2207 - protein, 138 aa, Homo sapiens
MVSGLRLASRSGEEGWLKPAVARLGPPRHRLRNLRTESPWRSRGSVLFCSGPGRAGRAAEPLHPVCTCGRHFRRPEPCREPLASPIQDSVAFEDVAVNFTQEEWALLDSSQKNLYREVMQETCRNLASVEIISYRDCV

SEQ ID NO: 2208 - DNA, 2479 bp, Homo sapiens
tggatgaggtcagaatgaccgcttttggcctagcggtttgtaggcggtgcgtccttcctgcgctgggatccgaccatgcaagaaggacattcacatttaacctgtatacaagttatagctatttgtgccttttatatatatatatatatataaaattggaagcaatataatgacagttctgtaactgcccagggagttcaccttgcccgctacctagacagagccgatttctcaagacaggggaatagcaatagagaaagagtaattcacgcagtgtcctctgtgcgggagaccggagtttttttattttattttatttttttgaaacagaatcttgctctgtctcccaggctggagtgcaggcttggagttttatgattattcaaatcagtctccctgagcatttggggtaagagtatttagaacgtttattttgccaaggttggggatgcatatgcatgacacagcctcaggatgtccttgatgacatgtgcccaaggtggtcagagcacagcttggttttgttggagagaaatgctcggtgccgcaaagtgaaaccagcactcaagcgaaagttttctcagcaacgcaatttacttctgcagaagcgtgctgctcgcatcaatcacgatcgcaagagcacactgaacagaggaaagcaggggtttttattcctaacgcagtccctacctctggcatgggctggggtcagaccgcacgatctaaactgacccggttggctatttgtgaatattttcccaaataaggaagggggaagggggatgtgagttacaatggtgggacttgcggtttccaagggagaaatgggtgcagagcaggtaaccaagggaacagatgtgagttattgattagaactgacggaaggttgtttacagtaactaagggcaaggaggcatggagaacaagaaagttgagttcgaaaacaaaaaaacaagaaagttaacatgccaaaccttggaagagaaactgactgtatctgacagctttatacattttagggaaacaggagacatcaatcaacatatgtaagatgaacactggtttgatccgggacaacctgaagcaaaagcgggtcaactcgaagccaggagggggcttccaggtcacagaaatggggtctccctcagttgcccaggctggtctctggtgcccaacgccgggctcccggtaatctctacaaataatccagtgaaggaatgccagagagtggaaagtggaggatgactgacaaaggacgcccgagtacgttttcacttcaagctctacaggagagaatcagcttcctgtctgggtacccacaagacatcttaagctgtgccatgagacagagtccaagaagaggaaaagacctcagaatgtctctgcgcccccagttcgtcagacggctcagatgaacatctctgttgagcagatggaaaccagtaaaactccccaagcaactccaccgacctgggggcagatgaagagactggctcacattgcagaagagaacctgaggtctcagaacaagccgctgaccaccagtaatctaatggtagctatgatggcggtaatctccttggtggtgagtcttcctgtagcagaggcagatcaaaattacacctatttttgtaataggaggaaggaggaggaggaggaatgttaatgaatgtttctattggttatcgctttcctgccatctgcctggggccagcagcaggatttttaaattatgatacacaaagttggatggtttatgttcctgcacataacggatcaaaagcctttattcatgcaatcagtggaagaacatttcaatctttggacactattaaataccttgagcatggctatgttgtgacacatcgccagattaataaatttaaacctaataagaacctcctgttattaaacggtcagaaaagctagaggtgctaacctgggaagattatattgcaaacagtgctgctgtactacaaaataattcctatggaatcatcattgattgggcccctaggggacaatttgcagtaaattgtactggacagagtgaagattgtagagagactattttgcaaacgactacccagataatgcaccaaaattacatagaagaattgaaacaaattaccctattaagtgggaggagaacggtatggctcctccaagcccaaaaattattgatccaattataagcccagaacatccagaattgtggaaattaatgatggctcaaagcccaattcggatttggaaagcagaatgtaaaacagagacccatagtaaaaaacttcgatttgttgtagccatgacctctaatcagatggtcccattgcagagttgtgttaaacctccttttatgttggcagtgggaaaaattaatatcttacctgactctcaaaccatatcatgcctcaactgtcgtctttttacctgcattatttctgcctttaataaagataatagcattttactggtt

SEQ ID NO: 2209 - protein, 65 aa, Homo sapiens
MPESGKWRMTDKGRPSTFSLQALQERISFLSGYPQDILSCAMRQSPRRGKDLRMSLRPQFVRRLR

SEQ ID NO: 2210 - DNA, 509 bp, Homo sapiens
agaatgaccgcttttggcctagcggtttgtaggcggtgcgtccttcctgcgctgggatccgaccatgcaagaaggacattcacatttaacctgtatacaagttatagctatttgtgccttttatatatatatatatatataaaattggaagcaatataatgacagttctgtaactgcccagggagttcaccttgcccgctacctagacagagccgatttctcaagacaggggaatagcaatagagaaagagtaattcacgcagtgtcctctgtgcgggagaccggagtttttttattttattttatttttttgaaacagaatcttgctctgtctcccaggctggagtgcaggcttggagttttatgattattcaaatcagtctccctgagcatttgggggaaacaggagacatcaatcaacatatgtaagatgaacactggtttgatccgggacaacctgaagcaaaagcgggtcaactcgaagccaggagggggcttccaggtcacag

SEQ ID NO: 2211 - protein, 51 aa, Homo sapiens
MTAFGLAVCRRCVLPALGSDHARRTFTFNLYTSYSYLCLLYIYIYIKLEAI

SEQ ID NO: 2212 - DNA, 10068 bp, Homo sapiens
atgcgcctgtcctccctgactgaagaggctgtagatggagggaatggaggcgagtggggtgaggatctgttagagcagttcacatgcattccttcccgcgtggttgaagctaagactgctccagagtggcctctgtgccctggtgaaggccagggtcttcatggcgagcctctccctgaccactgccagggtaccggtggccaaattgacccctccctggggaggggagggagggccaagcagcgtggctcccgagggagttggtgggcagcaggggagacaatagcgaacatgctgtgtgggctcagccgggagacccctggagaggcggacgatgggccctactccaaaggaggcaaggacgcaggaggggccgacgtttccctggcgtgccgcagacagagcattccagaggagttccgagggatcactgtggtggagctgatcaagaaagaaggcagcacgctgggcctgactatctcaggtggcaccgacaaggatggaaagcccagggtctccaacctgagacctgggggacttgcagccaggagtgatctgctgaacattggtgactatattcggtctgtgaacgggatccacctgaccaggctccgccacgatgagatcatcaccctgctcaagaatgtgggcgagcgcgtggtgctggaggtggagtatgagctgcccccgcccgctcctgagaataaccccaggatcatttcaaagacagtggacgtctccctctacaaggagggcaatagctttggctttgtccttagaggaggtgcccatgaagatgggcacaagtcccgcccgcttgtcctgacctacgtgcggcccggtggccctgccgacagggagggctccctgaaggtgggcgacaggctgctcagtgtcgatggaatcccgctgcacggggccagccatgccaccgccctggccaccctgcggcagtgcagccacgaggcactctttcaggtggagtatgatgtggccacccctgacacggtggctaatgcttcgggacccttgatggtggaaatagtcaagacgccagggtctgccctggggatctcgctcaccaccacctccctccggaacaagtcagtcattaccatcgaccgcatcaagccagccagcgtggtggacaggagcggagccctgcaccctggagaccacatcctgtccatcgatggcaccagcatggaacactgctcgctgcttgaggccaccaagctcctggccagcatttcagagaaggtgcggctggagatcctgcctgtgccccagagtcagcggccactgaggcctcagaggcagtgaaagtgcagaggagtgagcagctgcaccgctgggacccctgcgtgccctcctgccacagcccccggcccggccactgcaggatgcccacctgggccacacctgctggccaggaccaaagccgatccttgtcttcaactcccttttcctcgccgaccttgaaccacgccttttcctgcaacaaccccagcacccttccccgtggatcccagcccatgagtcctcgaactacaatggggcggaggaggcagcgaagaagggaacacaagagctcgttgtcgctagcctccagcacggtggggccgggcgggcagattgtgcacacggagaccacggaggtcgtgctctgtggagaccccctcagcggctttggcctccagctccagggcggcatcttcgccaccgagaccctgtcctccccacccctcgtgtgcttcatcgagcctgacagtccggctgagaggtgtgggctgctgcaggtgggggaccgtgtcctgtccatcaatggcattgccaccgaggacgggactatggaggaagccaaccagctcctgcgggacgccgcactggcccacaaggtcgtgctggaggtggagttcgatgtggcggagtccgtcatcccaagcagtggcaccttccacgtgaagctgcccaagaagcgcagcgtggagctgggcatcaccatcagctcggccagcaggaaacgaggggagcccttgatcatctccgacatcaagaaaggcagcgtggcacacaggacgggcaccctggagccaggcgacaagctactggccattgacaatatccgcctggacaactgccccatggaggacgccgtgcaaatcctgcggcagtgcgaggacctggtgaagctgaagatccggaaggacgaggacaactctgatgagctggagaccacaggtgccgtcagttacacagtggagctgaagcgctacgggggtcccctgggcatcaccatttcgggcacggaggaaccttttgaccccattgtcatctcaggcctcaccaagcgtggcctggctgagaggactggtgccatccacgtgggggaccgcattctggccatcaacaacgttagcctcaagggccggccgctgagcgaggccatccacctcctgcaggtggctggagagaccgtcacactgaagatcaagaagcaactagaccgtcccctcctaccccgcaagtcgggcagcctcagtgagaccagtgatgctgatgaggacccagcagatgccctgaaaggaggcctgccagcagcccgcttctcgccggctgtgcccagtgtggacagtgctgtggagtcttgggacagctcggccaccgagggtggctttgggggcccagggtcctatacaccacaggcagcagcccggggcacgaccccccaggagcggaggcctggctggctgaggggcagccccccacccaccgagccccggaggacgagctataccccaaccccagctgacgagagctttccagaggaggaggaggaggatgattgggagccgccaacgagcccagcccctggccctgcccgagaggagggcttctggcgcatgtttggagaagctctcgaagacctggagtcatgtggtcagtcagagctgctgagggaactggaggcatccatcatgacgggcaccgtgcagagggtggccctcgagggcaggcctggccaccggccttggcagaggggccgggaggtacgagcctctcctgcagaaatggaggagctgttgctgcctacacccttggagatgcacaaggtgaccctgcacaaggaccccatgcggcatgactttggtttcagcgtctcagatggcctcctggaaaaaggtgtctatgtccacactgtgcgccctgatgggccagcccaccgtggaggcctccagcccttcgacagggtcctgcaggtcaaccacgtccgtacacgggacttcgactgctgcctggcggtgccactcctggccgaggcgggtgatgtcttggagctgatcatcagccgcaagccgcacacggcacacagcagccgggccccccgatcgccaggccccagcagtccccggatgctctgaagtcagcatgtgggccgaactcctaaggggccacccaggcagatcctggctcccagacacgtagctgggctggagaagcggccacccactcattcatctgttggtctggcagactctgagcctgggatgatgcttggtctctgttccccaggtctgtggtgactggggtgccaggcagggaggtcctgccctagttggagtgacagctggggtctctcgccaagttgggtctccaagatgcccagaggagcctcccttaagaagggttggcacaggctgctcagccgagaggagagaggcctgggggctgtcccaggtctctgtggggcctccttggagaggtcgaagatgtagggagcacttcctcccagcaaagccatggagctggaatgagctgcaaggaggagtgagttctcggtcacaggaggtgagcaggcaggagctggataccccagcgcagtcatgcattggggtatgaggcattcccatgatgcgtgcacacgcgcttgggggttggcttcctgatggggagccacttcatctagagactcggccaccaggaaggatgctgcttcggatgggagcccagctccttcgcttctccagaataggggtttggggcttgctagtcctgagattctgagattcccagaatctggtccccacttatgagactcttaagttggggcgtctgggatcccaggaagtgctggccctttgattctgaaagtgggtgattctttgatttcagcatctcagtctgaagcttctgggacttgagactgtggttctgggcccattgggcaggctctatgggccttgggctctcagccctcctgcttcttctgtaggccgtgtggccactgacccatctgcacgtccgctcagcccaagcccctccatgtgggaggggtcattttggggcaaaagaccctggagcttccattcacctgccatccagtgaaaattgaaaagcgatggacgcaggacctgtgaggcggtagcgctcctctttacagccagatcagtggaggaagaggagaaagagggagggagatgggagagaaatgggccagagaaaaagatgggacactcttgcccagtggagggtgtccaaagtgcttattcaaagaagtctattcccacttgaaatctggaagcaccagcatcccttaaaatcattgtcctcagtgtccacaaatcagagaccctcttcattttgagaagggtgtgggcctcccctggtggtctagtgagtggtgcctgggatggagtgggcgggcaggtgtagccagggctggggatgtgctttgcctggcccagttctcacaggggtctcaggaaaacggggcacccactcccacctccatctgtctccaacctggggtccctggaggccagaaaagtgctcttccatttgagggaacagatgaggagtcaagaggtctgttcttttcaccctgggtctgttacctgtttgctgtgtgaccctgtctgggttggacccccagcccctctggacgatcacgggtggacagtctgagcagacacaggcctcctggtcagggccggaaccatctctgccgacccaccaaggcccccttggggacctgcccacgctgtctcctggaggcctgcctcccttacccctcccctccacttcgctgggctctgccccttggtgccctccctgagggccctgcatgcttgtgcctggggtgctcagcgcctctgctatcttggattcccgtgtactcagcccagagtgaaagggcactgtctacctgtcacagggcaccaagtgaaagccaagagccctcacttttgagggtgagggacagcacagcagaggtgtggcttctggatgcaagcagccatagctgtgtgaccttggacaggtggctcagcctctctggacctctgctaagcaacagggctggacaggacacactctcagggcctctcggcttgggaaaactgcattgactccaggactccaggcgagggaagatgcacccgactctaactaatacccccctccctcctcgggctgaggcctctgccattctcccaaaagtatgcaatcaggcccgcggtgggcctcccagccatgccggcctcctcatatgcaatatttcttctggcttctcatggggatggttcatccccgacttgaaatttcctgacacctttccccagtgagcgccctgcctgcctatgcattttgggaacagcccctgtgacatgtccccttccacctgccctctcccccaaagctgtatttttctctggctgagattagaacacattccttgtaaagtatttttctacatcgggttttcttagggctctcgggaagcacaaggggctgtattgcaaaggccgcttatggtctgtttggggccctcgtctaagtctttgtcccaccaggggttgcagtggcttgggggtaggtgccatggggatgattttttaaaataaaattatttaaatccacctagagtagaagtttgctttttaaaaaaatcatggattggcaagagtcagcttctgtatgggtctggtgacatctcacctgcttttgatgattcattaattcaaaaagtttgccatttgcttccatcatccagcccctgggcaacatgaatcagacagatttaggtcatgtctgcacattctggtggcaggcagacaatcaacaagtaagcaaataaataattatttcaaaaggcatcaagtgcaacaaagaaaacaagggagtaacgggatagagggaccagggtgaggggctttagctcacaatattaggaggggtttctctcaagaggcgacatttgcaatgagacctgaagacaggagccagcctccatggagacctggaggaagagtgtctcaggcagcgggcacagctagtgcaaaggccctgagataggaacgagtttgacggtctcaaggaagagaaagaaggcctgggaggggaatggggctggagactaggttggaggtagcaggaatcagtcgtgaaggcttgggtagggggagcaaatttgattctctgcgcagcagaaagccagaggcaggcagtggtgcctgcatatggagtctctttagcccaggttgggaaggtagtggcaggagggcagcctcaggtctggctgctgccctggagtgtccagagagtgtctagggcaggtgagctacagggtctgggacccagaggccagggccaggccccactggggaggccacagttctgtgagcagaggaagagcttctttccaggaagcgagtactctgtcttgggagtggtgtaggcagggggaaggccaagggaggcagcaggccttgctctaagcgctttgcaagagcttgctggatcctcccaatagcctttggaggtgggctctattcctgtcccatcattacagatgaggaaacaggcacagagaggttacgtaatttgcccaagtccacacaggtagtaagggatggaaccagggcttgaacacaagccacatggcccagtacacatagagagaggcaggcaggtaggcataggctgtcagaaagagccagaaaatgggggtagggtggtcttctattctaacattgtctataaatgagttactgagaattttgtctggttagttgggcaaagggctcaactgactcccgagtttgtccatcccaaagggtggggggcgctgttggcaggaaggctgccccaaacatggacctgttgtgaccccagagagcccctaactgggtattaatgagcgcctgcacctgacggtgggggagtgggagaagggcaatcaggtttgctccccctctaccctttcccccactccgccacccgctttctgcccttctggcaggtcagcccaaggctaaagaggagggactgaaagccgcagcaggtgagcacctaaggccaagagcatcacctccaatcatcctggtggccttgatggggacaatggtttattccagatggggaaactgaggctcaggtgactgctgccagatctcccagctgtacagggctgggcatgtagcaggtagaatcagtagagccagtagagccaagagctcatgggcccgggtgcgaatccaggttctttcatggacttgctgtgtacccctgagtgagcaagctgcttcctctgtgagcctccatgtgggaacctctaacctgggaaaatacctacctttgaggagcgtcctgggattggacgggaagccctttataaaatgtaaagcgtttggcaaacgttgagggggaaatacctcaccagaacacaacccacacatgttggatgttaaaaaggaaatgtttattttcatgttataaggtgattacaaactcctctaaaaaaagcaaagatgaatttaaaatattgatatacatatttatctaaaaagcaaaagagaaaaaaacccctgcaaaatacagggaatcatatcataaaacatttatacacaaaagcttgtatactgcaagactgaactacacaccaaggatcttgttcaaatacaaatgttcctcctcagaaaagtctcttgttggttgattttttttttataaaagtttaaaatatcttaaaaatattttgaagttttaaaaaaatgtcctgatgagccagacatatttctggaaggaggcaagacccacattctcagctttctcttgtgctaaatacagagtcacagttgctagggattgggagattaattgggtaaaaaaaaaaaatgaagccaacatctcaatttgaagtcaaatatataacaggatgctccatccctcggagaacacgccagaacatgtctgtagtgacacccacaagagaacaatgcaaaaatgcttcctattacaacaatatatattctgaggatcagggagagaaggaaagggggagggctgccccctgctttctggactgcccacctctacaagtttggctctctgggtttgttttgtttagtcttgtggttttgtacttcgatttttgcacacagtggtatttaccgtgtcccaggcagcctggcctgggaccacatgggtctgagggagggatgggacctcaggccaccttgaaggattttctcttgggtcctttcctggcttgtgtctgaatcttgggtggggtgggctgcggggagcagttaggtgcctctgcctttagactggctacccagagcatttccccagggagaggggctgtgctgggagatgctggctgggtgggggaccagtgtggcggtacccgggtgatacaagagtgccctgaagtgggctggaggggccatgctgtgctctccccttgtgtttccccactgtctttgggggtatgctggggatccagggggcagtgaaggagctgcacatggcccaggggttatgctgtcctggaaggagagcatccaaggccacttcctgctgcctggaaactccccgcagagcctcggggtcagtctggagccagggcgacttcatctaaatcctgcctaaggatctggcacacctctggcttctctgcacctcagttccctctttcacaaacagggatctcaattcctagctcaccaagggctgctgggaggaaggagggccccgtgcagggctggggtgtgcaggtgaggctggagtcacccagctcacggagccaccgcatgggtccaggaattctgtgaggatggtgggagtgtggctgctgctgctcccctcatccctgaacatggaggggagcgcatttccttttccataaaggcttgtctttggttgtcaggaagaccttgaggatgttgctggatgtagccctggttagacactcaccattccctgcacctacctcggagaacctgcagctagagctgtttcaagaaaatccattcctggctcacagtgcctccctgagcctcagttacctcatttacaacaagggcgttgggttaggggaccctggaggcccttctctccctgaccgtcaggaaatctctgtggccctagcatggcccatctcaacgcagtgtctcccacttcttcatcttaaaaaattgatttaaacaaccccctcgcttcctttccagatctggctggctgggctatgtgcgggcatcagcatttctgacccatcccaagcagaaagcaggtgaaggactttgcccattctctatagacaggtggaccagagtcatgagctctcatggaaagtttcgtttatacggagacatgaaggttgagcattattacacaggtactcgcagagctatgctctgcacacagagccagggctggctgggcgagagggctctgattggagacaggtgccttggggagagttgaggaacgacttccttccaggcggggcctggggacttggtctgcctgtgtctttggtctagaatttggtctgagaatcttataagaagaggccttcctcaggccatgtccagaatgttgcaatttgcctaccaacccaaaatactgtggcctttcacccagggagcccccgctggggagatggaaactgaaatgaccacaaatgcccaggtagccactgcgtgccaagtcccctcttccccacgtgccacctgccctcaatcattgacagtggttagtttactaaagttatataagacaaag

SEQ ID NO: 2213 - protein, 672 aa, Homo sapiens
MPTWATPAGQDQSRSLSSTPFSSPTLNHAFSCNNPSTLPRGSQPMSPRTTMGRRRQRRREHKSSLSLASSTVGPGGQIVHTETTEVVLCGDPLSGFGLQLQGGIFATETLSSPPLVCFIEPDSPAERCGLLQVGDRVLSINGIATEDGTMEEANQLLRDAALAHKVVLEVEFDVAESVIPSSGTFHVKLPKKRSVELGITISSASRKRGEPLIISDIKKGSVAHRTGTLEPGDKLLAIDNIRLDNCPMEDAVQILRQCEDLVKLKIRKDEDNSDELETTGAVSYTVELKRYGGPLGITISGTEEPFDPIVISGLTKRGLAERTGAIHVGDRILAINNVSLKGRPLSEAIHLLQVAGETVTLKIKKQLDRPLLPRKSGSLSETSDADEDPADALKGGLPAARFSPAVPSVDSAVESWDSSATEGGFGGPGSYTPQAAARGTTPQERRPGWLRGSPPPTEPRRTSYTPTPADESFPEEEEEDDWEPPTSPAPGPAREEGFWRMFGEALEDLESCGQSELLRELEASIMTGTVQRVALEGRPGHRPWQRGREVRASPAEMEELLLPTPLEMHKVTLHKDPMRHDFGFSVSDGLLEKGVYVHTVRPDGPAHRGGLQPFDRVLQVNHVRTRDFDCCLAVPLLAEAGDVLELIISRKPHTAHSSRAPRSPGPSSPRML

SEQ ID NO: 2214 - DNA, 4116 bp, Homo sapiens
caggaatggaaacgaaagtggaactcggcctttccctctttctctcctgcagacgatgggccctactccaaaggaggcaaggacgcaggaggggccgacgtttccctggcgtgccgcagacagagcattccagaggagttccgagggatcactgtggtggagctgatcaagaaagaaggcagcacgctgggcctgactatctcaggtggcaccgacaaggatggaaagcccagggtctccaacctgagacctgggggacttgcagccaggagtgatctgctgaacattggtgactatattcggtctgtgaacgggatccacctgaccaggctccgccacgatgagatcatcaccctgctcaagaatgtgggcgagcgcgtggtgctggaggtggagtatgagctgcccccgcccggtgggtgcccttggacggggaactttctccactgcctcggttgcgggtggacacggctacctccccaccagggcctgggtggcagggatcatgccagatggagtgggtagaacctggagactggccacaagcatccatacctcgcctaggggctgtgcctacaaccgcagtatgctgtcaccaggaggtggtgggactctatagccaatgtcattttacatatttagtctccagatgcttttcctttagcggggagggttttggaagcattagctgaataagtcgttccctgacctaccacgcccacactccactgccctgcactaagtaacggtggtgtagggtttcacctagcttgggattttcaaagctggtctaaagtcttgaagtttgagtaactgtctggaattcagccctggcctgagcctaccagccatggactcaagcctgagttctgccgtcgtctctgtgagcatgggcaggccctttcctctctctcagtggtgggctaagtgggattaggggagaggatccctctaagcctcacttgttcgacctgtaaaatgggcaagggtttaccctccctgtaatctctgtgactgatcacccagtcctcctggaatgagctttgggcacatctaccggcctggagatgcgactgagggactcaaaggagtcctccatttctccccagctcctgagaataaccccaggatcatttcaaagacagtggacgtctccctctacaaggagggcaatagctttggctttgtccttagaggtcagtgaaagaattgcccttggtattggggcagcaagaaagaggctaatactaattccatgtgtgtgctgtttggatttgaatgtaatttatgtgtatctcagttctgactttgaagaacacaggaccgttaaggtaagtattcagtgggaaaatctgccaagcaatgaagtaggcttggttggggagagtgagaggagaaagttgtaccggaaaatgatggtgaaagctgctaccgagactgagaacaaagtctggagcttcctagagatcagggaaaaggggaaataaggtgaggtcacagaagggaggcaagccatttaacagagagaagactttggtcatgttacccaccccttgcaccatctcttgggagggcgaatttattgttggtgtctcataagagggtccatggatagcaaggacaaggtcctcaaacaggttttattgaaggagcctgctcaggggctgtgtgggagcctctggatgggaaggggtgggtggatgattcctgcttcttgtcaaatcctgtccaggaggtgcccatgaagatgggcacaagtcccgcccgcttgtcctgacctacgtgcggcccggtggccctgccgacaggtgagccgaggcagaagaaatccacacactgcactgacctgccccaactcccctgcgaagaaggtggagtggggtcaccatgccccttccccagatgaagagatcgaggccctgagggaacactccctgcccggtgtcattcagggagttgttgatggaaccgggatgtaaccccaaatgagggaaacctcgagccctttcttccccaacatactgctgtctcaggggttggggtgtttggagaggggcagccttggtgtcgttcttccctttcctgctccttggttttcccgtctgtggaatggtccctaagagttgctatgagagatttgggggcacgctgattggccactgctgtagccgtctgtgactcagtctcctgggtcctggctgatcgacccagctcggccccgcctgggcccagcccagaagggccaggaggagagaatgtggggaaagaacatgtccagttcccagcccctgatccctcggcctccccagtgggagattcctggccattttaagagaagcctggaacggccttgtcagaaatctaaatctgtccttgggacagggccctgtgatgagctattcatagaacccccgagaatagctttggccacctgttgggagaggcgttccaggctggggatgcgacccaaaccgaggtgaaccctgctggggcccctcccctggcccctgttgagttctttcccaggcgcgggttgtcatcaggccagaatcaccgctgagaaaccagggtgagggtggagcaatgggaagggaccaggacggctcagagcagcccccaatgccgtgtggcatgggcacagcttgcaccctctctgggccctggtgctgtcctttgtccctgaggcaggagttgggggtgacgcttgaagagcacccccagctcagacatttcagggttctgcactgagtctgtgaattactgcacacccagaggagtggcaggcggcagagccaccccatcctgtcttcatcccccccttgctttatgcagctccccactcctggagtggctcattccttcactcactcatgcgccccttcacccgtcccctcctccccttcctcccccacccattccctgcttcttcatcctccatgtcccgcttcccagcgccctcccagacaggctgtgcccagtgctgctgccgggccaggctggtgactggcccttccctacagggagggctccctgaaggtgggcgacaggctgctcagtgtcgatggaatcccgctgcacggggccagccatgccaccgccctggccaccctgcggcagtgcagccacgaggcactctttcaggtggagtatgatgtggccacccctggtgagttgggggcctgagtgtgtgggttggggcaggaggaggcctgggatggggggaggtggcagtggccatggatctttaccactgcaaaggctgcatgaccttatgaccttgggccagtcacagcttctctgggcagtaaatagtatgtgctaggcattgtttgatgtgctggggatccagcctagaacaacagaattgaggtgtctgttctcatggagctggcattctggtggagagaggacagtatccagaatagataagatatggtgtatgtcagttggcaataagtgctatggaaaaaagaaaagaggcaggggagagagatgggacaggctgggggatgctctctcactaggggagtgagggaatgagcgaggcatggaatgtccagggacagcattccaggagggcggaagagtaagtgcaaaggccctgaggcaggagcatggccagcatggttggtcacagtgaggaggctgccgtggttggcacaggtgagtgaaaggaggtaagggcagagcagggtgaggtggaagccgggaggccataggaagcggcagcagctgtccaagcgagagctaagggactgaaccaggctggtggctaaggaggggagaaggcacgggattcaggaaatatgatgacggtccagctggcctgatctgctgagatttagacatgggtgggcgagggcaggagctaagggtgcggccaaagttttaatttccagccactgggtgtgttaatggaggtgccatttcctgagatggggatgggttgtagtgaactttacagtttagtgctggtataccacaggctcttcataaactcaagcaaattcatttcacccagcaaagccctgggatcacagcccctcagacctgagctcctgcccctcctccactgctatcttatctgtcaaattgatataacatttggtagaagat

SEQ ID NO: 2215 - protein, 89 aa, Homo sapiens
METKVELGLSLFLSCRRWALLQRRQGRRRGRRFPGVPQTEHSRGVPRDHCGGADQERRQHAGPDYLRWHRQGWKAQGLQPETWGTCSQE

SEQ ID NO: 2216 - DNA, 3445 bp, Homo sapiens
ggagttggtgggcagcaggggagacaatagcgaacatgctgtgtgggctcagccgggagacccctggagaggcggacgatgggccctactccaaaggaggcaaggacgcaggaggggccgacgtttccctggcgtgccgcagacagagcattccagaggagttccgagggatcactgtggtggagctgatcaagaaagaaggcagcacgctgggcctgactatctcaggtggcaccgacaaggatggaaagcccagggtctccaacctgagacctgggggacttgcagccaggagtgatctgctgaacattggtgactatattcggtctgtgaacgggatccacctgaccaggctccgccacgatgagatcatcaccctgctcaagaatgtgggcgagcgcgtggtgctggaggtggagtatgagctgcccccgcccgctcctgagaataaccccaggatcatttcaaagacagtggacgtctccctctacaaggagggcaatagctttggctttgtccttagaggtcagtgaaagaattgcccttggtattggggcagcaagaaagaggctaatactaattccatgtgtgtgctgtttggatttgaatgtaatttatgtgtatctcagttctgactttgaagaacacaggaccgttaaggtaagtattcagtgggaaaatctgccaagcaatgaagtaggcttggttggggagagtgagaggagaaagttgtaccggaaaatgatggtgaaagctgctaccgagactgagaacaaagtctggagcttcctagagatcagggaaaaggggaaataaggtgaggtcacagaagggaggcaagccatttaacagagagaagactttggtcatgttacccaccccttgcaccatctcttgggagggcgaatttattgttggtgtctcataagagggtccatggatagcaaggacaaggtcctcaaacaggttttattgaaggagcctgctcaggggctgtgtgggagcctctggatgggaaggggtgggtggatgattcctgcttcttgtcaaatcctgtccaggaggtgcccatgaagatgggcacaagtcccgcccgcttgtcctgacctacgtgcggcccggtggccctgccgacaggtgagccgaggcagaagaaatccacacactgcactgacctgccccaactcccctgcgaagaaggtggagtggggtcaccatgccccttccccagatgaagagatcgaggccctgagggaacactccctgcccggtgtcattcagggagttgttgatggaaccgggatgtaaccccaaatgagggaaacctcgagccctttcttccccaacatactgctgtctcaggggttggggtgtttggagaggggcagccttggtgtcgttcttccctttcctgctccttggttttcccgtctgtggaatggtccctaagagttgctatgagagatttgggggcacgctgattggccactgctgtagccgtctgtgactcagtctcctgggtcctggctgatcgacccagctcggccccgcctgggcccagcccagaagggccaggaggagagaatgtggggaaagaacatgtccagttcccagcccctgatccctcggcctccccagtgggagattcctggccattttaagagaagcctggaacggccttgtcagaaatctaaatctgtccttgggacagggccctgtgatgagctattcatagaacccccgagaatagctttggccacctgttgggagaggcgttccaggctggggatgcgacccaaaccgaggtgaaccctgctggggcccctcccctggcccctgttgagttctttcccaggcgcgggttgtcatcaggccagaatcaccgctgagaaaccagggtgagggtggagcaatgggaagggaccaggacggctcagagcagcccccaatgccgtgtggcatgggcacagcttgcaccctctctgggccctggtgctgtcctttgtccctgaggcaggagttgggggtgacgcttgaagagcacccccagctcagacatttcagggttctgcactgagtctgtgaattactgcacacccagaggagtggcaggcggcagagccaccccatcctgtcttcatcccccccttgctttatgcagctccccactcctggagtggctcattccttcactcactcatgcgccccttcacccgtcccctcctccccttcctcccccacccattccctgcttcttcatcctccatgtcccgcttcccagcgccctcccagacaggctgtgcccagtgctgctgccgggccaggctggtgactggcccttccctacagggagggctccctgaaggtgggcgacaggctgctcagtgtcgatggaatcccgctgcacggggccagccatgccaccgccctggccaccctgcggcagtgcagccacgaggcactctttcaggtggagtatgatgtggccacccctggtgagttgggggcctgagtgtgtgggttggggcaggaggaggcctgggatggggggaggtggcagtggccatggatctttaccactgcaaaggctgcatgaccttatgaccttgggccagtcacagcttctctgggcagtaaatagtatgtgctaggcattgtttgatgtgctggggatccagcctagaacaacagaattgaggtgtctgttctcatggagctggcattctggtggagagaggacagtatccagaatagataagatatggtgtatgtcagttggcaataagtgctatggaaaaaagaaaagaggcaggggagagagatgggacaggctgggggatgctctctcactaggggagtgagggaatgagcgaggcatggaatgtccagggacagcattccaggagggcggaagagtaagtgcaaaggccctgaggcaggagcatggccagcatggttggtcacagtgaggaggctgccgtggttggcacaggtgagtgaaaggaggtaagggcagagcagggtgaggtggaagccgggaggccataggaagcggcagcagctgtccaagcgagagctaagggactgaaccaggctggtggctaaggaggggagaaggcacgggattcaggaaatatgatgacggtccagctggcctgatctgctgagatttagacatgggtgggcgagggcaggagctaagggtgcggccaaagttttaatttccagccactgggtgtgttaatggaggtgccatttcctgagatggggatgggttgtagtgaactttacagtttagtgctggtataccacaggctcttcataaactcaagcaaattcatttcacccagcaaagccctgggatcacagcccctcagacctgagctcctgcccctcctccactgctatcttatctgtcaaattgatataacatttggtagaagat

SEQ ID NO: 2217 - protein, 165 aa, Homo sapiens
MLCGLSRETPGEADDGPYSKGGKDAGGADVSLACRRQSIPEEFRGITVVELIKKEGSTLGLTISGGTDKDGKPRVSNLRPGGLAARSDLLNIGDYIRSVNGIHLTRLRHDEIITLLKNVGERVVLEVEYELPPPAPENNPRIISKTVDVSLYKEGNSFGFVLRGQ

SEQ ID NO: 2218 - DNA, 544 bp, Homo sapiens
cgaaagtggaactcggcctttccctctttctctcctgcagacgatgggccctactccaaaggaggcaaggacgcaggaggggccgacgtttccctggcgtgccgcagacagagcattccagaggagttccgagggatcactgtggtggagctgatcaagaaagaaggcagcacgctgggcctgactatctcaggtggcaccgacaaggatggaaagcccagggtctccaacctgagacctgggggacttgcagccaggagtgatctgctgaacattggtgactatattcggtctgtgaacgggatccacctgaccaggctccgccacgatgagatcatcaccctgctcaagaatgtgggcgagcgcgtggtgctggaggtggagtatgagctgcccccgcccgctcctgagaataaccccaggatcatttcaaagacagtggacgtctccctctacaaggagggcaatagctttggctttgtccttagaggaggtgcccatgaagatgggcacaagtcccgcccgcttgtcctgacctacgtgc

SEQ ID NO: 2219 - protein, 68 aa, Homo sapiens
MRSSPCSRMWASAWCWRWSMSCPRPLLRITPGSFQRQWTSPSTRRAIALALSLEEVPMKMGTSPARLS

SEQ ID NO: 2220 - DNA, 545 bp, Homo sapiens
ggaagagcttcaaggccacatcgcagagggactccgacacagggagacccaaagaaaaggcatcagctacttaaacatttttagcagttcacagatttcttcactttctctctggaggggcagtggagagcgcacggcttctgaggcagcggcctgggatgaacctctagcaattccgctcaccagcagtgtcacctcagataagctacttaaggtctctgggcttcagttttgtcacttgtcaaggaggaagtcctcctccccctgtgtcatgaagattcaaggagagacacatggactcaccctgaacaacatggacactgagcaaaacctcaatttatggttttaaagatgtcaagaagtattaccttaatatacatgtcacaaaaatccttgtcagactctgttctgatttacttgctatgtaggtcacatagcaagtaaatgcctaaaaagtgcaatttaatgatcctttcgtaaactcctcttcccctgggctggaatgatgttctggagttataaattaaaagaatgctggtacccta

SEQ ID NO: 2221 - protein, 34 aa, Homo sapiens
MVLKMSRSITLIYMSQKSLSDSVLIYLLCRSHSK

SEQ ID NO: 2222 - DNA, 444 bp, Homo sapiens
tgagaatttagcttcctctgcacgatgcctgtcagggtccttggttgtcatctccatcttagcgatgcagtcttttaggtgctttaaataaagggggagagaggaaatcttctgaagcagatgacaattatttcccccaagcacagccaccaagccatgctcttattttgaatgatctgcgtcattttccaacatgaagcctcagaaggacatgattacaggctggactcaccgactgtagcctgtgcagctattgtaatgttttaatcagtgattaagtcaagaggtttaatttagtaccgggctccgttaagcttgtgaaaatggttttctgcctcctcaaactaaaaatgtgtctctcccccatgtgtccagcccgaagcatcttaacctttgttctatcttcaacaccgctggctctaacaaattactcagcagtgaatg

SEQ ID NO: 2223 - protein, 39 aa, Homo sapiens
MVFCLLKLKMCLSPMCPARSILTFVLSSTPLALTNYSAV

SEQ ID NO: 2224 - DNA, 1502 bp, Homo sapiens
gaagacacttccggttgcgacggaggtaggcttacgaggcctgtgtcgggtagaaagggtccttcctggaccgggaccctctgccacgaccatggaccgtaggaaaaagcctttggacgtcacggcctcctcgttggtagatcttaaggctgaactcttccgaaagcaagaagaattcaaacaagaaaaacttctaaaagattctggagtttttggaaaaccaaaaacaactaacaagaaaccaagtatctggagcaaacagaatgtaggcgtttcaaatcgagctgagaaggatgctgaacagaagattgaagaacagaagactttagacaaagcaagggaaaaattggaagaaaaagccaaattatatgaaaaaatgactaaaggagactttatagatgaagaagtagaggatatgtaccttgtggatttcacacagaagatcatagacaagcgcaaagaaatggaggcatctggtgcccatagagattctcaaaaggcaggagaaagggacgacgatgaggaaaaccttcctgagggagagatccctcctccccaagaccccagtgaagaatgggtggattacgtggactctttggggcgttcccggcgctgtatgagaaaggatttgccagatctgctggagatggataaaaatcttcaggggagactgtaagtgtgtgtggtatacagagctctgccaaggtctgaaatgcagccacagggattgttttgtgaggggaggctgttttataattaatgatctctgttgctccagtaaggagatattgattgattgattgattgattgaagcactttttagtggttagcatgcacatacacacataatccacacttggggaacaacctgactggtggatgagtagagctgtctcttttacttggaaggatgtctgacaacagagtaacagaataaacccaaacgaaaccagcaaaccaggctttgtggagacaagtggtttgagaatatacacttgattatcccacaaacaagtggctctagggagagaacttactcactttttctttatgtatcattgcatttttgaagtaagggccttataactagatttttcagcagggcctaagacctaagacataactctaaaacgtaagacctaagagataactctgaaacatccaggggaataaattcctcttaccataggaacttttatgtgaaaagtgttgggagaaactccaccttgtccaagtcctgcaggttcaggcatccagcacatagcctttggcttggcataagaaagggagaatggaggctgggcgcggtggctcacgcctgtaatcccagcactttgggaggccgaggcgggcggatcacaaggttaggagttcgagatcatcctggctagcacagtaaaaccccgtctctactgaaaatacaaaaaaaaaaaaaattagccaggtgtggttgcggccgcctgtagtcccagctactcaggaggctgaggcaggagaatgg

SEQ ID NO: 2225 - protein, 194 aa, Homo sapiens
MDRRKKPLDVTASSLVDLKAELFRKQEEFKQEKLLKDSGVFGKPKTTNKKPSIWSKQNVGVSNRAEKDAEQKIEEQKTLDKAREKLEEKAKLYEKMTKGDFIDEEVEDMYLVDFTQKIIDKRKEMEASGAHRDSQKAGERDDDEENLPEGEIPPPQDPSEEWVDYVDSLGRSRRCMRKDLPDLLEMDKNLQGRL

SEQ ID NO: 2226 - DNA, 1506 bp, Homo sapiens
gaagacacttccggttgcgacggaggtaggcttacgaggcctgtgtcgggtagaaagggtccttcctggaccgggaccctctgccacgaccatggaccgtaggaaaaagcctttggacgtcacggcctcctcgttggtagatcttaaggctgaactcttccgaaagcaagaagaattcaaacaagaaaaacttctaaaagattctggagtttttggaaaaccaaaaacaactaacaagaaaccaagtatctggagcaaacagaatgtaggcgtttcaaatcgagctgagaaggatgctgaacagaagattgaagaacagaagactttagacaaagcaagggaaaaattggaagaaaaagccaaattatatgaaaaaatgactaaaggagactttatagatgaagaagtagaggatatgtaccttgtggatttcacacagaagatcatagacaagcgcaaagaaatggaggcatctggtgcccatagagattctcaaaaggcaggagaaagggacgacgatgaggaaaaccttcctgagggagagatccctcctccccaagaccccagtgaagaatgggtggattacgtggactctttggggcgttcccggcgctgtatgagaaaggatttgccagatctgctggagatggataaaaatcttcaggggagactttttattagtcctgctaatgaaaaaaccctattatctgaagatatgagaaaagaacttcagcgccagcaatgggaggaagaagaaagagaggccctgaagaggcccatggggcccgtacattatgaagacattcgggaaaatgaggcccggcaacttggtgttgggtattttgcctttgcccgagacaaagagttgagaaacaagcagatgaaaaccttagagatgctgcgtgaacagacaacagatcagagaacaaaacgagaaaacataaaggaaaagcgaaaggctatcttagaggcaagacttgccaaacttcgacaaaaaaagatgaaaaaatcaaaagaaggtggaacagaagaagaaaatagagatggagatgttattgggcctttgccaccggagccagaggctgtgccaaccccacgtcctgctgcccagagtagcaaagtagaagtcattgtccaggagaggaaggacaccaagcctggagtgccacacatccgggagtgggaccgcggaaaagaattttcctttggatactggtcgaagaggcagtcagatctccgggctgagagagatcctgagtttgccccgccgtcagattactttgtgggtcagaagagaactggtttttccagcagccaggcatggagcagacctgggccagcacagagtgacccagggcagtgccctgaccagagccacggacctagccctgaacatacgtcacccactcctgcccccgacaacccaccacaagcccccacagttactttcaaaactctggatgacatgatttcctattacaaacaagtgacatgatctttcaaagc

SEQ ID NO: 2227 - protein, 467 aa, Homo sapiens; identical to SEQ ID NO: 200

SEQ ID NO: 2228 - DNA, 2730 bp, Homo sapiens
gaagacacttccggttgcgacggaggtaggcttacgaggcctgtgtcgggtagaaagggtccttcctggaccgggaccctctgccacgaccatggaccgtaggaaaaagcctttggacgtcacggcctcctcgttggtagatcttaaggctgaactcttccgaaagcaagaagaattcaaacaagaaaaacttctaaaagattctggagtttttggaaaaccaaaaacaactaacaagaaaccaagtatctggagcaaacagaatgtaggcgtttcaaatcgagctgagaaggatgctgaacagaagattgaagaacagaagactttagacaaagcaagggaaaaattggaagaaaaagccaaattatatgaaaaaatgactaaaggagactttatagatgaagaagtagaggatatgtaccttgtggatttcacacagaagatcatagacaagcgcaaagaaatggaggcatctggtgcccatagagattctcaaaaggcaggagaaagggacgacgatgaggaaaaccttcctgagggagagatccctcctccccaagaccccagtgaagaatgggtggattacgtggactctttggggcgttcccggcgctgtatgagaaaggatttgccagatctgctggagatggataaaaatcttcaggggagactttttattagtcctgctaatgaaaaaaccctattatctgaagatatgagaaaagaacttcagcgccagcaatgggaggaagaagaaagagaggccctgaagaggcccatggggcccgtacattatgaagacattcgggaaaatgatggagatgttattgggcctttgccaccggagccagaggctgtgccaaccccacgtcctgctgcccagagtagcaaagtagaagtcattgtccaggagaggaaggacaccaagcctggagtgccacacatccgggagtgggaccgcggaaaagaattttcctttggatactggtcgaagaggcagtcagatctccgggctgagagagatcctgagtttgccccgccgtcagattactttgtgggtcagaagagaactggtttttccagcagccaggcatggagcagacctgggccagcacagagtgacccagggcagtgccctgaccagagccacggacctagccctgaacatacgtcacccactcctgcccccgacaacccaccacaagcccccacagttactttcaaaactctggatgacatgatttcctattacaaacaagtgacatgatctttcaaagcacgctgacttgggtttgtactttgacagtgcctttctctcccagagggagaaataactttaggaactgaattgtacctttgtcctgtcctttccctaggaggcacagacttcgggttggatttgtcagcaaggaggaaagttatggaaactttggccacttggctgttcattttattctaagtgggatagggacatacctacctggatttacatgtgagctgcgatagaatagaagtatttattctgtaaaattagacactgagatgtgcttataaccctgtttcatatctactcccacgacttactcatatttaagggttcttttccattccttttgcaaatccgagcatgcaggtgtctttattccaagggttcagcttccagatcagccgatggaccataggtcacgaggaatttctccctgtcaagcagtggaaaactgcatgggaggcaaaatgctctgttctccaagaggacccggaagtaatcacataggaaatgataaggaagaccaggaggagctcttcgtagtccagaaaggtagaagtgggagttgtttacttaattttactgtcataccatgctattacctacactcctgtgtgcagtgggcattcagtaaatgtgtgttgaaggactgggacgtacgtggaggctgctggacctggtcagagactgatgtgccttagcggcaatggttagagcttttcagtgcatcccacctccctgtcgcccccatgctcggcttcctcacattcaggagcctgacttggatcagacttggggctgcacagtggagcaggtgggttcccgtgtcattagtaataaggagagggttgggggtgggcagggctccagaaagtcagcagtgtgcctgggcacccaccccatcctctacctgccacacctcagagggttcctacagctgcacacaagcagttgagagttgatgaccaggcccatagggctcccacagctggttcccaggccagtgagtgctgtgagaatacagtagcacaagtccttgttctctgaagagtgggaaggagaggagtgagtgaagtagcctgtcccctgcaggtcctctgcgatggcattgtctcggttcccgcagtgctgcagtgtggaagggagtgccccatcctcattacagatgacacactggagtgtggaggggtcgatgacttgtgcagggtcatatggtacctaaggggcagatctcagacttaaacacaattgatgtctaacccctagacagtctttttagtgccctctgctctcagtcttgttgccctagtatcaagcaatcttagacaaacatcctgaattcttacaaacttacctctaaactctgaggataaagttgccagtccttttaatggtcagcctaatcattctgtcagcctaatcgggtaattgctttttttaataaatacacataaaaaccaact

SEQ ID NO: 2229 - protein, 391 aa, Homo sapiens
MDRRKKPLDVTASSLVDLKAELFRKQEEFKQEKLLKDSGVFGKPKTTNKKPSIWSKQNVGVSNRAEKDAEQKIEEQKTLDKAREKLEEKAKLYEKMTKGDFIDEEVEDMYLVDFTQKIIDKRKEMEASGAHRDSQKAGERDDDEENLPEGEIPPPQDPSEEWVDYVDSLGRSRRCMRKDLPDLLEMDKNLQGRLFISPANEKTLLSEDMRKELQRQQWEEEEREALKRPMGPVHYEDIRENDGDVIGPLPPEPEAVPTPRPAAQSSKVEVIVQERKDTKPGVPHIREWDRGKEFSFGYWSKRQSDLRAERDPEFAPPSDYFVGQKRTGFSSSQAWSRPGPAQSDPGQCPDQSHGPSPEHTSPTPAPDNPPQAPTVTFKTLDDMISYYKQVT

SEQ ID NO: 2230 - DNA, 2958 bp, Homo sapiens
gaagacacttccggttgcgacggaggtaggcttacgaggcctgtgtcgggtagaaagggtccttcctggaccgggaccctctgccacgaccatggaccgtaggaaaaagcctttggacgtcacggcctcctcgttggtagatcttaaggctgaactcttccgaaagcaagaagaattcaaacaagaaaaacttctaaaagattctggagtttttggaaaaccaaaaacaactaacaagaaaccaagtatctggagcaaacagaatgtaggcgtttcaaatcgagctgagaaggatgctgaacagaagattgaagaacagaagactttagacaaagcaagggaaaaattggaagaaaaagccaaattatatgaaaaaatgactaaaggagactttatagatgaagaagtagaggatatgtaccttgtggatttcacacagaagatcatagacaagcgcaaagaaatggaggcatctggtgcccatagagattctcaaaaggcaggagaaagggacgacgatgaggaaaaccttcctgagggagagatccctcctccccaagaccccagtgaagaatgggtggattacgtggactctttggggcgttcccggcgctgtatgagaaaggatttgccagatctgctggagatggataaaaatcttcaggggagactttttattagtcctgctaatgaaaaaaccctattatctgaagatatgagaaaagaacttcagcgccagcaatgggaggaagaagaaagagaggccctgaagaggcccatggggcccgtacattatgaagacattcgggaaaatgaggcccggcaacttggtgttgggtattttgcctttgcccgagacaaagagttgagaaacaagcagatgaaaaccttagagatgctgcgtgaacagacaacagatcagagaacaaaacgagaaaacataaaggaaaagcgaaaggctatcttagaggcaagacttgccaaacttcgacaaaaaaagatgaaaaaatcaaaagaaggtggaacagaagaagaaaatagagatggagatgttattgggcctttgccaccggagccagaggctgtgccaaccccacgtcctgctgcccagagtagcaaagtagaagtcattgtccaggagaggaaggacaccaagcctggagtgccacacatccgggagtgggaccgcggaaaagaattttcctttggatactggtcgaagaggcagtcagatctccgggctgagagagatcctgagtttgccccgccgtcagattactttgtgggtcagaagagaactggtttttccagcagccaggcatggagcagacctgggccagcacagagtgacccagggcagtgccctgaccagagccacggacctagccctgaacatacgtcacccactcctgcccccgacaacccaccacaagcccccacagttactttcaaaactctggatgacatgatttcctattacaaacaagtgacatgatctttcaaagcacgctgacttgggtttgtactttgacagtgcctttctctcccagagggagaaataactttaggaactgaattgtacctttgtcctgtcctttccctaggaggcacagacttcgggttggatttgtcagcaaggaggaaagttatggaaactttggccacttggctgttcattttattctaagtgggatagggacatacctacctggatttacatgtgagctgcgatagaatagaagtatttattctgtaaaattagacactgagatgtgcttataaccctgtttcatatctactcccacgacttactcatatttaagggttcttttccattccttttgcaaatccgagcatgcaggtgtctttattccaagggttcagcttccagatcagccgatggaccataggtcacgaggaatttctccctgtcaagcagtggaaaactgcatgggaggcaaaatgctctgttctccaagaggacccggaagtaatcacataggaaatgataaggaagaccaggaggagctcttcgtagtccagaaaggtagaagtgggagttgtttacttaattttactgtcataccatgctattacctacactcctgtgtgcagtgggcattcagtaaatgtgtgttgaaggactgggacgtacgtggaggctgctggacctggtcagagactgatgtgccttagcggcaatggttagagcttttcagtgcatcccacctccctgtcgcccccatgctcggcttcctcacattcaggagcctgacttggatcagacttggggctgcacagtggagcaggtgggttcccgtgtcattagtaataaggagagggttgggggtgggcagggctccagaaagtcagcagtgtgcctgggcacccaccccatcctctacctgccacacctcagagggttcctacagctgcacacaagcagttgagagttgatgaccaggcccatagggctcccacagctggttcccaggccagtgagtgctgtgagaatacagtagcacaagtccttgttctctgaagagtgggaaggagaggagtgagtgaagtagcctgtcccctgcaggtcctctgcgatggcattgtctcggttcccgcagtgctgcagtgtggaagggagtgccccatcctcattacagatgacacactggagtgtggaggggtcgatgacttgtgcagggtcatatggtacctaaggggcagatctcagacttaaacacaattgatgtctaacccctagacagtctttttagtgccctctgctctcagtcttgttgccctagtatcaagcaatcttagacaaacatcctgaattcttacaaacttacctctaaactctgaggataaagttgccagtccttttaatggtcagcctaatcattctgtcagcctaatcgggtaattgctttttttaataaatacacataaaaaccaact

SEQ ID NO: 2231 - protein, 467 aa, Homo sapiens; identical to SEQ ID NO: 200

SEQ ID NO: 2232 - DNA, 2185 bp, Homo sapiens
acttccggttgcgacggaggtaggcttacgaggcctgtgtcgggtagaaagggtccttcctggaccgggaccctctgccacgaccatggaccgtaggaaaaagcctttggacgtcacggcctcctcgttggtagatcttaaggctgaactcttccgaaagcaagaagaattcaaacaagaaaaacttctaaaagattctggagtttttggaaaaccaaaaacaactaacaagaaaccaagtatctggagcaaacagaatgtaggcgtttcaaatcgagctgagaaggatgctgaacagaagattgaagaacaaaacgagaaaacataaaggaaaagcgaaaggctatcttagaggcaagacttgccaaacttcgacaaaaaaagatgaaaaaatcaaaagaaggtggaacagaagaagaaaatagagatggagatgttattgggcctttgccaccggagccagaggctgtgccaaccccacgtcctgctgcccagagtagcaaagtagaagtcattgtccaggagaggaaggacaccaagcctggagtgccacacatccgggagtgggaccgcggaaaagaattttcctttggatactggtcgaagaggcagtcagatctccgggctgagagagatcctgagtttgccccgccgtcagattactttgtgggtcagaagagaactggtttttccagcagccaggcatggagcagacctgggccagcacagagtgacccagggcagtgccctgaccagagccacggacctagccctgaacatacgtcacccactcctgcccccgacaacccaccacaagcccccacagttactttcaaaactctggatgacatgatttcctattacaaacaagtgacatgatctttcaaagcacgctgacttgggtttgtactttgacagtgcctttctctcccagagggagaaataactttaggaactgaattgtacctttgtcctgtcctttccctaggaggcacagacttcgggttggatttgtcagcaaggaggaaagttatggaaactttggccacttggctgttcattttattctaagtgggatagggacatacctacctggatttacatgtgagctgcgatagaatagaagtatttattctgtaaaattagacactgagatgtgcttataaccctgtttcatatctactcccacgacttactcatatttaagggttcttttccattccttttgcaaatccgagcatgcaggtgtctttattccaagggttcagcttccagatcagccgatggaccataggtcacgaggaatttctccctgtcaagcagtggaaaactgcatgggaggcaaaatgctctgttctccaagaggacccggaagtaatcacataggaaatgataaggaagaccaggaggagctcttcgtagtccagaaaggtagaagtgggagttgtttacttaattttactgtcataccatgctattacctacactcctgtgtgcagtgggcattcagtaaatgtgtgttgaaggactgggacgtacgtggaggctgctggacctggtcagagactgatgtgccttagcggcaatggttagagcttttcagtgcatcccacctccctgtcgcccccatgctcggcttcctcacattcaggagcctgacttggatcagacttggggctgcacagtggagcaggtgggttcccgtgtcattagtaataaggagagggttgggggtgggcagggctccagaaagtcagcagtgtgcctgggcacccaccccatcctctacctgccacacctcagagggttcctacagctgcacacaagcagttgagagttgatgaccaggcccatagggctcccacagctggttcccaggccagtgagtgctgtgagaatacagtagcacaagtccttgttctctgaagagtgggaaggagaggagtgagtgaagtagcctgtcccctgcaggtcctctgcgatggcattgtctcggttcccgcagtgctgcagtgtggaagggagtgccccctagtatcaagcaatcttagacaaacatcctgaattcttacaaacttacctctaaactctgaggataaagttgccagtccttttaatggtcagcctaatcattctgtcagcctaatcgggtaattgctttttttaataaatacacataaaaacc

SEQ ID NO: 2233 - protein, 164 aa, Homo sapiens [sequence omitted]

SEQ ID NO: 2234 - DNA, 753 bp, Homo sapiens
gcgacggaggtaggcttacgaggcctgtgtcgggtagaaagggtccttcctggaccgggaccctctgccacgaccatggaccgtaggaaaaagcctttggacgtcacggcctcctcgttggtagatcttaaggctgaactcttccgaaagcaagaagaattcaaacaagaaaaacttctaaaagattctggagtttttggaaaaccaaaaacaactaacaagaaaccaagtatctggagcaaacagaatgtaggcgtttcaaatcgagctgagaaggatgctgaacagaagattgaagaacagaagactttagacaaagcaagggaaaaattggaagaaaaagccaaattatatgaaaaaatgactaaaggagactttatagatgaagaagtagaggatatgtaccttgtggatttcacacagaagatcatagacaagcgcaaagaaatggaggcatctggtgcccatagagattctcaaaaggcaggagaaagggacgacgatgaggaaaaccttcctgagggagagatccctcctccccaagaccccagtgaagaatggttggtaacatcatggattagctcagaggaacatcctcagacttgcgctgacattttgggagtgattttgttgggttgttatcgagccatttctctttattcttcctgggtgttcttttgagacttccctttaagttaggttggattaggttattatagttgtaaaaacagtagctcaaatgaagacataatt

SEQ ID NO: 2235 - protein, 201 aa, Homo sapiens
MDRRKKPLDVTASSLVDLKAELFRKQEEFKQEKLLKDSGVFGKPKTTNKKPSIWSKQNVGVSNRAEKDAEQKIEEQKTLDKAREKLEEKAKLYEKMTKGDFIDEEVEDMYLVDFTQKIIDKRKEMEASGAHRDSQKAGERDDDEENLPEGEIPPPQDPSEEWLVTSWISSEEHPQTCADILGVILLGCYRAISLYSSWVFF

SEQ ID NO: 2236 - DNA, 1744 bp, Homo sapiens
acagtggtgaatttctcctgtgtgttcctgtgtggatcccgacactcttctcgctttaagagagcctcccgcgcccctcactccgccccttcccaagtctctgggctcgtcaaagcttcccgagagccatggttggtccaggcaggcagtcggagcacctcgtggagcggctgctaacccagggtggggtggggtggggtggaggggtctgcttgtagtactctcagtcctgatgtcacaggcgcggcaaggacatcgcaaggaggagtcggattacagtaaggatgggcagtgcagcaggcagcccgagcgcactctccagccgccggggatcttagccctggaaaggcagcctgcaaggcgctcatcccgcggaggaggcacgctctcggcgctcactgctctccacgccggggacatttccaccgaatgtagcatgaaagggctctgctctacgtgccagccttgggtgagagctgatgctgaagacaccgcggtgggattccagctgtctgattaatgagaaacataatgtattttggtggtacatgccagagtcctgctctcccggcccttgtccgtccaccagcccctcctttgcaaccatcgctggatattaaaccatttcttccctttcctcttgacactgcagctgcagtcaacctcttccccaatttcaatgcgatggacccgattcagaaagctgtaataaaccatacattcggggttcctcttccccaccgaagaaagcaaatcatatcatgcaacatttgccagttgagatttaattctgatagccaggctgcggcccactacaaaggcacgaaacatgccaagaagctcaaagcactggaagccatgaaaaataagcagaaatctgtaactgccaaggacagcgcaaagactaccttcacctccatcactaccaataccatcaataccagctctgacaaaacagacggtactgcagggacaccagcaatatcaacgacgacaactgtggaaatccgcaaaagcagtgttatgacaactgagatcacctctaaagtggaaaaaagcccaacgacagccactggcaatagctcatgtccttctactgagaccgaggaagaaaaggcaaaacggcttctttactgttcgctatgcaaggttgctgtcaactctgcctcgcagctggaggcgcacaacagtggtactaagcacaaaaccatgttagaagcccggaatggaagtggcactatcaaagcctttcctagggcaggagtgaaaggcaaaggacctgttaataaaggaaacacaggcctccaaaataaaacatttcactgtgaaatctgtgatgtgcacgtcaactcggaaacgcaacttaaacagcacattagcagtagaaggcacaaagacagagctgctgggaagcccccgaaacctaaatacagtccttacaacaaactacagaagacagcacatccactgggggtaaaattagtattttcaaaagaaccttcaaagccattggctccacgaattctaccaaatcctctagcagctgcagcagccgcagcagcagtggcagtgagttcccccttcagtcttcgaactgctccagcagcaacactgttccagacttccgcgcttcctccggcactcctgcggccagctcctggacccattcggaccgcccacactcctgtgctgtttgctccttactaaattccaaataggagtaattgtactgcaataatttttc

SEQ ID NO: 2237 - protein, 395 aa, Homo sapiens; identical to SEQ ID NO: 202

SEQ ID NO: 2238 - DNA, 4441 bp, Homo sapiens
gtaaacgttttccatcagggccagacagaagaggccttgtggaccatatggtctctgttgcaattactcaaatctgcaaccatagacgatgtgtaaatgaatgggtatggctgggttcccgtaaaacattatttacaaaacaggcagttggcctagattgccagcccccttagcagattttcagcttctgaaaaggcaggctctgtgtctcatttgccttgtgtctagcagaggccatgcagagagtgagtgctccataaatactcatttggggattattaaatgaagcaaaaggctggaatttgagctgcacacatacaggcctcatgacccagtgtttcaattcctaggtcatacccaacaggattgcctgcacgtagtcaccggagggcatgtgccagggtgtccatggcagcactgtttgtcatggccccaaactggaatctaccccagtgccagttgacaggagataattaaatcaattgcagcatattcacaaaatggaatactatgcagcaattaaaataaatgtgctctatgtaaaaatatggatgaatctcacaaacacgatgttgaattaagatgaagctacacataaaatattacatattgtatgactccattcacaaaaagttgaaaggcaggtaaaacacatctatgctgtgagaagtgaggagagtggttacctttggtggtggaggtgggctggaaggggttctcgggagcttcctgaagcactggctgtgcttttctccttgatcagtgtgctggctatgggggtatgctcagtttgtgaaaattcttcaatccgtgcacttaggatttgtgtacttttctgtatgaatgttatggttgcataaagcattccatttaaaacaaaacaaaaagtaaagtagtttgtccaaacattatttaaccaaagactactatcagccgttctgattttctgtccaatgctcttcaactgctgaccccaaatatgggctctttgtcctagaaaggggaatatggaagccctgtctctcctttcgtcatctctttcacccaggtgtacaagagcagagcccggcattgagtattttgaagatggagccaatgtccctggtctgcccctgcctcggcatcccccaccacctctggcatccatacccgtggtgggtgctgtaacggcatctgggctttgtcatctcctttgcagaacatcgtagctgtgggagctgggttctgcgacggcctccgctgtggagacaacaccaaagcggccgtcatccgcctgggactcatggaaatgattgcttttgccaggatcttctgcaaaggccaagtgtctacagccaccttcctagagagctgcggggtggccgacctgatcaccacctgttacggagggcggaaccgcagggtggccgaggccttcgccagaactgggaagaccattgaagagttggagaaggagatgctgaatgggcaaaagctccaaggaccgcagacttctgctgaagtgtaccgcatcctcaaacagaagggactactggacaagtttccattgtttactgcagtgtatcagatctgctacgaaagcagaccagttcaagagatgttgtcttgtcttcagagccatccagagcatacataaagtgaatcatgcaacgtgttgggggaagttctgcctttctgatcaatcttttgggttcacgtggaaaccaggacttggcaacatgatgtttgactgtaatctcatcacggatatgtatgaatttttacaggttcgtttttgaattgtgagaggcagttcattagcaaagatgtactgggcagtaactaaacacacatgcaaacatgtgaatggtggtttattcctcattctgtggatgtttctatgagccaaaatttgatgtctttttttcaaaattgcttatgaaatttccacacaatcgtagcttataagattggaacgatctcagccaaatattttaggtgtaattcatatgtatttgagtggaggattttttttctcatttttctagtgttaaattttaaccagcattaacatggtagagtggaggagtgagtgtgttcaaagatcaacatatttaacttttaaacactatctcaaagccagcataattaactactttgattgtgggctgacctttgtttttttaacaatcaggcatttttaattagataatccactcatgtatttccccctcactgcagttgtctgcatttttagcctcttttctcttcgttagttgtcagaatatgccttcgtcaaggctcagaggtaacaagacagaaaattcatctgggattttcctgctgtggctggcacattcttctgattaacagacacttgtatgatgctttaggctagttagtgcattttttagcaaacatttatcttaaacatcacagatccactggggggtgcaaggggctactgttagtcctcttgttagatgcagtcactcctcctggtcacctagtgagcagggacagagccaggagtcaagtgcagtgccaaggtgcatgaccctctgagaagtcactgggctgatttgacctccgactcattggttgtgcaaatgccatgtgcagcctttcctgaggccataggagggcttcctgcagctgagatctatgcaggccatcctctcaacaagtgccactccaagggcggtcctcggtgcagcagcatcagcttcacttgtgggggggtgggggaaggggcggtctcagaaatgcaggttcccaggtcccaccctggacttctgaaggggtgtggcatctgtgtttctgatgcttactacaatatgtgaaccactactttagaaaatctgctttaacttggtattcctctaattgtgttccctaggaaatgactgtcccaagagccagtgattattccaggtgttccctggaaaggtcaagtgagtctgggaaacactatgtctgtacacctcttgaaggtgtcgaatgtatgtttatacatcagtggaacccatttttctagcctagcaagtcccaaacacattacactgaagagattttggtgaggaaacttgctggagttttcagggaacactgttctaggcttaggtgaccttaggatcactcaagtagacccttcactccctgcgagaaattaggatgaataactacctgtggcattgttggttctgaacttttacagttcaggcctgctgtgaatctttgatgaagctttaaggtgacactgttgtacaagatgtcagctttgctgaaacgcacattacctggaataagtgctttaattgtagaattagaatgggatttactgtactgttttaaatgagattggcttcagaatccattacagttaccttacatagcacttgatacgtgttaaatgaacatatgaatgtaatttatatattcctagaatttaagttactttgtgagatttgggcctgtccctcaatgccagtttaggatttctttttttctataccttgaaatgattataaaatagattttcatgggaattttaaaaactctatccaaaacatttttggagcattttaaagccccatacacagaagtatacgaaagcacacaaaacactccaagtttcagcagttttagcgccaccattaacccactttgcttgtctcatgaaaaatctttgttaaagtttgtacacaggtaacaaaaagttactttaaaagatatataaagggctgtaagctaattgtggtgtctagtaagtagcataatgagatgtgaggagttggaactttgcgtgttttgcgtattttcatctgcattcagcttcttactctgggtttgtactcgagtgttatttctttacaaatgcccttgtaattaccactctgaagtctgctgactgtgtctcttgaacatacttaggatattctgcacattatggaaaaaggtaaattttagaagtttctgctctactaactgtagatatttatgactctgcgagttatctatttttataaccacctgtggtccattgttcattttaattcacatttcttatgaagtatggtaacagggagggagacacctagattagcagctcaatttgtactacttcagccaatctgtgaatgtaaaaactacactgttgccttgctaggatccaccctcctataatatggaacaaatatctgaatgaaatccaccctaggagacggagtcaaactaaacttgtggtttttcatttaacttttgactacagcatggccccatggcatccacaccaagagggtgttgtgatgaggtgccggtgtgcaaagggaactttagtttttccactggttcttatctgctagccttttacatacatgtgtactatatttgtttatagactgtaggtggatatataatttaaaagcttgatttaataaacatttaaccccctaaacttgca

SEQ ID NO: 2239 - protein, 117 aa, Homo sapiens
MEMIAFARIFCKGQVSTATFLESCGVADLITTCYGGRNRRVAEAFARTGKTIEELEKEMLNGQKLQGPQTSAEVYRILKQKGLLDKFPLFTAVYQICYESRPVQEMLSCLQSHPEHT

SEQ ID NO: 2240 - DNA, 2125 bp, Homo sapiens
tttctcttcgttagttgtcagaatatgccttcgtcaaggctcagaggtaacaagacagaaaattcatctgggattttcctgctgtggctggcacattcttctgattaacagacacttgtatgatgctttaggctagttagtgcattttttagcaaacatttatcttaaacatcacagatccactggggggtgcaaggggctactgttagtcctcttgttagatgcagtcactcctcctggtcacctagtgagcagggacagagccaggagtcaagtgcagtgccaaggtgcatgaccctctgagaagtcactgggctgatttgacctccgactcattggttgtgcaaatgccatgtgcagcctttcctgaggccataggagggcttcctgcagctgagatctatgcaggccatcctctcaacaagtgccactccaagggcggtcctcggtgcagcagcatcagcttcacttgtgggggggtgggggaaggggcggtctcagaaatgcaggttcccaggtcccaccctggacttctgaaggggtgtggcatctgtgtttctgatgcttactacaatatgtgaaccactactttagaaaatctgctttaacttggtattcctctaattgtgttccctaggaaatgactgtcccaagagccagtgattattccaggtgttccctggaaaggtcaattttctagcctagcaagtcccaaacacattacactgaagagattttggtgaggaaacttgctggagttttcagggaacactgttctaggcttaggtgaccttaggatcactcaagtagacccttcactccctgcgagaaattaggatgaataactacctgtggcattgttggttctgaacttttacagttcaggcctgctgtgaatctttgatgaagctttaaggtgacactgttgtacaagatgtcagctttgctgaaacgcacattacctggaataagtgctttaattgtagaattagaatgggatttactgtactgttttaaatgagattggcttcagaatccattacagttaccttacatagcacttgatacgtgttaaatgaacatatgaatgtaatttatatattcctagaatttaagttactttgtgagatttgggcctgtccctcaatgccagtttaggatttctttttttctataccttgaaatgattataaaatagattttcatgggaattttaaaaactctatccaaaacatttttggagcattttaaagccccatacacagaagtatacgaaagcacacaaaacactccaagtttcagcagttttagcgccaccattaacccactttgcttgtctcatgaaaaatctttgttaaagtttgtacacaggtaacaaaaagttactttaaaagatatataaagggctgtaagctaattgtggtgtctagtaagtagcataatgagatgtgaggagttggaactttgcgtgttttgcgtattttcatctgcattcagcttcttactctgggtttgtactcgagtgttatttctttacaaatgcccttgtaattaccactctgaagtctgctgactgtgtctcttgaacatacttaggatattctgcacattatggaaaaaggtaaattttagaagtttctgctctactaactgtagatatttatgactctgcgagttatctatttttataaccacctgtggtccattgttcattttaattcacatttcttatgaagtatggtaacagggagggagacacctagattagcagctcaatttgtactacttcagccaatctgtgaatgtaaaaactacactgttgccttgctaggatccaccctcctataatatggaacaaatatctgaatgaaatccaccctaggagacggagtcaaactaaacttgtggtttttcatttaacttttgactacagcatggccccatggcatccacaccaagagggtgttgtgatgaggtgccggtgtgcaaagggaactttagtttttccactggttcttatctgctagccttttacatacatgtgtactatatttgtttatagactgtaggtggatatataatttaaaagcttgatttaataaacatttaaccccctaaacttgca

SEQ ID NO: 2241 - protein, 77 aa, Homo sapiens [sequence omitted]

SEQ ID NO: 2242 - DNA, 1220 bp, Homo sapiens
atgtttatacatcagtggaacccatttttctagcctagcaagtcccaaacacattacactgaagagattttggtgaggaaacttgctggagttttcagggaacactgttctaggcttaggtgaccttaggatcactcaagtagacccttcactccctgcgagaaattaggatgaataactacctgtggcattgttggttctgaacttttacagttcaggcctgctgtgaatctttgatgaagctttaaggtgacactgttgtacaagatgtcagctttgctgaaacgcacattacctggaataagtgctttaattgtagaattagaatgggatttactgtactgttttaaatgagattggcttcagaatccattacagttaccttacatagcacttgatacgtgttaaatgaacatatgaatgtaatttatatattcctagaatttaagttactttgtgagatttgggcctgtccctcaatgccagtttaggatttctttttttctataccttgaaatgattataaaatagattttcatgggaattttaaaaactctatccaaaacatttttggagcattttaaagccccatacacagaagtatacgaaagcacacaaaacactccaagtttcagcagttttagcgccaccattaacccactttgcttgtctcatgaaaaatctttgttaaagtttgtacacaggtaacaaaaagttactttaaaagatatataaagggctgtaagctaattgtggtgtctagtaagtagcataatgagatgtgaggagttggaactttgcgtgttttgcgtattttcatctgcattcagcttcttactctgggtttgtactcgagtgttatttctttacaaatgcccttgtaattaccactctgaagtctgctgactgtgtctcttgaacatacttaggatattctgcacattatggaacaaatatctgaatgaaatccaccctaggagacggagtcaaactaaacttgtggtttttcatttaacttttgactacagcatggccccatggcatccacaccaagagggtgttgtgatgaggtgccggtgtgcaaagggaactttagtttttccactggttcttatctgctagccttttacatacatgtgtactatatttgtttatagactgtaggtggatatataatttaaaagcttgatttaataaacatttaaccccctaaacttgca

SEQ ID NO: 2243 - protein, 56 aa, Homo sapiens [sequence omitted]

SEQ ID NO: 2244 - DNA, 355 bp, Homo sapiens
ggagcaggggatgccttcatgggagctgcgctatcacagtggtgagtcctgatgccttgcctgtgagggccttcacaaccttcagagcatgatggcattgccagagagaagagaattcaccatggacacctagcctagtgcctggcagatggtgttaaagaaacatccgaagatcggctaattgaaggtggtccacagaccagtgacatcatcatcacccgggagcctattagaaatgcagaatctcaggccccacccctgacctgctgaactggaatatgcattttaacaaaatccccaggtgctttgtgtgcacgttagatttaagaaatgccaccttgagaccctcattctc

SEQ ID NO: 2245 - protein, 43 aa, Homo sapiens [sequence omitted]

SEQ ID NO: 2246 - DNA, 1172 bp, Homo sapiens
ggcctccaccgccttccccggctgcccggcagcctcccctcgctcgctctcctcttcctctagggccccagcgcagctcgggagcccgcgcaccgaggcgctaggggcaccgcgcactagagggacacccgccgcgcctggacagcccccggcgggcgcccccctcgcacctcctgccccgcgcgggccgcgctcccctcccccgcgcctgtgtccccagggcgcagggccgcgcgtccagccccagacccgccggggtccctggggacgcgccagcccggcagtggctcgacgatggaggagccgcagcgcgcccgctcgcacacagtcaccaccaccgccagctccttcgcagagaacttctccaccagcagcagcagcttcgcctacgaccgggagttcctccgcaccctgcccggcttcctcatcgtggccgagatcgttctggggctgctggtatggacgcttattgctggaactgagtacttccgggtccccgcatttggctgggtcatgtttgtagctgtattttactgggtcctcaccgtcttcttcctcattatctacataacaatgacctacaccaggattccccaggtgccctggacaacagtgggcctgtgctttaacggcagtgccttcgtcttgtacctctctgccgctgttgtagatgcatcttccgtctcccctgagagggacagtcacaacttcaacagctgggcggcctcatcgttctttgccttcctggtcaccatctgctacgctggaaatacatatttcagttttatagcatggagatccaggaccatacagtgatttaccattttgataattaaaaggaaaaaaaaaggaagactctcactgtaaaaacagctgtaggtataatgtatattcccagagaattgtatttaactaattaatgttttttatattcttaaatttgctcacaaattgtggtttgttacaattaaactggatacttatttgcaaagtgttgtagcttataatgaactcttaagtatcttattaatgtattaatgtcttcatagatcatattttcttagacaatgtttaaatagataaattgctaatattgagaatgtgtcaagtttgtaaacctaacttttaagatgccagattcttttttgattaaatgttgcaaaatcccaagt

SEQ ID NO: 2247 - protein, 173 aa, Homo sapiens; identical to SEQ ID NO: 207

SEQ ID NO: 2248 - DNA, 990 bp, Homo sapiens
ccgccttccccggctgcccggcagcctcccctcgctcgctctcctcttcctctagggccccagcgcagctcgggagcccgcgcaccgaggcgctaggggcaccgcgcactagagggacacccgccgcgcctggacagcccccggcgggcgcccccctcgcacctcctgccccgcgcgggccgcgctcccctcccccgcgcctgtgtccccagggcgcagggccgcgcgtccagccccagacccgccggggtccctggggacgcgccagcccggcagtggctcgacgatggaggagccgcagcgcgcccgctcgcacacagtcaccaccaccgccagctccttcgcagagaacttctccaccagcagcagcagcttcgcctacgaccgggagttcctccgcaccctgcccggcttcctcatcgtggccgagatcggcctgtgctttaacggcagtgccttcgtcttgtacctctctgccgctgttgtagatgcatcttccgtctcccctgagagggacagtcacaacttcaacagctgggcggcctcatcgttctttgccttcctggtcaccatctgctacgctggaaatacatatttcagttttatagcatggagatccaggaccatacagtgatttaccattttgataattaaaaggaaaaaaaaaggaagactctcactgtaaaaacagctgtaggtataatgtatattcccagagaattgtatttaactaattaatgttttttatattcttaaatttgctcacaaattgtggtttgttacaattaaactggatacttatttgcaaagtgttgtagcttataatgaactcttaagtatcttattaatgtattaatgtcttcatagatcatattttcttagacaatgtttaaatagataaattgctaatattgagaatgtgtcaagtttgtaaacctaacttttaagatgccagattcttttttgattaaatgttgcaaaatcccaagt

SEQ ID NO: 2249 - protein, 115 aa, Homo sapiens
MEEPQRARSHTVTTTASSFAENFSTSSSSFAYDREFLRTLPGFLIVAEIGLCFNGSAFVLYLSAAVVDASSVSPERDSHNFNSWAASSFFAFLVTICYAGNTYFSFIAWRSRTIQ

SEQ ID NO: 2250 - DNA, 8053 bp, Homo sapiens
gggcgagcgcctccgtccccggatgtgagctccggctgcccgcggtcccgagccagcggcggcgcgggcggcggcggcgggcaccgggcaccgcggcgggcgggcagacgggcgggcatggggggagcgccgagcggccccggcggccgggccggcatcaccgcggcgtctctccgctagaggaggggacaagccagttctcctttgcagcaaaaaattacatgtatatattattaagataatatatacattggattttatttttttaaaaagtttattttgctccatttttgaaaaagagagagcttgggtggcgagcggttttttttttaaatcaattatccttattttctgttatttgtccccgtccctccccacccccctgctgaagcgagaataagggcagggaccgcggctcctacctcttggtgatccccttccccattccgcccccgcctcaacgcccagcacagtgccctgcacacagtagtcgctcaataaatgttcgtggatgatgatgatgatgatgatgaaaaaaatgcagcatcaacggcagcagcaagcggaccacgcgaacgaggcaaactatgcaagaggcaccagacttcctctttctggtgaaggaccaacttctcagccgaatagctccaagcaaactgtcctgtcttggcaagctgcaatcgatgctgctagacaggccaaggctgcccaaactatgagcacctctgcacccccacctgtaggatctctctcccaaagaaaacgtcagcaatacgccaagagcaaaaaacagggtaactcgtccaacagccgacctgcccgcgcccttttctgtttatcactcaataaccccatccgaagagcctgcattagtatagtggaatggaaaccatttgacatatttatattattggctatttttgccaattgtgtggccttagctatttacatcccattccctgaagatgattctaattcaacaaatcataacttggaaaaagtagaatatgccttcctgattatttttacagtcgagacatttttgaagattatagcgtatggattattgctacatcctaatgcttatgttaggaatggatggaatttactggattttgttatagtaatagtaggattgtttagtgtaattttggaacaattaaccaaagaaacagaaggcgggaaccactcaagcggcaaatctggaggctttgatgtcaaagccctccgtgcctttcgagtgttgcgaccacttcgactagtgtcaggagtgcccagtttacaagttgtcctgaactccattataaaagccatggttcccctccttcacatagcccttttggtattatttgtaatcataatctatgctattataggattggaactttttattggaaaaatgcacaaaacatgtttttttgctgactcagatatcgtagctgaagaggacccagctccatgtgcgttctcagggaatggacgccagtgtactgccaatggcacggaatgtaggagtggctgggttggcccgaacggaggcatcaccaactttgataactttgcctttgccatgcttactgtgtttcagtgcatcaccatggagggctggacagatgtgctctactggatgaatgatgctatgggatttgaattgccctgggtgtattttgtcagtctcgtcatctttgggtcatttttcgtactaaatcttgtacttggtgtattgagcggagaattctcaaaggaaagagagaaggcaaaagcacggggagatttccagaagctccgggagaagcagcagctggaggaggatctaaagggctacttggattggatcacccaagctgaggacatcgatccggagaatgaggaagaaggaggagaggaaggcaaacgaaatactagcatgcccaccagcgagactgagtctgtgaacacagagaacgtcagcggtgaaggcgagaaccgaggctgctgtggaagtctctgtcaagccatctcaaaatccaaactcagccgacgctggcgtcgctggaaccgattcaatcgcagaagatgtagggccgccgtgaagtctgtcacgttttactggctggttatcgtcctggtgtttctgaacaccttaaccatttcctctgagcactacaatcagccagattggttgacacagattcaagatattgccaacaaagtcctcttggctctgttcacctgcgagatgctggtaaaaatgtacagcttgggcctccaagcatatttcgtctctcttttcaaccggtttgattgcttcgtggtgtgtggtggaatcactgagacgatcttggtggaactggaaatcatgtctcccctggggatctctgtgtttcggtgtgtgcgcctcttaagaatcttcaaagtgaccaggcactggacttccctgagcaacttagtggcatccttattaaactccatgaagtccatcgcttcgctgttgcttctgctttttctcttcattatcatcttttccttgcttgggatgcagctgtttggcggcaagtttaattttgatgaaacgcaaaccaagcggagcacctttgacaatttccctcaagcacttctcacagtgttccagatcctgacaggcgaagactggaatgctgtgatgtacgatggcatcatggcttacgggggcccatcctcttcaggaatgatcgtctgcatctacttcatcatcctcttcatttgtggtaactatattctactgaatgtcttcttggccatcgctgtagacaatttggctgatgctgaaagtctgaacactgctcagaaagaagaagcggaagaaaaggagaggaaaaagattgccagaaaagagagcctagaaaataaaaagaacaacaaaccagaagtcaaccagatagccaacagtgacaacaaggttacaattgatgactatagagaagaggatgaagacaaggacccctatccgccttgcgatgtgccagtaggggaagaggaagaggaagaggaggaggatgaacctgaggttcctgccggaccccgtcctcgaaggatctcggagttgaacatgaaggaaaaaattgcccccatccctgaagggagcgctttcttcattcttagcaagaccaacccgatccgcgtaggctgccacaagctcatcaaccaccacatcttcaccaacctcatccttgtcttcatcatgctgagcagcgctgccctggccgcagaggaccccatccgcagccactccttccggaacacgatactgggttactttgactatgccttcacagccatctttactgttgagatcctgttgaagatgacaacttttggagctttcctccacaaaggggccttctgcaggaactacttcaatttgctggatatgctggtggttggggtgtctctggtgtcatttgggattcaatccagtgccatctccgttgtgaagattctgagggtcttaagggtcctgcgtcccctcagggccatcaacagagcaaaaggacttaagcacgtggtccagtgcgtcttcgtggccatccggaccatcggcaacatcatgatcgtcaccaccctcctgcagttcatgtttgcctgtatcggggtccagttgttcaaggggaagttctatcgctgtacggatgaagccaaaagtaaccctgaagaatgcaggggacttttcatcctctacaaggatggggatgttgacagtcctgtggtccgtgaacggatctggcaaaacagtgatttcaacttcgacaacgtcctctctgctatgatggcgctcttcacagtctccacgtttgagggctggcctgcgttgctgtataaagccatcgactcgaatggagagaacatcggcccaatctacaaccaccgcgtggagatctccatcttcttcatcatctacatcatcattgtagctttcttcatgatgaacatctttgtgggctttgtcatcgttacatttcaggaacaaggagaaaaagagtataagaactgtgagctggacaaaaatcagcgtcagtgtgttgaatacgccttgaaagcacgtcccttgcggagatacatccccaaaaacccctaccagtacaagttctggtacgtggtgaactcttcgcctttcgaatacatgatgtttgtcctcatcatgctcaacacactctgcttggccatgcagcactacgagcagtccaagatgttcaatgatgccatggacattctgaacatggtcttcaccggggtgttcaccgtcgagatggttttgaaagtcatcgcatttaagcctaaggggtattttagtgacgcctggaacacgtttgactccctcatcgtaatcggcagcattatagacgtggccctcagcgaagcagacccaactgaaagtgaaaatgtccctgtcccaactgctacacctgggaactctgaagagagcaatagaatctccatcacctttttccgtcttttccgagtgatgcgattggtgaagcttctcagcaggggggaaggcatccggacattgctgtggacttttattaagtcctttcaggcgctcccgtatgtggccctcctcatagccatgctgttcttcatctatgcggtcattggcatgcagatgtttgggaaagttgccatgagagataacaaccagatcaataggaacaataacttccagacgtttccccaggcggtgctgctgctcttcaggtgtgcaacaggtgaggcctggcaggagatcatgctggcctgtctcccagggaagctctgtgaccctgagtcagattacaaccccggggaggagtatacatgtgggagcaactttgccattgtctatttcatcagtttttacatgctctgtgcatttctgatcatcaatctgtttgtggctgtcatcatggataatttcgactatctgacccgggactggtctattttggggcctcaccatttagatgaattcaaaagaatatggtcagaatatgaccctgaggcaaagggaaggataaaacaccttgatgtggtcactctgcttcgacgcatccagcctcccctggggtttgggaagttatgtccacacagggtagcgtgcaagagattagttgccatgaacatgcctctcaacagtgacgggacagtcatgtttaatgcaaccctgtttgctttggttcgaacggctcttaagatcaagaccgaagggaacctggagcaagctaatgaagaacttcgggctgtgataaagaaaatttggaagaaaaccagcatgaaattacttgaccaagttgtccctccagctggtgatgatgaggtaaccgtggggaagttctatgccactttcctgatacaggactactttaggaaattcaagaaacggaaagaacaaggactggtgggaaagtaccctgcgaagaacaccacaattgccctacaggcgggattaaggacactgcatgacattgggccagaaatccggcgtgctatatcgtgtgatttgcaagatgacgagcctgaggaaacaaaacgagaagaagaagatgatgtgttcaaaagaaatggtgccctgcttggaaaccatgtcaatcatgttaatagtgataggagagattcccttcagcagaccaataccacccaccgtcccctgcatgtccaaaggccttcaattccacctgcaagtgatactgagaaaccgctgtttcctccagcaggaaattcggtgtgtcataaccatcataaccataattccataggaaagcaagttcccacctcaacaaatgccaatctcaataatgccaatatgtccaaagctgcccatggaaagcggcccagcattgggaaccttgagcatgtgtctgaaaatgggcatcattcttcccacaagcatgaccgggagcctcagagaaggtccagtgtgaaaagaacccgctattatgaaacttacattaggtccgactcaggagatgaacagctcccaactatttgccgggaagacccagagatacatggctatttcagggacccccactgcttgggggagcaggagtatttcagtagtgaggaatgctacgaggatgacagctcgcccacctggagcaggcaaaactatggctactacagcagatacccaggcagaaacatcgactctgagaggccccgaggctaccatcatccccaaggattcttggaggacgatgactcgcccgtttgctatgattcacggagatctccaaggagacgcctactacctcccaccccagcatcccaccggagatcctccttcaactttgagtgcctgcgccggcagagcagccaggaagaggtcccgtcgtctcccatcttcccccatcgcacggccctgcctctgcatctaatgcagcaacagatcatggcagttgccggcctagattcaagtaaagcccagaagtactcaccgagtcactcgacccggtcgtgggccacccctccagcaacccctccctaccgggactggacaccgtgctacacccccctgatccaagtggagcagtcagaggccctggaccaggtgaacggcagcctgccgtccctgcaccgcagctcctggtacacagacgagcccgacatctcctaccggactttcacaccagccagcctgactgtccccagcagcttccggaacaaaaacagcgacaagcagaggagtgcggacagcttggtggaggcagtcctgatatccgaaggcttgggacgctatgcaagggacccaaaatttgtgtcagcaacaaaacacgaaatcgctgatgcctgtgacctcaccatcgacgagatggagagtgcagccagcaccctgcttaatgggaacgtgcgtccccgagccaacggggatgtgggccccctctcacaccggcaggactatgagctacaggactttggtcctggctacagcgacgaagagccagaccctgggagggatgaggaggacctggcggatgaaatgatatgcatcaccaccttgtagcccccagcgaggggcagactggctctggcctcaggtggggcgcaggagagccaggggaaaagtgcctcatagttaggaaagtttaggcactagttgggagtaatattcaattaattagacttttgtataagagatgtcatgcctcaagaaagccataaacctggtaggaacaggtcccaagcggttgagcctggcagagtaccatgcgctcggccccagctgcaggaaacagcaggccccgccctctcacagaggatgggtgaggaggccagacctgccctgccccattgtccagatgggcactgctgtggagtctgcttctcccatgtaccagggcaccaggcccacccaactgaaggcatggcggcggggtgcaggggaaagttaaaggtgatgacgatcatcacacctgtgtcgttacctcagccatcggtctagcatatcagtcactgggcccaacatatccatttttaaaccctttcccccaaatacactgcgtcctggttcctgtttagctgttctgaaatacggtgtgtaagtaagtcagaacccagctaccagtgattattgcgagggcaatgggacctcataaataaggttttctgtgatgtgacgccagtttacataagagaatatcactccgatggtcggtttctgactgtcacgctaagggcaactgtaaactggaataataatgcactcgcaaccaggtaaacttagatacactagtttgtttaaaattatagatttactgtacatgacttgtaatatactataatttgtatttgtaaagagatggtctatattttgtaattactgtattgtatttgaactgcagcaatatccatgggtcctaataattgtagttccccactaaaatctagaaattattagtatttttactcgggctatccagaagtagaagaaatagagccaattctcatttattcagcgaaaatcctctggggttaaaattttaagtttgaaagaacttgacactacagaaatttttctaaaatattttgagtcactataaacctatcatctttccacaag

SEQ ID NO: 2251 - protein, 2161 aa, Homo sapiens
MMMMMMMKKMQHQRQQQADHANEANYARGTRLPLSGEGPTSQPNSSKQTVLSWQAAIDAARQAKAAQTMSTSAPPPVGSLSQRKRQQYAKSKKQGNSSNSRPARALFCLSLNNPIRRACISIVEWKPFDIFILLAIFANCVALAIYIPFPEDDSNSTNHNLEKVEYAFLIIFTVETFLKIIAYGLLLHPNAYVRNGWNLLDFVIVIVGLFSVILEQLTKETEGGNHSSGKSGGFDVKALRAFRVLRPLRLVSGVPSLQVVLNSIIKAMVPLLHIALLVLFVIIIYAIIGLELFIGKMHKTCFFADSDIVAEEDPAPCAFSGNGRQCTANGTECRSGWVGPNGGITNFDNFAFAMLTVFQCITMEGWTDVLYWMNDAMGFELPWVYFVSLVIFGSFFVLNLVLGVLSGEFSKEREKAKARGDFQKLREKQQLEEDLKGYLDWITQAEDIDPENEEEGGEEGKRNTSMPTSETESVNTENVSGEGENRGCCGSLCQAISKSKLSRRWRRWNRFNRRRCRAAVKSVTFYWLVIVLVFLNTLTISSEHYNQPDWLTQIQDIANKVLLALFTCEMLVKMYSLGLQAYFVSLFNRFDCFVVCGGITETILVELEIMSPLGISVFRCVRLLRIFKVTRHWTSLSNLVASLLNSMKSIASLLLLLFLFIIIFSLLGMQLFGGKFNFDETQTKRSTFDNFPQALLTVFQILTGEDWNAVMYDGIMAYGGPSSSGMIVCIYFIILFICGNYILLNVFLAIAVDNLADAESLNTAQKEEAEEKERKKIARKESLENKKNNKPEVNQIANSDNKVTIDDYREEDEDKDPYPPCDVPVGEEEEEEEEDEPEVPAGPRPRRISELNMKEKIAPIPEGSAFFILSKTNPIRVGCHKLINHHIFTNLILVFIMLSSAALAAEDPIRSHSFRNTILGYFDYAFTAIFTVEILLKMTTFGAFLHKGAFCRNYFNLLDMLVVGVSLVSFGIQSSAISVVKILRVLRVLRPLRAINRAKGLKHVVQCVFVAIRTIGNIMIVTTLLQFMFACIGVQLFKGKFYRCTDEAKSNPEECRGLFILYKDGDVDSPVVRERIWQNSDFNFDNVLSAMMALFTVSTFEGWPALLYKAIDSNGENIGPIYNHRVEISIFFIIYIIIVAFFMMNIFVGFVIVTFQEQGEKEYKNCELDKNQRQCVEYALKARPLRRYIPKNPYQYKFWYVVNSSPFEYMMFVLIMLNTLCLAMQHYEQSKMFNDAMDILNMVFTGVFTVEMVLKVIAFKPKGYFSDAWNTFDSLIVIGSIIDVALSEADPTESENVPVPTATPGNSEESNRISITFFRLFRVMRLVKLLSRGEGIRTLLWTFIKSFQALPYVALLIAMLFFIYAVIGMQMFGKVAMRDNNQINRNNNFQTFPQAVLLLFRCATGEAWQEIMLACLPGKLCDPESDYNPGEEYTCGSNFAIVYFISFYMLCAFLIINLFVAVIMDNFDYLTRDWSILGPHHLDEFKRIWSEYDPEAKGRIKHLDVVTLLRRIQPPLGFGKLCPHRVACKRLVAMNMPLNSDGTVMFNATLFALVRTALKIKTEGNLEQANEELRAVIKKIWKKTSMKLLDQVVPPAGDDEVTVGKFYATFLIQDYFRKFKKRKEQGLVGKYPAKNTTIALQAGLRTLHDIGPEIRRAISCDLQDDEPEETKREEEDDVFKRNGALLGNHVNHVNSDRRDSLQQTNTTHRPLHVQRPSIPPASDTEKPLFPPAGNSVCHNHHNHNSIGKQVPTSTNANLNNANMSKAAHGKRPSIGNLEHVSENGHHSSHKHDREPQRRSSVKRTRYYETYIRSDSGDEQLPTICREDPEIHGYFRDPHCLGEQEYFSSEECYEDDSSPTWSRQNYGYYSRYPGRNIDSERPRGYHHPQGFLEDDDSPVCYDSRRSPRRRLLPPTPASHRRSSFNFECLRRQSSQEEVPSSPIFPHRTALPLHLMQQQIMAVAGLDSSKAQKYSPSHSTRSWATPPATPPYRDWTPCYTPLIQVEQSEALDQVNGSLPSLHRSSWYTDEPDISYRTFTPASLTVPSSFRNKNSDKQRSADSLVEAVLISEGLGRYARDPKFVSATKHEIADACDLTIDEMESAASTLLNGNVRPRANGDVGPLSHRQDYELQDFGPGYSDEEPDPGRDEEDLADEMICITTL

SEQ ID NO: 2252 - DNA, 9319 bp, Homo sapiens
gggcgagcgcctccgtccccggatgtgagctccggctgcccgcggtcccgagccagcggcggcgcgggcggcggcggcgggcaccgggcaccgcggcgggcgggcagacgggcgggcatggggggagcgccgagcggccccggcggccgggccggcatcaccgcggcgtctctccgctagaggaggggacaagccagttctcctttgcagcaaaaaattacatgtatatattattaagataatatatacattggattttatttttttaaaaagtttattttgctccatttttgaaaaagagagagcttgggtggcgagcggttttttttttaaatcaattatccttattttctgttatttgtccccgtccctccccacccccctgctgaagcgagaataagggcagggaccgcggctcctacctcttggtgatccccttccccattccgcccccgcctcaacgcccagcacagtgccctgcacacagtagtcgctcaataaatgttcgtggatgatgatgatgatgatgatgaaaaaaatgcagcatcaacggcagcagcaagcggaccacgcgaacgaggcaaactatgcaagaggcaccagacttcctctttctggtgaaggaccaacttctcagccgaatagctccaagcaaactgtcctgtcttggcaagctgcaatcgatgctgctagacaggccaaggctgcccaaactatgagcacctctgcacccccacctgtaggatctctctcccaaagaaaacgtcagcaatacgccaagagcaaaaaacagggtaactcgtccaacagccgacctgcccgcgcccttttctgtttatcactcaataaccccatccgaagagcctgcattagtatagtggaatggaaaccatttgacatatttatattattggctatttttgccaattgtgtggccttagctatttacatcccattccctgaagatgattctaattcaacaaatcataacttggaaaaagtagaatatgccttcctgattatttttacagtcgagacatttttgaagattatagcgtatggattattgctacatcctaatgcttatgttaggaatggatggaatttactggattttgttatagtaatagtaggattgtttagtgtaattttggaacaattaaccaaagaaacagaaggcgggaaccactcaagcggcaaatctggaggctttgatgtcaaagccctccgtgcctttcgagtgttgcgaccacttcgactagtgtcaggagtgcccagtttacaagttgtcctgaactccattataaaagccatggttcccctccttcacatagcccttttggtattatttgtaatcataatctatgctattataggattggaactttttattggaaaaatgcacaaaacatgtttttttgctgactcagatatcgtagctgaagaggacccagctccatgtgcgttctcagggaatggacgccagtgtactgccaatggcacggaatgtaggagtggctgggttggcccgaacggaggcatcaccaactttgataactttgcctttgccatgcttactgtgtttcagtgcatcaccatggagggctggacagatgtgctctactggatgaatgatgctatgggatttgaattgccctgggtgtattttgtcagtctcgtcatctttgggtcatttttcgtactaaatcttgtacttggtgtattgagcggagaattctcaaaggaaagagagaaggcaaaagcacggggagatttccagaagctccgggagaagcagcagctggaggaggatctaaagggctacttggattggatcacccaagctgaggacatcgatccggagaatgaggaagaaggaggagaggaaggcaaacgaaatactagcatgcccaccagcgagactgagtctgtgaacacagagaacgtcagcggtgaaggcgagaaccgaggctgctgtggaagtctctgtcaagccatctcaaaatccaaactcagccgacgctggcgtcgctggaaccgattcaatcgcagaagatgtagggccgccgtgaagtctgtcacgttttactggctggttatcgtcctggtgtttctgaacaccttaaccatttcctctgagcactacaatcagccagattggttgacacagattcaagatattgccaacaaagtcctcttggctctgttcacctgcgagatgctggtaaaaatgtacagcttgggcctccaagcatatttcgtctctcttttcaaccggtttgattgcttcgtggtgtgtggtggaatcactgagacgatcttggtggaactggaaatcatgtctcccctggggatctctgtgtttcggtgtgtgcgcctcttaagaatcttcaaagtgaccaggcactggacttccctgagcaacttagtggcatccttattaaactccatgaagtccatcgcttcgctgttgcttctgctttttctcttcattatcatcttttccttgcttgggatgcagctgtttggcggcaagtttaattttgatgaaacgcaaaccaagcggagcacctttgacaatttccctcaagcacttctcacagtgttccagatcctgacaggcgaagactggaatgctgtgatgtacgatggcatcatggcttacgggggcccatcctcttcaggaatgatcgtctgcatctacttcatcatcctcttcatttgtggtaactatattctactgaatgtcttcttggccatcgctgtagacaatttggctgatgctgaaagtctgaacactgctcagaaagaagaagcggaagaaaaggagaggaaaaagattgccagaaaagagagcctagaaaataaaaagaacaacaaaccagaagtcaaccagatagccaacagtgacaacaaggttacaattgatgactatagagaagaggatgaagacaaggacccctatccgccttgcgatgtgccagtaggggaagaggaagaggaagaggaggaggatgaacctgaggttcctgccggaccccgtcctcgaaggatctcggagttgaacatgaaggaaaaaattgcccccatccctgaagggagcgctttcttcattcttagcaagaccaacccgatccgcgtaggctgccacaagctcatcaaccaccacatcttcaccaacctcatccttgtcttcatcatgctgagcagcgctgccctggccgcagaggaccccatccgcagccactccttccggaacacgatactgggttactttgactatgccttcacagccatctttactgttgagatcctgttgaagatgacaacttttggagctttcctccacaaaggggccttctgcaggaactacttcaatttgctggatatgctggtggttggggtgtctctggtgtcatttgggattcaatccagtgccatctccgttgtgaagattctgagggtcttaagggtcctgcgtcccctcagggccatcaacagagcaaaaggacttaagcacgtggtccagtgcgtcttcgtggccatccggaccatcggcaacatcatgatcgtcaccaccctcctgcagttcatgtttgcctgtatcggggtccagttgttcaaggggaagttctatcgctgtacggatgaagccaaaagtaaccctgaagaatgcaggggacttttcatcctctacaaggatggggatgttgacagtcctgtggtccgtgaacggatctggcaaaacagtgatttcaacttcgacaacgtcctctctgctatgatggcgctcttcacagtctccacgtttgagggctggcctgcgttgctgtataaagccatcgactcgaatggagagaacatcggcccaatctacaaccaccgcgtggagatctccatcttcttcatcatctacatcatcattgtagctttcttcatgatgaacatctttgtgggctttgtcatcgttacatttcaggaacaaggagaaaaagagtataagaactgtgagctggacaaaaatcagcgtcagtgtgttgaatacgccttgaaagcacgtcccttgcggagatacatccccaaaaacccctaccagtacaagttctggtacgtggtgaactcttcgcctttcgaatacatgatgtttgtcctcatcatgctcaacacactctgcttggccatgcagcactacgagcagtccaagatgttcaatgatgccatggacattctgaacatggtcttcaccggggtgttcaccgtcgagatggttttgaaagtcatcgcatttaagcctaaggggtattttagtgacgcctggaacacgtttgactccctcatcgtaatcggcagcattatagacgtggccctcagcgaagcagacccaactgaaagtgaaaatgtccctgtcccaactgctacacctgggaactctgaagagagcaatagaatctccatcacctttttccgtcttttccgagtgatgcgattggtgaagcttctcagcaggggggaaggcatccggacattgctgtggacttttattaagtcctttcaggcgctcccgtatgtggccctcctcatagccatgctgttcttcatctatgcggtcattggcatgcagatgtttgggaaagttgccatgagagataacaaccagatcaataggaacaataacttccagacgtttccccaggcggtgctgctgctcttcaggtgtgcaacaggtgaggcctggcaggagatcatgctggcctgtctcccagggaagctctgtgaccctgagtcagattacaaccccggggaggagtatacatgtgggagcaactttgccattgtctatttcatcagtttttacatgctctgtgcatttctgatcatcaatctgtttgtggctgtcatcatggataatttcgactatctgacccgggactggtctattttggggcctcaccatttagatgaattcaaaagaatatggtcagaatatgaccctgaggcaaagggaaggataaaacaccttgatgtggtcactctgcttcgacgcatccagcctcccctggggtttgggaagttatgtccacacagggtagcgtgcaagagattagttgccatgaacatgcctctcaacagtgacgggacagtcatgtttaatgcaaccctgtttgctttggttcgaacggctcttaagatcaagaccgaagggaacctggagcaagctaatgaagaacttcgggctgtgataaagaaaatttggaagaaaaccagcatgaaattacttgaccaagttgtccctccagctggtgatgatgaggtaaccgtggggaagttctatgccactttcctgatacaggactactttaggaaattcaagaaacggaaagaacaaggactggtgggaaagtaccctgcgaagaacaccacaattgccctacaggcgggattaaggacactgcatgacattgggccagaaatccggcgtgctatatcgtgtgatttgcaagatgacgagcctgaggaaacaaaacgagaagaagaagatgatgtgttcaaaagaaatggtgccctgcttggaaaccatgtcaatcatgttaatagtgataggagagattcccttcagcagaccaataccacccaccgtcccctgcatgtccaaaggccttcaattccacctgcaagtgatactgagaaaccgctgtttcctccagcaggaaattcggtgtgtcataaccatcataaccataattccataggaaagcaagttcccacctcaacaaatgccaatctcaataatgccaatatgtccaaagctgcccatggaaagcggcccagcattgggaaccttgagcatgtgtctgaaaatgggcatcattcttcccacaagcatgaccgggagcctcagagaaggtccagtgtgaaaagaacccgctattatgaaacttacattaggtccgactcaggagatgaacagctcccaactatttgccgggaagacccagagatacatggctatttcagggacccccactgcttgggggagcaggagtatttcagtagtgaggaatgctacgaggatgacagctcgcccacctggagcaggcaaaactatggctactacagcagatacccaggcagaaacatcgactctgagaggccccgaggctaccatcatccccaaggattcttggaggacgatgactcgcccgtttgctatgattcacggagatctccaaggagacgcctactacctcccaccccagcatcccaccggagatcctccttcaactttgagtgcctgcgccggcagagcagccaggaagaggtcccgtcgtctcccatcttcccccatcgcacggccctgcctctgcatctaatgcagcaacagatcatggcagttgccggcctagattcaagtaaagcccagaagtactcaccgagtcactcgacccggtcgtgggccacccctccagcaacccctccctaccgggactggacaccgtgctacacccccctgatccaagtggagcagtcagaggccctggaccaggtgaacggcagcctgccgtccctgcaccgcagctcctggtacacagacgagcccgacatctcctaccggactttcacaccagccagcctgactgtccccagcagcttccggaacaaaaacagcgacaagcagaggagtgcggacagcttggtggaggcagtcctgatatccgaaggcttgggacgctatgcaagggacccaaaatttgtgtcagcaacaaaacacgaaatcgctgatgcctgtgacctcaccatcgacgagatggagagtgcagccagcaccctgcttaatgggaacgtgcgtccccgagccaacggggatgtgggccccctctcacaccggcaggactatgagctacaggactttggtcctggctacagcgacgaagagccagaccctgggagggatgaggaggacctggcggatgaaatgatatgcatcaccaccttgtagcccccagcgaggggcagactggctctggcctcaggtggggcgcaggagagccaggggaaaagtgcctcatagttaggaaagtttaggcactagttgggagtaatattcaattaattagacttttgtataagagatgtcatgcctcaagaaagccataaacctggtaggaacaggtcccaagcggttgagcctggcagagtaccatgcgctcggccccagctgcaggaaacagcaggccccgccctctcacagaggatgggtgaggaggccagacctgccctgccccattgtccagatgggcactgctgtggagtctgcttctcccatgtaccagggcaccaggcccacccaactgaaggcatggcggcggggtgcaggggaaagttaaaggtgatgacgatcatcacacctgtgtcgttacctcagccatcggtctagcatatcagtcactgggcccaacatatccatttttaaaccctttcccccaaatacactgcgtcctggttcctgtttagctgttctgaaatacggtgtgtaagtaagtcagaacccagctaccagtgattattgcgagggcaatgggacctcataaataaggttttctgtgatgtgacgccagtttacataagagaatatcactccgatggtcggtttctgactgtcacgctaagggcaactgtaaactggaataataatgcactcgcaaccaggtaaacttagatacactagtttgtttaaaattatagatttactgtacatgacttgtaatatactataatttgtatttgtaaagagatggtctatattttgtaattactgtattgtatttgaactgcagcaatatccatgggtcctaataattgtagttccccactaaaatctagaaattattagtatttttactcgggctatccagaagtagaagaaatagagccaattctcatttattcagcgaaaatcctctggggttaaaattttaagtttgaaagaacttgacactacagaaatttttctaaaatattttgagtcactataaacctatcatctttccacaagatataccagatgactatttgcagtcttttctttgggcaagagttccatgattttgatactgtacctttggatccaccatgggttgcaactgtctttggttttgtttgtttgacttgaaccaccctctggtaagtaagtaagtgaattacagagcaggtccagctggctgctctgccccttgggtatccatagttacggttttctctgtggcccacccagggtgttttttgcatcgctggtgcagaaatgcataggtggatgagatatagctgctcttgtcctctggggactggtggtgctgcttaagaaataaggggtgctggggacagaggagcaacgtggtgatctataggattggagtgtcggggtctgtacaaatcgtattgttgccttttacaaaactgctgtactgtatgttctctttgagggcttttatatgcaattgaatgagggctgaagttttcattagaatgcactcacactctgactgtacgtcctgatgaaaacccacttttggataattagaaccgtcaaggcttcattttctgtcaacagaattaggccgactgtcaggttaccttggcagggattccctgcaatcaaaaagatagatgataggtagcaattttggtccaaaatttttaatagtatacagacaacctgttaatttttttttttttttttttttttgtaaataacaaacaccactttgttatgaagaccttacaaacctcttcttaagacattcttactctgatccaggcaaaaacacttcaaggtttgtaaatgactctttcctgacataaatccttttttattaaaatgcaaaatgttcttcagaataaaactgtgtaataatttttatacttgggagtgctccttgcacagagctgtcatttgccagtgagagcctccgacagggcaggtactgtgccagggcagctctgaaattatggatattcttatcctcctggttccttcggtgccaatggtaacctaataccagccgcagggagcgccatttctcctaaagggctacaccactgtcaacattatcctggactctgtgtctctctctgttgggtcttgtggcatcacatcaggccaaaattgccagaccaggaccctaagtgtctgatagaggcgatgatcttttccaaagtcagtacttacaaactggcattcttacaggctgcaccatttcctagtatgtctgctttaagcctggttcaacctctcatcgaatattaaatttttctttgtaag

SEQ ID NO: 2253 - protein, 2161 aa, Homo sapiens; identical to SEQ ID NO: 2251

SEQ ID NO: 2254 - DNA, 761 bp, Homo sapiens
cggctcctacctcttggtgatccccttccccattccgcccccgcctcaacgcccagcacagtgccctgcacacagtagtcgctcaataaatgttcgtggatgatgatgatgatgatgatgaaaaaaatgcagcatcaacggcagcagcaagcggaccacgcgaacgaggcaaactatgcaagaggcaccagacttcctctttctggtgaaggaccaacttctcagccgaatagctccaagcaaactgtcctgtcttggcaagctgcaatcgatgctgctagacaggccaaggctgcccaaactatgagcacctctgcacccccacctgtaggatctctctcccaaagaaaacgtcagcaatacgccaagagcaaaaaacagggtaactcgtccaacagccgacctgcccgcgcccttttctgtttatcactcaataaccccatccgaagagcctgcattagtatagtggaatggaaaccatttgacatatttatattattggctatttttgccaattgtgtggccttagctatttacatcccattccctgaagatgattctaattcaacaaatcataacttggaaaaagtagaatatgccttcctgattatttttacagtcgagacatttttgaagattatagcgtatggattattgctacatcctaatgcttatgttaggaatggatggaatttactggattttgttatagtaatagtagggtaagtctcttttactttggggaaatgttgatttggaaa

SEQ ID NO: 2255 - protein, 208 aa, Homo sapiens
MMMMMMMKKMQHQRQQQADHANEANYARGTRLPLSGEGPTSQPNSSKQTVLSWQAAIDAARQAKAAQTMSTSAPPPVGSLSQRKRQQYAKSKKQGNSSNSRPARALFCLSLNNPIRRACISIVEWKPFDIFILLAIFANCVALAIYIPFPEDDSNSTNHNLEKVEYAFLIIFTVETFLKIIAYGLLLHPNAYVRNGWNLLDFVIVIVG

SEQ ID NO: 2256 - DNA, 5772 bp, Homo sapiens
acatgttacttcctgtatggaggcatggccagtttccagccccgcgctcttcgttccttcccagcctgcgccggagccacaactttcaggagcatggactgaaggcgccctcgccccagcgcccctctgagatcctttgtgttttcctccgtttcctccggccgtttctattttggggggctctccgctccccctgcctctcccctccccttcccctctcgcaaacatgcctccttccttcccggggccctggaaggagctgcctgcctgaagcccggagacgccgcgccgcgctcagccccgccgccgcccgccggctctcgggctgtgctgcgctgccgactcaagttggggatcctcggctgctcgccgccgccgcccgcggtccctgcctgccccaggcccggggcatcgccgccggccgccgactccgcgccctgcccgatcggctctctcctttttaaacggaaagcagcctttctccgccgagaggatcgtccccagcgtggctctgcgttcccggtcactttttgagattttccggggggcgctcggcggcttcccggattccaaggggactcgggccgccgagcgcggggggcccgtggagcgggcgagccggggaagcgccccggcttagcggaggctcgcacggaggcaagaacttattcaacaagtttacctccctgctttcctcttttcgatgtgcgttttcggacatgcggaggttactggaaccgtgttggtggattttgttcctgaaaatcaccagttccgtgctccattatgtcgtgtgcttccccgcgttgacagaaggctacgttggggccctgcacgagaatagacacggcagcgcagtgcagatccgcaggcgcaaggcttcaggcgacccgtactgggcctactctggtgcctatggtcctgagcactgggtcacgtctagtgtcagctgtgggggccgtcaccagtctcctattgacattttagaccagtatgcgcgtgttggggaagaataccaggaactgcaactcgatggcttcgacaatgagtcttctaacaaaacctggatgaaaaacacagggaaaacagtcgccatccttctgaaagacgactattttgtcagtggagctggtctacctggcagattcaaagctgagaaggtggaatttcactggggccacagcaatggctcagcgggctctgaacacagcatcaatggcaggaggtttcctgttgagatgcagattttcttttacaatccagatgactttgacagctttcaaaccgcaatttctgagaacagaataatcggagccatggccatattttttcaagtcagtccgagggacaattctgcactggatcctattatccacgggttgaagggtgtcgtacatcatgagaaggagacctttctggatcctttcgtcctccgggacctcctgcctgcatccctgggcagctattatcggtacacaggttccttgaccacaccaccgtgtagcgaaatagtggagtggatagtcttccggagacccgtccccatctcttaccatcagcttgaggctttttattccatcttcaccacggagcagcaagaccatgtcaagtcggtggagtatctgagaaataactttcgaccacagcagcgtctgcatgacagggtggtgtccaagtccgccgtccgtgactcctggaaccacgacatgacagacttcttagaaaacccactggggacagaagcctctaaagtttgcagctctccacccatccacatgaaggtgcagcctctgaaccagacggcactgcaggtgtcctggagccagccggagactatctaccacccacccatcatgaactacatgatctcctacagctggaccaagaatgaggacgagaaggagaagacgtttacaaaggacagcgacaaagacttgaaagccaccattagccatgtctcacccgatagcctttacctgttccgagtccaggccgtgtgtcggaacgacatgcgcagcgactttagccagacgatgctgtttcaagctaataccactcgaatattccaagggaccagaatagtgaaaacaggagtgcccacagcgtctcctgcctcttcagccgacatggcccccatcagctcggggtcttctacctggacgtcctctggcatcccattctcatttgtttccatggcaactgggatgggcccctcctccagtggcagccaggccacagtggcctcggtggtcaccagcacgctgctcgccggcctggggttcggcggtggtggcatctcctctttccccagcactgtgtggcccacgcgcctcccgacggccgcctcagccagcaagcaggcggctaggccagtcctagccaccacagaggccttggcttctccagggcccgatggtgattcgtcaccaaccaaggacggcgagggcaccgaggaaggagagaaggatgagaaaagcgagagtgaggatggggagcgggagcacgaggaggatggagagaaggactccgaaaagaaggagaagagtggggtgacccacgctgccgaggagcggaatcagacggagcccagccccacaccctcgtctcctaacaggactgccgagggagggcatcagactatacctgggcatgagcaggatcacactgccgtccccacagaccagacgggcggaaggagggatgccggcccaggcctggaccccgacatggtcacctccacccaagtgccccccaccgccacagaggagcagtatgcagggagtgatcccaagaggcccgaaatgccatctaaaaagcctatgtcccgcggggaccgattttctgaagacagcagatttatcactgttaatccagcggaaaaaaacacctctggaatgataagccgccctgctccagggaggatggagtggatcatccctctgattgtggtatcagccttgaccttcgtgtgcctcatccttctcattgctgtgctcgtttactggagagggtgtaacaaaataaagtccaagggctttcccagacgtttccgtgaagtgccttcttctggggagagaggagagaaggggagcagaaaatgttttcagactgctcatttctatgtggaagacagcagttcacctcgagtggtccctaatgaaagtatccctattattcctattccggatgacatggaagccattcctgtcaaacagtttgtcaaacacatcggtgagctctattctaataaccagcatgggttctctgaggattttgaggaagtccagcgctgtactgctgatatgaacatcactgcagagcattccaatcatccagaaaacaagcacaaaaacagatacatcaacattttagcatatgatcacagtagggtgaagttaagacctttaccaggaaaagactctaagcacagcgactacattaatgcaaactatgttgatggttacaacaaagcaaaagcctacattgccacccaaggacctttgaagtctacatttgaagatttctggaggatgatttgggaacaaaacactggaatcattgtgatgattacgaaccttgtggaaaaaggaagacgaaaatgtgatcagtattggccaacagagaacagtgaggaatatggaaacattattgtcacgctgaagagcacaaaaatacatgcctgctacactgttcgtcgtttttcaatcagaaatacaaaagtgaaaaagggtcagaagggaaatcccaagggtcgtcagaatgaaagggtagtgatccagtatcactatacacagtggcctgacatgggagttcccgagtatgcccttccagtactgactttcgtgaggagatcctcagcagctcggatgccagaaacgggccctgtgttggtgcactgcagtgctggtgtgggcagaacaggcacctatattgtaatagacagcatgctgcaacagataaaagacaaaagcacagttaacgtcctgggattcctgaagcatatcaggacacagcgtaactacctcgtccagactgaggagcagtacattttcatccatgatgccttgttggaagccattcttggaaaggagactgaagtatcttcaaatcagctgcacagctatgttaacagcatccttataccaggagtaggaggaaagacacgactggaaaagcaattcaagctggtcacacagtgtaatgcaaaatatgtggaatgtttcagtgctcagaaagagtgtaacaaagaaaagaacagaaactcttcagttgtgccatctgagcgtgctcgagtgggtcttgcaccattgcctggaatgaaaggaacagattacattaatgcttcttatatcatgggctattataggagcaatgaatttattataactcagcatcctctgccacatactacgaaagatttctggcgaatgatttgggatcataacgcacagatcattgtcatgctgccagacaaccagagcttggcagaagatgagtttgtgtactggccaagtcgagaagaatccatgaactgtgaggcctttaccgtcacccttatcagcaaagacagactgtgcctctctaatgaagaacaaattatcatccatgactttatccttgaagctacacaggatgactatgtcttagaagttcggcactttcagtgtcccaaatggcctaacccagatgcccccataagtagtacctttgaacttatcaacgtcatcaaggaagaggccttaacaagggatggtcccaccattgttcatgatgagtatggagcagtttcagcaggaatgttatgtgcccttaccaccctgtcccagcaactggagaatgaaaatgctgtggatgttttccaggttgcaaaaatgatcaatcttatgaggcctggagtattcacagacattgaacaataccagttcatctataaagcaatgcttagcttggtcagcactaaagaaaatggaaatggtcccatgacagtagacaaaaatggtgctgttcttattgcagatgaatcagaccctgctgagagcatggagtccctagtgtgactggaatcctgaaagggcacttaatttgtaaacttctgaagactgagaacttttttgaggccttttttgccagactctaggttatacaataacccagttacttttttacactgataaaagttttgatatttattttttgccattttatgtcttaatggtatcctactgagcatttgcacctctgttcatttcacacagtgaaacgcaattttacctagtttgcactatatgatcagtgttactgcctataatcttatacaacagcaaaccctgatgtgacattccatgacgacatacatgctacttttttttagttcaatacagtgaaggtctttgttatgacagtgaatattgcttttattattattattgctgaagtggttgcattctactagcaggcaatgctgtacttttcttcagtcctcctctcctttttattttaggcactgttcaatactgtatgccttctgtattttaatggagtggatagcattgttttcttttacagactagcaggctactgggacctaaaaaggtctgttaatgtcatggccttgaaacagttccatttatgctggttaagagatcccttaagaagttagaaggcttaagaactgcttcatgtgaacatcccttattagttacaaagttatattcacagttttttaaaaatgtgtcaaaataaaggataactctgtattacagctttcacagt

SEQ ID NO: 2257 - protein, 1445 aa, Homo sapiens
MRRLLEPCWWILFLKITSSVLHYVVCFPALTEGYVGALHENRHGSAVQIRRRKASGDPYWAYSGAYGPEHWVTSSVSCGGRHQSPIDILDQYARVGEEYQELQLDGFDNESSNKTWMKNTGKTVAILLKDDYFVSGAGLPGRFKAEKVEFHWGHSNGSAGSEHSINGRRFPVEMQIFFYNPDDFDSFQTAISENRIIGAMAIFFQVSPRDNSALDPIIHGLKGVVHHEKETFLDPFVLRDLLPASLGSYYRYTGSLTTPPCSEIVEWIVFRRPVPISYHQLEAFYSIFTTEQQDHVKSVEYLRNNFRPQQRLHDRVVSKSAVRDSWNHDMTDFLENPLGTEASKVCSSPPIHMKVQPLNQTALQVSWSQPETIYHPPIMNYMISYSWTKNEDEKEKTFTKDSDKDLKATISHVSPDSLYLFRVQAVCRNDMRSDFSQTMLFQANTTRIFQGTRIVKTGVPTASPASSADMAPISSGSSTWTSSGIPFSFVSMATGMGPSSSGSQATVASVVTSTLLAGLGFGGGGISSFPSTVWPTRLPTAASASKQAARPVLATTEALASPGPDGDSSPTKDGEGTEEGEKDEKSESEDGEREHEEDGEKDSEKKEKSGVTHAAEERNQTEPSPTPSSPNRTAEGGHQTIPGHEQDHTAVPTDQTGGRRDAGPGLDPDMVTSTQVPPTATEEQYAGSDPKRPEMPSKKPMSRGDRFSEDSRFITVNPAEKNTSGMISRPAPGRMEWIIPLIVVSALTFVCLILLIAVLVYWRGCNKIKSKGFPRRFREVPSSGERGEKGSRKCFQTAHFYVEDSSSPRVVPNESIPIIPIPDDMEAIPVKQFVKHIGELYSNNQHGFSEDFEEVQRCTADMNITAEHSNHPENKHKNRYINILAYDHSRVKLRPLPGKDSKHSDYINANYVDGYNKAKAYIATQGPLKSTFEDFWRMIWEQNTGIIVMITNLVEKGRRKCDQYWPTENSEEYGNIIVTLKSTKIHACYTVRRFSIRNTKVKKGQKGNPKGRQNERVVIQYHYTQWPDMGVPEYALPVLTFVRRSSAARMPETGPVLVHCSAGVGRTGTYIVIDSMLQQIKDKSTVNVLGFLKHIRTQRNYLVQTEEQYIFIHDALLEAILGKETEVSSNQLHSYVNSILIPGVGGKTRLEKQFKLVTQCNAKYVECFSAQKECNKEKNRNSSVVPSERARVGLAPLPGMKGTDYINASYIMGYYRSNEFIITQHPLPHTTKDFWRMIWDHNAQIIVMLPDNQSLAEDEFVYWPSREESMNCEAFTVTLISKDRLCLSNEEQIIIHDFILEATQDDYVLEVRHFQCPKWPNPDAPISSTFELINVIKEEALTRDGPTIVHDEYGAVSAGMLCALTTLSQQLENENAVDVFQVAKMINLMRPGVFTDIEQYQFIYKAMLSLVSTKENGNGPMTVDKNGAVLIADESDPAESMESLV

SEQ ID NO: 2258 - DNA, 9362 bp, Homo sapiens
acatgttacttcctgtatggaggcatggccagtttccagccccgcgctcttcgttccttcccagcctgcgccggagccacaactttcaggagcatggactgaaggcgccctcgccccagcgcccctctgagatcctttgtgttttcctccgtttcctccggccgtttctattttggggggctctccgctccccctgcctctcccctccccttcccctctcgcaaacatgcctccttccttcccggggccctggaaggagctgcctgcctgaagcccggagacgccgcgccgcgctcagccccgccgccgcccgccggctctcgggctgtgctgcgctgccgactcaagttggggatcctcggctgctcgccgccgccgcccgcggtccctgcctgccccaggcccggggcatcgccgccggccgccgactccgcgccctgcccgatcggctctctcctttttaaacggaaagcagcctttctccgccgagaggatcgtccccagcgtggctctgcgttcccggtcactttttgagattttccggggggcgctcggcggcttcccggattccaaggggactcgggccgccgagcgcggggggcccgtggagcgggcgagccggggaagcgccccggcttagcggaggctcgcacggaggcaagaacttattcaacaagtttacctccctgctttcctcttttcgatgtgcgttttcggacatgcggaggttactggaaccgtgttggtggattttgttcctgaaaatcaccagttccgtgctccattatgtcgtgtgcttccccgcgttgacagaaggctacgttggggccctgcacgagaatagacacggcagcgcagtgcagatccgcaggcgcaaggcttcaggcgacccgtactgggcctactctggtgcctatggtcctgagcactgggtcacgtctagtgtcagctgtgggggccgtcaccagtctcctattgacattttagaccagtatgcgcgtgttggggaagaataccaggaactgcaactcgatggcttcgacaatgagtcttctaacaaaacctggatgaaaaacacagggaaaacagtcgccatccttctgaaagacgactattttgtcagtggagctggtctacctggcagattcaaagctgagaaggtggaatttcactggggccacagcaatggctcagcgggctctgaacacagcatcaatggcaggaggtttcctgttgagatgcagattttcttttacaatccagatgactttgacagctttcaaaccgcaatttctgagaacagaataatcggagccatggccatattttttcaagtcagtccgagggacaattctgcactggatcctattatccacgggttgaagggtgtcgtacatcatgagaaggagacctttctggatcctttcgtcctccgggacctcctgcctgcatccctgggcagctattatcggtacacaggttccttgaccacaccaccgtgtagcgaaatagtggagtggatagtcttccggagacccgtccccatctcttaccatcagcttgaggctttttattccatcttcaccacggagcagcaagaccatgtcaagtcggtggagtatctgagaaataactttcgaccacagcagcgtctgcatgacagggtggtgtccaagtccgccgtccgtgactcctggaaccacgacatgacagacttcttagaaaacccactggggacagaagcctctaaagtttgcagctctccacccatccacatgaaggtgcagcctctgaaccagacggcactgcaggtgtcctggagccagccggagactatctaccacccacccatcatgaactacatgatctcctacagctggaccaagaatgaggacgagaaggagaagacgtttacaaaggacagcgacaaagacttgaaagccaccattagccatgtctcacccgatagcctttacctgttccgagtccaggccgtgtgtcggaacgacatgcgcagcgactttagccagacgatgctgtttcaagctaataccactcgaatattccaagggaccagaatagtgaaaacaggagtgcccacagcgtctcctgcctcttcagccgacatggcccccatcagctcggggtcttctacctggacgtcctctggcatcccattctcatttgtttccatggcaactgggatgggcccctcctccagtggcagccaggccacagtggcctcggtggtcaccagcacgctgctcgccggcctggggttcggcggtggtggcatctcctctttccccagcactgtgtggcccacgcgcctcccgacggccgcctcagccagcaagcaggcggctaggccagtcctagccaccacagaggccttggcttctccagggcccgatggtgattcgtcaccaaccaaggacggcgagggcaccgaggaaggagagaaggatgagaaaagcgagagtgaggatggggagcgggagcacgaggaggatggagagaaggactccgaaaagaaggagaagagtggggtgacccacgctgccgaggagcggaatcagacggagcccagccccacaccctcgtctcctaacaggactgccgagggagggcatcagactatacctgggcatgagcaggatcacactgccgtccccacagaccagacgggcggaaggagggatgccggcccaggcctggaccccgacatggtcacctccacccaagtgccccccaccgccacagaggagcagtatgcagggagtgatcccaagaggcccgaaatgccatctaaaaagcctatgtcccgcggggaccgattttctgaagacagcagatttatcactgttaatccagcggaaaaaaacacctctggaatgataagccgccctgctccagggaggatggagtggatcatccctctgattgtggtatcagccttgaccttcgtgtgcctcatccttctcattgctgtgctcgtttactggagagggtgtaacaaaataaagtccaagggctttcccagacgtttccgtgaagtgccttcttctggggagagaggagagaaggggagcagaaaatgttttcagactgctcatttctatgtggaagacagcagttcacctcgagtggtccctaatgaaagtatccctattattcctattccggatgacatggaagccattcctgtcaaacagtttgtcaaacacatcggtgagctctattctaataaccagcatgggttctctgaggattttgaggaagtccagcgctgtactgctgatatgaacatcactgcagagcattccaatcatccagaaaacaagcacaaaaacagatacatcaacattttagcatatgatcacagtagggtgaagttaagacctttaccaggaaaagactctaagcacagcgactacattaatgcaaactatgttgatggttacaacaaagcaaaagcctacattgccacccaaggacctttgaagtctacatttgaagatttctggaggatgatttgggaacaaaacactggaatcattgtgatgattacgaaccttgtggaaaaaggaagacgaaaatgtgatcagtattggccaacagagaacagtgaggaatatggaaacattattgtcacgctgaagagcacaaaaatacatgcctgctacactgttcgtcgtttttcaatcagaaatacaaaagtgaaaaagggtcagaagggaaatcccaagggtcgtcagaatgaaagggtagtgatccagtatcactatacacagtggcctgacatgggagttcccgagtatgcccttccagtactgactttcgtgaggagatcctcagcagctcggatgccagaaacgggccctgtgttggtgcactgcagtgctggtgtgggcagaacaggcacctatattgtaatagacagcatgctgcaacagataaaagacaaaagcacagttaacgtcctgggattcctgaagcatatcaggacacagcgtaactacctcgtccagactgaggagcagtacattttcatccatgatgccttgttggaagccattcttggaaaggagactgaagtatcttcaaatcagctgcacagctatgttaacagcatccttataccaggagtaggaggaaagacacgactggaaaagcaattcaagctggtcacacagtgtaatgcaaaatatgtggaatgtttcagtgctcagaaagagtgtaacaaagaaaagaacagaaactcttcagttgtgccatctgagcgtgctcgagtgggtcttgcaccattgcctggaatgaaaggaacagattacattaatgcttcttatatcatgggctattataggagcaatgaatttattataactcagcatcctctgccacatactacgaaagatttctggcgaatgatttgggatcataacgcacagatcattgtcatgctgccagacaaccagagcttggcagaagatgagtttgtgtactggccaagtcgagaagaatccatgaactgtgaggcctttaccgtcacccttatcagcaaagacagactgtgcctctctaatgaagaacaaattatcatccatgactttatccttgaagctacacaggatgactatgtcttagaagttcggcactttcagtgtcccaaatggcctaacccagatgcccccataagtagtacctttgaacttatcaacgtcatcaaggaagaggccttaacaagggatggtcccaccattgttcatgatgagtatggagcagtttcagcaggaatgttatgtgcccttaccaccctgtcccagcaactggagaatgaaaatgctgtggatgttttccaggttgcaaaaatgatcaatcttatgaggcctggagtattcacagacattgaacaataccagttcatctataaagcaatgcttagcttggtcagcactaaagaaaatggaaatggtcccatgacagtagacaaaaatggtgctgttcttattgcagatgaatcagaccctgctgagagcatggagtccctagtgtgactggaatcctgaaagggcacttaatttgtaaacttctgaagactgagaacttttttgaggccttttttgccagactctaggttatacaataacccagttacttttttacactgataaaagttttgatatttattttttgccattttatgtcttaatggtatcctactgagcatttgcacctctgttcatttcacacagtgaaacgcaattttacctagtttgcactatatgatcagtgttactgcctataatcttatacaacagcaaaccctgatgtgacattccatgacgacatacatgctacttttttttagttcaatacagtgaaggtctttgttatgacagtgaatattgcttttattattattattgctgaagtggttgcattctactagcaggcaatgctgtacttttcttcagtcctcctctcctttttattttaggcactgttcaatactgtatgccttctgtattttaatggagtggatagcattgttttcttttacagactagcaggctactgggacctaaaaaggtctgttaatgtcatggccttgaaacagttccatttatgctggttaagagatcccttaagaagttagaaggcttaagaactgcttcatgtgaacatcccttattagttacaaagttatattcacagttttttaaaaatgtgtcaaaataaaggataactctgtattacagctttcacagtagctatgtggacaatgtgttatttccattttgactctctaaaatagctacatcctaaaatcagggctatctttaacaatagcaagatagcaatattatatacaactcagttatgagaccctttagttattctccattaatgcttcttagtttgtaataccatacctcacagtaggtagaagaatgaaaacttctgcaggtgtgtaattttgaaactagtcctctaaaaattccctattactcctatagcaatctaataaaaactacctacatagttactgttttctttccttctttgccaaatgttttataataaatctcttaattacatacatttttctacttaagattaaattggaaatactgtcttagcaaaagtcttgggactatctaaactcccacacatagataaatctgatttggagagagaaatttaaaatatttaattaaaggtgatacccacattttcaagtttttaaaagagggagatggctttgtatgcttttgtgtagtttagaacagatacacattagtaaaagataccaataatcattagagctcaaggaagttattaggtgcagcctctggagccatactcacgctgcagtgcataatgggaaaattaggagcattaataagaaatttcagtagtgtttgtaaggaaaataagctacttactgagatctgtttcttctattgcatgtttgcttttgagggacagcttctgtcaaaagtgaaatcatcaccagaactgggcctgttaggaagaatagggttttatttactttttatgtcaattaacttcaacaaaaaggccacgctggctgctgtcatgccatctgggtatgcattaaacattaatgatgatcagcactgaggttctatttatcttgatttggctttcataaagtttgtcagaatggtgctggaggaccagaagtgctaaggagaaagaagctatgggccaagttaaagaatttgaatgcaaaggccaggtcaatggagttttcataaactacataatttaccagggtttatctcatcttctcaatacatagatttaacaacatggaatactctgcttttcaagagctgcgtaagctagtcctgagataagatgttcaagagagcatgctaagttgcatgtgctagatgagagacacctttacagcccctccgctccaaccagaggtgacacaggaagctctgtaaagttcaagtaaagcttgaacacaggaacactacaactgccagatgctgaggagaatcaggaaagcaatgagctagactctttttttagtcaattaagtgggttgttttagatgtatagagtattgatatgagttaacactttttagtagatggcaaagtgggcttgatgttcaaaagtaatgttcgagttagggttcatggtccctttctcagtaattttttcttaataaaagtaaacactggttcaaagacaaatagcaagtattccctcctgtgctatttatagagggctcaattcgtagaaaggcataccctccaatgcaattctgtggctgtcccttacagtggtttcagaatcacgaaaaaacagctagtaaataggatagaaacaataaaagaaagagtttagaagttccctgtgagcaatctgtgtgtcttcagcgagcttgaaccaaagtcttcatatcctgacccactgaattataagcaattgctacttgcccatcttgccaaagtagtccaaacacacttcaatgaggacagttatatttagcaggtcctcacccctgcaagagacagcatatcctcactattattattcatgtgttattggcaaaaacatagcttgcatctttccagaggcagagtttcaaagacagggttttctttgagacataagcacattgcttaagtacataacaaggttattaacacttgcactcaggggaaaggaaatagctattgcaaattaatgtgtgcaacttaataaaataagctgtttgtgtatatgaatttagctctaggtaagcaaaatgcacacatcatataaaaataaattgcaatgatcagaccaagtggctgtgctggacatcaaagaaaagacatgctgttgccatcaggagaactctttcttatatgcgatagccaagatatcttctttaatatgaaaaaagttaatttctgaatttcaaaaagagtaagattagctaattggtcttcctaatttttatgcctttagagtttttagtctattcaagtagaagagtccagcgaggccaaagaagggttacggtgttcaagttctggttgttggagtttttagcccagagtgacatactgaaatcagtaaataattattttataatgacacagcacaactgccttgttatgaatttttcttaaatgcatatatactgtatttaaaattaaaatatagataccaatttaccaaagatacatattactaattctaagcaaaactaaaaaaaaaacccaactcatcataatttaagaatcaaaatgtagtttgtcttaagaatttagtggttatactggaaatgcattttcaactcctatgttctaaagtttatgttcaaatggtgccagtgaatttttatatgaagggaaaatgcctgctttttttttttttttaacagatgtaatttcacttaaccctttgcgctttcccttagttgtcatttaacatacaatactggctttacttatctctagaaagaagaaggcatgctacaaataggaaggaattgtaataatgatatttggcctctactttgtcttagctgttaaactgtttttagtatttttgttaaatatttgcaaagggaagcattttctacagaggataattaatttcaagaaaaatatcttgagttttaagaaataaacatctccagaaaaggagaaagtcgattttataaaatgtcgcaactctccaacatttggggtagtgactccttttttgttaggacatttgaaactagcaagcagccattgtttctaaagaattctggcttcacattgactcatgtttctttcactccattttgaaatagctaaaaatcattaaaactgtaaatattttgttgcttgggtaagcatcttctgggaactttgtatctatggtatataatcatagaattttatattttcatataaagctaatttttttctagtttcaactccgtcatagttttttttcctttttgtggtggatatgtgaattcaactttctgtgtattgaagtagcaaaaaccatctttacattccaaaagaatccaacatgtgttatttctttgaggcagtgattgtgaaagttgggttttctttttaattccattgaccatttgtgcaataggaattagacataattagtcactgaaaacattcgtcacattgacccatttggaaaaagtgtgctttttttttttttttaaatttgttcagggggaggggttttgtaacctgaaatttttccctttttcttctgtttaaactatatcaaatcattctattatagtgttatttaatatgtaaattgtattgctatacataaaataaagtatggtttttgatgtattc

SEQ ID NO: 2259 - protein, 1445 aa, Homo sapiens; identical to SEQ ID NO: 2257

SEQ ID NO: 2260 - DNA, 9425 bp, Homo sapiens
acatgttacttcctgtatggaggcatggccagtttccagccccgcgctcttcgttccttcccagcctgcgccggagccacaactttcaggagcatggactgaaggcgccctcgccccagcgcccctctgagatcctttgtgttttcctccgtttcctccggccgtttctattttggggggctctccgctccccctgcctctcccctccccttcccctctcgcaaacatgcctccttccttcccggggccctggaaggagctgcctgcctgaagcccggagacgccgcgccgcgctcagccccgccgccgcccgccggctctcgggctgtgctgcgctgccgactcaagttggggatcctcggctgctcgccgccgccgcccgcggtccctgcctgccccaggcccggggcatcgccgccggccgccgactccgcgccctgcccgatcggctctctcctttttaaacggaaagcagcctttctccgccgagaggatcgtccccagcgtggctctgcgttcccggtcactttttgagattttccggggggcgctcggcggcttcccggattccaaggggactcgggccgccgagcgcggggggcccgtggagcgggcgagccggggaagcgccccggcttagcggaggctcgcacggaggcaagaacttattcaacaagtttacctccctgctttcctcttttcgatgtgcgttttcggacatgcggaggttactggaaccgtgttggtggattttgttcctgaaaatcaccagttccgtgctccattatgtcgtgtgcttccccgcgttgacagaaggctacgttggggccctgcacgagaatagacacggcagcgcagtgcagatccgcaggcgcaaggcttcaggcgacccgtactgggcctactctggtgcctatggtcctgagcactgggtcacgtctagtgtcagctgtgggggccgtcaccagtctcctattgacattttagaccagtatgcgcgtgttggggaagaataccaggaactgcaactcgatggcttcgacaatgagtcttctaacaaaacctggatgaaaaacacagggaaaacagtcgccatccttctgaaagacgactattttgtcagtggagctggtctacctggcagattcaaagctgagaaggtggaatttcactggggccacagcaatggctcagcgggctctgaacacagcatcaatggcaggaggtttcctgttgagatgcagattttcttttacaatccagatgactttgacagctttcaaaccgcaatttctgagaacagaataatcggagccatggccatattttttcaagtcagtccgagggacaattctgcactggatcctattatccacgggttgaagggtgtcgtacatcatgagaaggagacctttctggatcctttcgtcctccgggacctcctgcctgcatccctgggcagctattatcggtacacaggttccttgaccacaccaccgtgtagcgaaatagtggagtggatagtcttccggagacccgtccccatctcttaccatcagcttgaggctttttattccatcttcaccacggagcagcaagaccatgtcaagtcggtggagtatctgagaaataactttcgaccacagcagcgtctgcatgacagggtggtgtccaagtccgccgtccgtgactcctggaaccacgacatgacagacttcttagaaaacccactggggacagaagcctctaaagtttgcagctctccacccatccacatgaaggtgcagcctctgaaccagacggcactgcaggtgtcctggagccagccggagactatctaccacccacccatcatgaactacatgatctcctacagctggaccaagaatgaggacgagaaggagaagacgtttacaaaggacagcgacaaagacttgaaagccaccattagccatgtctcacccgatagcctttacctgttccgagtccaggccgtgtgtcggaacgacatgcgcagcgactttagccagacgatgctgtttcaagctaataccactcgaatattccaagggaccagaatagtgaaaacaggagtgcccacagcgtctcctgcctcttcagccgacatggcccccatcagctcggggtcttctacctggacgtcctctggcatcccattctcatttgtttccatggcaactgggatgggcccctcctccagtggcagccaggccacagtggcctcggtggtcaccagcacgctgctcgccggcctggggttcggcggtggtggcatctcctctttccccagcactgtgtggcccacgcgcctcccgacggccgcctcagccagcaagcaggcggctaggccagtcctagccaccacagaggccttggcttctccagggcccgatggtgattcgtcaccaaccaaggacggcgagggcaccgaggaaggagagaaggatgagaaaagcgagagtgaggatggggagcgggagcacgaggaggatggagagaaggactccgaaaagaaggagaagagtggggtgacccacgctgccgaggagcggaatcagacggagcccagccccacaccctcgtctcctaacaggactgccgagggagggcatcagactatacctgggcatgagcaggatcacactgccgtccccacagaccagacgggcggaaggagggatgccggcccaggcctggaccccgacatggtcacctccacccaagtgccccccaccgccacagaggagcagtatgcagggagtgatcccaagaggcccgaaatgccatctaaaaagcctatgtcccgcggggaccgattttctgaagacagcagatttatcactgttaatccagcggaaaaaaacacctctggaatgataagccgccctgctccagggaggatggagtggatcatccctctgattgtggtatcagccttgaccttcgtgtgcctcatccttctcattgctgtgctcgtttactggagagggtgtaacaaaataaagtccaagggctttcccagacgtttccgtgaagtgccttcttctggggagagaggagagaaggggagcagaaaatgttttcagactgctcatttctatgtggaagacagcagttcacctcgagtggtccctaatgaaagtatccctattattcctattccggatgacatggaagccattcctgtcaaacagtttgtcaaacacatcggtgagctctattctaataaccagcatgggttctctgaggattttgaggaagtccagcgctgtactgctgatatgaacatcactgcagagcattccaatcatccagaaaacaagcacaaaaacagatacatcaacattttagcatatgatcacagtagggtgaagttaagacctttaccaggaaaagactctaagcacagcgactacattaatgcaaactatgttgatggttacaacaaagcaaaagcctacattgccacccaaggacctttgaagtctacatttgaagatttctggaggatgatttgggaacaaaacactggaatcattgtgatgattacgaaccttgtggaaaaaggaagacgaaaatgtgatcagtattggccaacagagaacagtgaggaatatggaaacattattgtcacgctgaagagcacaaaaatacatgcctgctacactgttcgtcgtttttcaatcagaaatacaaaagtgaaaaagggtcagaagggaaatcccaagggtcgtcagaatgaaagggtagtgatccagtatcactatacacagtggcctgacatgggagttcccgagtatgcccttccagtactgactttcgtgaggagatcctcagcagctcggatgccagaaacgggccctgtgttggtgcactgcagtgctggtgtgggcagaacaggcacctatattgtaatagacagcatgctgcaacagataaaagacaaaagcacagttaacgtcctgggattcctgaagcatatcaggacacagcgtaactacctcgtccagactgaggagcagtacattttcatccatgatgccttgttggaagccattcttggaaaggagactgaagtatcttcaaatcagctgcacagctatgttaacagcatccttataccaggagtaggaggaaagacacgactggaaaagcaattcaagctggtcacacagtgtaatgcaaaatatgtggaatgtttcagtgctcagaaagagtgtaacaaagaaaagaacagaaactcttcagttgtgccatctgagcgtgctcgagtgggtcttgcaccattgcctggaatgaaaggaacagattacattaatgcttcttatatcatgggctattataggagcaatgaatttattataactcagcatcctctgccacatactacgaaagatttctggcgaatgatttgggatcataacgcacagatcattgtcatgctgccagacaaccagagcttggcagaagatgagtttgtgtactggccaagtcgagaagaatccatgaactgtgaggcctttaccgtcacccttatcagcaaagacagactgtgcctctctaatgaagaacaaattatcatccatgactttatccttgaagctacacaggatgactatgtcttagaagttcggcactttcagtgtcccaaatggcctaacccagatgcccccataagtagtacctttgaacttatcaacgtcatcaaggaagaggccttaacaagggatggtcccaccattgttcatgatgagtatggagcagtttcagcaggaatgttatgtgcccttaccaccctgtcccagcaactggagaatgaaaatgctgtggatgttttccaggttgcaaaaatgatcaatcttatgaggcctggagtattcacagacattgaacaataccagttcatctataaagcaatgcttagcttggtcagcactaaagaaaatggaaatggtcccatgacagtagacaaaaatggtgctgttcttattgcagatgaatcagaccctgctgagagcatggagtccctagtgtgactggaatcctgaaagggcacttaatttgtaaacttctgaagactgagaacttttttgaggccttttttgccagactctaggttatacaataacccagttacttttttacactgataaaagttttgatatttattttttgccattttatgtcttaatggtatcctactgagcatttgcacctctgttcatttcacacagtgaaacgcaattttacctagtttgcactatatgatcagtgttactgcctataatcttatacaacagcaaaccctgatgtgacattccatgacgacatacatgctacttttttttagttcaatacagtgaaggtctttgttatgacagtgaatattgcttttattattattattgctgaagtggttgcattctactagcaggcaatgctgtacttttcttcagtcctcctctcctttttattttaggcactgttcaatactgtatgccttctgtattttaatggagtggatagcattgttttcttttacagactagcaggctactgggacctaaaaaggtctgttaatgtcatggccttgaaacagttccatttatgctggttaagagatcccttaagaagttagaaggcttaagaactgcttcatgtgaacatcccttattagttacaaagttatattcacagttttttaaaaatgtgtcaaaataaaggataactctgtattacagctttcacagtagctatgtggacaatgtgttatttccattttgactctctaaaatagctacatcctaaaatcagggctatctttaacaatagcaagatagcaatattatatacaactcagttatgagaccctttagttattctccattaatgcttcttagtttgtaataccatacctcacagtaggtagaagaatgaaaacttctgcaggtgtgtaattttgaaactagtcctctaaaaattccctattactcctatagcaatctaataaaaactacctacatagttactgttttctttccttctttgccaaatgttttataataaatctcttaattacatacatttttctacttaagattaaattggaaatactgtcttagcaaaagtcttgggactatctaaactcccacacatagataaatctgatttggagagagaaatttaaaatatttaattaaaggtgatacccacattttcaagtttttaaaagagggagatggctttgtatgcttttgtgtagtttagaacagatacacattagtaaaagataccaataatcattagagctcaaggaagttattaggtgcagcctctggagccatactcacgctgcagtgcataatgggaaaattaggagcattaataagaaatttcagtagtgtttgtaaggaaaataagctacttactgagatctgtttcttctattgcatgtttgcttttgagggacagcttctgtcaaaagtgaaatcatcaccagaactgggcctgttaggaagaatagggttttatttactttttatgtcaattaacttcaacaaaaaggccacgctggctgctgtcatgccatctgggtatgcattaaacattaatgatgatcagcactgaggttctatttatcttgatttggctttcataaagtttgtcagaatggtgctggaggaccagaagtgctaaggagaaagaagctatgggccaagttaaagaatttgaatgcaaaggccaggtcaatggagttttcataaactacataatttaccagggtttatctcatcttctcaatacatagatttaacaacatggaatactctgcttttcaagagctgcgtaagctagtcctgagataagatgttcaagagagcatgctaagttgcatgtgctagatgagagacacctttacagcccctccgctccaaccagaggtgacacaggaagctctgtaaagttcaagtaaagcttgaacacaggaacactacaactgccagatgctgaggagaatcaggaaagcaatgagctagactctttttttagtcaattaagtgggttgttttagatgtatagagtattgatatgagttaacactttttagtagatggcaaagtgggcttgatgttcaaaagtaatgttcgagttagggttcatggtccctttctcagtaattttttcttaataaaagtaaacactggttcaaagacaaatagcaagtattccctcctgtgctatttatagagggctcaattcgtagaaaggcataccctccaatgcaattctgtggctgtcccttacagtggtttcagaatcacgaaaaaacagctagtaaataggatagaaacaataaaagaaagagtttagaagttccctgtgagcaatctgtgtgtcttcagcgagcttgaaccaaagtcttcatatcctgacccactgaattataagcaattgctacttgcccatcttgccaaagtagtccaaacacacttcaatgaggacagttatatttagcaggtcctcacccctgcaagagacagcatatcctcactattattattcatgtgttattggcaaaaacatagcttgcatctttccagaggcagagtttcaaagacagggttttctttgagacataagcacattgcttaagtacataacaaggttattaacacttgcactcaggggaaaggaaatagctattgcaaattaatgtgtgcaacttaataaaataagctgtttgtgtatatgaatttagctctaggtaagcaaaatgcacacatcatataaaaataaattgcaatgatcagaccaagtggctgtgctggacatcaaagaaaagacatgctgttgccatcaggagaactctttcttatatgcgatagccaagatatcttctttaatatgaaaaaagttaatttctgaatttcaaaaagagtaagattagctaattggtcttcctaatttttatgcctttagagtttttagtctattcaagtagaagagtccagcgaggccaaagaagggttacggtgttcaagttctggttgttggagtttttagcccagagtgacatactgaaatcagtaaataattattttataatgacacagcacaactgccttgttatgaatttttcttaaatgcatatatactgtatttaaaattaaaatatagataccaatttaccaaagatacatattactaattctaagcaaaactaaaaaaaaaacccaactcatcataatttaagaatcaaaatgtagtttgtcttaagaatttagtggttatactggaaatgcattttcaactcctatgttctaaagtttatgttcaaatggtgccagtgaatttttatatgaagggaaaatgcctgctttttttttttttttaacagatgtaatttcacttaaccctttgcgctttcccttagttgtcatttaacatacaatactggctttacttatctctagaaagaagaaggcatgctacaaataggaaggaattgtaataatgatatttggcctctactttgtcttagctgttaaactgtttttagtatttttgttaaatatttgcaaagggaagcattttctacagaggataattaatttcaagaaaaatatcttgagttttaagaaataaacatctccagaaaaggagaaagtcgattttataaaatgtcgcaactctccaacatttggggtagtgactccttttttgttaggacatttgaaactagcaagcagccattgtttctaaagaattctggcttcacattgactcatgtttctttcactccattttgaaatagctaaaaatcattaaaactgtaaatattttgttgcttgggtaagcatcttctgggaactttgtatctatggtatataatcatagaattttatattttcatataaagctaatttttttctagtttcaactccgtcatagttttttttcctttttgtggtggatatgtgaattcaactttctgtgtattgaagtagcaaaaaccatctttacattccaaaagaatccaacatgtgttatttctttgaggcagtgattgtgaaagttgggttttctttttaattccattgaccatttgtgcaataggaattagacataattagtcactgaaaacattcgtcacattgacccatttggaaaaagtgtgctttttttttttttttaaatttgttcagggggaggggttttgtaacctgaaatttttccctttttcttctgtttaaactatatcaaatcattctattatagtgttatttaatatgtaaattgtattgctatacataaaataaagtatggtttttgatgtattcagtagtgttgagcatttctatgaaaatgtctatatccaataaaataggttactagtctccctt

SEQ ID NO: 2261 - protein, 1445 aa, Homo sapiens; identical to SEQ ID NO: 2257

SEQ ID NO: 2262 - DNA, 2084 bp, Homo sapiens
aggattcctcatgggatgacaaggccttgctccagggatgatgtttcccactgtaggagaacagctactgtctttgatgaactgagtctacagggctattgaagggtcttgctgtgctgcccagcctggagtgtggtggtgcgatcatggctcactgaagcctccacttacaactcctggactcaagtgatcctcccacctgagcctcctgagtagctaggactataggcacttggcaccacacctggcaaattttttttatcataggatctcgctacattggccaggctggtctcaaacttctggccccaagtgattttcccacctctgcctcccaaagtgctgagactacagtctggcccttcatgatctctagatattaccaaaagtcccagagaaatgagtgcatggatggcttaatgacaacccactttcttctctggaagaaagaacttagtacagccctaccagaaggtgggatggcaatgccatcttcagacttgagtgttggggaggccttttctgctaaccaacagcaaatgttttacaagagaaacaggacacacagtagatgaaggcagccatggaaaatctgtatgaattatccactctgttgatctgtgcttaaaatatagaagggaaagtgaagaataaaaatgtgtccatgagcatcccacctggcttgcatccagattgaacaatttgaatgctaagagcaggattttgatagtatggcagacattgctcattgctcagccaacccattctcccctttgtccttactaacaacatcctgattttgtgtaggcaacaatgctcccagctaaaattacctactttaccagactcctatgcagttagaggtggcccagtaaccctggcaaataagatgcatgcaggcattactggactgagcttccaaaaacagcttttaaaaggggcaagctcaactgcatgaccctttgggcttttgaacctctttacctggaaatgagacctaaagctaaaaatgaaacaactgtcttgttatcatgaggtgactatcatgaagatgaaaacctccacaccaaataagtggaaagaaaagttggaaagaggtggagagaatgactcaatctttgatgtatcagtgctgcattgcctccctcaaaatgtctcaactgttttatgcagctgagcaaattcgtgatctcaaacagcaactcaagcaactccaggaaagaaaaaaaattgaccactggaggagatacctaagataatcctggtgatactttcggtgctacaagaaaaaaataatcctcgcacccaagaagaaacaatgaaaccttatttttcatgtaaatttctactcctgtttggttcaagcatttgaactgttgcataagatttttttgagtgccgctgagaaaagtattatcaatctagaatgcaccagaaagaaagcagcagaaagattacaaacagcttttctaaacccttgtccagcatttaccagaaagagcagcatgaattaacaaaagcagaaattttagttaaaaaaaaaaagcaactcaactctgattcctgagacatataatacaggacgtctatcgcccatttaccctcatccaactcaaatggctaccaaactctaaaattagcagggcatgtcgggaagacttcttattccttgtattacagatctgttgacgtgtcagtagcattttcctttgcaagttataaaatttcctttccccagtcttcaaataggcacttccccctccccaaagtctcttttgtcaccaactgccataacccaccaatcagggaaacaaatttcagttcataaaagaaaaccatgggtgacctactgaggaccacagtttcatttccataacaaagactgacatacaacccatgcccaaagtctggaacagctatgaataactgtggctgaatagtctattttctgttgggattcatatcaaactctatatttgaacttgagatatcagaacttttgtattataatacataaaacctaggtagtgagtttgaattgtctgcatttattctccatgggtaataaaaactcattgtttctc

SEQ ID NO: 2263 - protein, 69 aa, Homo sapiens
MISRYYQKSQRNECMDGLMTTHFLLWKKELSTALPEGGMAMPSSDLSVGEAFSANQQQMFYKRNRTHSR

SEQ ID NO: 2264 - DNA, 2401 bp, Homo sapiens
tcccgctgctcctcctccgcctccttcccctgcccgcgcccgccctactgccccgtgccgagtttcctgtttaagatggcgtcccccgtagcagcgcaggccgggaagcttctgcgagccctagcgctgcggccccgcttcctggcggccgggtcccaggcagttcaattaacctccagaagatggctgaacctgcaggaataccagagcaagaaactgatgtctgacaacggagtgagagttcaaagattctttgtagcagacactgcaaatgaagctctcgaggctgctaagagactaaatgcaaaagaaattgttttaaaagcccagatcttagctggaggaagaggaaaaggtgtcttcaatagtggtttgaaaggaggtgttcatttaacaaaagaccctaatgttgtgggacagctggctaaacagatgattgggtacaatctagcgacaaaacaaactccaaaagaaggtgtgaaagttaacaaggtgatggttgctgaagccttggatatttccagagaaacctacctggcaattctgatggaccggtcctgcaatggccccgtgctggtgggcagcccccaggggggcgtcgacattgaagaggtggctgcttcaaacccggagctcatttttaaggagcaaattgacatttttgaaggaataaaggacagccaagctcagcggatggccgaaaatctaggcttcgttgggcctttgaaaagccaggctgcagatcaaattacgaagctgtataatctcttcctgaaaattgatgctactcaggtggaagtgaatccctttggtgaaactccagaaggacaagttgtctgttttgatgccaagataaactttgatgacaacgcagaattccgacaaaaagacatatttgctatggacgacaaatcagagaatgagcccattgaaaatgaagctgccaaatatgatctaaaatacataggactagatgggaacattgcctgctttgtgaatggtgctgggctcgccatggctacttgtgatatcattttccttaatggtgggaagccagccaacttcttggatcttggaggtggtgtaaaggaagctcaagtatatcaagcattcaaattgctcacagctgatcctaaggttgaagccatccttgtcaatatatttggtggtatcgtcaactgtgccatcattgccaatgggatcaccaaagcctgccgggagctagaactcaaggtgcccctggtggtccggcttgaaggaaccaacgtccaagaggcccagaagatactcaacaacagcggactccccattacttcagccattgacctggaggatgcagccaagaaggctgtggccagtgtggccaagaagtgatgtctttgtcctgatccaatggagaaagaaagccatttttccgtaaaaagggatggttcatcattgtgaaagaaatggttatctcattggggaagaaaaggggagggggaaggcaagaatcactgaaaaatcttaaatctgtgttttctggaataagatatctagacagcctaaatctgattttggtctttataaaaataatatcttgtgttctcatacttttctgtcactgtaagcctgcccagtaggcagtgttttgcagactttggggagtggtctatgtggccaaatattgtgtgtatagacagaatttgaaatcaagtcctgcttcatttacaagaattttggtgggcatctaatcctacataatgaaaaagaaaaacagaccatttaaaaactcagacaagattatatttaatatattaattactaaaaaggcataagattacactgaacatattagctactaaaaaggcactgctaagacattcaagcaaatagctattacacactactgcagattttacaggtttctaattctaacatatgtttgaaaaatccgtgagtattccaaaatatatttaataatggaatatctgcattaatataccatccatgtgtttttaccatttgccttaatattgaatatactgtttacctcacactaaaaagaaaaccagaagccttatttgtgattttgggagtggaagcttccatttttgtgtcaaaaatgaatcctgattcttatggaaatctctgttattaagatatttcaagatgagacaacactgaagatcaaattgtgtttagtatcactatcttctctcctcgtttctctcttactcctcatcctcccagaatctaccagtttatggtagaaagatgggaaccttatttgaatgtgttttttttttccatgatgtccaattttgttgtgggaaaggatttggataaaatttttgtttaaattttggtagatttttatctatacaaatttaaataaaattatgttttgtaagctgtaaga

SEQ ID NO: 2265 - protein, 432 aa, Homo sapiens; identical to SEQ ID NO: 213

SEQ ID NO: 2266 - DNA, 546 bp, Homo sapiens
tctccctgtggtctttccccagctccaccggcagccctccctaaggactcctgcgagacaaagacagaaatggcttccctgaggactgagagtggttacagggctcttcctgctgcttcctctactcctgtatttcacttggctctctaaatttgtttcagctccagagcccagtgcagctgaaatcctagaagacctcacaactgtgttaaattttcacagctgaccacttaaaggcagttctcttcaaataagagagtctcactctctcacccaggctggagtgcggtggcacgatctcagctcactgcaacatctgcctcccaggttcaagagattctcctgcctcacttacatagatgagtttgataacagtcaagctgaaactaaaaagacgcagcttgactgacacagagatcctgaataagagactctttggatactgaaaagtctcttaaataagaaatgctggtgtaaggtgttcagaagacaatggagaaaaaatggaaatactgtgctgtctattacatcatccagatacatttt

SEQ ID NO: 2267 - protein, 60 aa, Homo sapiens
PLKGSSLQIRESHSLTQAGVRWHDLSSLQHLPPRFKRFSCLTYIDEFDNSQAETKKTQLD

SEQ ID NO: 2268 - DNA, 6049 bp, Homo sapiens
ctgttctggccttgaaaatgatccttcttaaaaggattttcctccttcctcaagggaaagaaaacctattgatataaaacttcacttcccattcagtttcccctgctaaatgccactccagtagagactgagtgttgataaatacaggggaaggaaaaagtcgtaagctgagcctggtcacattgccccttgtgatatcgttttatttttaacttcgcaacacttggactatttctgttgaagttttctctcctttccctgccttcccaacagaacgctgtcctctactgcagctgatgcaacccagccacctcccggcaatccgcttacttgcaatcaagggttcaggtgcaagcagatgctgactcagcctgttccattaagagctaagaagcaagaagaaattggggcgccatggggaaagcccgcagatccccgccagggcaccacaggcattgtgagggatgcttcaaccgccactgccacattcctgtggaacccaacacctcctgcctggtaataagctgccacctgctctgtggtgccaccttccacatgtgcaaagaggcagagcaccagctcctctgccctttagagcaggttccgtgcctcaactccgaatatggctgccctctgtccatgtcccgccacaaactggccaagcacctgcaggtgtgccccgccagcgtggtctgctgctccatggagtggaaccgctggccaaatgtggactctgaaaccacccttcatgaaaacatcatgaaagagacccccagtgaggagtgtttggacacagccctggccctgcaggatcagaaggtcctcttcagatccttgaaaatggtggaacttttcccagaaactagagaggctactgaggaggaaccaactatgaatggtgaaaccagtgtggaggaaatgggaggagcagtgggtggagtggatatcggtttggtaccacatggtctgtcagcaactaatggggagatggcagagctaagtcaagaagaacgggaggtgctagccaaaaccaaagaagggatggacctggtcaagtttggccagtgggaaaatattttcagcaaagagcacgcagcctctgctttaacaaattcatcagcgagctgtgagagcaagaacaagaatgactccgagaaagaacagatttccagtggccataacatggtagaaggagagggcgctcccaaaaagaaagaaccacaggaaaatcagaagcagcaggacgttcgtacagccatggaaaccacagggcttgccccttggcaggatggtgttctggaaagactgaaaacagctgtggatgcaaaggactataacatgtatctagtgcacaatgggcggatgctgatacactttggtcagatgcctgcttgtacacccaaggagagagactttgtttatggcaagctggaggctcaggaagttaagactgtttacaccttcaaagttcctgtgagctactgtggaaagcgagctcgacttggagatgccatgttgagttgtaagccaagtgaacacaaggcagtggatacttcagatttggggatcactgtggaggacctgcccaaatcagatctcatcaagaccaccctccagtgtgctttggaaagagaactcaaaggccacgtcatctctgaatccagaagcattgatggactgttcatggattttgccacacaaacatacaactttgagccagaacagttttcctctgggacagtgctggctgacctaaccgctgccaccccagggggactccacgtggagctccacagcgagtgtgtgaccaggagacacaacaaaagcagctctgccttcactttcacttgcaacaaattcttcaggagggatgagttccccctgcacttcaagaatgtccacacagacattcagtcatgtctcaatggctggttccagcatcgatgccccctcgcctacttgggatgtacatttgttcaaaaccatttccgtcccccagggcaaaaggcaaaagtaatctatagccaggagctcaagacctttgccattaagccggaggttgctccagagctgagcgagggaaggaagaacaaccatcttttgggtcatggaggaaaaagccagaattctttaaccagcctgcccctggagattttgaagtacattgctgggttcttggacagcgtcagcctggcccagctctcccaggtgtctgtgctgatgaggaatatctgtgccactttgttacaagagagaggaatggtccttttgcaatggaagaaaaagaggtattcccatggaggcacctcctggagagtccacagagagatctggcagttcagcagcctcttctccaaaatcaagagctgggagtttaatgaagtcacctccatgtctgagcacctgaagtcctgtcctttcaacattgtagagcacaaaactgacccgattcttttgactagcatgtgtcagccccgtgagcaggcccgagagagcttagtctccacctttagaatcagaccacgaggaagatacgtctcctaaaaattcagatgccactcgatgcacccttcttggatttcttctcggagttcctgaagtaggacagagtgtgtggttttgaggactcccttctgtaaactgcctatttgcttatcggggtgtattggaacacgcaatgtccttcgaaacctcaacacgaggcctaagaatttcctaagccatgtcttgtaccatagtgccacattgatgacttgtttccttttttcttttcttttcttttcttttttctttctttctaaaatagattggtctgagaagaaaataagtaatttgaggccatttggaagatgggcccaatttcttaagtgatgagagagcacgaaattccataaccagtacaggcctgtgcttttacatgggctttttagttcacaaagcactttcaaatttatgggacaggaaatgcaggatgggactccccagggaacgcagggtgaagggaacaaagctggaggctctggagctgggtctgttttgacggtcaagtccagggctcattttggttattctactgcctctaggccagggtagtcctaacacagcctgacataggagagcccctggctgagcatggcagccttgaagacaccacaggccaaaacatgaggggcagaaatgggatcacagagtctgttgctagaatcttggcaacatacagcaggaaagccttgataaatcgggagtccaaaggagacaccatatttatggagaacattaggacaaaaagtcaccaacttactttgtaacattttaataatgacttaagggtcaagatttttttcttctgaaaattatgttctgagttaggcagaacatagccatggccctgggccaccctgtgctatctgaaatgacctcaatacactaatgccaacctcagcgtcatgccagaatgcacagggcagcccagggagatcacacctttggcaaagtccagacaaggcccactgcagttcctatggcgccagtcaccagctcctagacagcacttgggtaccccattggggtcttggagaggaagacatgtgaacataacggctccctgaaattgctcctacccatccatatttctggtcatgctttcagtctgacaaaaatggatgatactgctgtttttggtaacaaacagtgaatattcataagaacaaaagtaaaagaaaaaaagacacagtagaaactggcatcccctaaagcagggcttcttagccttggaactattgacatttttaaatggataattctttttttttttttctaggtggggaggggatggagttcactcttgttgcccaggctggagcgcaatgacatgatctcggctcaccgcaacctccgcctcctgggttcaagcgattctcctgcctcagcctcccgagtagctgggattactcgcctggctaattttgtatttttagtagagacgggctttctccatgttgttcaggctggtctcaaactcccgacctcaggtgactcgcccgccttggccttccaaagtgctgggtttacaggtgtgagccactgcgccctgcctgaactggataattctttgttgcaagggactgttctgtgtactacaggatacttggcagcatccttggcctatccattaaatgtcagtagcacccccacagtggcaacaatcaaaaatgtcaccagacattgctaaatattggggagcaaaatggctccccgttgaaaatccctaaaggatgtcatactagtgacaataagttaggatatgcttattttttagtacagcaaaatcttatcgcacatagctatccacaatagttatgatttaatgcagctctttatttatgaaataggttttagacatgtggtgattttaagttgggaaccagaaggaaatgattcgtttggtatggcttcatgtccttcagccacccccaagaatgtatcctttcagctctctttggttatacctgaagccaggagcgttgagttattagccttgtgtttatattcctctcactgtaattggtgtcattttcccagcagtcctagcagtcctcaagcaagtgggaaatcggaaaagaaaaggacaggcattgtagggaagcagaggataaagaatttagccaacaaaagaaacaatctagtcaatctgggtgcttttatttcctgggttctctctaaacatggctcagagctggtgtagatgaagtaggtgaaacctctgaaaagagtctagaaggcagtagagcaagtcccagaccagaaacatgctcatcttttcatcgtaatgtgccactcggtactatttggtaatgtcactctatttttcctaatcccatcctttggtttgtatttcatatttgtatataaggcaccattttctaaaaatatgactagggtgtgacctaaggttttattctgtgaagatgagtaactggaaagaagctaacactgcagtgggaaggaaggaagagagttgtccaggtggtagttcgacgtgttttgaatctagtccttcctacatggaggataaaagctcctaaagtccactctgggtttgtgattttaatagaaatagaaagggaaactatagaccaatggagatgaaaatcaggggctatcgacagatggaggagaaataaggtgctacatagagaaaggaagagggcagaaggctttcccttcccaaactgggtgagctggggaagccttggttcaggagagtggcactgcccacaactgctttgtgggttgtgcacttccagccgcactctccccctccagttgctgccttcagagccgtactgaagcacgagcttcaataagacaagcacacttcatagtgagagggcagcggtaccaaagcctttcagagagactatggattagacagaaatgatttgtgagaggaagctggagtgaacagcatgaacagcgagtgttacctgacagaggcaagacagctagaagtggcttcagatttagaaacagctgaggggagcaaagacggactgtgtacacagggagggaggatgtctatgggcagagcccttggtgagtatcatcaccaagaaaggcagtccagagtagagatcagccgaatatggaggctgaggtctgtagaactgggccagagaggaccttactgccttagtagcataagggtctggaaaagaagtttctatctcacaacaaaggaaaaagtgaaaagcaaggtggaacttgaagatacgtcacgaaaatcactataaaagtctgatttatgtgtgatgtcaaatcaaactgaaatgaagaatgagattgagtatatctgtggtgactgacctctgtatactagaaacctcaacatctctagaagaggaaataaaagctgctttgcactctgaaaggctaattgggtgaatcttataagttaggtctagagacagatgtgtgattcacaggcatagaagttgtcgctgaaaccaagtgtgtatcatgaagaaagaccagagcacaagcctgagac

SEQ ID NO: 2269 - protein, 709 aa, Homo sapiens; identical to SEQ ID NO: 215

SEQ ID NO: 2270 - DNA, 618 bp, Homo sapiens
tctcagctgtggctgtatatgattaccaaggagagggaagtgatgagctttcctttgatccggacgacgtaatcactgacattgagatggtggacgagggctggtggcggggacgttgccatggccactttggactcttccctgcaaattatgtcaagcttctggagtgactagagctcactgtctactgcaactgtgatttcccatgtccaaagtggctctgcctccaccccctccctattcctgctgcaaatgtctaaccagatgaggttctggacagacttccctctcctgcttcattaagggcttggggcagagacagcatggggaaggaggtccccttccccaagagtcctctctatcctggatgagctcatgaacatttctcttgtgttcctgactccttcccaatgaacacctctctgccaccccaagctctgctctcctcctctgtgagctctgggcttcccagtttgtttacccgggaaagtacgtctagattgtgtggtttgcctcattgtgctatttgcccactttccttccctgaagaaatatctgaaccttctttctgttcagtcctaaaattcgaaataaagtgagactatggttcacctgtat

SEQ ID NO: 2271 - protein, 62 aa, Homo sapiens
MNTSLPPQALLSSSVSSGLPSLFTRESTSRLCGLPHCAICPLSFPEEISEPSFCSVLKFEIK

SEQ ID NO: 2272 - DNA, 2829 bp, Homo sapiens
tatactcatatgcatgaagatagaacagagaatcatctaagctcttcttttggcttaacatcaaaaccttataaatactcatgccgtttaggaaaacagattcatcagtttaaatattattgccatagcagcagataatcaagttaaacaactaattagggttactatttacagaatttagcatcaatctatgaagtccagatatctttaaagactcctttgtacaaaacaaaacaaaatgttgttttaaagagaaaaaaaagtaccgtatgattacagcatcatatcgttgacaggagagtaagattgataactcatcgatgtttttagttccacgccttattaggtcggattctttgaactcattttttatggtgcagaatggtgtctcctgccctgcagctgcacacagagagaggacagctccttcacagttagctgagattttttctttgtttttaccaacagttgttaattaggtggacatgcatccttaaagctaaggattggaagctaaggcagctaagttctagaaaattaattgtttgcatcatggggggtaaaaccatgaaaaacaaaatcaggaaagtttaaaacatactgcaaagctaagggaagatgtagaaggcaatagtgaaatatggagcatgcagtgttctagaatcaggatggaattccctgttccatcttggcaccactcttgcctgcctttgcttaatcaccgattcttacatcttttgctcacaagccacaaatggaatcacccagtcagtgtgtcatgtaaatcaagaaacaatacatgttaattagttcttaatatgcaaaaacccagacttgcttagatacccatagttcctgagccagatggagaacaaagctccaaaactctgcggtaatgttgggtatctgggcaacatatccagtcccagagccagctaggatccagactctcctggttgcagttatcccaccaaaatccacatatttgtgtttccattattgagtaatgaaagagaagaggcacagcattatcaactgggaatagggtaatgtctcttcatgagcagagtgctttatactttacaaggcacttttctaggtatcacatttcacttttgtgaggattcgttaggaagaaaagcgctaagttagtgaatgaaactaagtgtccataccagcctgtttctacattaaacacctatactcagcctgaagcccctacaaactacctctggggctggctgggagtaaggggaggttaggaagaggaaaacctgtcagctctgactctaaccaattctgtctcctcttctctgtagtcagcagtcggctttgattataaaggagaagtggagaagcacacatctcagaaagattactctcgtggctttggtggccggtacggggtggagaaggataaatgggacaaagcagctctgggatatgactacaagggagagacggagaaacacgagtcccagagagattatgccaagggctttggtggccagtatggaatccagaaggaccgagtggataagagcgctgtcggcttcaatgaaatggaggccccgaccacagcttataagaagacgacgcccatagaagccgcttctagtggtacccgtgggctgaaggcgaaatttgagtccatggctgaggagaagaggaagcgagaggaagaggagaaggcacagcaggtggccaggaggcaacaggagcgaaaggctgtgacaaagaggagccctgaggctccacagccagtgatagctatggaagagccagcagtaccggccccactgcccaagaaaatctcctcagaggcctggcctccagttgggactcctccatcatcagagtctgagcctgtgagaaccagcagggaacacccagtgcccttgctgcccattaggcagactctcccggaggacaatgaggagcccccagctctgccccctaggactctggaaggcctccaggtggaggaagagccagtgtacgaagcagagcctgagcctgagcccgagcctgagcccgagcctgagaatgactatgaggacgttgaggagatggacaggcatgagcaggaggatgaaccagagggggactatgaggaggtgctcgagcctgaagattcttctttttcttctgctctggctggatcatcaggctgcccggctggggctggggctggggctgtggctctggggatctcagctgtggctgtatatgattaccaaggagagggaagtgatgagctttcctttgatccggacgacgtaatcactgacattgagatggtggacgagggctggtggcggggacgttgccatggccactttggactcttccctgcaaattatgtcaagcttctggagtgactagagctcactgtctactgcaactgtgatttcccatgtccaaagtggctctgcctccaccccctccctattcctgctgcaaatgtctaaccagatgaggttctggacagacttccctctcctgcttcattaagggcttggggcagagacagcatggggaaggaggtccccttccccaagagtcctctctatcctggatgagctcatgaacatttctcttgtgttcctgactccttcccaatgaacacctctctgccaccccaagctctgctctcctcctctgtgagctctgggcttcccagtttgtttacccgggaaagtacgtctagattgtgtggtttgcctcattgtgctatttgcccactttccttccctgaagaaatatctgaaccttctttctgttcagtcctaaaattcgaaataaagtgagactatggttcacctgtat

SEQ ID NO: 2273 - protein, 272 aa, Homo sapiens
MEAPTTAYKKTTPIEAASSGTRGLKAKFESMAEEKRKREEEEKAQQVARRQQERKAVTKRSPEAPQPVIAMEEPAVPAPLPKKISSEAWPPVGTPPSSESEPVRTSREHPVPLLPIRQTLPEDNEEPPALPPRTLEGLQVEEEPVYEAEPEPEPEPEPEPENDYEDVEEMDRHEQEDEPEGDYEEVLEPEDSSFSSALAGSSGCPAGAGAGAVALGISAVAVYDYQGEGSDELSFDPDDVITDIEMVDEGWWRGRCHGHFGLFPANYVKLLE

SEQ ID NO: 2274 - DNA, 550 bp, Homo sapiens
gcagccagagagggagtcggtgtggacgcgaggagccgggcgcttagaacagaggcttgcacaggtggagatgtggaagtctgtagtgggccatgatgtgtctgtttccgtggagacccagggtgatgattgggacacagatcctgactttgtgaatgacatctctgaaaaggagcaacgatggggagccaagaccatcgaggggtctggacacttccctctcctgcttcattaagggcttggggcagagacagcatggggaaggaggtccccttccccaagagtcctctctatcctggatgagctcatgaacatttctcttgtgttcctgactccttcccaatgaacacctctctgccaccccaagctctgctctcctcctctgtgagctctgggcttcccagtttgtttacccgggaaagtacgtctagattgtgtggtttgcctcattgtgctatttgcccactttccttccctgaagaaatatctgaaccttctttctgttcagtcctaaaattcgaaataaagtgagactatggttcacctgtat

SEQ ID NO: 2275 - protein, 54 aa, Homo sapiens
MWKSVVGHDVSVSVETQGDDWDTDPDFVNDISEKEQRWGAKTIEGSGHFPLLLH

SEQ ID NO: 2276 - DNA, 791 bp, Homo sapiens
gctcagtttctcactccgaagtggcagcagccagagagggagtcggtgtggacgcgaggagccgggcgcttagaacagaggcttgcacaggtggagatgtggaagtctgtagtgggccatgatgtgtctgtttccgtggagacccagggtgatgattgggacacagatcctgactttgtgaatgacatctctgaaaaggagcaacgatggggagccaagaccatcgaggggtctggacgcacagaacacatcaacatccaccagctgaggaacaaagtatcagaggagcatgatgttctcaggaagaaagagatggagtcagggcccaaagcatcccatggctatggaggtcggtttggagtagaaagagaccgaatggacaagagtgcagtgggccatgagtatgttgccgaggtggagaagcactcttctcagacggatgctgccaaaggctttgggggcaagtacggagttgagagggacagggcagacaagcatggggaaggaggtccccttccccaagagtcctctctatcctggatgagctcatgaacatttctcttgtgttcctgactccttcccaatgaacacctctctgccaccccaagctctgctctcctcctctgtgagctctgggcttcccagtttgtttacccgggaaagtacgtctagattgtgtggtttgcctcattgtgctatttgcccactttccttccctgaagaaatatctgaaccttctttctgttcagtcctaaaattcgaaataaagtgagactatggttcacctgtat

SEQ ID NO: 2277 - protein, 151 aa, Homo sapiens
MWKSVVGHDVSVSVETQGDDWDTDPDFVNDISEKEQRWGAKTIEGSGRTEHINIHQLRNKVSEEHDVLRKKEMESGPKASHGYGGRFGVERDRMDKSAVGHEYVAEVEKHSSQTDAAKGFGGKYGVERDRADKHGEGGPLPQESSLSWMSS

SEQ ID NO: 2278 - DNA, 2037 bp, Homo sapiens
gacgaaaacctgaatacggaactgaagcagcagctcagtttctcactccgaagtggcagcagccagagagggagtcggtgtggacgcgaggagccgggcgcttagaacagaggcttgcacaggtggagatgtggaagtctgtagtgggccatgatgtgtctgtttccgtggagacccagggtgatgattgggacacagatcctgactttgtgaatgacatctctgaaaaggagcaacgatggggagccaagaccatcgaggggtctggacgcacagaacacatcaacatccaccagctgaggaacaaagtatcagaggagcatgatgttctcaggaagaaagagatggagtcagggcccaaagcatcccatggctatggaggtcggtttggagtagaaagagaccgaatggacaagagtgcagtgggccatgagtatgttgccgaggtggagaagcactcttctcagacggatgctgccaaaggctttgggggcaagtacggagttgagagggacagggcagacaagtcagcagtcggctttgattataaaggagaagtggagaagcacacatctcagaaagattactctcgtggctttggtggccggtacggggtggagaaggataaatgggacaaagcagctctgggatatgactacaagggagagacggagaaacacgagtcccagagagattatgccaagggctttggtggccagtatggaatccagaaggaccgagtggataagagcgctgtcggcttcaatgaaatggaggccccgaccacagcttataagaagacgacgcccatagaagccgcttctagtggtacccgtgggctgaaggcgaaatttgagtccatggctgaggagaagaggaagcgagaggaagaggagaaggcacagcaggtggccaggaggcaacaggagcgaaaggctgtgacaaagaggagccctgaggctccacagccagtgatagctatggaagagccagcagtaccggccccactgcccaagaaaatctcctcagaggcctggcctccagttgggactcctccatcatcagagtctgagcctgtgagaaccagcagggaacacccagtgcccttgctgcccattaggcagactctcccggaggacaatgaggagcccccagctctgccccctaggactctggaaggcctccaggtggaggaagagccagtgtacgaagcagagcctgagcctgagcccgagcctgagcccgagcctgagaatgactatgaggacgttgaggagatggacaggcatgagcaggaggatgaaccagagggggactatgaggaggtgctcgagcctgaagattcttctttttcttctgctctggctggatcatcaggctgcccggctggggctggggctggggctgtggctctggggatctcagctgtggctgtatatgattaccaaggagagggaagtgatgagctttcctttgatccggacgacgtaatcactgacattgagatggtggacgagggctggtggcggggacgttgccatggccactttggactcttccctgcaaattatgtcaagcttctggagtgactagagctcactgtctactgcaactgtgatttcccatgtccaaagtggctctgcctccaccccctccctattcctgctgcaaatgtctaaccagatgaggttctggacagacttccctctcctgcttcattaagggcttggggcagagacagcatggggaaggaggtccccttccccaagagtcctctctatcctggatgagctcatgaacatttctcttgtgttcctgactccttcccaatgaacacctctctgccaccccaagctctgctctcctcctctgtgagctctgggcttcccagtttgtttacccgggaaagtacgtctagattgtgtggtttgcctcattgtgctatttgcccactttccttccctgaagaaatatctgaaccttctttctgttcagtcctaaaattcgaaataaagtgagactatggttcacctgtat

SEQ ID NO: 2279 - protein, 486 aa, Homo sapiens
MWKSVVGHDVSVSVETQGDDWDTDPDFVNDISEKEQRWGAKTIEGSGRTEHINIHQLRNKVSEEHDVLRKKEMESGPKASHGYGGRFGVERDRMDKSAVGHEYVAEVEKHSSQTDAAKGFGGKYGVERDRADKSAVGFDYKGEVEKHTSQKDYSRGFGGRYGVEKDKWDKAALGYDYKGETEKHESQRDYAKGFGGQYGIQKDRVDKSAVGFNEMEAPTTAYKKTTPIEAASSGTRGLKAKFESMAEEKRKREEEEKAQQVARRQQERKAVTKRSPEAPQPVIAMEEPAVPAPLPKKISSEAWPPVGTPPSSESEPVRTSREHPVPLLPIRQTLPEDNEEPPALPPRTLEGLQVEEEPVYEAEPEPEPEPEPEPENDYEDVEEMDRHEQEDEPEGDYEEVLEPEDSSFSSALAGSSGCPAGAGAGAVALGISAVAVYDYQGEGSDELSFDPDDVITDIEMVDEGWWRGRCHGHFGLFPANYVKLLE

SEQ ID NO: 2280 - DNA, 666 bp, Homo sapiens
cagctgtggctgtatatgattaccaaggaggtaggttgggagtggcccgaggagcctggtacatggaggcccctgatataagacagggggacatgtgaaaagagattcatgtctgaccattctaatatcccctcaactttctccccagagggaagtgatgagctttcctttgatccggacgacgtaatcactgacattgagatggtggacgagggctggtggcggggacgttgccatggccactttggactcttccctgcaaattatgtcaagcttctggagtgactagagctcactgtctactgcaactgtgatttcccatgtccaaagtggctctgcctccaccccctccctattcctgctgcaaatgtctaaccagatgaggtccccttccccaagagtcctctctatcctggatgagctcatgaacatttctcttgtgttcctgactccttcccaatgaacacctctctgccaccccaagctctgctctcctcctctgtgagctctgggcttcccagtttgtttacccgggaaagtacgtctagattgtgtggtttgcctcattgtgctatttgcccactttccttccctgaagaaatatctgaaccttctttctgttcagtcctaaaattcgaaataaagtgagactatggttcacctgta

SEQ ID NO: 2281 - protein, 31 aa, Homo sapiens
MSNQMRSPSPRVLSILDELMNISLVFLTPSQ

SEQ ID NO: 2282 - DNA, 323 bp, Homo sapiens
agccagagagggagtcggtgtggacgcgaggagccgggcgcttagaacagaggcttgcacaggtggagatgtggaagtctgtagtgggccatgatgttgttcctgactccttcccaatgaacacctctctgccaccccaagctctgctctcctcctctgtgagctctgggcttcccagtttgtttacccgggaaagtacgtctagattgtgtggtttgcctcattgtgctatttgcccactttccttccctgaagaaatatctgaaccttctttctgttcagtcctaaaattcgaaataaagtgagactatggttcacctgta

SEQ ID NO: 2283 - protein, 78 aa, Homo sapiens [sequence omitted]

SEQ ID NO: 2284 - DNA, 623 bp, Homo sapiens
gacgaaaacctgaatacggaactgaagcagcagctcagtttctcactccgaagtggcagcagccagagagggagtcggtgtggacgcgaggagccgggcgcttagaacagaggcttgcacaggtggagatgtggaagtctgtagtgggccatgatgtgtctgtttccgtggagacccagggtgatgattgggacacagatcctgactttgtgaatgacatctctgaaaaggagcaacgatggggagccaagaccatcgaggggtctggacgcacagaacacatcaacatccaccagctgaggaacaaagtatcagaggagcatgatgttctcaggaagaaagagatggagtcagggcccaaagcatcccatggctatggaggtcggtttggagtagaaagagaccgaatggacaagagtgcagtgggccatgagtatgttgccgaggtggagaagcactcttctcagacggatgctgccaaaggctttgggggcaagtacggagttgagagggacagggcagacaagtcagcagtcggctttgattataaaggagaagtggagaagcacacatctcagaaagattatgccaagggctttggtggccagtatggaatccagaag

SEQ ID NO: 2285 - protein, 164 aa, Homo sapiens
MWKSVVGHDVSVSVETQGDDWDTDPDFVNDISEKEQRWGAKTIEGSGRTEHINIHQLRNKVSEEHDVLRKKEMESGPKASHGYGGRFGVERDRMDKSAVGHEYVAEVEKHSSQTDAAKGFGGKYGVERDRADKSAVGFDYKGEVEKHTSQKDYAKGFGGQYGIQ

SEQ ID NO: 2286 - DNA, 1429 bp, Homo sapiens
gtatcagaggagcatgatgttctcaggaagaaagagatggagtcagggcccaaagcatcccatggctatggaggtcggtttggagtagaaagagaccgaatggacaagagtgcagtgggccatgagtatgttgccgaggtggagaagcactcttctcagacggatgctgccaaaggctttgggggcaagtacggagttgagagggacagggcagacaaggtaagtgaccactctctctcccaaccacccacctccagtcctgtgaaaattgcccacgatcacccctggatggaggcacatgcttctttgttgaaagacaggacagtggatgctgtgaggacctgacaccgtcacagggatacctccctcagcaagttccttggtgccaatgttggaagccacatgctgagctgaaagacagtgattcaaataggagaagactctcaaactgtgtgtttgaatgaataattcctcaagccactggtttttattatactcatatgcatgaagatagaacagagaatcatctaagctcttcttttggcttaacatcaaaaccttataaatactcatgccgtttaggaaaacagattcatcagtttaaatattattgccatagcagcagataatcaagttaaacaactaattagggttactatttacagaatttagcatcaatctatgaagtccagatatctttaaagactcctttgtacaaaacaaaacaaaatgttgttttaaagagaaaaaaaagtaccgtatgattacagcatcatatcgttgacaggagagtaagattgataactcatcgatgtttttagttccacgccttattaggtcggattctttgaactcattttttatggtgcagaatggtgtctcctgccctgcagctgcacacagagagaggacagctccttcacagttagctgagattttttctttgtttttaccaacagttgttaattaggtggacatgcatccttaaagctaaggattggaagctaaggcagctaagttctagaaaattaattgtttgcatcatggggggtaaaaccatgaaaaacaaaatcaggaaagtttaaaacatactgcaaagctaagggaagatgtagaaggcaatagtgaaatatggagcatgcagtgttctagaatcaggatggaattccctgttccatcttggcaccactcttgcctgcctttgcttaatcaccgattcttacatcttttgctcacaagccacaaatggaatcacccagtcagtgtgtcatgtaaatcaagaaacaatacatgttaattagttcttaatatgcaaaaacccagacttgcttagatacccatagttcctgagccagatggagaacaaagctccaaaactctgcggtaatgttgggtatctgggcaacatatccagtcccagagccagcta

SEQ ID NO: 2287 - protein, 102 aa, Homo sapiens
MESGPKASHGYGGRFGVERDRMDKSAVGHEYVAEVEKHSSQTDAAKGFGGKYGVERDRADKVSDHSLSQPPTSSPVKIAHDHPWMEAHASLLKDRTVDAVRT

SEQ ID NO: 2288 - DNA, 1705 bp, Homo sapiens
gctcagtttctcactccgaagtggcagcagccagagagggagtcggtgtggacgcgaggagccgggcgcttagaacagaggcttgcacaggtggagatgtggaagtctgtagtgggccatgatgtgtctgtttccgtggagacccagggtgatgattgggacacagatcctgactttgtgaatgacatctctgaaaaggagcaacgatggggagccaagaccatcgaggggtctggacgcacagaacacatcaacatccaccagctgaggaacaaagtatcagaggagcatgatgttctcaggaagaaagagatggagtcagggcccaaagcatcccatggctatggaggtcggtttggagtagaaagagaccgaatggacaagagtgcagtgggccatgagtatgttgccgaggtggagaagcactcttctcagacggatgctgccaaaggctttgggggcaagtacggagttgagagggacagggcagacaaggtaagtgaccactctctctcccaaccacccacctccagtcctgtgaaaattgcccacgatcacccctggatggaggcacatgcttctttgttgaaagacaggacagtggatgctgtgaggacctgacaccgtcacagggatacctccctcagcaagttccttggtgccaatgttggaagccacatgctgagctgaaagacagtgattcaaataggagaagactctcaaactgtgtgtttgaatgaataattcctcaagccactggtttttattatactcatatgcatgaagatagaacagagaatcatctaagctcttcttttggcttaacatcaaaaccttataaatactcatgccgtttaggaaaacagattcatcagtttaaatattattgccatagcagcagataatcaagttaaacaactaattagggttactatttacagaatttagcatcaatctatgaagtccagatatctttaaagactcctttgtacaaaacaaaacaaaatgttgttttaaagagaaaaaaaagtaccgtatgattacagcatcatatcgttgacaggagagtaagattgataactcatcgatgtttttagttccacgccttattaggtcggattctttgaactcattttttatggtgcagaatggtgtctcctgccctgcagctgcacacagagagaggacagctccttcacagttagctgagattttttctttgtttttaccaacagttgttaattaggtggacatgcatccttaaagctaaggattggaagctaaggcagctaagttctagaaaattaattgtttgcatcatggggggtaaaaccatgaaaaacaaaatcaggaaagtttaaaacatactgcaaagctaagggaagatgtagaaggcaatagtgaaatatggagcatgcagtgttctagaatcaggatggaattccctgttccatcttggcaccactcttgcctgcctttgcttaatcaccgattcttacatcttttgctcacaagccacaaatggaatcacccagtcagtgtgtcatgtaaatcaagaaacaatacatgttaattagttcttaatatgcaaaaacccagacttgcttagatacccatagttcctgagccagatggagaacaaagctccaaaactctgcggtaatgttgggtatctgggcaacatatccagtcccagagccagcta

SEQ ID NO: 2289 - protein, 174 aa, Homo sapiens
MWKSVVGHDVSVSVETQGDDWDTDPDFVNDISEKEQRWGAKTIEGSGRTEHINIHQLRNKVSEEHDVLRKKEMESGPKASHGYGGRFGVERDRMDKSAVGHEYVAEVEKHSSQTDAAKGFGGKYGVERDRADKVSDHSLSQPPTSSPVKIAHDHPWMEAHASLLKDRTVDAVRT

SEQ ID NO: 2290 - DNA, 595 bp, Homo sapiens
gcagctcagtttctcactccgaagtggcagcagccagagagggagtcggtgtggacgcgaggagccgggcgcttagaacagaggcttgcacaggtggagatgtggaagtctgtagtgggccatgatgtgtctgtttccgtggagacccagggtgatgattgggacacagatcctgactttgtgaatgacatctctgaaaaggagcaacgatggggagccaagaccatcgaggggtctggacgcacagaacacatcaacatccaccagctgaggaacaaagtatcagaggagcatgatgttctcaggaagaaagagatggagtcagggcccaaagcatcccatggctatggaggtcggtttggagtagaaagagaccgaatggacaagagtgcagtgggccatgagtatgttgccgaggtggagaagcactcttctcagacggatgctgccaaaggctttgggggcaagtacggagttgagagggacagggcagacaagacaggacagtggatgctgtgaggacctgacaccgtcacagggatacctccctcagcaagttccttggtgccaatgttggaagccacatgctgagctg

SEQ ID NO: 2291 - protein, 139 aa, Homo sapiens
MWKSVVGHDVSVSVETQGDDWDTDPDFVNDISEKEQRWGAKTIEGSGRTEHINIHQLRNKVSEEHDVLRKKEMESGPKASHGYGGRFGVERDRMDKSAVGHEYVAEVEKHSSQTDAAKGFGGKYGVERDRADKTGQWML

SEQ ID NO: 2292 - DNA, 584 bp, Homo sapiens
agctcagtttctcactccgaagtggcagcagccagagagggagtcggtgtggacgcgaggagccgggcgcttagaacagaggcttgcacaggtggagatgtggaagtctgtagtgggccatgatgtgtctgtttccgtggagacccagggtgatgattgggacacagatcctgactttgtgaatgacatctctgaaaaggagcaacgatggggagccaagaccatcgaggggtctggacgcacagaacacatcaaaaacagttcagcttgtggaccacacactgagtggcactgctctggaataatctttcagcacttcctggaaccagtctggcctttagattaaatctttactgagctataaccataggatgtctgcctcagtggccctgtcctcttctcgtgccctgacattttatagcaagtggaaataaagaatggtgtaatgccaagagtatagaaatagaattctggagctctagggactgattccagctctgctgtaaaaaggcttatgatgctgaggagagtaataatattttaccatcctatcttgatttccagcgctgactggagattatagt

SEQ ID NO: 2293 - protein, 82 aa, Homo sapiens
MWKSVVGHDVSVSVETQGDDWDTDPDFVNDISEKEQRWGAKTIEGSGRTEHIKNSSACGPHTEWHCSGIIFQHFLEPVWPLD

SEQ ID NO: 2294 - DNA, 502 bp, Homo sapiens
gggagtcggtgtggacgcgaggagccgggcgcttagaacagaggcttgcacaggtggagatgtggaagtctgtagtgggccatgatgtgtctgtttccgtggagacccagggtgatgattgggacacagatcctgactttgtgaatgacatctctgaaaaggagcaacgatggggagccaagaccatcgaggggtctggacgcacagaacacatcaagtaggtgccgaaaggactggagaaaaggaagggggttatgggaagagcccaaagaaaactcggagacttgggggaagattttaaaaagtgtcagtggatgaccacattgcacaagcaacatactgtgaaagcctggcacaagtttctacaactggatgacaataccacattgtttaatcagaaataaatggtttcggccgggcgtggtggctcacgcttgtaatcccaaaactttggaaggccgagcgaggaagatcacttgaggtcaggagttcaagaccagca

SEQ ID NO: 2295 - protein, 57 aa, Homo sapiens
MTSLKRSNDGEPRPSRGLDAQNTSSRCRKDWRKGRGLWEEPKENSETWGKILKSVSG

SEQ ID NO: 2296 - DNA, 890 bp, Homo sapiens
agcagctcagtttctcactccgaagtggcagcagccagagagggagtcggtgtggacgcgaggagccgggcgcttagaacagaggcttgcacaggtggagatgtggaagtctgtagtgggccatgatgtgtctgtttccgtggagacccagggtgatgattgggacacagatcctgactttgtgaatgacatctctgaaaaggagcaacgatggggagccaagaccatcgaggggtctggacgcacagaacacatcaagtaggtgccgaaaggactggagaaaaggaagggggttatgggaagagcccaaagaaaactcggagacttgggggaaggtgagggaggaaaaggatagggtagttcatgtctatgtattattgtgtttgttttttttctagagtctgttcctgtgtgtacctgtgtgtcattgcatatttccattttatgtctctcctcttaccctcctcaaccctattatctatcttttatacctaacaactctgctatttccccaagtgggtctattggattaactgcctcccttcctttagtaaggcatgagagattcatagaggaagtggaccaaatactaaggtcctctctatctatctacctggcaatcatctatctcctatctatctcttcagataaatgtaaatatgtatttagaattcagggtgacttccttcagatgaactaagaacaattcagtaaaatgtcaaggtgaagaactcagaataaatgctataaaaagaggccacttcagctcccataactggcccaaataacttttaaaatacagatttgtacttagctatttgacagaagttggaagccatgaatggtaatatgaagaaatgtaacacttggaaaacctgttgataaaaact

SEQ ID NO: 2297 - protein, 53 aa, Homo sapiens
MWKSVVGHDVSVSVETQGDDWDTDPDFVNDISEKEQRWGAKTIEGSGRTEHIK

SEQ ID NO: 2298 - DNA, 450 bp, Homo sapiens
actccgaagtggcagcagccagagagggagtcggtgtggacgcgaggagccgggcgcttagaacagaggcttgcacaggtggagatgtggaagtctgtagtgggccatgatgtgtctgtttccgtggagacccagggtgatgattgggacacagatcctgactttgtggtgagtttggaagtagctttgcttggacagtgcagagggtggggtgaggagggcatctgggccactctgtgatctttgaggatgcttggaaaagggccttctaggactgagacagccctcatactgggactaattggtaggacaattggctgtcacctgtggggcatgcacgatacctggtatcagggatgaaaagagacaggtgtgggtgagtttgacagtgtgattgacaggccatggcaggctacactgaaggtgagaagcaggtgaacctgggtctcc

SEQ ID NO: 2299 - protein, 51 aa, Homo sapiens
MWKSVVGHDVSVSVETQGDDWDTDPDFVVSLEVALLGQCRGWGEEGIWATL

SEQ ID NO: 2300 - DNA, 569 bp, Homo sapiens
aacatatgatctgtgctgctgttggtgcaggaggacaggagggaaataagctggaagccatggatgtggagagtctggcttcaagatggagcttgtttacctgcagggccccatgcagaacctcatgagacgtgacttcagaggcctcctctctgaaggtgagggaggcgtcagctgttcagagagagaggctgccttgcctggggacacacagctagccagtggccggagcagcagtggatgcagttgtcctgatgcatagttcaagaagctttttttttttttttttttttcacgtgtgaaaacatctattgggaaaatggaaaaatcatttgacctcatattcctcatagctgacatgcctggctcctttctgtggagaagatcctgagaggaaccacaacttgacaaaaccaaaatgtggtggtgagccaacttcaattttgcagaaactgacttggaaagaactgattacctgaaggaccgtgaggatcaaagttgtcccactgaccaggctgtaaactttggaactgataagtgagagagataaggtaaacttctttaccttt

SEQ ID NO: 2301 - protein, 58 aa, Homo sapiens
MELVYLQGPMQNLMRRDFRGLLSEGEGGVSCSEREAALPGDTQLASGRSSSGCSCPDA

SEQ ID NO: 2302 - DNA, 4673 bp, Homo sapiens
gtcagtctggccggctccgtcctcccgtaggctccgctgtagctagcaatgtgacaccaggacgcactcgctctcgcgcgctctcccaggctcgttctccctcgccctctctctctcacacacgcacgcacacacccacctctcccataaacacacacacacacatgcacacccacacccacgcgcgcccgcaccgccccacgcgcacacactcctgcccacgcccacgcagcgctccgggaagtccggtccgggcgagagcgcgaaaggataccgagaagccacccgcggagagcgcagcggcgccctgggacgcggcgctctcccggcgctgctgcctcggcttggtctcggcctgcgggccgtcggccggcgatggccctggattatctactactgctcctcctggcatccgcagtggctgcgatggaagaaacgttaatggacaccagaacggctactgcagagctgggctggacggccaatcctgcgtccgggtgggaagaagtcagtggctacgatgaaaacctgaacaccatccgcacctaccaggtgtgcaatgtcttcgagcccaaccagaacaattggctgctcaccaccttcatcaaccggcggggggcccatcgcatctacacagagatgcgcttcactgtgagagactgcagcagcctccctaatgtcccaggatcctgcaaggagaccttcaacttgtattactatgagactgactctgtcattgccaccaagaagtcagccttctggtctgaggccccctacctcaaagtagacaccattgctgcagatgagagcttctcccaggtggactttgggggaaggctgatgaaggtaaacacagaagtcaggagctttgggcctcttactcggaatggtttttacctcgcttttcaggattatggagcctgtatgtctcttctttctgtccgtgtcttcttcaaaaagtgtcccagcattgtgcaaaattttgcagtgtttccagagactatgacaggggcagagagcacatctctggtgattgctcggggcacatgcatccccaacgcagaggaagtggacgtgcccatcaaactctactgcaacggggatggggaatggatggtgcctattgggcgatgcacctgcaagcctggctatgagcctgagaacagcgtggcatgcaaggcttgccctgcagggacattcaaggccagccaggaagctgaaggctgctcccactgcccctccaacagccgctcccctgcagaggcgtctcccatctgcacctgtcggaccggttattaccgagcggactttgaccctccagaagtggcatgcactagcgtcccatcaggtccccgcaatgttatctccatcgtcaatgagacgtccatcattctggagtggcaccctccaagggagacaggtgggcgggatgatgtgacctacaacatcatctgcaaaaagtgccgggcagaccgccggagctgctcccgctgtgacgacaatgtggagtttgtgcccaggcagctgggcctgacggagtgccgcgtctccatcagcagcctgtgggcccacaccccctacacctttgacatccaggccatcaatggagtctccagcaagagtcccttccccccacagcacgtctctgtcaacatcaccacaaaccaagccgccccctccaccgttcccatcatgcaccaagtcagtgccactatgaggagcatcaccttgtcatggccacagccggagcagcccaatggcatcatcctggactatgagatccggtactatgagaaggaacacaatgagttcaactcctccatggccaggagtcagaccaacacagcaaggattgatgggctgcggcctggcatggtatatgtggtacaggtgcgtgcccgcactgttgctggctacggcaagttcagtggcaagatgtgcttccagactctgactgacgatgattacaagtcagagctgagggagcagctgcccctgattgctggctcggcagcggccggggtcgtgttcgttgtgtccttggtggccatctctatcgtctgtagcaggaaacgggcttatagcaaagaggctgtgtacagcgataagctccagcattacagcacaggccgaggctccccagggatgaagatctacattgaccccttcacttacgaggatcccaacgaagctgtccgggagtttgccaaggagattgatgtatcttttgtgaaaattgaagaggtcatcggagcaggggagtttggagaagtgtacaaggggcgtttgaaactgccaggcaagagggaaatctacgtggccatcaagaccctgaaggcagggtactcggagaagcagcgtcgggactttctgagtgaggcgagcatcatgggccagttcgaccatcctaacatcattcgcctggagggtgtggtcaccaagagtcggcctgtcatgatcatcacagagttcatggagaatggtgcattggattctttcctcaggcaaaatgacgggcagttcaccgtgatccagcttgtgggtatgctcaggggcatcgctgctggcatgaagtacctggctgagatgaattatgtgcatcgggacctggctgctaggaacattctggtcaacagtaacctggtgtgcaaggtgtccgactttggcctctcccgctacctccaggatgacacctcagatcccacctacaccagctccttgggagggaagatccctgtgagatggacagctccagaggccatcgcctaccgcaagttcacttcagccagcgacgtttggagctatgggatcgtcatgtgggaagtcatgtcatttggagagagaccctattgggatatgtccaaccaagatgtcatcaatgccatcgagcaggactaccggctgcccccacccatggactgtccagctgctctacaccagctcatgctggactgttggcagaaggaccggaacagccggccccggtttgcggagattgtcaacaccctagataagatgatccggaacccggcaagtctcaagactgtggcaaccatcaccgccgtgccttcccagcccctgctcgaccgctccatcccagacttcacggcctttaccaccgtggatgactggctcagcgccatcaaaatggtccagtacagggacagcttcctcactgctggcttcacctccctccagctggtcacccagatgacatcagaagacctcctgagaataggcatcaccttggcaggccatcagaagaagatcctgaacagcattcattctatgagggtccagataagtcagtcaccaacggcaatggcatgagaactcttgtttcttggggaaggagaggagggaaaaggaccagggtcaagggggaccagaggttgaccactgtggaatgtactggagagactggcttctcagctgaggaatgcatttccatcagtgaagaatcaaccggacctgttgctagcaggcaatctccatttctcagtgacagaagcatgtttgagatgccgtgggaaaccaaatatataataataaaaatataaaaaggtgatgttcaacagaagtgaagacaaaacaatatgcatcaggagaacaagagtaaacccagctcccattctcagtgggctgcagttgcccaaccacaggaagaaagggaaggaggtagagggaagaaacagaagcagtgttccattttcttcctcaccaatgacattcttttcttttctcctttcgtactcctccctgagagtcccctcccttctcccacactcgtttccctttgctcatgactcctgtagggaagtttcttcaaacaaaacccagctcctgagtctccagatgttgttctgtcagttgccaaaggactttgctgaccactgcatggggatccaaccaattcaattaatgtcttcatattgaagaagagatgtaccttcaattgaaaacctcgtttttcttttgtttgcattttctgcaaaaaggaaaaagaaaccacaaattggggaaaaaaaaagaagaaaaacctgtttccgtgtgcaaaagcacacatatgtatgtctgtgttataaaatgactgtgcttgttcgtaacagatgcaaacaagaaagaagaactgggaagtctttgtccctaggaaatccaaaggggctggaatatggtgttggtttggctttctggttggcccaatcggcctattggctcaatgggaagagaggagagggagaaaaataaaatgaaaggaaaaaaaaaagtttgcaaattcagacaggaaacaggtgagtggtttgaattggatgcagtgtgggccatcctggaatgatactgactgattaattattcctgataacatctcaagaaaaggagaaggaaagtgtttctggagaatgttctttcacatcactggaatctgcaattcaagaagtgacaagggagaattcttgctttacctatggactggcttaagccgtgtggcatccgaggaatgtttcaaatgtgtctgtgtttctctttacattccttgttgtacctcattgttcaattcacttttgtaaattccacctaacatttaattattttaaatttctccttttaccttaatctccttgctaattttatctgtctaattaaaaagagcagaagcatgtctgggtttacgt

SEQ ID NO: 2303 - protein, 984 aa, Homo sapiens
MALDYLLLLLLASAVAAMEETLMDTRTATAELGWTANPASGWEEVSGYDENLNTIRTYQVCNVFEPNQNNWLLTTFINRRGAHRIYTEMRFTVRDCSSLPNVPGSCKETFNLYYYETDSVIATKKSAFWSEAPYLKVDTIAADESFSQVDFGGRLMKVNTEVRSFGPLTRNGFYLAFQDYGACMSLLSVRVFFKKCPSIVQNFAVFPETMTGAESTSLVIARGTCIPNAEEVDVPIKLYCNGDGEWMVPIGRCTCKPGYEPENSVACKACPAGTFKASQEAEGCSHCPSNSRSPAEASPICTCRTGYYRADFDPPEVACTSVPSGPRNVISIVNETSIILEWHPPRETGGRDDVTYNIICKKCRADRRSCSRCDDNVEFVPRQLGLTECRVSISSLWAHTPYTFDIQAINGVSSKSPFPPQHVSVNITTNQAAPSTVPIMHQVSATMRSITLSWPQPEQPNGIILDYEIRYYEKEHNEFNSSMARSQTNTARIDGLRPGMVYVVQVRARTVAGYGKFSGKMCFQTLTDDDYKSELREQLPLIAGSAAAGVVFVVSLVAISIVCSRKRAYSKEAVYSDKLQHYSTGRGSPGMKIYIDPFTYEDPNEAVREFAKEIDVSFVKIEEVIGAGEFGEVYKGRLKLPGKREIYVAIKTLKAGYSEKQRRDFLSEASIMGQFDHPNIIRLEGVVTKSRPVMIITEFMENGALDSFLRQNDGQFTVIQLVGMLRGIAAGMKYLAEMNYVHRDLAARNILVNSNLVCKVSDFGLSRYLQDDTSDPTYTSSLGGKIPVRWTAPEAIAYRKFTSASDVWSYGIVMWEVMSFGERPYWDMSNQDVINAIEQDYRLPPPMDCPAALHQLMLDCWQKDRNSRPRFAEIVNTLDKMIRNPASLKTVATITAVPSQPLLDRSIPDFTAFTTVDDWLSAIKMVQYRDSFLTAGFTSLQLVTQMTSEDLLRIGITLAGHQKKILNSIHSMRVQISQSPTAMA

SEQ ID NO: 2304 - DNA, 4955 bp, Homo sapiens
gtcagtctggccggctccgtcctcccgtaggctccgctgtagctagcaatgtgacaccaggacgcactcgctctcgcgcgctctcccaggctcgttctccctcgccctctctctctcacacacgcacgcacacacccacctctcccataaacacacacacacacatgcacacccacacccacgcgcgcccgcaccgccccacgcgcacacactcctgcccacgcccacgcagcgctccgggaagtccggtccgggcgagagcgcgaaaggataccgagaagccacccgcggagagcgcagcggcgccctgggacgcggcgctctcccggcgctgctgcctcggcttggtctcggcctgcgggccgtcggccggcgatggccctggattatctactactgctcctcctggcatccgcagtggctgcgatggaagaaacgttaatggacaccagaacggctactgcagagctgggctggacggccaatcctgcgtccgggtgggaagaagtcagtggctacgatgaaaacctgaacaccatccgcacctaccaggtgtgcaatgtcttcgagcccaaccagaacaattggctgctcaccaccttcatcaaccggcggggggcccatcgcatctacacagagatgcgcttcactgtgagagactgcagcagcctccctaatgtcccaggatcctgcaaggagaccttcaacttgtattactatgagactgactctgtcattgccaccaagaagtcagccttctggtctgaggccccctacctcaaagtagacaccattgctgcagatgagagcttctcccaggtggactttgggggaaggctgatgaaggtaaacacagaagtcaggagctttgggcctcttactcggaatggtttttacctcgcttttcaggattatggagcctgtatgtctcttctttctgtccgtgtcttcttcaaaaagtgtcccagcattgtgcaaaattttgcagtgtttccagagactatgacaggggcagagagcacatctctggtgattgctcggggcacatgcatccccaacgcagaggaagtggacgtgcccatcaaactctactgcaacggggatggggaatggatggtgcctattgggcgatgcacctgcaagcctggctatgagcctgagaacagcgtggcatgcaaggcttgccctgcagggacattcaaggccagccaggaagctgaaggctgctcccactgcccctccaacagccgctcccctgcagaggcgtctcccatctgcacctgtcggaccggttattaccgagcggactttgaccctccagaagtggcatgcactagcgtcccatcaggtccccgcaatgttatctccatcgtcaatgagacgtccatcattctggagtggcaccctccaagggagacaggtgggcgggatgatgtgacctacaacatcatctgcaaaaagtgccgggcagaccgccggagctgctcccgctgtgacgacaatgtggagtttgtgcccaggcagctgggcctgacggagtgccgcgtctccatcagcagcctgtgggcccacaccccctacacctttgacatccaggccatcaatggagtctccagcaagagtcccttccccccacagcacgtctctgtcaacatcaccacaaaccaagccgccccctccaccgttcccatcatgcaccaagtcagtgccactatgaggagcatcaccttgtcatggccacagccggagcagcccaatggcatcatcctggactatgagatccggtactatgagaaggaacacaatgagttcaactcctccatggccaggagtcagaccaacacagcaaggattgatgggctgcggcctggcatggtatatgtggtacaggtgcgtgcccgcactgttgctggctacggcaagttcagtggcaagatgtgcttccagactctgactgacgatgattacaagtcagagctgagggagcagctgcccctgattgctggctcggcagcggccggggtcgtgttcgttgtgtccttggtggccatctctatcgtctgtagcaggaaacgggcttatagcaaagaggctgtgtacagcgataagctccagcattacagcacaggccgaggctccccagggatgaagatctacattgaccccttcacttacgaggatcccaacgaagctgtccgggagtttgccaaggagattgatgtatcttttgtgaaaattgaagaggtcatcggagcaggggagtttggagaagtgtacaaggggcgtttgaaactgccaggcaagagggaaatctacgtggccatcaagaccctgaaggcagggtactcggagaagcagcgtcgggactttctgagtgaggcgagcatcatgggccagttcgaccatcctaacatcattcgcctggagggtgtggtcaccaagagtcggcctgtcatgatcatcacagagttcatggagaatggtgcattggattctttcctcaggcaaaatgacgggcagttcaccgtgatccagcttgtgggtatgctcaggggcatcgctgctggcatgaagtacctggctgagatgaattatgtgcatcgggacctggctgctaggaacattctggtcaacagtaacctggtgtgcaaggtgtccgactttggcctctcccgctacctccaggatgacacctcagatcccacctacaccagctccttgggagggaagatccctgtgagatggacagctccagaggccatcgcctaccgcaagttcacttcagccagcgacgtttggagctatgggatcgtcatgtgggaagtcatgtcatttggagagagaccctattgggatatgtccaaccaagatgtcatcaatgccatcgagcaggactaccggctgcccccacccatggactgtccagctgctctacaccagctcatgctggactgttggcagaaggaccggaacagccggccccggtttgcggagattgtcaacaccctagataagatgatccggaacccggcaagtctcaagactgtggcaaccatcaccgccgtgccttcccagcccctgctcgaccgctccatcccagacttcacggcctttaccaccgtggatgactggctcagcgccatcaaaatggtccagtacagggacagcttcctcactgctggcttcacctccctccagctggtcacccagatgacatcagaagacctcctgagaataggcatcaccttggcaggccatcagaagaagatcctgaacagcattcattctatgagggtccagataagtcagtcaccaacggcaatggcatgagaactcttgtttcttggggaaggagaggagggaaaaggaccagggtcaagggggaccagaggttgaccactgtggaatgtactggagagactggcttctcagctgaggaatgcatttccatcagtgaagaatcaaccggacctgttgctagcaggcaatctccatttctcagtgacagaagcatgtttgagatgccgtgggaaaccaaatatataataataaaaatataaaaaggtgatgttcaacagaagtgaagacaaaacaatatgcatcaggagaacaagagtaaacccagctcccattctcagtgggctgcagttgcccaaccacaggaagaaagggaaggaggtagagggaagaaacagaagcagtgttccattttcttcctcaccaatgacattcttttcttttctcctttcgtactcctccctgagagtcccctcccttctcccacactcgtttccctttgctcatgactcctgtagggaagtttcttcaaacaaaacccagctcctgagtctccagatgttgttctgtcagttgccaaaggactttgctgaccactgcatggggatccaaccaattcaattaatgtcttcatattgaagaagagatgtaccttcaattgaaaacctcgtttttcttttgtttgcattttctgcaaaaaggaaaaagaaaccacaaattggggaaaaaaaaagaagaaaaacctgtttccgtgtgcaaaagcacacatatgtatgtctgtgttataaaatgactgtgcttgttcgtaacagatgcaaacaagaaagaagaactgggaagtctttgtccctaggaaatccaaaggggctggaatatggtgttggtttggctttctggttggcccaatcggcctattggctcaatgggaagagaggagagggagaaaaataaaatgaaaggaaaaaaaaaagtttgcaaattcagacaggaaacaggtgagtggtttgaattggatgcagtgtgggccatcctggaatgatactgactgattaattattcctgataacatctcaagaaaaggagaaggaaagtgtttctggagaatgttctttcacatcactggaatctgcaattcaagaagtgacaagggagaattcttgctttacctatggactggcttaagccgtgtggcatccgaggaatgtttcaaatgtgtctgtgtttctctttacattccttgttgtacctcattgttcaattcacttttgtaaattccacctaacatttaattattttaaatttctccttttaccttaatctccttgctaattttatctgtctaattaaaaagagcagaagcatgtctgggtttacgtaaaatggtgtcagagtgtgtatccctggatcccagagggttgtccccaaatttcaggagaatccttaacaactgtccttcttctttctaatgtgggagggagggaacacatccttgaccccatgaatgccaagaagcagaatgtagtaaactctctggcactgacgtgatccaaaggaaaaactgaataaataaggcttaagaagtcgctggcaaataaacataaacaatcaccatgaatacactatcaaccctgattttagtttacgcactgcatttgaga

SEQ ID NO: 2305 - protein, 984 aa, Homo sapiens; identical to SEQ ID NO: 2303

SEQ ID NO: 2306 - DNA, 970 bp, Homo sapiens
ctccagctcgcagtccacgggctagtggactctgcttggcgtgcaagcactgcgcgcgggggccggagaagctctgccgtggtatcccgcaagtggccgccgaaggagaggggtggagttcattggccgtacccttggggaccagtctggtggtccgggcgcctgcgggactgcaggtttccagggtcagtcggggagaggtggaaacccttttcgcctcttgagccttggaacaggagtgggctgggaaacgttaatggacaccagaacggctactgcagagctgggctggacggccaatcctgcgtccgggtgggaagaagtcagtggctacgatgaaaacctgaacaccatccgcacctaccaggtgtgcaatgtcttcgagcccaaccagaacaattggctgctcaccaccttcatcaaccggcggggggcccatcgcatctacacagagatgcgcttcactgtgagagactgcagcagcctccctaatgtcccaggatcctgcaaggagaccttcaacttgtattactatgagactgactctgtcattgccaccaagaagtcagccttctggtctgaggccccctacctcaaagtagacaccattgctgcagatgagagcttctcccaggtggactttgggggaaggctgatgaaggtaaacacagaagtcaggagctttgggcctcttactcggaatggtttttacctcgcttttcaggattatggagcctgtatgtctcttctttctgtccgtgtcttcttcaaaaagtgtcccagcattgtgcaaaattttgcagtgtttccagagactatgacaggggcagagagcacatctctggtgattgctcggggcacatgcatccccaacgcagaggaagtggacgtgcccatcaaactctactgcaacggggatggggaatggatggtgcctattgggcgatgcacctgcaagcctggctatgag

SEQ ID NO: 2307 - protein, 237 aa, Homo sapiens
MDTRTATAELGWTANPASGWEEVSGYDENLNTIRTYQVCNVFEPNQNNWLLTTFINRRGAHRIYTEMRFTVRDCSSLPNVPGSCKETFNLYYYETDSVIATKKSAFWSEAPYLKVDTIAADESFSQVDFGGRLMKVNTEVRSFGPLTRNGFYLAFQDYGACMSLLSVRVFFKKCPSIVQNFAVFPETMTGAESTSLVIARGTCIPNAEEVDVPIKLYCNGDGEWMVPIGRCTCKPGY

SEQ ID NO: 2308 - DNA, 698 bp, Homo sapiens; identical to SEQ ID NO: 216

SEQ ID NO: 2309 - protein, 74 aa, Homo sapiens; identical to SEQ ID NO: 217

SEQ ID NO: 2310 - DNA, 539 bp, Homo sapiens
agttgctaacattcaggccaggtgttgaccaggaagtgaagcgagattattaagagtacacttacacacagcaagctgcatcacaagtgcctcagaatgcttgaaaatgaggtcctatctggcacagctgcccagggtttgccttacctgttcacatctgtgggttctctgtgatcaagaactgcctgccctgggaaatccatttgttttcctccactcagtgccaaatgccttcgtctttgtttctgcaagctctcaacattcactgcaggctctaacccaatgacaagtctttagaagagaagagagggaaaaatagacagaaacacaccaaggagaagacaatgtgaagacagaggcagatattggagtgatgcatctacaggccaaggaatgccaagaattgccagcagccaccagaagccaggagataacagattctctgttcgagcctccagaaggatccaatgcagctgacaccttgatttcagacttctggcctccagaactgtgagaataaatatctgatgttttaaact

SEQ ID NO: 2311 - protein, 59 aa, Homo sapiens
MRSYLAQLPRVCLTCSHLWVLCDQELPALGNPFVFLHSVPNAFVFVSASSQHSLQALTQ

SEQ ID NO: 2312 - DNA, 2634 bp, Homo sapiens
cttggtaggaggaatgaaatctgatttgcagcagccggtctttcttttgagaaaattatcagactcattgataagggaaattaaatattgaccaaggacaatgtctttatttctcagtaacttatcaacaaatgactctagcctgtggaaagagaatcataattctacggaccttttaaatccgccaggaaccctgaatatctatcttttttgcttgacatgtctcatgacttttgcagccttggtgggcagcatttattcactaatttccctgctgaaaatgcagaacagaactgttgtgtccatgcttgtggcttcctggtctgtggatgatctcatgagcgtcctgtcggtgaccatcttcatgtttttgcagtggccaaacgaggtccccggttacttccaatttctgtgcaccacctctgccttaatgtatttatgccagggcctctctagcaacttgaaggcgactctcctagtctcttacaacttttatacgatgcacagaggtgtggggagccagacagcctccagaagatcgggccaggtgctcggcgtggtgctgaccgtgtgggcagccagtctgctgctctcggcgctcccgctgtgcggctggggcgccttcgtgcgcacgccctggggctgcctggtggactgctccagctcctacgtactattcctctctatcgtgtacgctttggccttcggactcctcgtgggcctctcagtcccactcactcaccgattgctgtgttcggaggagccgccgagactccactccaactaccaggaaatttcccgtggagcttcaattcctgggacccctcctactgcggggagagtggtttccctgtccccagaggatgctccaggcccgagtctgcggcgctctgggggatgctctccgagctccgacaccgtgttcggaccgggtgcgcccgctgccgctggggctgaagcctgcaggcgtgagaaccgggggactctctatggcaccaggagcttcaccgtgagcgtagcgcagaagcgcttcgctttgatcctagcgcttacaaaagtcgtcctttggctgcccatgatgatgcacatggtggtccagaacgtcgtggggtttcagagccttcccttggagacattcagctttctacttaccctgctggccaccactgtaaccccagtgtttgtcttgtccaaacgctggacccacttgccctgtggctgcatcatcaactgcaggcagaacgcatatgcagtggcgtccgatgggaaaaaaatcaagagaaaaggctttgaattcaatctatcattccaaaaaagttatgggatttataaaatagcacatgaagattactatgatgatgatgaaaattccatattctatcacaacctgatgaactctgagtgtgaaactacaaaagaccctcagagagacaaccgtaacatcttcaatgctataaaagtagaaatcagcaccacgccctctctggacagctccacacaaagaggcatcaacaaatgcacaaatactgatattacagaagctaaacaggattccaacaacaaaaaggatgcgttttctgacaaaacaggaggtgatattaactatgaagaaactaccttttctgaagggccagaaagaagactgtctcatgaagagagtcagaaaccagatctttcagactgggagtggtgtaggagtaaatcagaaagaacccctcgtcagcgttccggttatgcccttgccattcccttgtgtgcattccaggggactgtgtctctccatgcacctacagggaaaaccctatctctttctacctatgaggtaagcgcagaagggcaaaaaataactccagcctctaagaaaatagaagtctatcgatccaaaagtgttggccatgaaccaaactcagaagattcttcatccacgtttgtggacaccagtgtgaaaatacacttggaggttcttgaaatttgtgataatgaagaggccttggacactgtgtcaatcattagtaacatcagtcagtcctccacacaagtcagatctccatccctacgttactccaggaaagaaaacagatttgtttcatgtgacctaggggaaacagcctcatactccctctttttgcccaccagtaatcctgatggtgatattaatatctccattccagacacagtagaagcacacaggcagaacagtaaaaggcagcatcaagagagggatggctaccaggaggaaatccagttgttaaataaagcttacagaaaaagagaggaagaaagcaagggtagttagtgggtatttggtctaacaggagcaagaatggatctgcaacgtcaactgtgaaactaacacctttgttatgagactgatttccttttatttgttggcttacattagttttactgatttaatagttaatttttttgtgggaacaactggaactagtgtaaacacttaagtgcatttgatgtgttacctaaagatcacacactgtggtaatgaaaagattttacttcttatctgacttctaaaaaatattttctaaatcaaatcttggcctagtttaccaatgtttttgcttgtcaacttcctagtaaacagaaaattgtataaactcagtgaatatactg

SEQ ID NO: 2313 - protein, 731 aa, Homo sapiens
MSLFLSNLSTNDSSLWKENHNSTDLLNPPGTLNIYLFCLTCLMTFAALVGSIYSLISLLKMQNRTVVSMLVASWSVDDLMSVLSVTIFMFLQWPNEVPGYFQFLCTTSALMYLCQGLSSNLKATLLVSYNFYTMHRGVGSQTASRRSGQVLGVVLTVWAASLLLSALPLCGWGAFVRTPWGCLVDCSSSYVLFLSIVYALAFGLLVGLSVPLTHRLLCSEEPPRLHSNYQEISRGASIPGTPPTAGRVVSLSPEDAPGPSLRRSGGCSPSSDTVFGPGAPAAAGAEACRRENRGTLYGTRSFTVSVAQKRFALILALTKVVLWLPMMMHMVVQNVVGFQSLPLETFSFLLTLLATTVTPVFVLSKRWTHLPCGCIINCRQNAYAVASDGKKIKRKGFEFNLSFQKSYGIYKIAHEDYYDDDENSIFYHNLMNSECETTKDPQRDNRNIFNAIKVEISTTPSLDSSTQRGINKCTNTDITEAKQDSNNKKDAFSDKTGGDINYEETTFSEGPERRLSHEESQKPDLSDWEWCRSKSERTPRQRSGYALAIPLCAFQGTVSLHAPTGKTLSLSTYEVSAEGQKITPASKKIEVYRSKSVGHEPNSEDSSSTFVDTSVKIHLEVLEICDNEEALDTVSIISNISQSSTQVRSPSLRYSRKENRFVSCDLGETASYSLFLPTSNPDGDINISIPDTVEAHRQNSKRQHQERDGYQEEIQLLNKAYRKREEESKGS

SEQ ID NO: 2314 - DNA, 1730 bp, Homo sapiens
ttattcacagaagaaagcaggtagtatactgttacaatactacagtagaaagtcagaaggtcacaaagcttgcagggtaagtgacacaacttgaaactgcttggccctctttaaaaagaaataataaaatgggagagaatgaagcaagtttacctaacacgtctttgcaaggtaaaaagatggcctatcagaaggtccatgcagatcaaagagctccaggacactcacagtacttagacaatgatgaccttcaagccactgcccttgacttagagtgggacatggagaaggaactagaggagtctggttttgaccaattccagctagacggtgctgagaatcagaacctagggcattcagagactatagacctcaatcttgattccattcaaccagcaacttcacccaaaggaaggttccagagacttcaagaagaatctgactacattacccattatacacgatctgcaccaaagagcaatcgctgcaacttttgccacgtcttaaaaatactttgcacagccaccattttatttatttttgggattttgataggttattatgtacatacaaattgcccttcagatgctccatcttcaggaacagttgatcctcagttatatcaagagattctcaagacaatccaggcagaagatattaagaagtctttcagaaatttggtacaactatataaaaatgaagatgacatggaaatttcaaagaagattaagactcagtggacctctttgggcctagaagatgtacagtttgtaaattactctgtgctgcttgatctgccaggcccttctcccagcactgtgactctgagcagcagtggtcaatgctttcatcctaatggccagccttgcagtgaagaagccagaaaagatagcagccaagacctgctctattcatatgcagcctattctgccaaaggaactctcaaggctgaagtcatcgatgtgagttatggaatggcagatgatttaaaaaggattaggaaaataaaaaacgtaacaaatcagatcgcactcctgaaattaggaaaattgccactgctttataaggttggtccagtgaatgttattcagtggtttggtcaatattttgccttgttttgttggaattatatgcttttgtgagtgtggagtgtgtgtgtgcatataggtgtgtgagagagagaaggggagaggaagaaagagaggcagagagtgtcacagaaagatggcttttccacattagaacattttaatttaagatatttaagaacaatatatttatgcccttatttctttagagagaaaataccttaagtcaggtaacactgagtttgtgggaccttaataaaattggcatactcttcataatggtacctatctggaatagtaaaaaatgagaaccaccctgtgttcatcttatgacatatgtgaaacttctaatctattatcaaatggactaattatcatgttctctatgttagacaagtatctagatgatttacaccctttagtgattattttgtcaactatacaactacagttactaactgtgatcaggattttaattaaaatataattgctaagagtagcagaattttgatttattttatttgaatggaagtttattaacactcatccacagatacacttatgtaattaagtttctgatgatgaaccagcacaatagacagccactactgctcattcttgcttcatttcctttttctattt

SEQ ID NO: 2315 - protein, 337 aa, Homo sapiens
MGENEASLPNTSLQGKKMAYQKVHADQRAPGHSQYLDNDDLQATALDLEWDMEKELEESGFDQFQLDGAENQNLGHSETIDLNLDSIQPATSPKGRFQRLQEESDYITHYTRSAPKSNRCNFCHVLKILCTATILFIFGILIGYYVHTNCPSDAPSSGTVDPQLYQEILKTIQAEDIKKSFRNLVQLYKNEDDMEISKKIKTQWTSLGLEDVQFVNYSVLLDLPGPSPSTVTLSSSGQCFHPNGQPCSEEARKDSSQDLLYSYAAYSAKGTLKAEVIDVSYGMADDLKRIRKIKNVTNQIALLKLGKLPLLYKVGPVNVIQWFGQYFALFCWNYMLL

SEQ ID NO: 2316 - DNA, 4953 bp, Homo sapiens
ttattcacagaagaaagcaggtagtatactgttacaatactacagtagaaagtcagaaggtcacaaagcttgcagggtaagtgacacaacttgaaactgcttggccctctttaaaaagaaataataaaatgggagagaatgaagcaagtttacctaacacgtctttgcaaggtaaaaagatggcctatcagaaggtccatgcagatcaaagagctccaggacactcacagtacttagacaatgatgaccttcaagccactgcccttgacttagagtgggacatggagaaggaactagaggagtctggttttgaccaattccagctagacggtgctgagaatcagaacctagggcattcagagactatagacctcaatcttgattccattcaaccagcaacttcacccaaaggaaggttccagagacttcaagaagaatctgactacattacccattatacacgatctgcaccaaagagcaatcgctgcaacttttgccacgtcttaaaaatactttgcacagccaccattttatttatttttgggattttgataggttattatgtacatacaaattgcccttcagatgctccatcttcaggaacagttgatcctcagttatatcaagagattctcaagacaatccaggcagaagatattaagaagtctttcagaaatttggtacaactatataaaaatgaagatgacatggaaatttcaaagaagattaagactcagtggacctctttgggcctagaagatgtacagtttgtaaattactctgtgctgcttgatctgccaggcccttctcccagcactgtgactctgagcagcagtggtcaatgctttcatcctaatggccagccttgcagtgaagaagccagaaaagatagcagccaagacctgctctattcatatgcagcctattctgccaaaggaactctcaaggctgaagtcatcgatgtgagttatggaatggcagatgatttaaaaaggattaggaaaataaaaaacgtaacaaatcagatcgcactcctgaaattaggaaaattgccactgctttataagctttcctcattggaaaaggctggatttggaggtgttcttctgtatatcgatccttgtgatttgccaaagactgtgaatcctagccatgataccttcatggtgtcactgaatccaggaggagacccttctacgcctggttacccaagtgtcgatgaaagttttagacaaagccgatcaaacctcacctctctattagtgcagcccatctctgcacccctcgttgcaaaactgatctcttcgccaaaagctagaaccaaaaatgaagcgtgtagctctctagagcttccaaataatgaaataagagtcgtcagcatgcaagttcagacagtcacaaaattgaaaacagttactaatgttgttggatttgtaatgggcttgacatctccagaccggtatatcatagttggcagccatcatcacactgcacacagttataatggacaagaatgggccagtagtactgcaataatcacagcgtttatccgtgccttgatgtcaaaagttaagagagggtggagaccagaccgaactattgttttctgttcttggggaggaacagcttttggcaatattggctcatatgaatggggagaggatttcaagaaggttcttcagaaaaatgttgtggcttatattagcctccacagtcccataagggggaactctagtctgtatcctgtagcatcaccatctcttcagcaactggtagtagagaaaaataatttcaactgtaccagaagagcccagtgcccagaaaccaatatcagttctatacagatacaaggtgatgctgattatttcatcaaccatcttggagttcccatcgtgcagtttgcttacgaggacatcaaaacattagagggtccaagttttctctccgaggcccgtttttctacacgagcaacaaaaattgaagaaatggatccctctttcaaccttcatgaaaccattactaagctctcaggagaagtgattttgcaaattgccaacgaacctgttctgccctttaatgcacttgatatagctttagaagttcaaaacaaccttaaaggtgatcaacccaacactcatcaactgttagccatggcgttacgcctgcgggagagtgctgaactttttcagtctgatgagatgcgacctgctaatgatcccaaggagagagcacccatccgcatccggatgctgaatgacattctccaagacatggagaaaagctttctggtaaagcaggcaccaccaggtttttatagaaacatcctctaccaccttgatgaaaagacaagccggttttcaatacttatagaggcttgggaacactgcaaaccccttgcatcaaatgagacccttcaagaagccctgtcagaggtgttgaacagcattaattcagctcaggtttacttcaaagcaggacttgatgtgttcaagagtgtcttggatgggaagaattgagaaaactctgagcatttttaaaagtttgtttacaattccacaagcaaaagctctaatttaaccagattttctgacattgaaggcttattttccccaatggctttttgacaagtataaagctattattacattgtattttttaaatgtaaatatagaaagaacattttgcacatttaatatttttcttatatctacatttctgaatatgtaaagcaagttattgaaataggacttaagaattacctattaaaaagaaatctgatatataaaaatatgtactattttaaggaaaaatttccaagaagttctggactatctttgttcctatggggagggcatataggaacacagtttattctctctgatagagctattaatgacttagtttctgtaaaagaaatggagagttgatatggttcagattaacttcactattaagtgttcaatatgaagaattcaagtattctgactgagtgattggttgacctaaaccactttgaatgtttctattttatgaaatgaagtttctcttcttaacacaactagatgtagtaatacactggttatgaaattgtatttttttaagtattaatgaaaaaagagccataagcattccaggagaaaatctcaagggagctacatagagcaatttaaatgcaaatttttttcctaacaacttacaaggtgactagctttgaaacccctaatttgcctcagttgattttctaagaatttcaggagtgatgtatgtcttaagagggagaaaaaaatatttcttattactttttctcttgtttctgttggaaacactgaagcagggactctaaaatgaaagcatctcacattggttttctttcttgtatcttttctgaaactccttgctgtaaggcagctttctcagagtactatatattttcaacagtaaagtagcagagtttctctttgaaacccaaaatgtcttctaaagaatcaaatttctatttctgcctctgacaaaaagaacttactatgaaagaaatagttgttttatcaataaaagccccttaatattatgaagaaacttttcatattttttcttctttatccttaattgtgactaagatggaaatctagaaaatattcatgcttctaagtttctgcagtgttactgtaagagagtgtctcgtctacacttcagttcttctctcatgtggaaaactaagctttttatattgacattgccattgaatagctctagcaactattattattcccccaaaccctaaaattctacctattaggtgtcaggttaaagttctaatttatctttagaaatttatgtgaaaaatggttttcctatactggataaagcaattccccttaggaaacatagcctcagagtatttcatataaattttctctatctaattcaaacatatctccccatgatacaccgccagagtgacattgcagacagtctgtgtatgtttaaattttcactttttatggatgagcataaacctagtcttagtttaaaggcaaactaaagttgaggggaaataattaatcaatactgattaattgatttataaggttcaacactgtctaccctaaataatttttatatgctcaaggcaaagcagggaatagaggcaattagctagataattcaagcagaaatccattttcatcgaaattgcctgtgtgcacatatttttagatgaaaaatgaaactaccttacaatattatttttttaaccaatgtatttgtttgcaaacatttgccatgttgaagagtgtgtataggaaaggtctagaaataaataggcttgtgcatacctaggcattcatgctctttcttcctcttcagagatcatcagaaaagaggtgggaatacacaagcaggtgcatgtaagcccaaaagctagaaagccttatatttaaccaaaggttgatgtgttcattccagttattcacttacagatgaaactaaaacaaataaaggcaagctattatcagtttggtagttcattattttagaacaaatttctaaattaatttattcccataacctacaatagcactgagaacagaaaacatgtttcttcttcattttgtttaaagattgcgtacctaggtaagtcacactgtatagataaaaaccttcttctgtattcctcacctctaaattatatgttatttgctatttgaaaactgtagttaactatggttttttattagtctattaaaagatacgtggagatattaaattatacctaaagcagacgtccaacaaattctgtacatgctgctttacatctttgcaacaaacctcttaactagcagcattatttctatagtgtgattacctgagggtgcctccaaatgtatatcatttcactcccctcccctccccacccccaatagattcaaataaataaaatcctgagcaaattaa

SEQ ID NO: 2317 - protein, 795 aa, Homo sapiens; identical to SEQ ID NO: 219

SEQ ID NO: 2318 - DNA, 408 bp, Homo sapiens
cctatgacagacaaggcaagctctactctcagaagcaaaaattatatatctaggagtcagagtatgaatcaagaagaatggacttctgcttcttatctacctaatgccagataatgatgacagcaatgcattttctacattcatatcctcaatcatatgtttttgaatgcttactggaaaaccggtttaaaagaaaggtgactagttattggtcttgctctgacagccgtggaaaccatttgctgatgaaagcacaagcaacaacaacaaaaaagatgaataaactggatttcaacaaaaacacatttgtgcttcagagaacataatcaagaaagtgaaaaggcaacccaccaatgggagaacacagtttcaaaacatatatctaataaaatatttgagtccagatta

SEQ ID NO: 2319 - protein, 70 aa, Homo sapiens
MMTAMHFLHSYPQSYVFECLLENRFKRKVTSYWSCSDSRGNHLLMKAQATTTKKMNKLDFNKNTFVLQRT

SEQ ID NO: 2320 - DNA, 1574 bp, Homo sapiens
actttttacctcagggtcattagaaagccaccacagatctaggcatctaagcaggaataggagaggaaaggcaactgtagccacattaatcacttttatcaggaagataaatgcttttcccgaatctttcaacaggctttcattttacattgggcatatttttgtcatatagccttccctagctgcaagggaggcttttcaaacttctttatggaattcagcaagaaagtaaagaggataaaatgaagcacactggatgaatggtgtggcttgatgaaattaagaaatttggtacaactatataaaaatgaagatgacatggaaatttcaaagaagattaagactcagtggacctctttgggcctagaagatgtacagtttgtaaattactctgtgctgcttgatctgccaggcccttctcccagcactgtgactctgagcagcagtggtcaatgctttcatcctaatggccagccttgcagtgaagaagccagaaaagatagcagccaagacctgctctattcatatgcagcctattctgccaaaggaactctcaaggctgaagtcatcgatgtgagttatggaatggcagatgatttaaaaaggattaggaaaataaaaaacgtaacaaatcagatcgcactcctgaaattaggaaaattgccactgctttataagctttcctcattggaaaaggctggatttggaggtgttcttctgtatatcgatccttgtgatttgccaaagactgtgaatcctagccatgataccttcatggtgtcactgaatccaggaggagacccttctacgcctggttacccaagtgtcgaaataagagtcgtcagcatgcaagttcagacagtcacaaaattgaaaacagttactaatgttgttggatttgtaatgggcttgacatctccagaccggtatatcatagttggcagccatcatcacactgcacacagttataatggacaagaatgggccagtagtactgcaataatcacagcgtttatccgtgccttgatgtcaaaagttaagagagggtggagaccagaccgaactattgttttctgttcttggggaggaacagcttttggcaatattggctcatatgaatggggagaggatttcaagaaggttcttcagaaaaatgttgtggcttatattagcctccacagtcccataagggggaactctagtctgtatcctgtagcatcaccatctcttcagcaactggtagtagagaaaaataatttcaactgtaccagaagagcccagtgcccagaaaccaatatcagttctatacagatacaaggtgatgctgattatttcatcaaccatcttggagttcccatcgtgcagtttgcttacgaggacatcaaaacattagagggtccaagttttctctccgaggcccgtttttctacacgagcaacaaaaattgaagaaatggatccctctttcaaccttcatgaaaccattactaagtgaagaacacacatgctttcatagtcttggaatgtgtggtatgtactctatgattgctgaaataaagtgcttttgaaaatcct

SEQ ID NO: 2321 - protein, 406 aa, Homo sapiens
MKLRNLVQLYKNEDDMEISKKIKTQWTSLGLEDVQFVNYSVLLDLPGPSPSTVTLSSSGQCFHPNGQPCSEEARKDSSQDLLYSYAAYSAKGTLKAEVIDVSYGMADDLKRIRKIKNVTNQIALLKLGKLPLLYKLSSLEKAGFGGVLLYIDPCDLPKTVNPSHDTFMVSLNPGGDPSTPGYPSVEIRVVSMQVQTVTKLKTVTNVVGFVMGLTSPDRYIIVGSHHHTAHSYNGQEWASSTAIITAFIRALMSKVKRGWRPDRTIVFCSWGGTAFGNIGSYEWGEDFKKVLQKNVVAYISLHSPIRGNSSLYPVASPSLQQLVVEKNNFNCTRRAQCPETNISSIQIQGDADYFINHLGVPIVQFAYEDIKTLEGPSFLSEARFSTRATKIEEMDPSFNLHETITK

SEQ ID NO: 2322 - DNA, 907 bp, Homo sapiens
acttggtgaaattcctcagggattttgagacatcaaagcaatctctctagttctggaaagactgaatttgcagcatctgctgaaatgaggaataatcaatgttcaccagcggaaattgaaaagcaaagagatggggaagattccaaggatccactcaagttcctggtgtttttgtgaatgttctgtgtttaagacatgcttttgtttaggagaagacatgagctgagccaactgggataaagaagaggttgaaaatgcgtatggcttagacagagtaaagagttttagataaaatatcggggtaacttttagagtcttggcttaaggccaaagcttctgaatcaaggaaagagtgacagttgccttcctctatttttattaatatacaggtgtgttaccattattacctgccagaaagagcataatattaatccaatcaaattatatgagtcctacagtagaaatattgcagacatttaatattatattgaagtttaattaatggtaagacatttcaaggtggtaatagttatatgcagctctttggctaaaagtcaaagtgtgatatatacagaatagaaacgatgctggactgccagaaaatctgcctctccctcccactcccccaagatctattaggaacgagcatttactgttattatttcaaatatttatgcaaagtaattttaaatgatttaaacattccatatatcaatcaaagttaataataagttagattctgaaacatttgtgccattaacaacagtcagaaagataacattatttcattggtattaaatgaggcaatcaacagtttgatggaaaaaaaaaaaaaactaagtgtattttttaaaattacacttttacatagagttagaaaactagtccatagaaaggaaactgttga

SEQ ID NO: 2323 - protein, 30 aa, Homo sapiens
MRNNQCSPAEIEKQRDGEDSKDPLKFLVFL

SEQ ID NO: 2324 - DNA, 938 bp, Homo sapiens
agcagattacccaggccttgcacctggatcaatgggctgccctaatgaaggatatcaaaaatgaaggggcagctaaagaaaaataaaagacacctcagaaagtagcctgcctctttgacaagggacatgccttcagaggaacataacagaaacctctgagaattgtcaacaataaaaagactgagcaacaagggaaactggtaggaagccaaaggttttaagaggtgagagtggagaaatgctgtgcttttattgatcctctccaaaggaacacctttaaaaaagcatgatataaattggcactaatcctcataagagaagaatgtcagccaagccagtgaaggaattttggagttcgctttgaagacttatgcactctccagctggtcacagacactacactcacccattttgtaaatacacttttttttgttttgttttttaagcttctcacttcagtatctaccagacaggcttgtgcaaggagtgaactagtattgtatctgttaatttctttgcaggcaaaaatcaagttaccaggaaaatattttttaaaaaccacgaacagtctaagagcactgaacattttgaatcatttgccttttctcaacactggattttaagcaaggaacaagactattccagttctaaatgctttaatgaacaaggggtattgggttttagcatcaacatgatctatcctcactctgaagctttaacttgagtagctgctgtgctttgtaaagcttcaatccaattcatttgataactacaattaccaaatctgggcattgctgactacacagttcaaaaaaacagcatggagggaagacctgctgagaaccttagaatctatcgataagctcttgaaatggtttaaagtaataaaccacttcaattgaaagggcaataaaatgtttttcgtgtatatatgtaca

SEQ ID NO: 2325 - protein, 93 aa, Homo sapiens
RNFGVRFEDLCTLQLVTDTTLTHFVNTLFFVLFFKLLTSVSTRQACARSELVLYLLISLQAKIKLPGKYFLKTTNSLRALNILNHLPFLNTGF

SEQ ID NO: 2326 - DNA, 602 bp, Homo sapiens
ccctaatgaaggatatcaaaaatgaaggggcagctaaagaaaaataaaagacacctcagaaagtagcctgcctctttgacaagggacatgccttcagaggaacataacagaaacctctgagaattgtcaacaataaaaagactgagcaacaagggaaactggtaggaagccaaaggttttaagaggcaaaaatcaagttaccaggaaaatattttttaaaaaccacgaacagtctaagagcactgaacattttgaatcatttgccttttctcaacactggattttaagcaaggaacaagactattccagttctaaatgctttaatgaacaaggggtattgggttttagcatcaacatgatctatcctcactctgaagctttaacttgagtagctgctgtgctttgtaaagcttcaatccaattcatttgataactacaattaccaaatctgggcattgctgactacacagttcaaaaaaacagcatggagggaagacctgctgagaaccttagaatctatcgataagctcttgaaatggtttaaagtaataaaccacttcaattgaaagggcaataaaatgtttttcgtgtatatatgtaca

SEQ ID NO: 2327 - protein, 34 aa, Homo sapiens
EAKIKLPGKYFLKTTNSLRALNILNHLPFLNTGF

SEQ ID NO: 2328 - DNA, 6699 bp, Homo sapiens
gcagtgccgtagtagcgggccacggagatagacagctttggagctgctgaactccgagcacagggtgaagaccccggcgctaccaaccacagcctggcagcctggtctccgcggcacccactggggctgcatccccctcccccgagagggctgcgcaggcgggaagacgcccagaggccagcttcggtcccccttctgtctctcggttcctctttcctcccaagtaagggaataaaccgcgaagaaggagcgccccgggccaccgcgcaaccaagtgttgcctggtgaggaagagccaggacttctgaatttaccttgaatacagacaggaggatgttgcctaaggaatagcagagatcttgtctcatcttctgagaggtgcctgctgctgctgtatacacttgagtgctcccagaagtctcctgaaaggcttacatcgcaaacctgcaatgagccaggccctgggctgggcctccacttcagcctagtgaacaaaactccatcactgccctttagccactcacataaagtttaaaaatgggtgaagaacggtgggtctccctcactccagaagaatttgaccaactccagaaatattcagaatattcctccaagaagataaaagatgccttgactgaatttaatgagggtgggagcctcaaacaatatgacccacatgagccgattagctatgatgtcttcaagctgttcatgagggcgtacctggaggtggaccttccccagccactgagcactcacctcttcctggccttcagccagaagcccagacacgagacctctgaccacccgacggagggagccagcaacagtgaggccaacagcgcagatactaatatacagaatgcagataatgccaccaaagcagacgaggcctgtgcccctgatactgaatcaaatatggctgagaagcaagcaccagctgaagaccaagtggctgcgacccccctggaaccccccgtccctcggtcttcaagctcggaatccccagtggtatacctgaaggatgttgtgtgctacctgtccctgctggagacggggaggcctcaggataagctggagttcatgtttcgcctctatgattcagatgagaacggtctcctggaccaagcggagatggattgcattgtcaaccaaatgctgcatattgcccagtacctggagtgggatcccacagagctgaggcctatattgaaggagatgctgcaagggatggactacgaccgggacggctttgtgtctctacaggaatgggtccatggagggatgaccaccatcccattgctggtcctcctggggatggatgactctggctccaagggggatgggcggcacgcctggaccatgaagcacttcaagaaaccaacctactgcaacttctgccatatcatgctcatgggcgtccgcaagcaaggcctgtgctgcacttactgtaaatacactgtccacgaacgctgtgtgtccagaaacattcctggttgtgtcaaaacgtactcaaaagccaaaaggagtggtgaggtgatgcagcacgcatgggtggaagggaactcctccgtcaagtgtgaccggtgccacaaaagtatcaagtgctaccagagtgtcaccgcgcggcactgcgtgtggtgccggatgacgtttcaccgcaaatgtgaattatcaacgttgtgtgacggtggggaactcagagaccacatcttactgcccacctccatatgccccatcacccgggacaggccaggtgagaagtctgatggctgcgtgtccgccaagggcgaacttgtcatgcagtataagatcatccccaccccgggtacccaccccctgctggtcttggtgaaccccaagagtggagggagacaaggagaaagaattcttcggaaattccactatctgctcaaccccaaacaagttttcaacctggacaatggggggcctactccagggttgaactttttccgtgatactccagacttccgtgttttggcctgtggtggagatgggacagttggctggattttggattgcattgataaggccaactttgcaaagcatccaccagtggctgtcctgcctcttggaacaggaaatgaccttgcccgttgtctccgctggggaggaggttatgaagggggcagcttgacaaaaatcctgaaagacattgagcagagccccttggtgatgctggaccgctggcatctggaagtcatccccagagaggaagtggaaaacggggaccaggtcccatacagcatcatgaacaactatttctccattggtgtggacgcttccattgcacacagattccatgtgatgagagagaaacatcctgaaaaattcaacagcaggatgaagaacaagctgtggtactttgaatttggcacctcggagacttttgcagcgacctgcaagaaactccacgaccacattgagttggagtgtgatggggttggggtggacctgagcaacatcttcctggaaggcattgccattctcaacattcccagcatgtacggaggcaccaatctctggggagaaaacaagaagaaccgggctgtgatccgggaaagcaggaagggtgtcactgaccccaaagaactgaaattctgcgttcaagacctcagtgaccagctccttgaagtggtggggctagaaggagccatggagatggggcagatctacaccggcctgaagagtgcaggcaggaggctggcccagtgcgcctctgtcaccatcaggacaaacaagctgctgccaatgcaagtggatggagaaccctggatgcagccatgttgcacgattaaaattactcacaagaaccaagcgcccatgatgatggggcctccccagaagagcagcttcttctcgttgagaaggaagagccgttcaaaagactaaacagtgtgccaaacaccagctaaaccaagagagaaagcaagaaactataatgcacactcacacacaatttatgtgcacactcacacatgcacacacacacacacatacacactcttctctaaccagtggaagcaaagccacccttcgggaagaaaacgtcaccttgccatacattctgtttcaacagtgggtacacccctaacagagccagtgccaacaaaacattttgaatggacttagggcccatgaggttgtggctggcttaggcagcaacctccacattcccacaggccttgagcagaattttctgagactgaagggaaatccccctttctttctaccagccctgcaagtttcctcatggacgctcgcgaggagcaggctgcaggtttcctgcctatggtgagatcagatgtggccaagggaaggagctctggttccagagaatttgcacaaagttccctctgtacagagacaaaacggcctccggctctcagagcataatccttggcagggctcagcaggcgcacgttggtttcttggtcgtcctttgagtgacaacttctccgtgaacctgctgaagaggcagaaaggctgtggaaagctgtatttccattcttgggtttctgcgccgtcggtgggcacttgttattttccaggaaccttctcctggtgtctacatgtttgcttagaggcggctccaagagcccccagagctgcctgcatagcacaccttagatgtggtatttattttcttagttctgtgaacacctgggagggagagcggagaaactgggatttatttttcaaattggtgtcataatattgtgtaaaaagggaaggaaaaaaaaaaccacccccagcttctttctttttcaagccaaagcgtgtttcctgtttgagttccaagccctggtggcagactattcctgaaggcagaaaagatgggaaggaaggaactttgctggggaaaccaggagacggttccctcctgcttctttgcactcaccactcccagagtatgacctgaaggaccttctgatggtcttaacgtgtgtgcgcgcgtgtgtgtgtgtgtgtgcgtgtatatatatatatttagcctatatatttatatatatatatatataaatatttatttactgatggacttttcctcattggaaaaaaaaaacataggtagtatgagacagaaagtggtaaggaaaaagaaggttctcactcccccactccaccgtttcattgtcaggacgcatctccctgtggtgatcacaagggttaaggggaatgaaagtagctccctattatgaacgaagagaccgagaactcctattctggatcctcaaaacaagcatgaaagacctgctgggctggatttactctcccatttgtcagataagaaaattgagtctcagaaaagttcagagacttttccatggtgtcttggctaatgcagcttgagagtaggtgccgttacaaagatatttaatggagaaaagaacccacacatctcagagtagggtcatttctggtcactgaaaagtgagtccacttggatccaggttgccagggaggaacaaacgtacagcacatgcgtggatgggatatccccacacaagaaaacgagcgcctcatgctgcttcccagaggttctctctgacctgaatggaaaagaagttggtctgagatcgaaggtactaaacagatcatcagactgaactctccacatgtcacctcatcatggtcatcatagtctcttagtttggaaacaaccttggctgcagggatgacctcagtggagagtcacaagaaggactgaggcgtcttctgcaagatactgccagccaggacagaggggtctcagcagagctcagtgggcttcattcagcaagtgccagcattaccatcctttcccaagggcaaggccatgcagagcttcattgggcctccatccctctctgagatttatcagtggaaacttggacccacttgatatcgttccactgagctgcctctaatcttgcattggacaggagctttggacaaagaagggaatattaagattgtgtgtacaaatggcacttaactgtgaaggaccacctaggagcaagatcttggaccattctgctcaacctaacagtgcagaatgctaagtaaggggaaaaccaggccacctgaagaatatctttaatgatggtattcttggtgatgggaccaacaagctccagaattactacaggtactatcttggaagccacttgtttctgaaactgaggcaggttcaggtttggggtcactgattctaagacatttacagaagttcgtgcatgtgtttcagccatgatccccaagattgaggctattgagacatggcactatcaacaggtgaaattgattctcagagactcacaggtctcatgaaggggcagtgcagaaaatggcccttacctgctgcaccctagtgcacaggacttgcaatgttgcttgagagacatatcccaagtccttcttagaggcatggagtataacaacttcagtggaattgcacttccagtttggtaaccttagtaaatcttgtgttgttgtttaatcgtgccttgcaaatcatcctttaaacactatgactgtggtttcttgtggtggagtccctcatcatagtgaccctcatagcaacctctgaggttagcagagaaggtattattatctcgatctcaatgaggagaacaaggcttaatgaggtttagtgacttctcaaagccacatggttagtcaggggagaacctaatcccttatttcttatcttattctgattctggccatgctacaaacatgttctcacctgccccccatgcttctaccccaacagcaataaaaactgtaaagcaggaactctctagtacattgtgttgtccctaaactgatgggctaggaattgtgtctcattatggcttagtctttgtgggttttccccagtgagttgagagtggagatagacctagtaggatgattatattcaggtcagagaccagctcctctcaagagagttctttccacagatggaaaagatacgttaaaattgccaaataaattaggaaatacttggcagaacctggaagagcctccagactggcgttacataacatgcatatacattatacatatgcacattatataaggtgacatagtacttaatgtgctgtatatattatgtaaattacatatttgtgagtaatcatgataaatatagagacccactaatcacttttttacacatactcagtgacagattaggaagttactttgccagagagtcttaaaacttactctcttctgctgctttggttccaactcctgccaaaaataattgcatcaacttttcccatctctagccccctcttctcttggccaaaactctcagttacctcctgtcccagctagtctgtgccttccgtgcaacactaccacaattgggatccataaaaatagaatcatggggatgggaaggatctagatgctcagatcccctatatgtcaggcctacacctcaacactcccaggcaggtgcatgtctaatgctaatattaaaagagcgggagttgggggaaggaggaagagtctaccaaccttccaaggaaggaaacttcacagtcttccttggccgccagctccgggctctaacagtaatcaatcaggaaattatttcaaatgtccagtctgagtccccacagcatatctgaaaccataatttcctaaaatgtgtctcccaaaacactagcatccatcaaa

SEQ ID NO: 2329 - protein, 791 aa, Homo sapiens; identical to SEQ ID NO: 222

SEQ ID NO: 2330 - DNA, 6624 bp, Homo sapiens
gcagtgccgtagtagcgggccacggagatagacagctttggagctgctgaactccgagcacagggtgaagaccccggcgctaccaaccacagcctggcagcctggtctccgcggcacccactggggctgcatccccctcccccgagagggctgcgcaggcgggaagacgcccagaggccagcttcggtcccccttctgtctctcggttcctctttcctcccaagtaagggaataaaccgcgaagaaggagcgccccgggccaccgcgcaaccaagtgttgcctggtgaggaagagccaggacttctgaatttaccttgaatacagacaggaggatgttgcctaaggaatagcagagatcttgtctcatcttctgagaggtgcctgctgctgctgtatacacttgagtgctcccagaagtctcctgaaaggcttacatcgcaaacctgcaatgagccaggccctgggctgggcctccacttcagcctagtgaacaaaactccatcactgccctttagccactcacataaagtttaaaaatgggtgaagaacggtgggtctccctcactccagaagaatttgaccaactccagaaatattcagaatattcctccaagaagataaaagatgccttgactgaatttaatgagggtgggagcctcaaacaatatgacccacatgagccgattagctatgatgtcttcaagctgttcatgagggcgtacctggaggtggaccttccccagccactgagcactcacctcttcctggccttcagccagaagcccagacacgagacctctgaccacccgacggagggagccagcaacagtgaggccaacagcgcagatactaatatacagaatgcagataatgccaccaaagcagacgaggcctgtgcccctgatactgaatcaaatatggctgagaagcaagcaccagctgaagaccaagtggctgcgacccccctggaaccccccgtccctcggtcttcaagctcggaatccccagtggtatacctgaaggatgttgtgtgctacctgtccctgctggagacggggaggcctcaggataagctggagttcatgtttcgcctctatgattcagatgagaacggtctcctggaccaagcggagatggattgcattgtcaaccaaatgctgcatattgcccagtacctggagtgggatcccacagagctgaggcctatattgaaggagatgctgcaagggatggactacgaccgggacggctttgtgtctctacaggaatgggtccatggagggatgaccaccatcccattgctggtcctcctggggatggatgactctggctccaagggggatgggcggcacgcctggaccatgaagcacttcaagaaaccaacctactgcaacttctgccatatcatgctcatgggcgtccgcaagcaaggcctgtgctgcacttactgtaaatacactgtccacgaacgctgtgtgtccagaaacattcctggttgtgtcaaaacgtactcaaaagccaaaaggagtggtgaggtgatgcagcacgcatgggtggaagggaactcctccgtcaagtgtgaccggtgccacaaaagtatcaagtgctaccagagtgtcaccgcgcggcactgcgtgtggtgccggatgacgtttcaccgcaaatgtgaattatcaacgttgtgtgacggtggggaactcagagaccacatcttactgcccacctccatatgccccatcacccgggacaggccaggtgagaagtctgatggctgcgtgtccgccaagggcgaacttgtcatgcagtataagatcatccccaccccgggtacccaccccctgctggtcttggtgaaccccaagagtggagggagacaaggagaaaggttgaactttttccgtgatactccagacttccgtgttttggcctgtggtggagatgggacagttggctggattttggattgcattgataaggccaactttgcaaagcatccaccagtggctgtcctgcctcttggaacaggaaatgaccttgcccgttgtctccgctggggaggaggttatgaagggggcagcttgacaaaaatcctgaaagacattgagcagagccccttggtgatgctggaccgctggcatctggaagtcatccccagagaggaagtggaaaacggggaccaggtcccatacagcatcatgaacaactatttctccattggtgtggacgcttccattgcacacagattccatgtgatgagagagaaacatcctgaaaaattcaacagcaggatgaagaacaagctgtggtactttgaatttggcacctcggagacttttgcagcgacctgcaagaaactccacgaccacattgagttggagtgtgatggggttggggtggacctgagcaacatcttcctggaaggcattgccattctcaacattcccagcatgtacggaggcaccaatctctggggagaaaacaagaagaaccgggctgtgatccgggaaagcaggaagggtgtcactgaccccaaagaactgaaattctgcgttcaagacctcagtgaccagctccttgaagtggtggggctagaaggagccatggagatggggcagatctacaccggcctgaagagtgcaggcaggaggctggcccagtgcgcctctgtcaccatcaggacaaacaagctgctgccaatgcaagtggatggagaaccctggatgcagccatgttgcacgattaaaattactcacaagaaccaagcgcccatgatgatggggcctccccagaagagcagcttcttctcgttgagaaggaagagccgttcaaaagactaaacagtgtgccaaacaccagctaaaccaagagagaaagcaagaaactataatgcacactcacacacaatttatgtgcacactcacacatgcacacacacacacacatacacactcttctctaaccagtggaagcaaagccacccttcgggaagaaaacgtcaccttgccatacattctgtttcaacagtgggtacacccctaacagagccagtgccaacaaaacattttgaatggacttagggcccatgaggttgtggctggcttaggcagcaacctccacattcccacaggccttgagcagaattttctgagactgaagggaaatccccctttctttctaccagccctgcaagtttcctcatggacgctcgcgaggagcaggctgcaggtttcctgcctatggtgagatcagatgtggccaagggaaggagctctggttccagagaatttgcacaaagttccctctgtacagagacaaaacggcctccggctctcagagcataatccttggcagggctcagcaggcgcacgttggtttcttggtcgtcctttgagtgacaacttctccgtgaacctgctgaagaggcagaaaggctgtggaaagctgtatttccattcttgggtttctgcgccgtcggtgggcacttgttattttccaggaaccttctcctggtgtctacatgtttgcttagaggcggctccaagagcccccagagctgcctgcatagcacaccttagatgtggtatttattttcttagttctgtgaacacctgggagggagagcggagaaactgggatttatttttcaaattggtgtcataatattgtgtaaaaagggaaggaaaaaaaaaaccacccccagcttctttctttttcaagccaaagcgtgtttcctgtttgagttccaagccctggtggcagactattcctgaaggcagaaaagatgggaaggaaggaactttgctggggaaaccaggagacggttccctcctgcttctttgcactcaccactcccagagtatgacctgaaggaccttctgatggtcttaacgtgtgtgcgcgcgtgtgtgtgtgtgtgtgcgtgtatatatatatatttagcctatatatttatatatatatatatataaatatttatttactgatggacttttcctcattggaaaaaaaaaacataggtagtatgagacagaaagtggtaaggaaaaagaaggttctcactcccccactccaccgtttcattgtcaggacgcatctccctgtggtgatcacaagggttaaggggaatgaaagtagctccctattatgaacgaagagaccgagaactcctattctggatcctcaaaacaagcatgaaagacctgctgggctggatttactctcccatttgtcagataagaaaattgagtctcagaaaagttcagagacttttccatggtgtcttggctaatgcagcttgagagtaggtgccgttacaaagatatttaatggagaaaagaacccacacatctcagagtagggtcatttctggtcactgaaaagtgagtccacttggatccaggttgccagggaggaacaaacgtacagcacatgcgtggatgggatatccccacacaagaaaacgagcgcctcatgctgcttcccagaggttctctctgacctgaatggaaaagaagttggtctgagatcgaaggtactaaacagatcatcagactgaactctccacatgtcacctcatcatggtcatcatagtctcttagtttggaaacaaccttggctgcagggatgacctcagtggagagtcacaagaaggactgaggcgtcttctgcaagatactgccagccaggacagaggggtctcagcagagctcagtgggcttcattcagcaagtgccagcattaccatcctttcccaagggcaaggccatgcagagcttcattgggcctccatccctctctgagatttatcagtggaaacttggacccacttgatatcgttccactgagctgcctctaatcttgcattggacaggagctttggacaaagaagggaatattaagattgtgtgtacaaatggcacttaactgtgaaggaccacctaggagcaagatcttggaccattctgctcaacctaacagtgcagaatgctaagtaaggggaaaaccaggccacctgaagaatatctttaatgatggtattcttggtgatgggaccaacaagctccagaattactacaggtactatcttggaagccacttgtttctgaaactgaggcaggttcaggtttggggtcactgattctaagacatttacagaagttcgtgcatgtgtttcagccatgatccccaagattgaggctattgagacatggcactatcaacaggtgaaattgattctcagagactcacaggtctcatgaaggggcagtgcagaaaatggcccttacctgctgcaccctagtgcacaggacttgcaatgttgcttgagagacatatcccaagtccttcttagaggcatggagtataacaacttcagtggaattgcacttccagtttggtaaccttagtaaatcttgtgttgttgtttaatcgtgccttgcaaatcatcctttaaacactatgactgtggtttcttgtggtggagtccctcatcatagtgaccctcatagcaacctctgaggttagcagagaaggtattattatctcgatctcaatgaggagaacaaggcttaatgaggtttagtgacttctcaaagccacatggttagtcaggggagaacctaatcccttatttcttatcttattctgattctggccatgctacaaacatgttctcacctgccccccatgcttctaccccaacagcaataaaaactgtaaagcaggaactctctagtacattgtgttgtccctaaactgatgggctaggaattgtgtctcattatggcttagtctttgtgggttttccccagtgagttgagagtggagatagacctagtaggatgattatattcaggtcagagaccagctcctctcaagagagttctttccacagatggaaaagatacgttaaaattgccaaataaattaggaaatacttggcagaacctggaagagcctccagactggcgttacataacatgcatatacattatacatatgcacattatataaggtgacatagtacttaatgtgctgtatatattatgtaaattacatatttgtgagtaatcatgataaatatagagacccactaatcacttttttacacatactcagtgacagattaggaagttactttgccagagagtcttaaaacttactctcttctgctgctttggttccaactcctgccaaaaataattgcatcaacttttcccatctctagccccctcttctcttggccaaaactctcagttacctcctgtcccagctagtctgtgccttccgtgcaacactaccacaattgggatccataaaaatagaatcatggggatgggaaggatctagatgctcagatcccctatatgtcaggcctacacctcaacactcccaggcaggtgcatgtctaatgctaatattaaaagagcgggagttgggggaaggaggaagagtctaccaaccttccaaggaaggaaacttcacagtcttccttggccgccagctccgggctctaacagtaatcaatcaggaaattatttcaaatgtccagtctgagtccccacagcatatctgaaaccataatttcctaaaatgtgtctcccaaaacactagcatccatcaaa

SEQ ID NO: 2331 - protein, 766 aa, Homo sapiens
MGEERWVSLTPEEFDQLQKYSEYSSKKIKDALTEFNEGGSLKQYDPHEPISYDVFKLFMRAYLEVDLPQPLSTHLFLAFSQKPRHETSDHPTEGASNSEANSADTNIQNADNATKADEACAPDTESNMAEKQAPAEDQVAATPLEPPVPRSSSSESPVVYLKDVVCYLSLLETGRPQDKLEFMFRLYDSDENGLLDQAEMDCIVNQMLHIAQYLEWDPTELRPILKEMLQGMDYDRDGFVSLQEWVHGGMTTIPLLVLLGMDDSGSKGDGRHAWTMKHFKKPTYCNFCHIMLMGVRKQGLCCTYCKYTVHERCVSRNIPGCVKTYSKAKRSGEVMQHAWVEGNSSVKCDRCHKSIKCYQSVTARHCVWCRMTFHRKCELSTLCDGGELRDHILLPTSICPITRDRPGEKSDGCVSAKGELVMQYKIIPTPGTHPLLVLVNPKSGGRQGERLNFFRDTPDFRVLACGGDGTVGWILDCIDKANFAKHPPVAVLPLGTGNDLARCLRWGGGYEGGSLTKILKDIEQSPLVMLDRWHLEVIPREEVENGDQVPYSIMNNYFSIGVDASIAHRFHVMREKHPEKFNSRMKNKLWYFEFGTSETFAATCKKLHDHIELECDGVGVDLSNIFLEGIAILNIPSMYGGTNLWGENKKNRAVIRESRKGVTDPKELKFCVQDLSDQLLEVVGLEGAMEMGQIYTGLKSAGRRLAQCASVTIRTNKLLPMQVDGEPWMQPCCTIKITHKNQAPMMMGPPQKSSFFSLRRKSRSKD

SEQ ID NO: 2332 - DNA, 5800 bp, Homo sapiens
gcagtgccgtagtagcgggccacggagatagacagctttggagctgctgaactccgagcacagggtgaagaccccggcgctaccaaccacagcctggcagcctggtctccgcggcacccactggggctgcatccccctcccccgagagggctgcgcaggcgggaagacgcccagaggccagcttcggtcccccttctgtctctcggttcctctttcctcccaagtaagggaataaaccgcgaagaaggagcgccccgggccaccgcgcaaccaagtgttgcctggtgaggaagagccaggacttctgaatttaccttgaatacagacaggaggatgttgcctaaggaatagcagagatcttgtctcatcttctgagaggtgcctgctgctgctgtatacacttgagtgctcccagaagtctcctgaaaggcttacatcgcaaacctgcaatgagccaggccctgggctgggcctccacttcagcctagtgaacaaaactccatcactgccctttagccactcacataaagtttaaaaatgggtgaagaacggtgggtctccctcactccagaagaatttgaccaactccagaaatattcagaatattcctccaagaagataaaagatgccttgactgaatttaatgagggtgggagcctcaaacaatatgacccacatgagccgattagctatgatgtcttcaagctgttcatgagggcgtacctggaggtggaccttccccagccactgagcactcacctcttcctggccttcagccagaagcccagacacgagacctctgaccacccgacggagggagccagcaacagtgaggccaacagcgcagatactaatatacagaatgcagataatgccaccaaagcagacgaggcctgtgcccctgatactgaatcaaatatggctgagaagcaagcaccagctgaagaccaagtggctgcgacccccctggaaccccccgtccctcggtcttcaagctcggaatccccagtggtatacctgaaggatgttgtgtgctacctgtccctgctggagacggggaggcctcaggataagctggagttcatgtttcgcctctatgattcagatgagaacggtctcctggaccaagcggagatggattgcattgtcaaccaaatgctgcatattgcccagtacctggagtgggatcccacagagctgaggcctatattgaaggagatgctgcaagggatggactacgaccgggacggctttgtgtctctacaggaatgggtccatggagggatgaccaccatcccattgctggtcctcctggggatggatgactctggctccaagggggatgggcggcacgcctggaccatgaagcacttcaagaaaccaacctactgcaacttctgccatatcatgctcatgggcgtccgcaagcaaggcctgtgctgcacttactgtaaatacactgtccacgaacgctgtgtgtccagaaacattcctggttgtgtcaaaacgtactcaaaagccaaaaggagtggtgaggtgatgcagcacgcatgggtggaagggaactcctccgtcaagtgtgaccggtgccacaaaagtatcaagtgctaccagagtgtcaccgcgcggcactgcgtgtggtgccggatgacgtttcaccgcaaatgtgaattatcaacgttgtgtgacggtggggaactcagagaccacatcttactgcccacctccatatgccccatcacccgggacaggccaggtgagaagtctgatggctgcgtgtccgccaagggcgaacttgtcatgcagtataagatcatccccaccccgggtacccaccccctgctggtcttggtgaaccccaagagtggagggagacaaggagaaagaattcttcggaaattccactatctgctcaaccccaaacaagttttcaacctggacaatggggggcctactccagggttgaactttttccgtgatactccagacttccgtgttttggcctgtggtggagatgggacagttggctggattttggattgcattgataaggccaactttgcaaagcatccaccagtggctgtcctgcctcttggaacaggaaatgaccttgcccgttgtctccgctggggaggaggttatgaagggggcagcttgacaaaaatcctgaaagacattgagcagagccccttggtgatgctggaccgctggcatctggaagtcatccccagagaggaagtggaaaacggggaccaggtcccatacagcatcatgaacaactatttctccattggtgtggacgcttccattgcacacagattccatgtgatgagagagaaacatcctgaaaaattcaacagcaggatgaagaacaagctgtggtactttgaatttggcacctcggagacttttgcagcgacctgcaagaaactccacgaccacattgagttggagtgtgatggggttggggtggacctgagcaacatcttcctggaaggcattgccattctcaacattcccagcatgtacggaggcaccaatctctggggagaaaacaagaagaaccgggctgtgatccgggaaagcaggaagggtgtcactgaccccaaagaactgaaattctgcgttcaagacctcagtgaccagctccttgaagtggtggggctagaaggagccatggagatggggcagatctacaccggcctgaagagtgcaggcaggaggctggcccagtgcgcctctgtcaccatcaggacaaacaagctgctgccaatgcaagtggatggagaaccctggatgcagccatgttgcacgattaaaattactcacaagaaccaagcgcccatgatgatggggcctccccagaagagcagcttcttctcgttgagaaggaagagccgttcaaaagactaaacagtgtgccaaacaccagctaaaccaagagagaaagcaagaaactataatgcacactcacacacaatttatgtgcacactcacacatgcacacacacacacacatacacactcttctctaaccagtggaagcaaagccacccttcgggaagaaaacgtcaccttgccatacattctgtttcaacagtgggtacacccctaacagagccagtgccaacaaaacattttgaatggacttagggcccatgaggttgtggctggcttaggcagcaacctccacattcccacaggccttgagcagaattttctgagactgaagggaaatccccctttctttctaccagccctgcaagtttcctcatggacgctcgcgaggagcaggctgcaggtttcctgcctatggtgagatcagatgtggccaagggaaggagctctggttccagagaatttgcacaaagttccctctgtacagagacaaaacggcctccggctctcagagcataatccttggcagggctcagcaggcgcacgttggtttcttggtcgtcctttgagtgacaacttctccgtgaacctgctgaagaggcagaaaggctgtggaaagctgtatttccattcttgggtttctgcgccgtcggtgggcacttgttattttccaggaaccttctcctggtgtctacatgtttgcttagaggcggctccaagagcccccagagctgcctgcatagcacaccttagatgtggtatttattttcttagttctgtgaacacctgggagggagagcggagaaactgggatttatttttcaaattggtgtcataatattgtgtaaaaagggaaggaaaaaaaaaaccacccccagcttctttctttttcaagccaaagcgtgtttcctgtttgagttccaagccctggtggcagactattcctgaaggcagaaaagatgggaaggaaggaactttgctggggaaaccaggagacggttccctcctgcttctttgcactcaccactcccagagtatgacctgaaggaccttctgatggtcttaacgtgtgtgcgcgcgtgtgtgtgtgtgtgtgcgtgtatatatatatatttagcctatatatttatatatatatatatataaatatttatttactgatggacttttcctcattggaaaaaaaaaacataggtagtatgagacagaaagtggtaaggaaaaagaaggttctcactcccccactccaccgtttcattgtcaggacgcatctccctgtggtgatcacaagggttaaggggaatgaaagtagctccctattatgaacgaagagaccgagaactcctattctggatcctcaaaacaagcatgaaagacctgctgggctggatttactctcccatttgtcagataagaaaattgagtctcagaaaagttcagagacttttccatggtgtcttggctaatgcagcttgagagtaggtgccgttacaaagatatttaatggagaaaagaacccacacatctcagagtagggtcatttctggtcactgaaaagtgagtccacttggatccaggttgccagggaggaacaaacgtacagcacatgcgtggatgggatatccccacacaagaaaacgagcgcctcatgctgcttcccagaggttctctctgacctgaatggaaaagaagttggtctgagatcgaaggtactaaacagatcatcagactgaactctccacatgtcacctcatcatggtcatcatagtctcttagtttggaaacaaccttggctgcagggatgacctcagtggagagtcacaagaaggactgaggcgtcttctgcaagatactgccagccaggacagaggggtctcagcagagctcagtgggcttcattcagcaagtgccagcattaccatcctttcccaagggcaaggccatgcagagcttcattgggcctccatccctctctgagatttatcagtggaaacttggacccacttgatatcgttccactgagctgcctctaatcttgcattggacaggagctttggacaaagaagggaatattaagattgtgtgtacaaatggcacttaactgtgaaggaccacctaggagcaagatcttggaccattctgctcaacctaacagtgcagaatgctaagtaaggggaaaaccaggccacctgaagaatatctttaatgatggtattcttggtgatgggaccaacaagctccagaattactacaggtactatcttggaagccacttgtttctgaaactgaggcaggttcaggtttggggtcactgattctaagacatttacagaagttcgtgcatgtgtttcagccatgatccccaagattgaggctattgagacatggcactatcaacaggtgaaattgattctcagagactcacaggtctcatgaaggggcagtgcagaaaatggcccttacctgctgcaccctagtgcacaggacttgcaatgttgcttgagagacatatcccaagtccttcttagaggcatggagtataacaacttcagtggaattgcacttccagtttggtaaccttagtaaatcttgtgttgttgtttaatcgtgccttgcaaatcatcctttaaacactatgactgtggtttcttgtggtggagtccctcatcatagtgaccctcatagcaacctctgaggttagcagagaaggtattattatctcgatctcaatgaggagaacaaggcttaatgaggtttagtgacttctcaaagccacatggttagtcaggggagaacctaatcccttatttcttatcttattctgattctggccatgctacaaacatgttctcacctgccccccatgcttctaccccaacagcaataaaaactgtaaagcagg

SEQ ID NO: 2333 - protein, 791 aa, Homo sapiens; identical to SEQ ID NO: 222

SEQ ID NO: 2334 - DNA, 5725 bp, Homo sapiens
gcagtgccgtagtagcgggccacggagatagacagctttggagctgctgaactccgagcacagggtgaagaccccggcgctaccaaccacagcctggcagcctggtctccgcggcacccactggggctgcatccccctcccccgagagggctgcgcaggcgggaagacgcccagaggccagcttcggtcccccttctgtctctcggttcctctttcctcccaagtaagggaataaaccgcgaagaaggagcgccccgggccaccgcgcaaccaagtgttgcctggtgaggaagagccaggacttctgaatttaccttgaatacagacaggaggatgttgcctaaggaatagcagagatcttgtctcatcttctgagaggtgcctgctgctgctgtatacacttgagtgctcccagaagtctcctgaaaggcttacatcgcaaacctgcaatgagccaggccctgggctgggcctccacttcagcctagtgaacaaaactccatcactgccctttagccactcacataaagtttaaaaatgggtgaagaacggtgggtctccctcactccagaagaatttgaccaactccagaaatattcagaatattcctccaagaagataaaagatgccttgactgaatttaatgagggtgggagcctcaaacaatatgacccacatgagccgattagctatgatgtcttcaagctgttcatgagggcgtacctggaggtggaccttccccagccactgagcactcacctcttcctggccttcagccagaagcccagacacgagacctctgaccacccgacggagggagccagcaacagtgaggccaacagcgcagatactaatatacagaatgcagataatgccaccaaagcagacgaggcctgtgcccctgatactgaatcaaatatggctgagaagcaagcaccagctgaagaccaagtggctgcgacccccctggaaccccccgtccctcggtcttcaagctcggaatccccagtggtatacctgaaggatgttgtgtgctacctgtccctgctggagacggggaggcctcaggataagctggagttcatgtttcgcctctatgattcagatgagaacggtctcctggaccaagcggagatggattgcattgtcaaccaaatgctgcatattgcccagtacctggagtgggatcccacagagctgaggcctatattgaaggagatgctgcaagggatggactacgaccgggacggctttgtgtctctacaggaatgggtccatggagggatgaccaccatcccattgctggtcctcctggggatggatgactctggctccaagggggatgggcggcacgcctggaccatgaagcacttcaagaaaccaacctactgcaacttctgccatatcatgctcatgggcgtccgcaagcaaggcctgtgctgcacttactgtaaatacactgtccacgaacgctgtgtgtccagaaacattcctggttgtgtcaaaacgtactcaaaagccaaaaggagtggtgaggtgatgcagcacgcatgggtggaagggaactcctccgtcaagtgtgaccggtgccacaaaagtatcaagtgctaccagagtgtcaccgcgcggcactgcgtgtggtgccggatgacgtttcaccgcaaatgtgaattatcaacgttgtgtgacggtggggaactcagagaccacatcttactgcccacctccatatgccccatcacccgggacaggccaggtgagaagtctgatggctgcgtgtccgccaagggcgaacttgtcatgcagtataagatcatccccaccccgggtacccaccccctgctggtcttggtgaaccccaagagtggagggagacaaggagaaaggttgaactttttccgtgatactccagacttccgtgttttggcctgtggtggagatgggacagttggctggattttggattgcattgataaggccaactttgcaaagcatccaccagtggctgtcctgcctcttggaacaggaaatgaccttgcccgttgtctccgctggggaggaggttatgaagggggcagcttgacaaaaatcctgaaagacattgagcagagccccttggtgatgctggaccgctggcatctggaagtcatccccagagaggaagtggaaaacggggaccaggtcccatacagcatcatgaacaactatttctccattggtgtggacgcttccattgcacacagattccatgtgatgagagagaaacatcctgaaaaattcaacagcaggatgaagaacaagctgtggtactttgaatttggcacctcggagacttttgcagcgacctgcaagaaactccacgaccacattgagttggagtgtgatggggttggggtggacctgagcaacatcttcctggaaggcattgccattctcaacattcccagcatgtacggaggcaccaatctctggggagaaaacaagaagaaccgggctgtgatccgggaaagcaggaagggtgtcactgaccccaaagaactgaaattctgcgttcaagacctcagtgaccagctccttgaagtggtggggctagaaggagccatggagatggggcagatctacaccggcctgaagagtgcaggcaggaggctggcccagtgcgcctctgtcaccatcaggacaaacaagctgctgccaatgcaagtggatggagaaccctggatgcagccatgttgcacgattaaaattactcacaagaaccaagcgcccatgatgatggggcctccccagaagagcagcttcttctcgttgagaaggaagagccgttcaaaagactaaacagtgtgccaaacaccagctaaaccaagagagaaagcaagaaactataatgcacactcacacacaatttatgtgcacactcacacatgcacacacacacacacatacacactcttctctaaccagtggaagcaaagccacccttcgggaagaaaacgtcaccttgccatacattctgtttcaacagtgggtacacccctaacagagccagtgccaacaaaacattttgaatggacttagggcccatgaggttgtggctggcttaggcagcaacctccacattcccacaggccttgagcagaattttctgagactgaagggaaatccccctttctttctaccagccctgcaagtttcctcatggacgctcgcgaggagcaggctgcaggtttcctgcctatggtgagatcagatgtggccaagggaaggagctctggttccagagaatttgcacaaagttccctctgtacagagacaaaacggcctccggctctcagagcataatccttggcagggctcagcaggcgcacgttggtttcttggtcgtcctttgagtgacaacttctccgtgaacctgctgaagaggcagaaaggctgtggaaagctgtatttccattcttgggtttctgcgccgtcggtgggcacttgttattttccaggaaccttctcctggtgtctacatgtttgcttagaggcggctccaagagcccccagagctgcctgcatagcacaccttagatgtggtatttattttcttagttctgtgaacacctgggagggagagcggagaaactgggatttatttttcaaattggtgtcataatattgtgtaaaaagggaaggaaaaaaaaaaccacccccagcttctttctttttcaagccaaagcgtgtttcctgtttgagttccaagccctggtggcagactattcctgaaggcagaaaagatgggaaggaaggaactttgctggggaaaccaggagacggttccctcctgcttctttgcactcaccactcccagagtatgacctgaaggaccttctgatggtcttaacgtgtgtgcgcgcgtgtgtgtgtgtgtgtgcgtgtatatatatatatttagcctatatatttatatatatatatatataaatatttatttactgatggacttttcctcattggaaaaaaaaaacataggtagtatgagacagaaagtggtaaggaaaaagaaggttctcactcccccactccaccgtttcattgtcaggacgcatctccctgtggtgatcacaagggttaaggggaatgaaagtagctccctattatgaacgaagagaccgagaactcctattctggatcctcaaaacaagcatgaaagacctgctgggctggatttactctcccatttgtcagataagaaaattgagtctcagaaaagttcagagacttttccatggtgtcttggctaatgcagcttgagagtaggtgccgttacaaagatatttaatggagaaaagaacccacacatctcagagtagggtcatttctggtcactgaaaagtgagtccacttggatccaggttgccagggaggaacaaacgtacagcacatgcgtggatgggatatccccacacaagaaaacgagcgcctcatgctgcttcccagaggttctctctgacctgaatggaaaagaagttggtctgagatcgaaggtactaaacagatcatcagactgaactctccacatgtcacctcatcatggtcatcatagtctcttagtttggaaacaaccttggctgcagggatgacctcagtggagagtcacaagaaggactgaggcgtcttctgcaagatactgccagccaggacagaggggtctcagcagagctcagtgggcttcattcagcaagtgccagcattaccatcctttcccaagggcaaggccatgcagagcttcattgggcctccatccctctctgagatttatcagtggaaacttggacccacttgatatcgttccactgagctgcctctaatcttgcattggacaggagctttggacaaagaagggaatattaagattgtgtgtacaaatggcacttaactgtgaaggaccacctaggagcaagatcttggaccattctgctcaacctaacagtgcagaatgctaagtaaggggaaaaccaggccacctgaagaatatctttaatgatggtattcttggtgatgggaccaacaagctccagaattactacaggtactatcttggaagccacttgtttctgaaactgaggcaggttcaggtttggggtcactgattctaagacatttacagaagttcgtgcatgtgtttcagccatgatccccaagattgaggctattgagacatggcactatcaacaggtgaaattgattctcagagactcacaggtctcatgaaggggcagtgcagaaaatggcccttacctgctgcaccctagtgcacaggacttgcaatgttgcttgagagacatatcccaagtccttcttagaggcatggagtataacaacttcagtggaattgcacttccagtttggtaaccttagtaaatcttgtgttgttgtttaatcgtgccttgcaaatcatcctttaaacactatgactgtggtttcttgtggtggagtccctcatcatagtgaccctcatagcaacctctgaggttagcagagaaggtattattatctcgatctcaatgaggagaacaaggcttaatgaggtttagtgacttctcaaagccacatggttagtcaggggagaacctaatcccttatttcttatcttattctgattctggccatgctacaaacatgttctcacctgccccccatgcttctaccccaacagcaataaaaactgtaaagcagg

SEQ ID NO: 2335 - protein, 766 aa, Homo sapiens; identical to SEQ ID NO: 2331

SEQ ID NO: 2336 - DNA, 6197 bp, Homo sapiens
gcagtgccgtagtagcgggccacggagatagacagctttggagctgctgaactccgagcacagggtgaagaccccggcgctaccaaccacagcctggcagcctggtctccgcggcacccactggggctgcatccccctcccccgagagggctgcgcaggcgggaagacgcccagaggccagcttcggtcccccttctgtctctcggttcctctttcctcccaagtaagggaataaaccgcgaagaaggagcgccccgggccaccgcgcaaccaagtgttgcctggtgaggaagagccaggacttctgaatttaccttgaatacagacaggaggatgttgcctaaggaatagcagagatcttgtctcatcttctgagaggtgcctgctgctgctgtatacacttgagtgctcccagaagtctcctgaaaggcttacatcgcaaacctgcaatgagccaggccctgggctgggcctccacttcagcctagtgaacaaaactccatcactgccctttagccactcacataaagtttaaaaatgggtgaagaacggtgggtctccctcactccagaagaatttgaccaactccagaaatattcagaatattcctccaagaagataaaagatgccttgactgaatttaatgagggtgggagcctcaaacaatatgacccacatgagccgattagctatgatgtcttcaagctgttcatgagggcgtacctggaggtggaccttccccagccactgagcactcacctcttcctggccttcagccagaagcccagacacgagacctctgaccacccgacggagggagccagcaacagtgaggccaacagcgcagatactaatatacagaatgcagataatgccaccaaagcagacgaggcctgtgcccctgatactgaatcaaatatggctgagaagcaagcaccagctgaagaccaagtggctgcgacccccctggaaccccccgtccctcggtcttcaagctcggaatccccagtggtatacctgaaggatgttgtgtgctacctgtccctgctggagacggggaggcctcaggataagctggagttcatgtttcgcctctatgattcagatgagaacggtctcctggaccaagcggagatggattgcattgtcaaccaaatgctgcatattgcccagtacctggagtgggatcccacagagctgaggcctatattgaaggagatgctgcaagggatggactacgaccgggacggctttgtgtctctacaggaatgggtccatggagggatgaccaccatcccattgctggtcctcctggggatggatgactctggctccaagggggatgggcggcacgcctggaccatgaagcacttcaagaaaccaacctactgcaacttctgccatatcatgctcatgggcgtccgcaagcaaggcctgtgctgcacttactgtaaatacactgtccacgaacgctgtgtgtccagaaacattcctggttgtgtcaaaacgtactcaaaagccaaaaggagtggtgagtttcaccgcaaatgtgaattatcaacgttgtgtgacggtggggaactcagagaccacatcttactgcccacctccatatgccccatcacccgggacaggccaggtgagaagtctgatggctgcgtgtccgccaagggcgaacttgtcatgcagtataagatcatccccaccccgggtacccaccccctgctggtcttggtgaaccccaagagtggagggagacaaggagaaagaattcttcggaaattccactatctgctcaaccccaaacaagttttcaacctggacaatggggggcctactccagggttgaactttttccgtgatactccagacttccgtgttttggcctgtggtggagatgggacagttggctggattttggattgcattgataaggccaactttgcaaagcatccaccagtggctgtcctgcctcttggaacaggaaatgaccttgcccgttgtctccgctggggaggaggttatgaagggggcagcttgacaaaaatcctgaaagacattgagcagagccccttggtgatgctggaccgctggcatctggaagtcatccccagagaggaagtggaaaacggggaccaggtcccatacagcatcatgaacaactatttctccattggtgtggacgcttccattgcacacagattccatgtgatgagagagaaacatcctgaaaaattcaacagcaggatgaagaacaagctgtggtactttgaatttggcacctcggagacttttgcagcgacctgcaagaaactccacgaccacattgagttggagtggtgctaagtgcctcatggaatctgcaaagcagccctaagtggcaggtgtcataatcacctttccagagaagggggacacaggctgagagaagtgtgatggggttggggtggacctgagcaacatcttcctggaaggcattgccattctcaacattcccagcatgtacggaggcaccaatctctggggagaaaacaagaagaaccgggctgtgatccgggaaagcaggaagggtgtcactgaccccaaagaactgaaattctgcgttcaagacctcagtgaccagctccttgaagtggtggggctagaaggagccatggagatggggcagatctacaccggcctgaagagtgcaggcaggaggctggcccagtgcgcctctgtcaccatcaggacaaacaagctgctgccaatgcaagtggatggagaaccctggatgcagccatgttgcacggtgagtcttgccaatctttgagatggggatgagaagccttatttttgagcccttttgggcactgacttaatatgaaatcactgaatctcagagtcacagggactgtggaagattatctagtgcaacccctcttccactttattatccatccactcatttacctggcaactcttaatgaaaacctgctatatgccagacactgtgaagcgccggtcacaaaattgaatgagacatagaaccaacttcgaggagttcacagttctagtcagtgaattctgagacttcatctactgtatcctggacagcctcagcttgaatcatgtcaatggcaaggaatttactacctcaaaaggaagactgttctgctgatgaacaagtcaaattgcttccttacgtggaagccaaatctacacacttaccttacctagaatttggtagggtagcgcctttgactgctggagctcccgggagaaaattcctcgcagagcacagacatgcctcccagtcggtgcacccaaagccctgataacctacttgaaaattccactgaatgagtcaccacgcaggttatctattttgtttatggcactgtcacccagaacgtagaacagtgcctggtttgtaatagttgcacaataatacatgtcaaatgatgaataaaagactgaacaaatgaactaacaaaaatagactatctccattcccagacttaccatatccgttagctctccctttagcactaggacaggagccatgcatccttccttcttagtttgtcctcagttagaaatgcagctagaatctcgtggtgaagagcaatcgtcgtcctggttttcagggcctctgctgggatactacatgcgtaataccctcaataagattgcagctatgcaaatttcaaaagacaaaagtggagtttctaagcttcctcactctagtggagtattcagatactttgatcacctgctattttgagccctccagaacatcaaattgtcttctactaaaggaaggtttccatgaacctgctgagaaaaggtagcatcttctataaaggttatcaaaaacagaaatttctctgcaaaaatcttacctcaatcttatgaagaccaagaaaaaaatgaaaacacactatatcaaataatagctttccaccttgctggagttaggacgcatagagggaatttctactatttatcatttgatggaactgagttgagaagaatctatccaagttccttttatctccaacccccctacaaaaaaaaaggtggaagaaatcaaaccctctcctacctggttcagtcctagctgaaaactggattgctattcctataaattcaagcactggattttgaaatagccaaatgcttctccctatgcccacacccacccttcctccataccaccctttagagattacaactcactatgaaaaaatttgtgaaccaatgatttcatagtgtgaggcccagaaatccgtatgtaaaggtatattcgtctgctttgagtgccataatagaataccacagactgacagcttaaacaacagaaatttattttctcacagttctggaggctgacaacacaagaccaaggtgccggaagggctggtttctggggaggcctctcttcctaacttccaacggctgccttcttgttgtatcctcacatggcttttcctctgtgtttgtacactcttttctcttcttataaggacaccagttctaagggattatggcccccccgccccttgtgacctcatttatccgttattacctccttaaaggccctacctacaaatatagtcacactgggggttaggaattcaacatatgaatttgggggggacacaatttattccataacagaaggtaacagaaaatcattcttaaacttgcaagggttaaaacccatgtaccccttgttgaaacatcttcttgaaggtatacaccaactaagaagtgattcaaaattaaagccttaagaatggactatcacagcccaaaagaacttttggtaaaaatggaaaccagtgaaattagaatgaagtttccaaaaacctgctaaatatgtttatgcaataaatgcaaatggcaaaaaatcattctttgaaagagaagacatatcatgtaaatattaataacctgtatcccaaacctgagattatattaacaaaggccaaaaacatgcaggagacactgctgaaggaatagtaaagatatgtgaagtttctcattgtctctcttcactttgatgacaaaacgtataaatcagaagataattttaataggtagacaatcactagcgaaactaaaaatagggtgcacacctttcaaatctggaagaatttaaaatatataaaccctattaatgtagcacaggatagaaagcaaaaaataagccaacatttaaaaattttttgaagcaagttgaatgatgttaagactgtatatatataatatatatataaaagaaaaatagatgagttaaaattccctattaaaagatcaatactctcatattgagttaaaaatgaaaatccaaatatatgcttcttacaaaagatacatctaaaatgaaaggttatacatacgtatatataatatatatcttattttatcctttatcaggtataaagaaattaaaaggaagacatagtaatgttaattatgctaattttaggcaaactaacctttccatgtgcctaaagcataaagcagaataagtaaacacattttttatttgataaaaagtacattcaattatgagatatagtggtcataaaatgttagatatttaataacagaatcaaaatatataaaaaactatcaatacatattctgagaaaaggttgatatagaattgacagacagatattgagaagcttgaaaatatttgtttccatctttgaggttaagtagcaaaaaaataaatgcttggatgaaataactctataactcataaagaaattaaatatcatatttgttcaggcattcatatttattaaactagatcataaactagtttacaaggcaaaaagctccataaaatccagttgcagaaattataaaggtcattttctttgaccacaaagtaataaagctagaaattactaatagaagattaagtgaataaacaaaatttagtcacttggagacttaaaaattctcctaaacaacaagagatttatgaggagatcaaagccaccatggtagattactcaaaaaattacaaaaataagaaggctccagtttaaaaattatagaatatagcctaaactatatttggaagtaaattaaaagcctcataatcttccatcatataaaaaagaagtaaaatgtaatgaataatactaaaattagaagagcaataataaaacaatcttaggagaagcagaaggaag

SEQ ID NO: 2337 - protein, 602 aa, Homo sapiens
MGEERWVSLTPEEFDQLQKYSEYSSKKIKDALTEFNEGGSLKQYDPHEPISYDVFKLFMRAYLEVDLPQPLSTHLFLAFSQKPRHETSDHPTEGASNSEANSADTNIQNADNATKADEACAPDTESNMAEKQAPAEDQVAATPLEPPVPRSSSSESPVVYLKDVVCYLSLLETGRPQDKLEFMFRLYDSDENGLLDQAEMDCIVNQMLHIAQYLEWDPTELRPILKEMLQGMDYDRDGFVSLQEWVHGGMTTIPLLVLLGMDDSGSKGDGRHAWTMKHFKKPTYCNFCHIMLMGVRKQGLCCTYCKYTVHERCVSRNIPGCVKTYSKAKRSGEFHRKCELSTLCDGGELRDHILLPTSICPITRDRPGEKSDGCVSAKGELVMQYKIIPTPGTHPLLVLVNPKSGGRQGERILRKFHYLLNPKQVFNLDNGGPTPGLNFFRDTPDFRVLACGGDGTVGWILDCIDKANFAKHPPVAVLPLGTGNDLARCLRWGGGYEGGSLTKILKDIEQSPLVMLDRWHLEVIPREEVENGDQVPYSIMNNYFSIGVDASIAHRFHVMREKHPEKFNSRMKNKLWYFEFGTSETFAATCKKLHDHIELEWC

SEQ ID NO: 2338 - DNA, 511 bp, Homo sapiens
cattcaaactggagacacttagctacttagcccctccgaaaattcagccagtggaaaaacacctgactgcctgccctcctgcttctcatctgcctctccgaagctgtcttggcttcaactctcatctcacgccccctattggatgaagcagagctaatttctttttcttttacctttcaagtataagatcatccccaccccgggtacccaccccctgctggtcttggtgaaccccaagagtggagggagacaaggagaaagaattcttcggaaattccactatctgctcaaccccaaacaagttttcaacctggacaatggggggcctactccagggttgaactttttccgtgatactccagacttccgtgttttggcctgtggtggagatgggacagttggctggattttggattgcattggtaagcatgggctgagagggcgtttgctgcttatttatagtaagcgtatttacaatcagcagaaggcaataaaaaagaaagagacatgg

SEQ ID NO: 2339 - protein, 117 aa, Homo sapiens
FLFLLPFKYKIIPTPGTHPLLVLVNPKSGGRQGERILRKFHYLLNPKQVFNLDNGGPTPGLNFFRDTPDFRVLACGGDGTVGWILDCIGKHGLRGRLLLIYSKRIYNQQKAIKKKET

SEQ ID NO: 2340 - DNA, 1462 bp, Homo sapiens
gaaacagaggagataacaaaaggaatcaaaatcatggtacctgagctgagacacacacagtaaccctccatgcaagagaaactggcctcgagctgagagatggatcccaagttgctacagctgtggggatgagtgataagaagtgacaggagaaatctgccttgatttgagatggattgcattgtcaaccaaatgctgcatattgcccagtacctggagtgggatcccacagagctgaggcctatattgaaggagatgctgcaagggatggactacgaccgggacggctttgtgtctctacaggaatgggtccatggagggatgaccaccatcccattgctggtcctcctggggatggatgactctgtaagtcaacaagctggagttcagagatctcttgccattcaggaacattgggcttcatgttaatatcaacatatcactttggcttctgctccagactgcccaacagacgtgccatgaccagccccaaagtcctctctatttacattattttgtatccattagtgcctgaagtatattcatttgacagacatttactacattattactactttaaaaatactgttctgcatgctgtgagggaatacagacacattatctgcctgcaagaaccttatactcaaccaggcaaagggccacaaacttcaaagaagaattctgtcttttcaacaaattaggtttaaaaatgctaagagaattggggaaggaagggtgagaggaaagaacgaagggagagaggaaaaaatacggatctgttgtgggggtggcttccattagtggtatcttatttaataatcaaaacaaccagataaggtaaatatttttatcccaatttatacagatggaaaactgaggttctgaccctaaggagcaaaaggaggagtgaggatttgtctctgacaccaaagatgttgcactttgtaatatcccacacatgagagttaggccagtgggaagaaaccttggaaggtgttgacttgtccctgaagaatgcatgagattttgatgtcccattcttgagaataaagagcaggtggccttaaagacctagagagagtttatggcttggagaacagcttgattaaaaacacaaatgaaagaaagttctgggtgtgttaggcaaatctcccatttgatcagagtagggcatatgtgtacaggcttaatgtgaaactgattgttatatataccttcatctgacccagttactgtattctccacctatttaccaagtgaactcacttccatgcatgaggtagggaagactaaaactagtaggagcacaaatggtgacattaagcgtttactagtcacaccagttgtgtgacaacactactttgagattacagatctcaaagattacacctctttgagactattccatagagaggaacagggcagcaagtgcagctgggtgagcctctagctgaccaagttg

SEQ ID NO: 2341 - protein, 85 aa, Homo sapiens [sequence omitted]

SEQ ID NO: 2342 - DNA, 549 bp, Homo sapiens
ttggtgcatgactgtagaactttaagcaatgatgaaaatgctctatatccacactatccaatatggttctgcttgaattcttgccctggctcttggtgaaggatcggcctgctggatctgagtcatccacctataagagggacaacaccacacattggtcgctgctctcaagcccctggaataccaccccacttggcttctcctggtaacagtggctgcctttgcttgcctgtctccaactcctcccaagagcattgctgactataccacccacataaacaaaaactttttgggagtcctccagaatttttaagagttatctaaactattgcctttaatgaccaggaactccaatttgagaagttaccctacgttaagccaacagcagcctggctccttcatcctgtgcagtatgggacagagctgggtccttgttgtcatcagccagacaagcacacattaaagcccaccttagccattggcattacagctttaaaagcagctccatcctaccatgctgtcactctactcaatcacgtgatcttaacg

SEQ ID NO: 2343 - protein, 48 aa, Homo sapiens
MVLLEFLPWLLVKDRPAGSESSTYKRDNTTHWSLLSSPWNTTPLGFSW

SEQ ID NO: 2344 - DNA, 604 bp, Homo sapiens
aaatgctctatatccacactatccaatatggtaaccactagccacttgtgactactgagtgtctgaaaggttctgcttgaattcttgccctggctcttggtgaaggatcggcctgctggatctgagtcatccacctataagagggacaacaccacacattggtcgctgctctcaagcccctggaataccaccccacttggcttctcctggtaacagtggctgcctttgcttgcctgtctccaactcctcccaagagcattgctgactataccacccacataaacaaaaactttttgggagtcctccagaatttttaagagttatctaaactattgcctttaatgaccaggaactccaatttgagaagttaccctacgttaagccaacagcagcctggctccttcatcctgtgcagtatgggacagagctgggtccttgttgtcatcagccagacaagcacacattaaagcccaccttagccattggcattacagctttaaaagcagctccatcctaccatgctgtcactctactcaatcacgtgatcttaacgaccagctctacatatcctctctccatgcccccaccaccatcccccaccaac

SEQ ID NO: 2345 - protein, 41 aa, Homo sapiens
MTRNSNLRSYPTLSQQQPGSFILCSMGQSWVLVVISQTSTH

SEQ ID NO: 2346 - DNA, 575 bp, Homo sapiens
aatatggtaaccactagccacttgtgactactgagtgtctgaaaggttctgcttgaattcttgccctggctcttggtgaaggatcggcctgctggatctgagtcatccacctataagagggacaacaccacacattggtcgctgctctcaagcccctggaataccaccccacttggcttctcctgagatgggctctcactatagccctgttctggaactcctgggctcaagccatcctcccactttggcctccccaaaatgctgggattacaggcgtgaaccaccgcatctagcctaaaattatattgttaaaagactttgtttctcagtttgggataatcagaattcatagttctgatctcgactaccagttttaatgaggtacttctttctaactccatcagctgtgtggctatctgcagataccacccacataaacaaaaactttttgggagtcctccagaatttttaagagttatctaaactattgcctttaatgaccaggaactccaatttgagaagttaccctacgttaagccaacagcagcctggctccttcatcctgtgcagtatgg

SEQ ID NO: 2347 - protein, 31 aa, Homo sapiens
MRYFFLTPSAVWLSADTTHINKNFLGVLQNF

SEQ ID NO: 2348 - DNA, 422 bp, Homo sapiens
cttgaattcttgccctggctcttggtgaaggatcggcctgctggatctgagtcatccacctataagagggacaacaccacacattggtcgctgctctcaagcccctggaataccaccccacttggcttctcctgattctgctatcagctacaggtctgggtttgtgtctccgacaaagaaccacctcaaagccccacagaaaaggactgtaccgtatacttcaaactattgacacctcaaagaacagagcttgggttcaggcttctgatgcattctgagacactctcagaccataccagtgggctgggtcaggatttacagaactattttcatttcaagagcatacgggctcatgagattgctaactcaagatccggtggaacagaaatacttatatcggactgaataaactgatgaggaaa

SEQ ID NO: 2349 - protein, 45 aa, Homo sapiens
MHSETLSDHTSGLGQDLQNYFHFKSIRAHEIANSRSGGTEILISD

SEQ ID NO: 2350 - DNA, 368 bp, Homo sapiens
tcaatggcaaaagggcatactgctgttattgtcagtgaggggtcagtagtttaaatgatgaaactctggggatcagcgtaaagtaaaccaacatactgcatgtaagtatcaagtaaatgagcagagacagcccctggtttacaaacacctgacttaagcatcgtccatcctacaggacagggaaggaggaagaagcttcgagaggctggaacagttgagggagcgctgacacggtaaaggccactttgctcatcatcaccaggcgtgctgccgaaaatttccactctgtttactcccaagaccttactcctactatgtggagacacatttgaataaaaaattggcctcttttcaaagtcaaaattctg

SEQ ID NO: 2351 - protein, 38 aa, Homo sapiens
AETAPGLQTPDLSIVHPTGQGRRKKLREAGTVEGALTR

SEQ ID NO: 2352 - DNA, 721 bp, Homo sapiens
gggaggtgcaagctgagcctgcactaccttttgtcacggttgctatggaaaagattaagagcccggatagcccttcctcctctgggggcctgggcatcagcaagtcggatggcagtggaaggtggagaaatggaatcctgctgggggctcaggaggcctgccccctgatgctgccgtgcactgcagatgtccttgatgaagagaatgaatggaagctgtctttctcaatggcaaaagggcatactgctgttattgtcagtgaggggtcagtagtttaaatgatgaaactctggggatcagcgtaaagtaaaccaacatactgcatgtaaattcctcattcttactgctgtgagaacaattgttaggagccaaaaacttcagagctttcaaagaactgtaatgagatagcacaatgcaggcaaaaagccagtgttaacggagcaagaaacttcccagttctgacattcacagcatgacctagagcatgcggattcccctctctgagtcactggtttctcacctgcaaaagaaagcggggacagggaaggaggaagaagcttcgagaggctggaacagttgagggagcgctgacacggtaaaggccactttgctcatcatcaccaggcgtgctgccgaaaatttccactctgtttactcccaagaccttactcctactatgtggagacacatttgaataaaaaattggcctcttttcaaagtc

SEQ ID NO: 2353 - protein, 77 aa, Homo sapiens
MEKIKSPDSPSSSGGLGISKSDGSGRWRNGILLGAQEACPLMLPCTADVLDEENEWKLSFSMAKGHTAVIVSEGSVV

SEQ ID NO: 2354 - DNA, 2285 bp, Homo sapiens
aagttgttttctaatgctcacgcgctatggccgaagtctgcaatggatgggagaaaggggaggaccaaattagctcagattctttacagttcacagcatcagctgttttatttatttgttttagatagcgaagccaaaaaaagttggatgggggcaaaaatgccaactaaaatagctcatagttctgaagtagagagaagtcagaatttcccgttttctcttgtttctctcagggatggtctatatgactggcgctccttggaagcagtgctgagggcattatcaagagtttccagggcctcctctttctcctgaaaccttcttcaaggagggtaaagttttaagagagttcaaaagtaccacagacttccagggaatagtagtttttgtcgtgacaagcatggacattttcttgcgtcatgtactatttcagaaggtagagaccacaaaaaggcttcttactgtggccaccgtggacatcttcccacatctacaaggtgttgtggccacatcattgctgcacccagtttcctcagaagaaatacctgttgcttaggtttagaaacgaggcatgtatacgtatttaacagttctcagaatgtcaaggatccctcctcagagcaagagctcgaatttacaaaagaagcactacctcctttatcacatagtaaaataaaggaccgtgtctgctccaggacatggctggttacaattttgttttaaagaaatcaccagagaaacctgagattccaacccagccttttgtttgcctgggattatagcccagttcttacaagcagagaagcctaggacactaacccagcttcaagagtatactcagaatctcaagaatcacaatctgtgctgcccattcttcaacagactgtcatctggaggcctggattggatcaggagtcgggctcaccaatggagccccaatcagtcagtcaggagtgaagatgaaagcttcaaagccagcacaagagcacacaggaggccggcataatcacgaattgcagctgtctgaagggcagtcacataaaagaggagaagcttcacctttgcttcacaaggcacatcttgaaccagggatggaaattacagagaggccaaaaccagctcggtgtgagcaggactggtaacagactggccaagcaacagaaggggctgccctgtgaagaagcaagctctctgtcaatgggaggtgcaagctgagcctgcactaccttttgtcacggttgctatggaaaagattaagagcccgggcctggctgttcccacctcaaaccacttcttagcttcatttgttctcataacaacaggatagcccttcctcctctgggggcctgggcatcagcaagtcggatggcagtggaaggtggagaaatggaatcctgctgggggctcaggaggcctgccccctgatgctgccgtgcactgcagatgtccttgatgaagagaatgaatggaaggtattggaagggagctgaagttcaacaaatgaccacctaatgaaaaagtcagcagtggattgcttgagatcttgagcaccctgtactgttattagtatttataaacatgtttgaaagatgttcccttccttcactgtagtgccagaaagcctttaacatattgggtccggtctagatttgtaaggaagtatggctgaattgttatcgggtggatacagtttacatgtttaaagctgtctttctcaatggcaaaagggcatactgctgttattgtcagtgaggggtcagtagtttaaatgatgaaactctggggatcagcgtaaagtaaaccaacatactgcatgtaagtatcaagtaaatgagcagagacagcccctggtttacaaacacctgacttaagcatcgtccatcctacaggtaaattcctcattcttactgctgtgagaacaattgttaggagccaaaaacttcagagctttcaaagaactgtaatgagatagcacaatgcaggcaaaaagccagtgttaacggagcaagaaacttcccagttctgacattcacagcatgacctagagcatgcggattcccctctctgagtcactggtttctcacctgcaaaagaaagcggggacagggaaggaggaagaagcttcgagaggctggaacagttgagggagcgctgacacggtaaaggccactttgctcatcatcaccaggcgtgctgccgaaaatttccactctgtttactcccaagaccttactcctactatgtggagacacatttgaataaaaaattggcctcttttcaaagtc

SEQ ID NO: 2355 - protein, 60 aa, Homo sapiens
MKASKPAQEHTGGRHNHELQLSEGQSHKRGEASPLLHKAHLEPGMEITERPKPARCEQDW

SEQ ID NO: 2356 - DNA, 572 bp, Homo sapiens
caccctcccccgcccaccgcctcagcaaccaacctccagggaggggaaagggggcagaagtttgagttaataactaatagctaaagatgtaaacaataagcctccataaaaccccaaaaggactggactggtttctgagagcttccaggttgttgagcacgtggaggttctgggagggtccacacccagagaaggcatggaagctgaccccttccccataccttgctctttgcatctcttccatttggctgttcccgagttgtatactttgtaataagtgggatttccacccaacaacaattcagccacactgcttcacacatctagaatccatccaaaattgtaaaggctttgtggcactacagtgaaacaggcaagaacatcttccaaacatccagcacaagagcacacaggaggccggcataatcacgaattgcagctgtctgaagggcagtcacataaaagaggagaagcttcacctttgcttcacaaggcacatcttgaaccagggatggaaattacagagaggccaaaaccagctcggtgtgagcaggactggtaacagactggcc

SEQ ID NO: 2357 - protein, 67 aa, Homo sapiens
NRQEHLPNIQHKSTQEAGIITNCSCLKGSHIKEEKLHLCFTRHILNQGWKLQRGQNQLGVSRTGNRL

SEQ ID NO: 2358 - DNA, 433 bp, Homo sapiens
cgatgtgaatgtgatcattctctgagtctcagttttccatccatgaatccttgtgatttttaatttttcatgtaggactgtcacgagaagtaagatttttaaatttccagaacagaaataggtaagggaaacatctaagtgtgactcctccaaaatcactcttgcttccaattttgtctgctgttatggaggtcagcaactagtataaaatcctgaggtcagcccttccctcaaatcttcaaaacacagttcgctgatgatgctgcttcttaaaccttcatcatctcagggcgcctggctggggccaggaaggcgttcgcgtcagacaaccccagcggggaagcccccctctcccgcgggccaaaccgcagcttcttgcagccactcgccccggccggtttcgggaggagggcggcgctccgaaggcggccgc

SEQ ID NO: 2359 - protein, 58 aa, Homo sapiens
MMLLLKPSSSQGAWLGPGRRSRQTTPAGKPPSPAGQTAASCSHSPRPVSGGGRRSEGG

SEQ ID NO: 2360 - DNA, 701 bp, Homo sapiens
gcactgagccaggcactaccatatccataatctcctctgagacttggaaaccaagctggggccaggttacaaatgacttcacatgccattctccccgctgcctgccacttgtaccttgggcagccactggggacattcctggttctggattcctgcctctgagcagctctcttaacatgagtaggaggcctgtgcttccccacacccgtttccatctgtttgcatggaccagagccacttgagatagggccttcctaggaatagaaggtaagaccagcatcattccagggccactgtggatgggctttccccgcccaggaaatgactgctgcattgatctctgtgccactcaggccagggcatccttgtggggaggattccagtctgcattgcatcaaatacctagtataaaatcctgaggtcagcccttccctcaaatcttcaaaacacagttcgctgatgatgctgcttcttaaaccttcatcatctcagccaagccagggctggatccagggaaactcatcaccattcctggaagaggacatcccaacagctgccagcattagctctctcagggcgcctggctggggccaggaaggcgttcgcgtcagacaaccccagcggggaagcccccctctcccgcgggccaaaccgcagcttcttgcagccactcgccccggccggtttcgggaggagggcgg

SEQ ID NO: 2361 - protein, 79 aa, Homo sapiens
MMLLLKPSSSQPSQGWIQGNSSPFLEEDIPTAASISSLRAPGWGQEGVRVRQPQRGSPPLPRAKPQLLAATRPGRFREE

SEQ ID NO: 2362 - DNA, 490 bp, Homo sapiens
caaaatctcatgcatattttaatacttatgacttcatatttcatttgaatgagtgcgatgattaaatttgggacagagagaaaaagaatcctgtgtgtttacacaaacctagtataaaatcctgaggtcagcccttccctcaaatcttcaaaacacagttcgctgatgatgctgcttcttaaaccttcatcatctgaaatagctggcccatcaggaaggtactttgttgggtgattccatttggccagagaaaagtgatctttgttttccaaccctttctcctgttccaaggacgaaatggagctgcagaatctgtcctccccctcttgtatctctcctggctgccaacagaaagactcctgttctataagccagcagcttcatgaggtctgaaaataatccctcagccaagccagggctggatccagggaaactcatcaccattcctggaagaggacatcccaacagctgccagcattagctctctgga

SEQ ID NO: 2363 - protein, 32 aa, Homo sapiens
MRSENNPSAKPGLDPGKLITIPGRGHPNSCQH

SEQ ID NO: 2364 - DNA, 2669 bp, Homo sapiens
aacctatggcttttgggggatacagttcagtccatagcagtggggaaaggatgtgactcagtctagagagactcaaggagggaatgcttagataggagcatggagggcgtgcctggtgaagggaacagtatggcacagcttcagaggcaagggtgagccagcagcaaggggctggctatggccggtacaaaaagcatgtgctcgtgggaaataggcaccaaagaaggcccagagaggtttaacaacttcctcagaatcacacagcttccaaatggttgggttgggtttacatttaggcggtcttgctccagagccagtgctcctaacctttgcaagccacgaacctcaagaaagtggagaaggaaacgctgggaaatctggaagtcagacatggcaatttatctcccgggagctgacttcatttctaaacgtataggggtttcttagaggagcttcagaatactaatcatcgctagtgagggcacttggacactttgcttcacctcagccagcacctcttttcccagctgtaaaatggtatgataataagcacccctaggaatctcaaggatgttacgagggaaaaatatgcaataatatacaaagcactttgagcttctctgaagacagacgcatataaatggaaggtggtattataaggtggggtaatcactggttacctcccccccttttttatttaattaggagaaaaccagtaattaggaagcatggccttgttaaagctgtggcctgggaaatagttctcttggcacctaatcagaactgtgacatggcgcaaatttttgcaaaatgtgggcagcaggggaccttccccaaggctcagactgtgagaaatttgcgtctaggggccagatcctgaggtggctgagctggctggggaggcttctaaggagatcttcactcaggtctgcaagggggctctgccctgcctcagtagccctcatctctgggggccccaaagtcattctcatctgcaggttagagcttgctgcaggcccagaaccaagcttgtccaccacgtggccttcttggacccactggggcaacttcagggttctgaaaagcacctcagatctagtctggtctctgattcagtagcagagacaaagaaatcccctgcctgttccccttaaaatgggccattgtggagtaggtgctggggccctagcttgctccccactgtgcctttgttagagcattagcctccagcggaacccactgtctctctccttgcgagtcccagtttgcccattctcccggatcctgcttaaaggccgcctctgccaggaggccttcccaggtcttcccagttaccatcactctcttcctcctctagactctgtgtttggtacagtgtggtttttgtgtttgtcctgtcttctctcacatttgactctgagccactggaagaaagggaaggaaagtaagagaaatgaagtattcccattcccaggcacctggccagttgttgcagacagaatgaccagcactgttgtattgattccccctcaatacgttgaaaaagcaaacgggaggcatctggaaaatcttgagataagcagcttcattttcaatgatgagtcttttaaaatacacagaaatggtataacaatcatgtatccaccacttagactaccaatggttacttttgtcatattcactttaaatgtctttttattatgtatttaaaagaagtgaaacttgtagatacagctagggctccccgtgtccactcactgaagtcccttcccttttgtcatattcactttaaatgtctttttattatgtatttaaaagaagtgaaacttgtagatatagctagggctccccgtgtccactcactgaagtcccttccctctcccttctagggtccaccactttccttgtcatctggtaaaggaccctgcatccatggatggacagaggggattgctaaagtgctgaatcgcgtgtgaaattctacgtgtgcctctttctcacacatgccacatccattgcagagatgctcttgactcaaccttccagcagtctccactgcaaccactctggccaaggccaccattttcttttcttttctttttctctctcgccatggttggagtgcagtggtgcgatctaggctcactgcaacctctgtctccagggttgaagcgattcttctgcctcagcctcccgagtagctgagattacaggtttttctcactgtaagaagaggacaatagcctatgatctacagtgcccattccaactcagagaatctttacatctggagatctatagcagggctatccctagtgacatgcgtgaagaagcttggaaatggtgctgggtaggagctgagtgtgcagaatgtggaaaggcattctaaaccaaaggaagaacacgagtaaagatgatgaagcagggataaggctaaaatgaaatttgtgatctgatccacatacaagcacagtgtagtacagctggaatatagagaagagcttgaagacttatgagcaactatcccggtactcttggaggctctgcaaccacagtttgagaaactccgcgttcaaagttaaaaactgtcacctgaatagttaataacatcaaagattgtgaaagcaagtataaataacacagagattaaaataatgaggcaggatcag

SEQ ID NO: 2365 - protein, 89 aa, Homo sapiens [sequence omitted]

SEQ ID NO: 2366 - DNA, 909 bp, Homo sapiens
ctgaaaagccgacctacatgcagagaaaggcgggaggggctgctgggagaagtctgctggagcttgttcatgctgagaggttgggggtgtgatttgaggtgcggaagacctacttaaaacctgagagtctcgaataggagaggcgctttcagatcagcccgagtcttctgcagcgcacaggagctagtcgtactgaaaagaatgaagttggacttgtccaggcgagtttcggacagtgctgggctgccctgctctgatctcctgggtgtcttcacctcctctggttcctaagtcggctgctgcaccagcacccatcaaactctcctggaagaggaagtgacagctcaccggtagcctagaaggcccctgtgggcagaagcatggacttactcctcctcatggagatgcggctgagccatatttccttggcacctctctggaaccttcgacaaccaccacctcagacactaaccagactttaggtccattcctttcatggctaaaatgagacagtccacaatgttgattttatttgtaggggatgtcaggattccagaaaagcagacttggaaagcaacaaaacgttaacttgcagctcactgaggcccttacacttgttctgggcacctctgtatgttaaaagaagtccaatatctttagctgctggttataggtggccatatgtttctgcacagaaatggggctccccttgctagactaattttctaatttttcctcaagcttcattgattcatattcttctacttgaccctgactgtcaggaccaacaacaccaaataacaccaaagtctcttgctcctgtcctcagaacctctcagaggcatcctctgccctgttggagccattttatttcaggttgatccttaattaaattcagcgagatgcagg

SEQ ID NO: 2367 - protein, 33 aa, Homo sapiens
MDLLLLMEMRLSHISLAPLWNLRQPPPQTLTRL

SEQ ID NO: 2368 - DNA, 1058 bp, Homo sapiens
agaacaccacaggcaggacctcccagcaaaggcctccagatgctgtgaaaacctaaggctcgtcctcctcctggcttcccaggttacccagccacaacacacagatgctgggtctgggacggctccactggaacctgagatgacctgagggtgtcccagtgatataacatatgaggaaagcagaaacaactaagaaatagactctgaatgtggcagattctagaactgagaggcggaagaggagcagatcttcactttccacacctcaaggtactcagccaatcacctgttcatgcctgagattgtgaatccaataggaaagtacaaggacatggagattgtcagagctgttgtatgatggtggcagcagagtcaagagtccagcggagaggcagcaagcatcccaaggatcccatgactgagaaccagcttctgtggtttagaagcaaggcgccaactggtatgagaagcacagacagatggtgccctgggaacactggctgtcacgtgctggaggaggttcctcagcaagtcaccttccctccatgggcctctgttggaaagaaggcatcaagatcattccagctatgattcctgagcttttaatatattctttctgatgattaagaaatatatctgtcgagcatggcagcttacgcctgtaatcctagcactttgtgaggccgaggcgggtggatcatgaggtcaggagttcaagaccagcctgaccaacatggtgaaacctcgtgtctactaaaaatacaaaaattagccgggtgttgtggtgtgtgcttgtaatcccagctactcgggaggctgaggcaggagaaacacttgaacccgggaggcggaggttgcagtgagctgacatcacgccactgccctccagcctgggtaacagagtgagactccatctcaaagaaaaaaagagatatatctgcatgtgacatggaaagaggctcagaatatcagacattttactacagatcttgaaaacagctctccaaaactaactccagatccaccctggggttctcaactccacatggttttctaaa

SEQ ID NO: 2369 - protein, 30 aa, Homo sapiens
MWQILELRGGRGADLHFPHLKVLSQSPVHA

SEQ ID NO: 2370 - DNA, 2450 bp, Homo sapiens
aggctcctccactgctccccaggcactgagatttctttaaaaccatcagacgggttttcacaaccccaaaccgatgtgtgtttgagtttcttccaaattcccacaaacggcagggagatacacctgtcctcctgggaatggggtgaaggaaaagggctgtctgagctggctacacttcccgggggaccacaaggttcctggctgctgccccatctcctgcagatgagggtggcatctggagtcagggaggcttgatctggggcctgggtgtctgtcgctcgctgggtgccagttcctgcctgatgattctaaatctggacactggcgtaaaagataacatctataggaaaccccctatctacagacagcatgctgccaggcgatcggatggggaggatggaagcttggaccaggataacaggaagcagaagagcagctggctgatgctcaagggggatgcagacacaaggaccaattctccagacctggacacccagtccttgtcccacagcagcgggaccgacagagaccctctccaaaggatggcaggggacagctttcactcacaatacaagatctatccgtatgactccctcatcgtcacaaaccgaattcgcgtgaaactgcccaaagacgtggaccggacgagactggagagacacttgtcgcccgaggagttccaggaagtgtttgggatgagcatcgaggagtttgaccgcctggccctctggaagaggaatgaccttaagaagaaagcccttttgttctgacggctgccagcctgccccactggtgtgtgccgggcgccgaggccaggggcccctggcgagaaccgcacacacccctcccacacaccttgctctggcttctctgtgtccatggggtgggcgggagggggtcccccagcaggtgcggcccctgcacctgccggcgacactcctgccggtagtttagggccgagacggctagcttcacgccacccttccccgctgtggcttggtgtcagggagaggctgtagagtggctgtgtcgggcatcagatggagcacacaggtggctgcagcccagcccaccttcccagcgttctcgaggtgccctggccccggtgctgggcacgtgggggacagaggtggccgggacgtgagctgtgaggcttgttgatgatggttgctgacaccatcatcgggggtgggcacacggcccttcggagcctgggcagcctggcctcacaggcagactcgcagacggggcagtgagcgtctgggacagtgccaagagtggggtgtgtgatttttgcaggcgtctgtgatgggtctctttagggacaaatgtcaacaagggacaagacagggcaccttccgccagcgcccctccatgcgctgcgttcctcctccagatcgacccctagatgcctacacaatatctttaaagtaacacagaagtttttattttattaaaaagtatagcctacttaaacgcgagatgacatatatagagtttaattttacggtccctccgcaggggagcggcctccagccttattctccaccgctcggatctgtgtggtttcagtctgttcttggtgtggtcctcatacacagagctccctgtctagtttcttttctttttcttttttctttttctcgtcacacaggtaaccttaaagacagacccctctaaagaacgctttgtaaatacatgtgaggtatagccaccactgttttccttgctgttatttttccaagtcttggggagaaaacatcctcctctgatggccaaagccctggaatcaagggtttccacgtaccctgcctaatacccgacgtagctcttgatgcaccgtccttgtgctgtggctggcggtgtctcagcctgaaacataaaccccacatgccccaggagcgatgtgctccctgaaacagacaaccacacgctgttggggagagaaggatggagataggatggagataggatggagatgtggctcttctcatctttgaagccagcagggcatcccggagcaggaggctggccgggctccccaagcgaaggcgttggtgtctgtcattaggtgtgtgttagggtgcagcaccggccgtcacaggatgctgataagcgcgctgagaggtggatgaaacaccaaagtctgtttccccgtccgcagtgggtgttgcctctttgtgtgtgtcccgatgttcctgcctgtgagtcggccttactccgtttccttagcgcccatgacacgccaagtcccgtttcgcactcggcttctcacccgcccagctcggctagggagggggagtttttagcacctaatatgcttcctgccattgcgcaatctgagcctgagcaactggaaacccccatttctcattagtgcaatgtcatatctgatcccaggaagcctggaaaataaaagacgatgcattataacttgcggaagtacaaga

SEQ ID NO: 2371 - protein, 155 aa, Homo sapiens
MILNLDTGVKDNIYRKPPIYRQHAARRSDGEDGSLDQDNRKQKSSWLMLKGDADTRTNSPDLDTQSLSHSSGTDRDPLQRMAGDSFHSQYKIYPYDSLIVTNRIRVKLPKDVDRTRLERHLSPEEFQEVFGMSIEEFDRLALWKRNDLKKKALLF

SEQ ID NO: 2372 - DNA, 2756 bp, Homo sapiens
ctactcttttcttatcttctgcagctggcaaaattttactcaatggcttttaaaggacaattttgatcattttagtgctttaatcctattctgagcagctaatttttagattctcaaggaaaacagcatgtttatatacaaggataattaggaagaggggcctttgttttggcgaatttgcagttggttggattcaaacaccagccaggatgcagaggcgcagatggagtgagccccctaaggtgttcttagttcaccgcccagccctctgccctcagcaatgtcgctcctctgccttgggactctggacagacttcaactcagggttggattagcaagtccttggacacagtctgggaacgtggatgaggcccacactccttcccctgggcaggggatctgggctgctccaccagacaggagagatggggctcgctgcaaataagcttttcatgcttgaaatattctactttgctttcccgtttccccttctatctgctgcctttgcccttccgtctggaggcagtgaaagtggccggagcacccccagcctctccgtgctctctgacagcaagccgcccccctccacctaccagcaggcacctcgccacttccacgtcccagacactggcgtaaaagataacatctataggaaaccccctatctacagacagcatgctgccaggcgatcggatggggaggatggaagcttggaccaggataacaggaagcagaagagcagctggctgatgctcaagggggatgcagacacaaggaccaattctccagacctggacacccagtccttgtcccacagcagcgggaccgacagagaccctctccaaaggatggcaggggacagctttcactcacaatacaagatctatccgtatgactccctcatcgtcacaaaccgaattcgcgtgaaactgcccaaagacgtggaccggacgagactggagagacacttgtcgcccgaggagttccaggaagtgtttgggatgagcatcgaggagtttgaccgcctggccctctggaagaggaatgaccttaagaagaaagcccttttgttctgacggctgccagcctgccccactggtgtgtgccgggcgccgaggccaggggcccctggcgagaaccgcacacacccctcccacacaccttgctctggcttctctgtgtccatggggtgggcgggagggggtcccccagcaggtgcggcccctgcacctgccggcgacactcctgccggtagtttagggccgagacggctagcttcacgccacccttccccgctgtggcttggtgtcagggagaggctgtagagtggctgtgtcgggcatcagatggagcacacaggtggctgcagcccagcccaccttcccagcgttctcgaggtgccctggccccggtgctgggcacgtgggggacagaggtggccgggacgtgagctgtgaggcttgttgatgatggttgctgacaccatcatcgggggtgggcacacggcccttcggagcctgggcagcctggcctcacaggcagactcgcagacggggcagtgagcgtctgggacagtgccaagagtggggtgtgtgatttttgcaggcgtctgtgatgggtctctttagggacaaatgtcaacaagggacaagacagggcaccttccgccagcgcccctccatgcgctgcgttcctcctccagatcgacccctagatgcctacacaatatctttaaagtaacacagaagtttttattttattaaaaagtatagcctacttaaacgcgagatgacatatatagagtttaattttacggtccctccgcaggggagcggcctccagccttattctccaccgctcggatctgtgtggtttcagtctgttcttggtgtggtcctcatacacagagctccctgtctagtttcttttctttttcttttttctttttctcgtcacacaggtaaccttaaagacagacccctctaaagaacgctttgtaaatacatgtgaggtatagccaccactgttttccttgctgttatttttccaagtcttggggagaaaacatcctcctctgatggccaaagccctggaatcaagggtttccacgtaccctgcctaatacccgacgtagctcttgatgcaccgtccttgtgctgtggctggcggtgtctcagcctgaaacataaaccccacatgccccaggagcgatgtgctccctgaaacagacaaccacacgctgttggggagagaaggatggagataggatggagataggatggagatgtggctcttctcatctttgaagccagcagggcatcccggagcaggaggctggccgggctccccaagcgaaggcgttggtgtctgtcattaggtgtgtgttagggtgcagcaccggccgtcacaggatgctgataagcgcgctgagaggtggatgaaacaccaaagtctgtttccccgtccgcagtgggtgttgcctctttgtgtgtgtcccgatgttcctgcctgtgagtcggccttactccgtttccttagcgcccatgacacgccaagtcccgtttcgcactcggcttctcacccgcccagctcggctagggagggggagtttttagcacctaatatgcttcctgccattgcgcaatctgagcctgagcaactggaaacccccatttctcattagtgcaatgtcatatctgatcccaggaagcctggaaaataaaagacgatgcattataacttgcggaagtacaaga

SEQ ID NO: 2373 - protein, 236 aa, Homo sapiens
MRPTLLPLGRGSGLLHQTGEMGLAANKLFMLEIFYFAFPFPLLSAAFALPSGGSESGRSTPSLSVLSDSKPPPSTYQQAPRHFHVPDTGVKDNIYRKPPIYRQHAARRSDGEDGSLDQDNRKQKSSWLMLKGDADTRTNSPDLDTQSLSHSSGTDRDPLQRMAGDSFHSQYKIYPYDSLIVTNRIRVKLPKDVDRTRLERHLSPEEFQEVFGMSIEEFDRLALWKRNDLKKKALLF

SEQ ID NO: 2374 - DNA, 3172 bp, Homo sapiens
cctcctcctctgctgtggaggagaaagggcctcctggggaagattaatgcttttgttttcgcctctgccggggaggcgagtctgtggcggcgtggctgagtcggcgggctctgcacagctctgagcatcctccccgggtgcaaggtgggaactgcgggcggggacaagcctggctccgcagaaggggagctgccgccgccgcggtggcactgcctgatgctcggcccagtgtgccggtgccccgctgggtgacagtggactcccagggcgcagcaggagcaggtgacagactgttggctgaaggtgagggtgtccaccctcgcaggcacacgttccagggagcacggcactcaagcagggccgtcagactgggctctggtgcccagaagctgtgcaggccggagagaagcactaccacccttcctgcgcgctatgtgtcaggtgcggccagatgtttgcagaaggcgaagagatgtatcttcaaggttcctccatctggcatccggcgtgtcgacaagcagccagaactgaagacagaaacaaggaaaccagaacttcctcagagagcatcatttctgtccctgcttccagcacctcagggtctccgagccgtgtgatttatgccaagcttggtggtgagatcctggactacagggacttggcagcccttcctaaaagtaaggccatctatgacatcgaccgccccgacatgatctcctactcaccctacatcagccactctgcaggggacaggcagagctacggcgagtcccctcagttgctctcgccaacgccgaccgagggggatcaggatgaccggtcctacaagcagtgtcggacctccagcccaagctccactgggtcggttagcctcgggcgctacactccgacctcacggtcaccacagcactacagccgtccagacactggcgtaaaagataacatctataggaaaccccctatctacagacagcatgctgccaggcgatcggatggggaggatggaagcttggaccaggataacaggaagcagaagagcagctggctgatgctcaagggggatgcagacacaaggaccaattctccagacctggacacccagtccttgtcccacagcagcgggaccgacagagaccctctccaaaggatggcaggggacagctttcactcacgattcccctattccaaatctgaccctctcccaggacatggaaagaatggcttggaccagcggaatgccaatctggccccctgtggagcagacccggatgccagctggggcatgcgagaatacaagatctatccgtatgactccctcatcgtcacaaaccgaattcgcgtgaaactgcccaaagacgtggaccggacgagactggagagacacttgtcgcccgaggagttccaggaagtgtttgggatgagcatcgaggagtttgaccgcctggccctctggaagaggaatgaccttaagaagaaagcccttttgttctgacggctgccagcctgccccactggtgtgtgccgggcgccgaggccaggggcccctggcgagaaccgcacacacccctcccacacaccttgctctggcttctctgtgtccatggggtgggcgggagggggtcccccagcaggtgcggcccctgcacctgccggcgacactcctgccggtagtttagggccgagacggctagcttcacgccacccttccccgctgtggcttggtgtcagggagaggctgtagagtggctgtgtcgggcatcagatggagcacacaggtggctgcagcccagcccaccttcccagcgttctcgaggtgccctggccccggtgctgggcacgtgggggacagaggtggccgggacgtgagctgtgaggcttgttgatgatggttgctgacaccatcatcgggggtgggcacacggcccttcggagcctgggcagcctggcctcacaggcagactcgcagacggggcagtgagcgtctgggacagtgccaagagtggggtgtgtgatttttgcaggcgtctgtgatgggtctctttagggacaaatgtcaacaagggacaagacagggcaccttccgccagcgcccctccatgcgctgcgttcctcctccagatcgacccctagatgcctacacaatatctttaaagtaacacagaagtttttattttattaaaaagtatagcctacttaaacgcgagatgacatatatagagtttaattttacggtccctccgcaggggagcggcctccagccttattctccaccgctcggatctgtgtggtttcagtctgttcttggtgtggtcctcatacacagagctccctgtctagtttcttttctttttcttttttctttttctcgtcacacaggtaaccttaaagacagacccctctaaagaacgctttgtaaatacatgtgaggtatagccaccactgttttccttgctgttatttttccaagtcttggggagaaaacatcctcctctgatggccaaagccctggaatcaagggtttccacgtaccctgcctaatacccgacgtagctcttgatgcaccgtccttgtgctgtggctggcggtgtctcagcctgaaacataaaccccacatgccccaggagcgatgtgctccctgaaacagacaaccacacgctgttggggagagaaggatggagataggatggagataggatggagatgtggctcttctcatctttgaagccagcagggcatcccggagcaggaggctggccgggctccccaagcgaaggcgttggtgtctgtcattaggtgtgtgttagggtgcagcaccggccgtcacaggatgctgataagcgcgctgagaggtggatgaaacaccaaagtctgtttccccgtccgcagtgggtgttgcctctttgtgtgtgtcccgatgttcctgcctgtgagtcggccttactccgtttccttagcgcccatgacacgccaagtcccgtttcgcactcggcttctcacccgcccagctcggctagggagggggagtttttagcacctaatatgcttcctgccattgcgcaatctgagcctgagcaactggaaacccccatttctcattagtgcaatgtcatatctgatcccaggaagcctggaaaataaaagacgatgcattataacttgcggaagtacaaga

SEQ ID NO: 2375 - protein, 346 aa, Homo sapiens
MFAEGEEMYLQGSSIWHPACRQAARTEDRNKETRTSSESIISVPASSTSGSPSRVIYAKLGGEILDYRDLAALPKSKAIYDIDRPDMISYSPYISHSAGDRQSYGESPQLLSPTPTEGDQDDRSYKQCRTSSPSSTGSVSLGRYTPTSRSPQHYSRPDTGVKDNIYRKPPIYRQHAARRSDGEDGSLDQDNRKQKSSWLMLKGDADTRTNSPDLDTQSLSHSSGTDRDPLQRMAGDSFHSRFPYSKSDPLPGHGKNGLDQRNANLAPCGADPDASWGMREYKIYPYDSLIVTNRIRVKLPKDVDRTRLERHLSPEEFQEVFGMSIEEFDRLALWKRNDLKKKALLF

SEQ ID NO: 2376 - DNA, 490 bp, Homo sapiens
agcatgtggctgcgacctggccgagggcggcttcttcgtgcggcagggcgagtacatctgcacgctggatggccgggctccccaagcgaaggcgttggtgtctgtcattaggtgtgtgttagggtgcagcaccggccgtcacaggatgctgataagcgcgctgagaggtggatgaaacaccaaagtctgtttccccgtccgcagtgggtgttgcctctttgtgtgtgtcccgatgttcctgcctgtgagtcggccttactccgtttccttagcgcccatgacacgccaagtcccgtttcgcactcggcttctcacccgcccagctcggctagggagggggagtttttagcacctaatatgcttcctgccattgcgcaatctgagcctgagcaactggaaacccccatttctcattagtgcaatgtcatatctgatcccaggaagcctggaaaataaaagacgatgcattataacttgcggaagtacaaga

SEQ ID NO: 2377 - protein, 35 aa, Homo sapiens
MWLRPGRGRLLRAAGRVHLHAGWPGSPSEGVGVCH

SEQ ID NO: 2378 - DNA, 3545 bp, Homo sapiens
tgcggcggcgctgcctggcgtgtgcgcaaggagcgggcgcggagccggcgggcgggcggaggatagcgcgggcgcggcacctgcgggcccgagggtctggctgtcgcagcgccgggccgccccgactccgagcggctgctgagatgagtgcagtgtcgcagccccaggctgctcccagcccgctggagaagtcgcccagcacggcgatcctgtgcaacacgtgtgggaatgtgtgcaagggcgaggtgctgcgggtgcaggacaagtacttccacatcaagtgcttcgtctgtaaagcatgtggctgcgacctggccgagggcggcttcttcgtgcggcagggcgagtacatctgcacgctggactaccagaggctctacggcacccgctgcttcagctgcgaccagttcattgagggtgaggtggtgtcggcgctgggcaagacctaccaccccgactgcttcgtgtgtgccgtctgccggctgcccttcccccccggggaccgagtgaccttcaacgggaaggaatgcatgtgccagaagtgttccctgcccgtatcggtgggcagcagcgcgcacctgtcccagggcctccgaagttgtgggggctgcggcacagaaatcaagaatggccaggccctggtagccttggacaagcactggcacttgggctgttttaagtgcaagagctgtgggaagctcctgaatgccgagtacatcagcaaggatgggctgccctactgcgaagctgactatcacgccaagttcggcatccgctgtgacagctgtgagaaatacatcacggggcgcgtgctggaggccggagagaagcactaccacccttcctgcgcgctatgtgtcaggtgcggccagatgtttgcagaaggcgaagagatgtatcttcaaggttcctccatctggcatccggcgtgtcgacaagcagccagaactgaagacagaaacaaggaaaccagaacttcctcagagagcatcatttctgtccctgcttccagcacctcagggtctccgagccgtgtgatttatgccaagcttggtggtgagatcctggactacagggacttggcagcccttcctaaaagtaaggccatctatgacatcgaccgccccgacatgatctcctactcaccctacatcagccactctgcaggggacaggcagagctacggcgagggggatcaggatgaccggtcctacaagcagtgtcggacctccagcccaagctccactgggtcggttagcctcgggcgctacactccgacctcacggtcaccacagcactacagccgtccaggcagtgaaagtggccggagcacccccagcctctccgtgctctctgacagcaagccgcccccctccacctaccagcaggcacctcgccacttccacgtcccagacactggcgtaaaagataacatctataggaaaccccctatctacagacagcatgctgccaggcgatcggatggggaggatggaagcttggaccaggataacaggaagcagaagagcagctggctgatgctcaagggggatgcagacacaaggaccaattctccagacctggacacccagtccttgtcccacagcagcgggaccgacagagaccctctccaaaggatggcaggggacagctttcactcacaatacaagatctatccgtatgactccctcatcgtcacaaaccgaattcgcgtgaaactgcccaaagacgtggaccggacgagactggagagacacttgtcgcccgaggagttccaggaagtgtttgggatgagcatcgaggagtttgaccgcctggccctctggaagaggaatgaccttaagaagaaagcccttttgttctgacggctgccagcctgccccactggtgtgtgccgggcgccgaggccaggggcccctggcgagaaccgcacacacccctcccacacaccttgctctggcttctctgtgtccatggggtgggcgggagggggtcccccagcaggtgcggcccctgcacctgccggcgacactcctgccggtagtttagggccgagacggctagcttcacgccacccttccccgctgtggcttggtgtcagggagaggctgtagagtggctgtgtcgggcatcagatggagcacacaggtggctgcagcccagcccaccttcccagcgttctcgaggtgccctggccccggtgctgggcacgtgggggacagaggtggccgggacgtgagctgtgaggcttgttgatgatggttgctgacaccatcatcgggggtgggcacacggcccttcggagcctgggcagcctggcctcacaggcagactcgcagacggggcagtgagcgtctgggacagtgccaagagtggggtgtgtgatttttgcaggcgtctgtgatgggtctctttagggacaaatgtcaacaagggacaagacagggcaccttccgccagcgcccctccatgcgctgcgttcctcctccagatcgacccctagatgcctacacaatatctttaaagtaacacagaagtttttattttattaaaaagtatagcctacttaaacgcgagatgacatatatagagtttaattttacggtccctccgcaggggagcggcctccagccttattctccaccgctcggatctgtgtggtttcagtctgttcttggtgtggtcctcatacacagagctccctgtctagtttcttttctttttcttttttctttttctcgtcacacaggtaaccttaaagacagacccctctaaagaacgctttgtaaatacatgtgaggtatagccaccactgttttccttgctgttatttttccaagtcttggggagaaaacatcctcctctgatggccaaagccctggaatcaagggtttccacgtaccctgcctaatacccgacgtagctcttgatgcaccgtccttgtgctgtggctggcggtgtctcagcctgaaacataaaccccacatgccccaggagcgatgtgctccctgaaacagacaaccacacgctgttggggagagaaggatggagataggatggagataggatggagatgtggctcttctcatctttgaagccagcagggcatcccggagcaggaggctggccgggctccccaagcgaaggcgttggtgtctgtcattaggtgtgtgttagggtgcagcaccggccgtcacaggatgctgataagcgcgctgagaggtggatgaaacaccaaagtctgtttccccgtccgcagtgggtgttgcctctttgtgtgtgtcccgatgttcctgcctgtgagtcggccttactccgtttccttagcgcccatgacacgccaagtcccgtttcgcactcggcttctcacccgcccagctcggctagggagggggagtttttagcacctaatatgcttcctgccattgcgcaatctgagcctgagcaactggaaacccccatttctcattagtgcaatgtcatatctgatcccaggaagcctggaaaataaaagacgatgcattataacttgcggaagtacaaga

SEQ ID NO: 2379 - protein, 573 aa, Homo sapiens
MSAVSQPQAAPSPLEKSPSTAILCNTCGNVCKGEVLRVQDKYFHIKCFVCKACGCDLAEGGFFVRQGEYICTLDYQRLYGTRCFSCDQFIEGEVVSALGKTYHPDCFVCAVCRLPFPPGDRVTFNGKECMCQKCSLPVSVGSSAHLSQGLRSCGGCGTEIKNGQALVALDKHWHLGCFKCKSCGKLLNAEYISKDGLPYCEADYHAKFGIRCDSCEKYITGRVLEAGEKHYHPSCALCVRCGQMFAEGEEMYLQGSSIWHPACRQAARTEDRNKETRTSSESIISVPASSTSGSPSRVIYAKLGGEILDYRDLAALPKSKAIYDIDRPDMISYSPYISHSAGDRQSYGEGDQDDRSYKQCRTSSPSSTGSVSLGRYTPTSRSPQHYSRPGSESGRSTPSLSVLSDSKPPPSTYQQAPRHFHVPDTGVKDNIYRKPPIYRQHAARRSDGEDGSLDQDNRKQKSSWLMLKGDADTRTNSPDLDTQSLSHSSGTDRDPLQRMAGDSFHSQYKIYPYDSLIVTNRIRVKLPKDVDRTRLERHLSPEEFQEVFGMSIEEFDRLALWKRNDLKKKALLF

SEQ ID NO: 2380 - DNA, 3662 bp, Homo sapiens
tgcggcggcgctgcctggcgtgtgcgcaaggagcgggcgcggagccggcgggcgggcggaggatagcgcgggcgcggcacctgcgggcccgagggtctggctgtcgcagcgccgggccgccccgactccgagcggctgctgagatgagtgcagtgtcgcagccccaggctgctcccagcccgctggagaagtcgcccagcacggcgatcctgtgcaacacgtgtgggaatgtgtgcaagggcgaggtgctgcgggtgcaggacaagtacttccacatcaagtgcttcgtctgtaaagcatgtggctgcgacctggccgagggcggcttcttcgtgcggcagggcgagtacatctgcacgctggactaccagaggctctacggcacccgctgcttcagctgcgaccagttcattgagggtgaggtggtgtcggcgctgggcaagacctaccaccccgactgcttcgtgtgtgccgtctgccggctgcccttcccccccggggaccgagtgaccttcaacgggaaggaatgcatgtgccagaagtgttccctgcccgtatcggtgggcagcagcgcgcacctgtcccagggcctccgaagttgtgggggctgcggcacagaaatcaagaatggccaggccctggtagccttggacaagcactggcacttgggctgttttaagtgcaagagctgtgggaagctcctgaatgccgagtacatcagcaaggatgggctgccctactgcgaagctgactatcacgccaagttcggcatccgctgtgacagctgtgagaaatacatcacggggcgcgtgctggaggccggagagaagcactaccacccttcctgcgcgctatgtgtcaggtgcggccagatgtttgcagaaggcgaagagatgtatcttcaaggttcctccatctggcatccggcgtgtcgacaagcagccagaactgaagacagaaacaaggaaaccagaacttcctcagagagcatcatttctgtccctgcttccagcacctcagggtctccgagccgtgtgatttatgccaagcttggtggtgagatcctggactacagggacttggcagcccttcctaaaagtaaggccatctatgacatcgaccgccccgacatgatctcctactcaccctacatcagccactctgcaggggacaggcagagctacggcgagggggatcaggatgaccggtcctacaagcagtgtcggacctccagcccaagctccactgggtcggttagcctcgggcgctacactccgacctcacggtcaccacagcactacagccgtccaggcagtgaaagtggccggagcacccccagcctctccgtgctctctgacagcaagccgcccccctccacctaccagcaggcacctcgccacttccacgtcccagacactggcgtaaaagataacatctataggaaaccccctatctacagacagcatgctgccaggcgatcggatggggaggatggaagcttggaccaggataacaggaagcagaagagcagctggctgatgctcaagggggatgcagacacaaggaccaattctccagacctggacacccagtccttgtcccacagcagcgggaccgacagagaccctctccaaaggatggcaggggacagctttcactcacgattcccctattccaaatctgaccctctcccaggacatggaaagaatggcttggaccagcggaatgccaatctggccccctgtggagcagacccggatgccagctggggcatgcgagaatacaagatctatccgtatgactccctcatcgtcacaaaccgaattcgcgtgaaactgcccaaagacgtggaccggacgagactggagagacacttgtcgcccgaggagttccaggaagtgtttgggatgagcatcgaggagtttgaccgcctggccctctggaagaggaatgaccttaagaagaaagcccttttgttctgacggctgccagcctgccccactggtgtgtgccgggcgccgaggccaggggcccctggcgagaaccgcacacacccctcccacacaccttgctctggcttctctgtgtccatggggtgggcgggagggggtcccccagcaggtgcggcccctgcacctgccggcgacactcctgccggtagtttagggccgagacggctagcttcacgccacccttccccgctgtggcttggtgtcagggagaggctgtagagtggctgtgtcgggcatcagatggagcacacaggtggctgcagcccagcccaccttcccagcgttctcgaggtgccctggccccggtgctgggcacgtgggggacagaggtggccgggacgtgagctgtgaggcttgttgatgatggttgctgacaccatcatcgggggtgggcacacggcccttcggagcctgggcagcctggcctcacaggcagactcgcagacggggcagtgagcgtctgggacagtgccaagagtggggtgtgtgatttttgcaggcgtctgtgatgggtctctttagggacaaatgtcaacaagggacaagacagggcaccttccgccagcgcccctccatgcgctgcgttcctcctccagatcgacccctagatgcctacacaatatctttaaagtaacacagaagtttttattttattaaaaagtatagcctacttaaacgcgagatgacatatatagagtttaattttacggtccctccgcaggggagcggcctccagccttattctccaccgctcggatctgtgtggtttcagtctgttcttggtgtggtcctcatacacagagctccctgtctagtttcttttctttttcttttttctttttctcgtcacacaggtaaccttaaagacagacccctctaaagaacgctttgtaaatacatgtgaggtatagccaccactgttttccttgctgttatttttccaagtcttggggagaaaacatcctcctctgatggccaaagccctggaatcaagggtttccacgtaccctgcctaatacccgacgtagctcttgatgcaccgtccttgtgctgtggctggcggtgtctcagcctgaaacataaaccccacatgccccaggagcgatgtgctccctgaaacagacaaccacacgctgttggggagagaaggatggagataggatggagataggatggagatgtggctcttctcatctttgaagccagcagggcatcccggagcaggaggctggccgggctccccaagcgaaggcgttggtgtctgtcattaggtgtgtgttagggtgcagcaccggccgtcacaggatgctgataagcgcgctgagaggtggatgaaacaccaaagtctgtttccccgtccgcagtgggtgttgcctctttgtgtgtgtcccgatgttcctgcctgtgagtcggccttactccgtttccttagcgcccatgacacgccaagtcccgtttcgcactcggcttctcacccgcccagctcggctagggagggggagtttttagcacctaatatgcttcctgccattgcgcaatctgagcctgagcaactggaaacccccatttctcattagtgcaatgtcatatctgatcccaggaagcctggaaaataaaagacgatgcattataacttgcggaagtacaaga

SEQ ID NO: 2381 - protein, 612 aa, Homo sapiens
MSAVSQPQAAPSPLEKSPSTAILCNTCGNVCKGEVLRVQDKYFHIKCFVCKACGCDLAEGGFFVRQGEYICTLDYQRLYGTRCFSCDQFIEGEVVSALGKTYHPDCFVCAVCRLPFPPGDRVTFNGKECMCQKCSLPVSVGSSAHLSQGLRSCGGCGTEIKNGQALVALDKHWHLGCFKCKSCGKLLNAEYISKDGLPYCEADYHAKFGIRCDSCEKYITGRVLEAGEKHYHPSCALCVRCGQMFAEGEEMYLQGSSIWHPACRQAARTEDRNKETRTSSESIISVPASSTSGSPSRVIYAKLGGEILDYRDLAALPKSKAIYDIDRPDMISYSPYISHSAGDRQSYGEGDQDDRSYKQCRTSSPSSTGSVSLGRYTPTSRSPQHYSRPGSESGRSTPSLSVLSDSKPPPSTYQQAPRHFHVPDTGVKDNIYRKPPIYRQHAARRSDGEDGSLDQDNRKQKSSWLMLKGDADTRTNSPDLDTQSLSHSSGTDRDPLQRMAGDSFHSRFPYSKSDPLPGHGKNGLDQRNANLAPCGADPDASWGMREYKIYPYDSLIVTNRIRVKLPKDVDRTRLERHLSPEEFQEVFGMSIEEFDRLALWKRNDLKKKALLF

SEQ ID NO: 2382 - DNA, 1532 bp, Homo sapiens
gagcaggcttggcgttgatttgcctctgtgagtggggagagcagggctttgtattttcacgctgaaaatcactgtctctcctggaagaaggagaaacaggtagccgttgagagtaacgagatgttagtgtattcggaacggaactgctcagtcttcaattttggccttatcttgtcaaggtcctgtagcccaatcccaaatttccaagctctctggcctggtatcagtcttgtccttggtggtgcaggaggcagggtacggcaaaagacagacgggcccgagcccgccgcccgctgcagctgccaggcgatcggatggggaggatggaagcttggaccaggataacaggaagcagaagagcagctggctgatgctcaagggggatgcagacacaaggaccaattctccagacctggacacccagtccttgtcccacagcagcgggaccgacagagaccctctccaaaggatggcaggggacagctttcactcacgtgagtggttcttttgaagaaggagccgtgatgtgcacaaaatgcctcgcggcaaagaggccccagaactcagagctatccccctacatctaagccttgcctgttaaaaagcatgaaagcaaagcccacaaatctaaggaccgaccggaaggaaatatggggcttttgcagtttgccggcttcccaagaactgtccccgagccagtgtgctaacgagggccacgcctgcatgtcccctcacagatttccaaggtgtgcaagaatgcagaaacccagacctgctcctgggctgtttaggagaaaggcgtccgggctgccgggtggaagtcagggcctgttccctccagagcagacatgggcatggtccggctgatgagtgcagacttggagttggtgatgggcaccatccctgtcccctgtgactcatcctgaacgaggcacagcctcaggcttcatagagagacagtgatggtgtctgcctgaccctaggggtgttttgaagactgaatcaggagtgattttcaaatgtagagaaaactccagataatgctgtttgcttccggccgctgtaaatcataggtgaaaaccagtagcaagtgctcactcagtgcctcccagaagcggtctgcgggtctcagctgggctgggggcagttttcattgggcaaggcttgggcttagcttcgaagcaggggctgggagaggatggatgggggtgtgagagcagaagaaagacctggctttgcagtgaggcagtcccaagttcaaatctgagctcaccactgacccgtcgtgtgatgggcgccaggtgttaggagactggaactgggtatgtgtgtggcattcggccggccatagtagctgctcagtaaacagaaactgtttctcatcctcatcctcatcctcatgcctgcaaactgtaaaccgtcctacttaacaatgaaagtagaaaagtgtttcaatgtgacaggaaagagtgaagacacagaagcttggaaatgatgatgtgttaaagaatcactttaaacaaagaaaggtg

SEQ ID NO: 2383 - protein, 74 aa, Homo sapiens
MLVYSERNCSVFNFGLILSRSCSPIPNFQALWPGISLVLGGAGGRVRQKTDGPEPAARCSCQAIGWGGWKLGPG

SEQ ID NO: 2384 - DNA, 2577 bp, Homo sapiens
tgcggcggcgctgcctggcgtgtgcgcaaggagcgggcgcggagccggcgggcgggcggaggatagcgcgggcgcggcacctgcgggcccgagggtctggctgtcgcagcgccgggccgccccgactccgagcggctgctgagatgagtgcagtgtcgcagccccaggctgctcccagcccgctggagaagtcgcccagcacggcgatcctgtgcaacacgtgtgggaatgtgtgcaagggcgaggtgctgcgggtgcaggacaagtacttccacatcaagtgcttcgtctgtaaagcatgtggctgcgacctggccgagggcggcttcttcgtgcggcagggcgagtacatctgcacgctggactaccagaggctctacggcacccgctgcttcagctgcgaccagttcattgagggtgaggtggtgtcggcgctgggcaagacctaccaccccgactgcttcgtgtgtgccgtctgccggctgcccttcccccccggggaccgagtgaccttcaacgggaaggaatgcatgtgccagaagtgttccctgcccgtatcggtgggcagcagcgcgcacctgtcccagggcctccgaagttgtgggggctgcggcacagaaatcaagaatggccaggccctggtagccttggacaagcactggcacttgggctgttttaagtgcaagagctgtgggaagctcctgaatgccgagtacatcagcaaggatgggctgccctactgcgaagctgactatcacgccaagttcggcatccgctgtgacagctgtgagaaatacatcacggggcgcgtgctggaggccggagagaagcactaccacccttcctgcgcgctatgtgtcaggtgcggccagatgtttgcagaaggcgaagagatgtatcttcaaggttcctccatctggcatccggcgtgtcgacaagcagccagaactgaagacagaaacaaggaaaccagaacttcctcagagagcatcatttctgtccctgcttccagcacctcagggtctccgagccgtgtgatttatgccaagcttggtggtgagatcctggactacagggacttggcagcccttcctaaaagtaaggccatctatgacatcgaccgccccgacatgatctcctactcaccctacatcagccactctgcaggggacaggcagagctacggcgagtcccctcagttgctctcgccaacgccgaccgagggggatcaggatgaccggtcctacaagcagtgtcggacctccagcccaagctccactgggtcggttagcctcgggcgctacactccgacctcacggtcaccacagcactacagccgtccagctgccaggcgatcggatggggaggatggaagcttggaccaggataacaggaagcagaagagcagctggctgatgctcaagggggatgcagacacaaggaccaattctccagacctggacacccagtccttgtcccacagcagcgggaccgacagagaccctctccaaaggatggcaggggacagctttcactcacgtgagtggttcttttgaagaaggagccgtgatgtgcacaaaatgcctcgcggcaaagaggccccagaactcagagctatccccctacatctaagccttgcctgttaaaaagcatgaaagcaaagcccacaaatctaaggaccgaccggaaggaaatatggggcttttgcagtttgccggcttcccaagaactgtccccgagccagtgtgctaacgagggccacgcctgcatgtcccctcacagatttccaaggtgtgcaagaatgcagaaacccagacctgctcctgggctgtttaggagaaaggcgtccgggctgccgggtggaagtcagggcctgttccctccagagcagacatgggcatggtccggctgatgagtgcagacttggagttggtgatgggcaccatccctgtcccctgtgactcatcctgaacgaggcacagcctcaggcttcatagagagacagtgatggtgtctgcctgaccctaggggtgttttgaagactgaatcaggagtgattttcaaatgtagagaaaactccagataatgctgtttgcttccggccgctgtaaatcataggtgaaaaccagtagcaagtgctcactcagtgcctcccagaagcggtctgcgggtctcagctgggctgggggcagttttcattgggcaaggcttgggcttagcttcgaagcaggggctgggagaggatggatgggggtgtgagagcagaagaaagacctggctttgcagtgaggcagtcccaagttcaaatctgagctcaccactgacccgtcgtgtgatgggcgccaggtgttaggagactggaactgggtatgtgtgtggcattcggccggccatagtagctgctcagtaaacagaaactgtttctcatcctcatcctcatcctcatgcctgcaaactgtaaaccgtcctacttaacaatgaaagtagaaaagtgtttcaatgtgacaggaaagagtgaagacacagaagcttggaaatgatgatgtgttaaagaatcactttaaacaaagaaaggtg

SEQ ID NO: 2385 - protein, 470 aa, Homo sapiens
MSAVSQPQAAPSPLEKSPSTAILCNTCGNVCKGEVLRVQDKYFHIKCFVCKACGCDLAEGGFFVRQGEYICTLDYQRLYGTRCFSCDQFIEGEVVSALGKTYHPDCFVCAVCRLPFPPGDRVTFNGKECMCQKCSLPVSVGSSAHLSQGLRSCGGCGTEIKNGQALVALDKHWHLGCFKCKSCGKLLNAEYISKDGLPYCEADYHAKFGIRCDSCEKYITGRVLEAGEKHYHPSCALCVRCGQMFAEGEEMYLQGSSIWHPACRQAARTEDRNKETRTSSESIISVPASSTSGSPSRVIYAKLGGEILDYRDLAALPKSKAIYDIDRPDMISYSPYISHSAGDRQSYGESPQLLSPTPTEGDQDDRSYKQCRTSSPSSTGSVSLGRYTPTSRSPQHYSRPAARRSDGEDGSLDQDNRKQKSSWLMLKGDADTRTNSPDLDTQSLSHSSGTDRDPLQRMAGDSFHSREWFF

SEQ ID NO: 2386 - DNA, 1396 bp, Homo sapiens
gtggatgaagaaatagtggcgtatctatgccagggagtattattcagccacagacaggaatgaaagcactgatcctgctacaacatggatgaactctgaaaacgtgtgcagtgaaagatgccagacgcaaagccacggggtagaggattccttcactatggaaaatccggagcaggcaaatccatggagacagaaagcagaggaggaggtcgaggctcagagaggcgaggggggcctacccaaggccatgtcattgagagaatgaggagccaggatccaaagaaggcaggctggatgctacctcctgggaagactccatgggccatggggacaatcggggacatttgtggctgagcccctgcaggtccggggcctcagagcacggaattaactgcatcctcagctcaccggctccctgtcaacagccctcctcccacacccaacgcacagacacaggaaaaggaagggtcgcagagctcctagtgagctgggggcagagacggaagccttccacgctgtacacgccacggcctggcccatggcacagaggagcagcctggggtctgagaagtcacacagcagagttagagccaagtctgagccagtgccagctctgcaccctttccagtgatggcacagccgcgtggccaggggcagccggcaccctcactcacagttcgggccactcataaagtatgagagtcaacagccaaacccttacattttaaggacgctccatgttctggaacaatccacccatggtggaggggcagggctggagggcctgtgtcttcaggctctgaggaacaccacggggccgtcaagtggacggagcaaatgtgcctgccggtgctcaggcctgtcccaggctcgtggccaaagccatggaggtgacagattccagcctgagattctctcttcctggctgtgtgactcaggccctgtgtcacgtgctggggttcagtgtccccgtgtataagatggagaggactgtccctccctctcaggctggggtagtataaccgggctctgtgattccagaggacatttagctggaaggtaccggcatggcacaggtcaccccctccctaccccatacttcctgctgagaaccagtgggtcacaggcggccatcgatgggctgatggagtcaaaaattagaagtgtcctcattccctgtgtcacctcctgttgtcattcccattctctcatagtgactggggcgtcccagtcatcggtacagtggccacatcctcccaattgccacccgaggagtgcctgaaacctcggccgctggttgttccagtgggcgcacggctccccaggcaggcggaagtcccaccctcgcccgcgtggggctcatgatggctcggatttcaaaatatatgagcaactg

SEQ ID NO: 2387 - protein, 78 aa, Homo sapiens
MPDAKPRGRGFLHYGKSGAGKSMETESRGGGRGSERRGGPTQGHVIERMRSQDPKKAGWMLPPGKTPWAMGTIGDICG

SEQ ID NO: 2388 - DNA, 553 bp, Homo sapiens
gcaaggagcgggcgcggagccggcgggcgggcggaggatagcgcgggcgcggcacctgcgggcccgagggtctggctgtcgcagcgccgggccgccccgactccgagcggctgctgagatgagtgcagtgtcgcagccccaggctgctcccagcccgctggagaagtcgcccagcacggcgatcctgtgcaacacgtgtgggaatgtgtgcaagggcgaggtgctgcgggtgcaggacaagtacttccacatcaagtgcttcgtctgtaaagcatgtggctgcgacctggccgagggcggcttcttcgtgcggcagggcgagtacatctgcacgctggactaccagaggctctacggcacccgctgcttcagctgcgaccagttcattgagggtgaggtggtgtcggcgctgggcaagacctaccaccccgactgcttcgtgtgtgccgtctgccggtgagtaagtgggcacctggcctctgcttcccctgcctctctgggccttttctccttccctccctcccttcccttcttcctcctgctccctcccgtg

SEQ ID NO: 2389 - protein, 113 aa, Homo sapiens
MSAVSQPQAAPSPLEKSPSTAILCNTCGNVCKGEVLRVQDKYFHIKCFVCKACGCDLAEGGFFVRQGEYICTLDYQRLYGTRCFSCDQFIEGEVVSALGKTYHPDCFVCAVCR

SEQ ID NO: 2390 - DNA, 4116 bp, Homo sapiens
acaaacgtggtctcagatgttgggtatcccccatgcccccgccaaaagcactccagatgacaaaaatccactacaaagctcttctttaaaaagaaagattctgagaagttccatcaaaagaagaaaagaagaaatgaagggatggtgccttgagtgaatgacccccttggagaacattcttccgcatccctcgcctcaagccagcctcagacagaaaactgaagattcagcagatccagtgcttcctgctcctcttctgcccaggaacacgcttgccttccccaaggcttccagaagctctgaggcaggaggcaccaagttctacctcatgtttggaggatcttgctagctatggccctcgtactcggctccctgttgctgctggggctgtgcgggaactccttttcaggagggcagccttcatccacagatgctcctaaggcttggaattatgaattgcctgcaacaaattatgagacccaagactcccataaagctggacccattggcattctctttgaactagtgcatatctttctctatgtggtacagccgcgtgatttcccagaagatactttgagaaaattcttacagaaggcatatgaatccaaaattgattatgacaagccagaaactgtaatcttaggtctaaagattgtctactatgaagcagggattattctatgctgtgtcctggggctgctgtttattattctgatgcctctggtggggtatttcttttgtatgtgtcgttgctgtaacaaatgtggtggagaaatgcaccagcgacagaaggaaaatgggcccttcctgaggaaatgctttgcaatctccctgttggtgatttgtataataataagcattggcatcttctatggttttgtggcaaatcaccaggtaagaacccggatcaaaaggagtcggaaactggcagatagcaatttcaaggacttgcgaactctcttgaatgaaactccagagcaaatcaaatatatattggcccagtacaacactaccaaggacaaggcgttcacagatctgaacagtatcaattcagtgctaggaggcggaattcttgaccgactgagacccaacatcatccctgttcttgatgagattaagtccatggcaacagcgatcaaggagaccaaagaggcgttggagaacatgaacagcaccttgaagagcttgcaccaacaaagtacacagcttagcagcagtctgaccagcgtgaaaactagcctgcggtcatctctcaatgaccctctgtgcttggtgcatccatcaagtgaaacctgcaacagcatcagattgtctctaagccagctgaatagcaaccctgaactgaggcagcttccacccgtggatgcagaacttgacaacgttaataacgttcttaggacagatttggatggcctggtccaacagggctatcaatcccttaatgatatacctgacagagtacaacgccaaaccacgactgtcgtagcaggtatcaaaagggtcttgaattccattggttcagatatcgacaatgtaactcagcgtcttcctattcaggatatactctcagcattctctgtttatgttaataacactgaaagttacatccacagaaatttacctacattggaagagtatgattcatactggtggctgggtggcctggtcatctgctctctgctgaccctcatcgtgattttttactacctgggcttactgtgtggcgtgtgcggctatgacaggcatgccaccccgaccacccgaggctgtgtctccaacaccggaggcgtcttcctcatggttggagttggattaagtttcctcttttgctggatattgatgatcattgtggttcttacctttgtctttggtgcaaatgtggaaaaactgatctgtgaaccttacacgagcaaggaattattccgggttttggatacaccctacttactaaatgaagactgggaatactatctctctgggaagctatttaataaatcaaaaatgaagctcacttttgaacaagtttacagtgactgcaaaaaaaatagaggcacttacggcactcttcacctgcagaacagcttcaatatcagtgaacatctcaacattaatgagcatactggaagcataagcagtgaattggaaagtctgaaggtaaatcttaatatctttctgttgggtgcagcaggaagaaaaaaccttcaggattttgctgcttgtggaatagacagaatgaattatgacagctacttggctcagactggtaaatcccccgcaggagtgaatcttttatcatttgcatatgatctagaagcaaaagcaaacagtttgcccccaggaaatttgaggaactccctgaaaagagatgcacaaactattaaaacaattcaccagcaacgagtccttcctatagaacaatcactgagcactctataccaaagcgtcaagatacttcaacgcacagggaatggattgttggagagagtaactaggattctagcttctctggattttgctcagaacttcatcacaaacaatacttcctctgttattattgaggaaactaagaagtatgggagaacaataataggatattttgaacattatctgcagtggatcgagttctctatcagtgagaaagtggcatcgtgcaaacctgtggccaccgctctagatactgctgttgatgtctttctgtgtagctacattatcgaccccttgaatttgttttggtttggcataggaaaagctactgtatttttacttccggctctaatttttgcggtaaaactggctaagtactatcgtcgaatggattcggaggacgtgtacgatgatgttgaaactatacccatgaaaaatatggaaaatggtaataatggttatcataaagatcatgtatatggtattcacaatcctgttatgacaagcccatcacaacattgatagctgatgttgaaactgcttgagcatcaggatactcaaagtggaaaggatcacagatttttggtagtttctgggtctacaaggactttccaaatccaggagcaacgccagtggcaacgtagtgactcaggcgggcaccaaggcaacggcaccattggtctctgggtagtgctttaagaatgaacacaatcacgttatagtccatggtccatcactattcaaggatgactccctcccttcctgtctatttttgttttttacttttttacactgagtttctatttagacactacaacatatggggtgtttgttcccattggatgcatttctatcaaaactctatcaaatgtgatggctagattctaacatattgccatgtgtggagtgtgctgaacacacaccagtttacaggaaagatgcattttgtgtacagtaaacggtgtatataccttttgttaccacagagttttttaaacaaatgagtattataggactttcttctaaatgagctaaataagtcaccattgacttcttggtgctgttgaaaataatccattttcactaaaagtgtgtgaaacctacagcatattcttcacgcagagattttcatctattatactttatcaaagattggccatgttccacttggaaatggcatgcaaaagcaatcatagagaaacctgcgtaactccatctgacaaattcaaaagagagagagagatcttgagagagaaatgctgttcgttcaaaagtggagttgttttaacagatgccaattacggtgtacagtttaacagagttttctgttgcattacgataaacattaattggagtgcagctaacatgagtatcatcagactagtatcaagtgttctaaaatgaaatatgagaagatcctgtcacaattcttagatctggtgtccagcatggatgaaacctttgagtttggtccctaaatttgcatgaaagcacaaggtaaatattcatttgcttcaggagtttcatgttggatctgtcattatcaaaagtgatcagcaatgaagaactggtcggacaaaatttaacgttgatgtaatgaaattccagatgtaggcattccccccaggtcttttcatgtgcagattgcagttctgattcatttgaataaaaaggaacttggaaaacatg

SEQ ID NO: 2391 - protein, 865 aa, Homo sapiens
MALVLGSLLLLGLCGNSFSGGQPSSTDAPKAWNYELPATNYETQDSHKAGPIGILFELVHIFLYVVQPRDFPEDTLRKFLQKAYESKIDYDKPETVILGLKIVYYEAGIILCCVLGLLFIILMPLVGYFFCMCRCCNKCGGEMHQRQKENGPFLRKCFAISLLVICIIISIGIFYGFVANHQVRTRIKRSRKLADSNFKDLRTLLNETPEQIKYILAQYNTTKDKAFTDLNSINSVLGGGILDRLRPNIIPVLDEIKSMATAIKETKEALENMNSTLKSLHQQSTQLSSSLTSVKTSLRSSLNDPLCLVHPSSETCNSIRLSLSQLNSNPELRQLPPVDAELDNVNNVLRTDLDGLVQQGYQSLNDIPDRVQRQTTTVVAGIKRVLNSIGSDIDNVTQRLPIQDILSAFSVYVNNTESYIHRNLPTLEEYDSYWWLGGLVICSLLTLIVIFYYLGLLCGVCGYDRHATPTTRGCVSNTGGVFLMVGVGLSFLFCWILMIIVVLTFVFGANVEKLICEPYTSKELFRVLDTPYLLNEDWEYYLSGKLFNKSKMKLTFEQVYSDCKKNRGTYGTLHLQNSFNISEHLNINEHTGSISSELESLKVNLNIFLLGAAGRKNLQDFAACGIDRMNYDSYLAQTGKSPAGVNLLSFAYDLEAKANSLPPGNLRNSLKRDAQTIKTIHQQRVLPIEQSLSTLYQSVKILQRTGNGLLERVTRILASLDFAQNFITNNTSSVIIEETKKYGRTIIGYFEHYLQWIEFSISEKVASCKPVATALDTAVDVFLCSYIIDPLNLFWFGIGKATVFLLPALIFAVKLAKYYRRMDSEDVYDDVETIPMKNMENGNNGYHKDHVYGIHNPVMTSPSQH

SEQ ID NO: 2392 - DNA, 4375 bp, Homo sapiens
gcatctgctgaccaggcgcggggctgagcgcactccttccactgtactgggggtgtacagtgaggagtggacgggttcgctctgcgccccccttaccctagccatctgcgccgcctccctggcccctcagcaggtggtgcgggcccggacagcggctgggggccagaggaactgcggggagagcgtggtggtgccggtgcccgtccaacccaaactttttagtctgagtggtggcccgcgacgccccgcttgggtcttctttccatccactggggatgggggcgggggtgggggtagccggcggccgtggttccggagcgggagtcggaggtgagtgtgcgaactggaccggggccccagagacttcggactcgctctcggggagaacggtgaccgagggatggtgccttgagtgaatgacccccttggagaacattcttccgcatccctcgcctcaagccagcctcagacagaaaactgaagattcagcagatccagtgcttcctgctcctcttctgcccaggaacacgcttgccttccccaaggcttccagaagctctgaggcaggaggcaccaagttctacctcatgtttggaggatcttgctagctatggccctcgtactcggctccctgttgctgctggggctgtgcgggaactccttttcaggagggcagccttcatccacagatgctcctaaggcttggaattatgaattgcctgcaacaaattatgagacccaagactcccataaagctggacccattggcattctctttgaactagtgcatatctttctctatgtggtacagccgcgtgatttcccagaagatactttgagaaaattcttacagaaggcatatgaatccaaaattgattatgacaagccagaaactgtaatcttaggtctaaagattgtctactatgaagcagggattattctatgctgtgtcctggggctgctgtttattattctgatgcctctggtggggtatttcttttgtatgtgtcgttgctgtaacaaatgtggtggagaaatgcaccagcgacagaaggaaaatgggcccttcctgaggaaatgctttgcaatctccctgttggtgatttgtataataataagcattggcatcttctatggttttgtggcaaatcaccaggtaagaacccggatcaaaaggagtcggaaactggcagatagcaatttcaaggacttgcgaactctcttgaatgaaactccagagcaaatcaaatatatattggcccagtacaacactaccaaggacaaggcgttcacagatctgaacagtatcaattcagtgctaggaggcggaattcttgaccgactgagacccaacatcatccctgttcttgatgagattaagtccatggcaacagcgatcaaggagaccaaagaggcgttggagaacatgaacagcaccttgaagagcttgcaccaacaaagtacacagcttagcagcagtctgaccagcgtgaaaactagcctgcggtcatctctcaatgaccctctgtgcttggtgcatccatcaagtgaaacctgcaacagcatcagattgtctctaagccagctgaatagcaaccctgaactgaggcagcttccacccgtggatgcagaacttgacaacgttaataacgttcttaggacagatttggatggcctggtccaacagggctatcaatcccttaatgatatacctgacagagtacaacgccaaaccacgactgtcgtagcaggtatcaaaagggtcttgaattccattggttcagatatcgacaatgtaactcagcgtcttcctattcaggatatactctcagcattctctgtttatgttaataacactgaaagttacatccacagaaatttacctacattggaagagtatgattcatactggtggctgggtggcctggtcatctgctctctgctgaccctcatcgtgattttttactacctgggcttactgtgtggcgtgtgcggctatgacaggcatgccaccccgaccacccgaggctgtgtctccaacaccggaggcgtcttcctcatggttggagttggattaagtttcctcttttgctggatattgatgatcattgtggttcttacctttgtctttggtgcaaatgtggaaaaactgatctgtgaaccttacacgagcaaggaattattccgggttttggatacaccctacttactaaatgaagactgggaatactatctctctgggaagctatttaataaatcaaaaatgaagctcacttttgaacaagtttacagtgactgcaaaaaaaatagaggcacttacggcactcttcacctgcagaacagcttcaatatcagtgaacatctcaacattaatgagcatactggaagcataagcagtgaattggaaagtctgaaggtaaatcttaatatctttctgttgggtgcagcaggaagaaaaaaccttcaggattttgctgcttgtggaatagacagaatgaattatgacagctacttggctcagactggtaaatcccccgcaggagtgaatcttttatcatttgcatatgatctagaagcaaaagcaaacagtttgcccccaggaaatttgaggaactccctgaaaagagatgcacaaactattaaaacaattcaccagcaacgagtccttcctatagaacaatcactgagcactctataccaaagcgtcaagatacttcaacgcacagggaatggattgttggagagagtaactaggattctagcttctctggattttgctcagaacttcatcacaaacaatacttcctctgttattattgaggaaactaagaagtatgggagaacaataataggatattttgaacattatctgcagtggatcgagttctctatcagtgagaaagtggcatcgtgcaaacctgtggccaccgctctagatactgctgttgatgtctttctgtgtagctacattatcgaccccttgaatttgttttggtttggcataggaaaagctactgtatttttacttccggctctaatttttgcggtaaaactggctaagtactatcgtcgaatggattcggaggacgtgtacgatgatgttgaaactatacccatgaaaaatatggaaaatggtaataatggttatcataaagatcatgtatatggtattcacaatcctgttatgacaagcccatcacaacattgatagctgatgttgaaactgcttgagcatcaggatactcaaagtggaaaggatcacagatttttggtagtttctgggtctacaaggactttccaaatccaggagcaacgccagtggcaacgtagtgactcaggcgggcaccaaggcaacggcaccattggtctctgggtagtgctttaagaatgaacacaatcacgttatagtccatggtccatcactattcaaggatgactccctcccttcctgtctatttttgttttttacttttttacactgagtttctatttagacactacaacatatggggtgtttgttcccattggatgcatttctatcaaaactctatcaaatgtgatggctagattctaacatattgccatgtgtggagtgtgctgaacacacaccagtttacaggaaagatgcattttgtgtacagtaaacggtgtatataccttttgttaccacagagttttttaaacaaatgagtattataggactttcttctaaatgagctaaataagtcaccattgacttcttggtgctgttgaaaataatccattttcactaaaagtgtgtgaaacctacagcatattcttcacgcagagattttcatctattatactttatcaaagattggccatgttccacttggaaatggcatgcaaaagcaatcatagagaaacctgcgtaactccatctgacaaattcaaaagagagagagagatcttgagagagaaatgctgttcgttcaaaagtggagttgttttaacagatgccaattacggtgtacagtttaacagagttttctgttgcattacgataaacattaattggagtgcagctaacatgagtatcatcagactagtatcaagtgttctaaaatgaaatatgagaagatcctgtcacaattcttagatctggtgtccagcatggatgaaacctttgagtttggtccctaaatttgcatgaaagcacaaggtaaatattcatttgcttcaggagtttcatgttggatctgtcattatcaaaagtgatcagcaatgaagaactggtcggacaaaatttaacgttgatgtaatgaaattccagatgtaggcattccccccaggtcttttcatgtgcagattgcagttctgattcatttgaataaaaaggaacttggaaaacatg

SEQ ID NO: 2393 - protein, 865 aa, Homo sapiens; identical to SEQ ID NO: 2391

SEQ ID NO: 2394 - DNA, 4307 bp, Homo sapiens
gcatctgctgaccaggcgcggggctgagcgcactccttccactgtactgggggtgtacagtgaggagtggacgggttcgctctgcgccccccttaccctagccatctgcgccgcctccctggcccctcagcaggtggtgcgggcccggacagcggctgggggccagaggaactgcggggagagcgtggtggtgccggtgcccgtccaacccaaactttttagtctgagtggtggcccgcgacgccccgcttgggtcttctttccatccactggggatgggggcgggggtgggggtagccggcggccgtggttccggagcgggagtcggagggatggtgccttgagtgaatgacccccttggagaacattcttccgcatccctcgcctcaagccagcctcagacagaaaactgaagattcagcagatccagtgcttcctgctcctcttctgcccaggaacacgcttgccttccccaaggcttccagaagctctgaggcaggaggcaccaagttctacctcatgtttggaggatcttgctagctatggccctcgtactcggctccctgttgctgctggggctgtgcgggaactccttttcaggagggcagccttcatccacagatgctcctaaggcttggaattatgaattgcctgcaacaaattatgagacccaagactcccataaagctggacccattggcattctctttgaactagtgcatatctttctctatgtggtacagccgcgtgatttcccagaagatactttgagaaaattcttacagaaggcatatgaatccaaaattgattatgacaagccagaaactgtaatcttaggtctaaagattgtctactatgaagcagggattattctatgctgtgtcctggggctgctgtttattattctgatgcctctggtggggtatttcttttgtatgtgtcgttgctgtaacaaatgtggtggagaaatgcaccagcgacagaaggaaaatgggcccttcctgaggaaatgctttgcaatctccctgttggtgatttgtataataataagcattggcatcttctatggttttgtggcaaatcaccaggtaagaacccggatcaaaaggagtcggaaactggcagatagcaatttcaaggacttgcgaactctcttgaatgaaactccagagcaaatcaaatatatattggcccagtacaacactaccaaggacaaggcgttcacagatctgaacagtatcaattcagtgctaggaggcggaattcttgaccgactgagacccaacatcatccctgttcttgatgagattaagtccatggcaacagcgatcaaggagaccaaagaggcgttggagaacatgaacagcaccttgaagagcttgcaccaacaaagtacacagcttagcagcagtctgaccagcgtgaaaactagcctgcggtcatctctcaatgaccctctgtgcttggtgcatccatcaagtgaaacctgcaacagcatcagattgtctctaagccagctgaatagcaaccctgaactgaggcagcttccacccgtggatgcagaacttgacaacgttaataacgttcttaggacagatttggatggcctggtccaacagggctatcaatcccttaatgatatacctgacagagtacaacgccaaaccacgactgtcgtagcaggtatcaaaagggtcttgaattccattggttcagatatcgacaatgtaactcagcgtcttcctattcaggatatactctcagcattctctgtttatgttaataacactgaaagttacatccacagaaatttacctacattggaagagtatgattcatactggtggctgggtggcctggtcatctgctctctgctgaccctcatcgtgattttttactacctgggcttactgtgtggcgtgtgcggctatgacaggcatgccaccccgaccacccgaggctgtgtctccaacaccggaggcgtcttcctcatggttggagttggattaagtttcctcttttgctggatattgatgatcattgtggttcttacctttgtctttggtgcaaatgtggaaaaactgatctgtgaaccttacacgagcaaggaattattccgggttttggatacaccctacttactaaatgaagactgggaatactatctctctgggaagctatttaataaatcaaaaatgaagctcacttttgaacaagtttacagtgactgcaaaaaaaatagaggcacttacggcactcttcacctgcagaacagcttcaatatcagtgaacatctcaacattaatgagcatactggaagcataagcagtgaattggaaagtctgaaggtaaatcttaatatctttctgttgggtgcagcaggaagaaaaaaccttcaggattttgctgcttgtggaatagacagaatgaattatgacagctacttggctcagactggtaaatcccccgcaggagtgaatcttttatcatttgcatatgatctagaagcaaaagcaaacagtttgcccccaggaaatttgaggaactccctgaaaagagatgcacaaactattaaaacaattcaccagcaacgagtccttcctatagaacaatcactgagcactctataccaaagcgtcaagatacttcaacgcacagggaatggattgttggagagagtaactaggattctagcttctctggattttgctcagaacttcatcacaaacaatacttcctctgttattattgaggaaactaagaagtatgggagaacaataataggatattttgaacattatctgcagtggatcgagttctctatcagtgagaaagtggcatcgtgcaaacctgtggccaccgctctagatactgctgttgatgtctttctgtgtagctacattatcgaccccttgaatttgttttggtttggcataggaaaagctactgtatttttacttccggctctaatttttgcggtaaaactggctaagtactatcgtcgaatggattcggaggacgtgtacgatgatgttgaaactatacccatgaaaaatatggaaaatggtaataatggttatcataaagatcatgtatatggtattcacaatcctgttatgacaagcccatcacaacattgatagctgatgttgaaactgcttgagcatcaggatactcaaagtggaaaggatcacagatttttggtagtttctgggtctacaaggactttccaaatccaggagcaacgccagtggcaacgtagtgactcaggcgggcaccaaggcaacggcaccattggtctctgggtagtgctttaagaatgaacacaatcacgttatagtccatggtccatcactattcaaggatgactccctcccttcctgtctatttttgttttttacttttttacactgagtttctatttagacactacaacatatggggtgtttgttcccattggatgcatttctatcaaaactctatcaaatgtgatggctagattctaacatattgccatgtgtggagtgtgctgaacacacaccagtttacaggaaagatgcattttgtgtacagtaaacggtgtatataccttttgttaccacagagttttttaaacaaatgagtattataggactttcttctaaatgagctaaataagtcaccattgacttcttggtgctgttgaaaataatccattttcactaaaagtgtgtgaaacctacagcatattcttcacgcagagattttcatctattatactttatcaaagattggccatgttccacttggaaatggcatgcaaaagcaatcatagagaaacctgcgtaactccatctgacaaattcaaaagagagagagagatcttgagagagaaatgctgttcgttcaaaagtggagttgttttaacagatgccaattacggtgtacagtttaacagagttttctgttgcattacgataaacattaattggagtgcagctaacatgagtatcatcagactagtatcaagtgttctaaaatgaaatatgagaagatcctgtcacaattcttagatctggtgtccagcatggatgaaacctttgagtttggtccctaaatttgcatgaaagcacaaggtaaatattcatttgcttcaggagtttcatgttggatctgtcattatcaaaagtgatcagcaatgaagaactggtcggacaaaatttaacgttgatgtaatgaaattccagatgtaggcattccccccaggtcttttcatgtgcagattgcagttctgattcatttgaataaaaaggaacttggaaaacatg

SEQ ID NO: 2395 - protein, 865 aa, Homo sapiens; identical to SEQ ID NO: 2391

SEQ ID NO: 2396 - DNA, 4485 bp, Homo sapiens
agctgggtcctcatcccggagcgagagaggcatctgctgaccaggcgcggggctgagcgcactccttccactgtactgggggtgtacagtgaggagtggacgggttcgctctgcgccccccttaccctagccatctgcgccgcctccctggcccctcagcaggtggtgcgggcccggacagcggctgggggccagaggaactgcggggagagcgtggtggtgccggtgcccgtccaacccaaactttttagtctgagtggtggcccgcgacgccccgcttgggtcttctttccatccactggggatgggggcgggggtgggggtagccggcggccgtggttccggagcgggagtcggaggtgagtgtgcgaactggaccggggccccagagacttcggactcgctctcggggagaacggtgaccgaggagccccggtggagttgagctcagagtattgatgctagcagaagcagacagaccccagatagccttccagctgcgtgccagggatggtgccttgagtgaatgacccccttggagaacattcttccgcatccctcgcctcaagccagcctcagacagaaaactgaagattcagcagatccagtgcttcctgctcctcttctgcccaggaacacgcttgccttccccaaggcttccagaagctctgaggcaggaggcaccaagttctacctcatgtttggaggatcttgctagctatggccctcgtactcggctccctgttgctgctggggctgtgcgggaactccttttcaggagggcagccttcatccacagatgctcctaaggcttggaattatgaattgcctgcaacaaattatgagacccaagactcccataaagctggacccattggcattctctttgaactagtgcatatctttctctatgtggtacagccgcgtgatttcccagaagatactttgagaaaattcttacagaaggcatatgaatccaaaattgattatgacaagccagaaactgtaatcttaggtctaaagattgtctactatgaagcagggattattctatgctgtgtcctggggctgctgtttattattctgatgcctctggtggggtatttcttttgtatgtgtcgttgctgtaacaaatgtggtggagaaatgcaccagcgacagaaggaaaatgggcccttcctgaggaaatgctttgcaatctccctgttggtgatttgtataataataagcattggcatcttctatggttttgtggcaaatcaccaggtaagaacccggatcaaaaggagtcggaaactggcagatagcaatttcaaggacttgcgaactctcttgaatgaaactccagagcaaatcaaatatatattggcccagtacaacactaccaaggacaaggcgttcacagatctgaacagtatcaattcagtgctaggaggcggaattcttgaccgactgagacccaacatcatccctgttcttgatgagattaagtccatggcaacagcgatcaaggagaccaaagaggcgttggagaacatgaacagcaccttgaagagcttgcaccaacaaagtacacagcttagcagcagtctgaccagcgtgaaaactagcctgcggtcatctctcaatgaccctctgtgcttggtgcatccatcaagtgaaacctgcaacagcatcagattgtctctaagccagctgaatagcaaccctgaactgaggcagcttccacccgtggatgcagaacttgacaacgttaataacgttcttaggacagatttggatggcctggtccaacagggctatcaatcccttaatgatatacctgacagagtacaacgccaaaccacgactgtcgtagcaggtatcaaaagggtcttgaattccattggttcagatatcgacaatgtaactcagcgtcttcctattcaggatatactctcagcattctctgtttatgttaataacactgaaagttacatccacagaaatttacctacattggaagagtatgattcatactggtggctgggtggcctggtcatctgctctctgctgaccctcatcgtgattttttactacctgggcttactgtgtggcgtgtgcggctatgacaggcatgccaccccgaccacccgaggctgtgtctccaacaccggaggcgtcttcctcatggttggagttggattaagtttcctcttttgctggatattgatgatcattgtggttcttacctttgtctttggtgcaaatgtggaaaaactgatctgtgaaccttacacgagcaaggaattattccgggttttggatacaccctacttactaaatgaagactgggaatactatctctctgggaagctatttaataaatcaaaaatgaagctcacttttgaacaagtttacagtgactgcaaaaaaaatagaggcacttacggcactcttcacctgcagaacagcttcaatatcagtgaacatctcaacattaatgagcatactggaagcataagcagtgaattggaaagtctgaaggtaaatcttaatatctttctgttgggtgcagcaggaagaaaaaaccttcaggattttgctgcttgtggaatagacagaatgaattatgacagctacttggctcagactggtaaatcccccgcaggagtgaatcttttatcatttgcatatgatctagaagcaaaagcaaacagtttgcccccaggaaatttgaggaactccctgaaaagagatgcacaaactattaaaacaattcaccagcaacgagtccttcctatagaacaatcactgagcactctataccaaagcgtcaagatacttcaacgcacagggaatggattgttggagagagtaactaggattctagcttctctggattttgctcagaacttcatcacaaacaatacttcctctgttattattgaggaaactaagaagtatgggagaacaataataggatattttgaacattatctgcagtggatcgagttctctatcagtgagaaagtggcatcgtgcaaacctgtggccaccgctctagatactgctgttgatgtctttctgtgtagctacattatcgaccccttgaatttgttttggtttggcataggaaaagctactgtatttttacttccggctctaatttttgcggtaaaactggctaagtactatcgtcgaatggattcggaggacgtgtacgatgatgttgaaactatacccatgaaaaatatggaaaatggtaataatggttatcataaagatcatgtatatggtattcacaatcctgttatgacaagcccatcacaacattgatagctgatgttgaaactgcttgagcatcaggatactcaaagtggaaaggatcacagatttttggtagtttctgggtctacaaggactttccaaatccaggagcaacgccagtggcaacgtagtgactcaggcgggcaccaaggcaacggcaccattggtctctgggtagtgctttaagaatgaacacaatcacgttatagtccatggtccatcactattcaaggatgactccctcccttcctgtctatttttgttttttacttttttacactgagtttctatttagacactacaacatatggggtgtttgttcccattggatgcatttctatcaaaactctatcaaatgtgatggctagattctaacatattgccatgtgtggagtgtgctgaacacacaccagtttacaggaaagatgcattttgtgtacagtaaacggtgtatataccttttgttaccacagagttttttaaacaaatgagtattataggactttcttctaaatgagctaaataagtcaccattgacttcttggtgctgttgaaaataatccattttcactaaaagtgtgtgaaacctacagcatattcttcacgcagagattttcatctattatactttatcaaagattggccatgttccacttggaaatggcatgcaaaagcaatcatagagaaacctgcgtaactccatctgacaaattcaaaagagagagagagatcttgagagagaaatgctgttcgttcaaaagtggagttgttttaacagatgccaattacggtgtacagtttaacagagttttctgttgcattacgataaacattaattggagtgcagctaacatgagtatcatcagactagtatcaagtgttctaaaatgaaatatgagaagatcctgtcacaattcttagatctggtgtccagcatggatgaaacctttgagtttggtccctaaatttgcatgaaagcacaaggtaaatattcatttgcttcaggagtttcatgttggatctgtcattatcaaaagtgatcagcaatgaagaactggtcggacaaaatttaacgttgatgtaatgaaattccagatgtaggcattccccccaggtcttttcatgtgcagattgcagttctgattcatttgaataaaaaggaacttggaaaacatg

SEQ ID NO: 2397 - protein, 865 aa, Homo sapiens; identical to SEQ ID NO: 2391

SEQ ID NO: 2398 - DNA, 4278 bp, Homo sapiens
aaattgcattgggattaggcaacagaagggtctaatgcggccgggatgagacaggagagtttttaggagggtagctgcattctaagtaagggactctgcggggggaaaagaggcgcaagcgttgcaagaagggagtgcagggggttgagcaggcacctctacaggaaatggatgctgtccaggtgctggtgggcgccccagggctacgtggcgaagcagctcagccggtccaatcagagtgcgtccagggctcgggtttcgcgatctttaagtgactgaggcagatccccacgcggcacctggccatgctctcagctctcccgccgcgggatggtgccttgagtgaatgacccccttggagaacattcttccgcatccctcgcctcaagccagcctcagacagaaaactgaagattcagcagatccagtgcttcctgctcctcttctgcccaggaacacgcttgccttccccaaggcttccagaagctctgaggcaggaggcaccaagttctacctcatgtttggaggatcttgctagctatggccctcgtactcggctccctgttgctgctggggctgtgcgggaactccttttcaggagggcagccttcatccacagatgctcctaaggcttggaattatgaattgcctgcaacaaattatgagacccaagactcccataaagctggacccattggcattctctttgaactagtgcatatctttctctatgtggtacagccgcgtgatttcccagaagatactttgagaaaattcttacagaaggcatatgaatccaaaattgattatgacaagattgtctactatgaagcagggattattctatgctgtgtcctggggctgctgtttattattctgatgcctctggtggggtatttcttttgtatgtgtcgttgctgtaacaaatgtggtggagaaatgcaccagcgacagaaggaaaatgggcccttcctgaggaaatgctttgcaatctccctgttggtgatttgtataataataagcattggcatcttctatggttttgtggcaaatcaccaggtaagaacccggatcaaaaggagtcggaaactggcagatagcaatttcaaggacttgcgaactctcttgaatgaaactccagagcaaatcaaatatatattggcccagtacaacactaccaaggacaaggcgttcacagatctgaacagtatcaattcagtgctaggaggcggaattcttgaccgactgagacccaacatcatccctgttcttgatgagattaagtccatggcaacagcgatcaaggagaccaaagaggcgttggagaacatgaacagcaccttgaagagcttgcaccaacaaagtacacagcttagcagcagtctgaccagcgtgaaaactagcctgcggtcatctctcaatgaccctctgtgcttggtgcatccatcaagtgaaacctgcaacagcatcagattgtctctaagccagctgaatagcaaccctgaactgaggcagcttccacccgtggatgcagaacttgacaacgttaataacgttcttaggacagatttggatggcctggtccaacagggctatcaatcccttaatgatatacctgacagagtacaacgccaaaccacgactgtcgtagcaggtatcaaaagggtcttgaattccattggttcagatatcgacaatgtaactcagcgtcttcctattcaggatatactctcagcattctctgtttatgttaataacactgaaagttacatccacagaaatttacctacattggaagagtatgattcatactggtggctgggtggcctggtcatctgctctctgctgaccctcatcgtgattttttactacctgggcttactgtgtggcgtgtgcggctatgacaggcatgccaccccgaccacccgaggctgtgtctccaacaccggaggcgtcttcctcatggttggagttggattaagtttcctcttttgctggatattgatgatcattgtggttcttacctttgtctttggtgcaaatgtggaaaaactgatctgtgaaccttacacgagcaaggaattattccgggttttggatacaccctacttactaaatgaagactgggaatactatctctctgggaagctatttaataaatcaaaaatgaagctcacttttgaacaagtttacagtgactgcaaaaaaaatagaggcacttacggcactcttcacctgcagaacagcttcaatatcagtgaacatctcaacattaatgagcatactggaagcataagcagtgaattggaaagtctgaaggtaaatcttaatatctttctgttgggtgcagcaggaagaaaaaaccttcaggattttgctgcttgtggaatagacagaatgaattatgacagctacttggctcagactggtaaatcccccgcaggagtgaatcttttatcatttgcatatgatctagaagcaaaagcaaacagtttgcccccaggaaatttgaggaactccctgaaaagagatgcacaaactattaaaacaattcaccagcaacgagtccttcctatagaacaatcactgagcactctataccaaagcgtcaagatacttcaacgcacagggaatggattgttggagagagtaactaggattctagcttctctggattttgctcagaacttcatcacaaacaatacttcctctgttattattgaggaaactaagaagtatgggagaacaataataggatattttgaacattatctgcagtggatcgagttctctatcagtgagaaagtggcatcgtgcaaacctgtggccaccgctctagatactgctgttgatgtctttctgtgtagctacattatcgaccccttgaatttgttttggtttggcataggaaaagctactgtatttttacttccggctctaatttttgcggtaaaactggctaagtactatcgtcgaatggattcggaggacgtgtacgatgatgttgaaactatacccatgaaaaatatggaaaatggtaataatggttatcataaagatcatgtatatggtattcacaatcctgttatgacaagcccatcacaacattgatagctgatgttgaaactgcttgagcatcaggatactcaaagtggaaaggatcacagatttttggtagtttctgggtctacaaggactttccaaatccaggagcaacgccagtggcaacgtagtgactcaggcgggcaccaaggcaacggcaccattggtctctgggtagtgctttaagaatgaacacaatcacgttatagtccatggtccatcactattcaaggatgactccctcccttcctgtctatttttgttttttacttttttacactgagtttctatttagacactacaacatatggggtgtttgttcccattggatgcatttctatcaaaactctatcaaatgtgatggctagattctaacatattgccatgtgtggagtgtgctgaacacacaccagtttacaggaaagatgcattttgtgtacagtaaacggtgtatataccttttgttaccacagagttttttaaacaaatgagtattataggactttcttctaaatgagctaaataagtcaccattgacttcttggtgctgttgaaaataatccattttcactaaaagtgtgtgaaacctacagcatattcttcacgcagagattttcatctattatactttatcaaagattggccatgttccacttggaaatggcatgcaaaagcaatcatagagaaacctgcgtaactccatctgacaaattcaaaagagagagagagatcttgagagagaaatgctgttcgttcaaaagtggagttgttttaacagatgccaattacggtgtacagtttaacagagttttctgttgcattacgataaacattaattggagtgcagctaacatgagtatcatcagactagtatcaagtgttctaaaatgaaatatgagaagatcctgtcacaattcttagatctggtgtccagcatggatgaaacctttgagtttggtccctaaatttgcatgaaagcacaaggtaaatattcatttgcttcaggagtttcatgttggatctgtcattatcaaaagtgatcagcaatgaagaactggtcggacaaaatttaacgttgatgtaatgaaattccagatgtaggcattccccccaggtcttttcatgtgcagattgcagttctgattcatttgaataaaaaggaacttggaaaacatg

SEQ ID NO: 2399 - protein, 856 aa, Homo sapiens
MALVLGSLLLLGLCGNSFSGGQPSSTDAPKAWNYELPATNYETQDSHKAGPIGILFELVHIFLYVVQPRDFPEDTLRKFLQKAYESKIDYDKIVYYEAGIILCCVLGLLFIILMPLVGYFFCMCRCCNKCGGEMHQRQKENGPFLRKCFAISLLVICIIISIGIFYGFVANHQVRTRIKRSRKLADSNFKDLRTLLNETPEQIKYILAQYNTTKDKAFTDLNSINSVLGGGILDRLRPNIIPVLDEIKSMATAIKETKEALENMNSTLKSLHQQSTQLSSSLTSVKTSLRSSLNDPLCLVHPSSETCNSIRLSLSQLNSNPELRQLPPVDAELDNVNNVLRTDLDGLVQQGYQSLNDIPDRVQRQTTTVVAGIKRVLNSIGSDIDNVTQRLPIQDILSAFSVYVNNTESYIHRNLPTLEEYDSYWWLGGLVICSLLTLIVIFYYLGLLCGVCGYDRHATPTTRGCVSNTGGVFLMVGVGLSFLFCWILMIIVVLTFVFGANVEKLICEPYTSKELFRVLDTPYLLNEDWEYYLSGKLFNKSKMKLTFEQVYSDCKKNRGTYGTLHLQNSFNISEHLNINEHTGSISSELESLKVNLNIFLLGAAGRKNLQDFAACGIDRMNYDSYLAQTGKSPAGVNLLSFAYDLEAKANSLPPGNLRNSLKRDAQTIKTIHQQRVLPIEQSLSTLYQSVKILQRTGNGLLERVTRILASLDFAQNFITNNTSSVIIEETKKYGRTIIGYFEHYLQWIEFSISEKVASCKPVATALDTAVDVFLCSYIIDPLNLFWFGIGKATVFLLPALIFAVKLAKYYRRMDSEDVYDDVETIPMKNMENGNNGYHKDHVYGIHNPVMTSPSQH

SEQ ID NO: 2400 - DNA, 4305 bp, Homo sapiens
aaattgcattgggattaggcaacagaagggtctaatgcggccgggatgagacaggagagtttttaggagggtagctgcattctaagtaagggactctgcggggggaaaagaggcgcaagcgttgcaagaagggagtgcagggggttgagcaggcacctctacaggaaatggatgctgtccaggtgctggtgggcgccccagggctacgtggcgaagcagctcagccggtccaatcagagtgcgtccagggctcgggtttcgcgatctttaagtgactgaggcagatccccacgcggcacctggccatgctctcagctctcccgccgcgggatggtgccttgagtgaatgacccccttggagaacattcttccgcatccctcgcctcaagccagcctcagacagaaaactgaagattcagcagatccagtgcttcctgctcctcttctgcccaggaacacgcttgccttccccaaggcttccagaagctctgaggcaggaggcaccaagttctacctcatgtttggaggatcttgctagctatggccctcgtactcggctccctgttgctgctggggctgtgcgggaactccttttcaggagggcagccttcatccacagatgctcctaaggcttggaattatgaattgcctgcaacaaattatgagacccaagactcccataaagctggacccattggcattctctttgaactagtgcatatctttctctatgtggtacagccgcgtgatttcccagaagatactttgagaaaattcttacagaaggcatatgaatccaaaattgattatgacaagccagaaactgtaatcttaggtctaaagattgtctactatgaagcagggattattctatgctgtgtcctggggctgctgtttattattctgatgcctctggtggggtatttcttttgtatgtgtcgttgctgtaacaaatgtggtggagaaatgcaccagcgacagaaggaaaatgggcccttcctgaggaaatgctttgcaatctccctgttggtgatttgtataataataagcattggcatcttctatggttttgtggcaaatcaccaggtaagaacccggatcaaaaggagtcggaaactggcagatagcaatttcaaggacttgcgaactctcttgaatgaaactccagagcaaatcaaatatatattggcccagtacaacactaccaaggacaaggcgttcacagatctgaacagtatcaattcagtgctaggaggcggaattcttgaccgactgagacccaacatcatccctgttcttgatgagattaagtccatggcaacagcgatcaaggagaccaaagaggcgttggagaacatgaacagcaccttgaagagcttgcaccaacaaagtacacagcttagcagcagtctgaccagcgtgaaaactagcctgcggtcatctctcaatgaccctctgtgcttggtgcatccatcaagtgaaacctgcaacagcatcagattgtctctaagccagctgaatagcaaccctgaactgaggcagcttccacccgtggatgcagaacttgacaacgttaataacgttcttaggacagatttggatggcctggtccaacagggctatcaatcccttaatgatatacctgacagagtacaacgccaaaccacgactgtcgtagcaggtatcaaaagggtcttgaattccattggttcagatatcgacaatgtaactcagcgtcttcctattcaggatatactctcagcattctctgtttatgttaataacactgaaagttacatccacagaaatttacctacattggaagagtatgattcatactggtggctgggtggcctggtcatctgctctctgctgaccctcatcgtgattttttactacctgggcttactgtgtggcgtgtgcggctatgacaggcatgccaccccgaccacccgaggctgtgtctccaacaccggaggcgtcttcctcatggttggagttggattaagtttcctcttttgctggatattgatgatcattgtggttcttacctttgtctttggtgcaaatgtggaaaaactgatctgtgaaccttacacgagcaaggaattattccgggttttggatacaccctacttactaaatgaagactgggaatactatctctctgggaagctatttaataaatcaaaaatgaagctcacttttgaacaagtttacagtgactgcaaaaaaaatagaggcacttacggcactcttcacctgcagaacagcttcaatatcagtgaacatctcaacattaatgagcatactggaagcataagcagtgaattggaaagtctgaaggtaaatcttaatatctttctgttgggtgcagcaggaagaaaaaaccttcaggattttgctgcttgtggaatagacagaatgaattatgacagctacttggctcagactggtaaatcccccgcaggagtgaatcttttatcatttgcatatgatctagaagcaaaagcaaacagtttgcccccaggaaatttgaggaactccctgaaaagagatgcacaaactattaaaacaattcaccagcaacgagtccttcctatagaacaatcactgagcactctataccaaagcgtcaagatacttcaacgcacagggaatggattgttggagagagtaactaggattctagcttctctggattttgctcagaacttcatcacaaacaatacttcctctgttattattgaggaaactaagaagtatgggagaacaataataggatattttgaacattatctgcagtggatcgagttctctatcagtgagaaagtggcatcgtgcaaacctgtggccaccgctctagatactgctgttgatgtctttctgtgtagctacattatcgaccccttgaatttgttttggtttggcataggaaaagctactgtatttttacttccggctctaatttttgcggtaaaactggctaagtactatcgtcgaatggattcggaggacgtgtacgatgatgttgaaactatacccatgaaaaatatggaaaatggtaataatggttatcataaagatcatgtatatggtattcacaatcctgttatgacaagcccatcacaacattgatagctgatgttgaaactgcttgagcatcaggatactcaaagtggaaaggatcacagatttttggtagtttctgggtctacaaggactttccaaatccaggagcaacgccagtggcaacgtagtgactcaggcgggcaccaaggcaacggcaccattggtctctgggtagtgctttaagaatgaacacaatcacgttatagtccatggtccatcactattcaaggatgactccctcccttcctgtctatttttgttttttacttttttacactgagtttctatttagacactacaacatatggggtgtttgttcccattggatgcatttctatcaaaactctatcaaatgtgatggctagattctaacatattgccatgtgtggagtgtgctgaacacacaccagtttacaggaaagatgcattttgtgtacagtaaacggtgtatataccttttgttaccacagagttttttaaacaaatgagtattataggactttcttctaaatgagctaaataagtcaccattgacttcttggtgctgttgaaaataatccattttcactaaaagtgtgtgaaacctacagcatattcttcacgcagagattttcatctattatactttatcaaagattggccatgttccacttggaaatggcatgcaaaagcaatcatagagaaacctgcgtaactccatctgacaaattcaaaagagagagagagatcttgagagagaaatgctgttcgttcaaaagtggagttgttttaacagatgccaattacggtgtacagtttaacagagttttctgttgcattacgataaacattaattggagtgcagctaacatgagtatcatcagactagtatcaagtgttctaaaatgaaatatgagaagatcctgtcacaattcttagatctggtgtccagcatggatgaaacctttgagtttggtccctaaatttgcatgaaagcacaaggtaaatattcatttgcttcaggagtttcatgttggatctgtcattatcaaaagtgatcagcaatgaagaactggtcggacaaaatttaacgttgatgtaatgaaattccagatgtaggcattccccccaggtcttttcatgtgcagattgcagttctgattcatttgaataaaaaggaacttggaaaacatg

SEQ ID NO: 2401 - protein, 865 aa, Homo sapiens; identical to SEQ ID NO: 2391

SEQ ID NO: 2402 - DNA, 4748 bp, Homo sapiens
tgggagcgaatatggctttatgctgtttttcaaccgcttcagccactagcattggtactgctgcacactaaggatccaaatgattgtttttttgttttttgttttgttttgttttgttttgttttgttttaaattgcattgggattaggcaacagaagggtctaatgcggccgggatgagacaggagagtttttaggagggtagctgcattctaagtaagggactctgcggggggaaaagaggcgcaagcgttgcaagaagggagtgcagggggttgagcaggcacctctacaggaaatggatgctgtccaggtgctggtgggcgccccagggctacgtggcgaagcagctcagccggtccaatcagagtgcgtccagggctcgggtttcgcgatctttaagtgactgaggcagatccccacgcggcacctggccatgctctcagctctcccgccgcggtgagtatgtttaaggaatcctttccattacggcggccccatacctaggtccccgtccgggacagaggaagccgcaacgggtccccccgggcacccgggcctttctcctgcctcccgccacgtccgagggtccggccgcagcgccgcctgagcccctccgcggccggcagtgggaggcgggctctccgaaagccgtcgcggtggtcccagaagccgggtcataaataattcacgagccagggtctggcgagctaagggaagggcggcggcagcggtgactagggcgggagcaggagcgggagccgggtgcacgggatggtgccttgagtgaatgacccccttggagaacattcttccgcatccctcgcctcaagccagcctcagacagaaaactgaagattcagcagatccagtgcttcctgctcctcttctgcccaggaacacgcttgccttccccaaggcttccagaagctctgaggcaggaggcaccaagttctacctcatgtttggaggatcttgctagctatggccctcgtactcggctccctgttgctgctggggctgtgcgggaactccttttcaggagggcagccttcatccacagatgctcctaaggcttggaattatgaattgcctgcaacaaattatgagacccaagactcccataaagctggacccattggcattctctttgaactagtgcatatctttctctatgtggtacagccgcgtgatttcccagaagatactttgagaaaattcttacagaaggcatatgaatccaaaattgattatgacaagccagaaactgtaatcttaggtctaaagattgtctactatgaagcagggattattctatgctgtgtcctggggctgctgtttattattctgatgcctctggtggggtatttcttttgtatgtgtcgttgctgtaacaaatgtggtggagaaatgcaccagcgacagaaggaaaatgggcccttcctgaggaaatgctttgcaatctccctgttggtgatttgtataataataagcattggcatcttctatggttttgtggcaaatcaccaggtaagaacccggatcaaaaggagtcggaaactggcagatagcaatttcaaggacttgcgaactctcttgaatgaaactccagagcaaatcaaatatatattggcccagtacaacactaccaaggacaaggcgttcacagatctgaacagtatcaattcagtgctaggaggcggaattcttgaccgactgagacccaacatcatccctgttcttgatgagattaagtccatggcaacagcgatcaaggagaccaaagaggcgttggagaacatgaacagcaccttgaagagcttgcaccaacaaagtacacagcttagcagcagtctgaccagcgtgaaaactagcctgcggtcatctctcaatgaccctctgtgcttggtgcatccatcaagtgaaacctgcaacagcatcagattgtctctaagccagctgaatagcaaccctgaactgaggcagcttccacccgtggatgcagaacttgacaacgttaataacgttcttaggacagatttggatggcctggtccaacagggctatcaatcccttaatgatatacctgacagagtacaacgccaaaccacgactgtcgtagcaggtatcaaaagggtcttgaattccattggttcagatatcgacaatgtaactcagcgtcttcctattcaggatatactctcagcattctctgtttatgttaataacactgaaagttacatccacagaaatttacctacattggaagagtatgattcatactggtggctgggtggcctggtcatctgctctctgctgaccctcatcgtgattttttactacctgggcttactgtgtggcgtgtgcggctatgacaggcatgccaccccgaccacccgaggctgtgtctccaacaccggaggcgtcttcctcatggttggagttggattaagtttcctcttttgctggatattgatgatcattgtggttcttacctttgtctttggtgcaaatgtggaaaaactgatctgtgaaccttacacgagcaaggaattattccgggttttggatacaccctacttactaaatgaagactgggaatactatctctctgggaagctatttaataaatcaaaaatgaagctcacttttgaacaagtttacagtgactgcaaaaaaaatagaggcacttacggcactcttcacctgcagaacagcttcaatatcagtgaacatctcaacattaatgagcatactggaagcataagcagtgaattggaaagtctgaaggtaaatcttaatatctttctgttgggtgcagcaggaagaaaaaaccttcaggattttgctgcttgtggaatagacagaatgaattatgacagctacttggctcagactggtaaatcccccgcaggagtgaatcttttatcatttgcatatgatctagaagcaaaagcaaacagtttgcccccaggaaatttgaggaactccctgaaaagagatgcacaaactattaaaacaattcaccagcaacgagtccttcctatagaacaatcactgagcactctataccaaagcgtcaagatacttcaacgcacagggaatggattgttggagagagtaactaggattctagcttctctggattttgctcagaacttcatcacaaacaatacttcctctgttattattgaggaaactaagaagtatgggagaacaataataggatattttgaacattatctgcagtggatcgagttctctatcagtgagaaagtggcatcgtgcaaacctgtggccaccgctctagatactgctgttgatgtctttctgtgtagctacattatcgaccccttgaatttgttttggtttggcataggaaaagctactgtatttttacttccggctctaatttttgcggtaaaactggctaagtactatcgtcgaatggattcggaggacgtgtacgatgatgttgaaactatacccatgaaaaatatggaaaatggtaataatggttatcataaagatcatgtatatggtattcacaatcctgttatgacaagcccatcacaacattgatagctgatgttgaaactgcttgagcatcaggatactcaaagtggaaaggatcacagatttttggtagtttctgggtctacaaggactttccaaatccaggagcaacgccagtggcaacgtagtgactcaggcgggcaccaaggcaacggcaccattggtctctgggtagtgctttaagaatgaacacaatcacgttatagtccatggtccatcactattcaaggatgactccctcccttcctgtctatttttgttttttacttttttacactgagtttctatttagacactacaacatatggggtgtttgttcccattggatgcatttctatcaaaactctatcaaatgtgatggctagattctaacatattgccatgtgtggagtgtgctgaacacacaccagtttacaggaaagatgcattttgtgtacagtaaacggtgtatataccttttgttaccacagagttttttaaacaaatgagtattataggactttcttctaaatgagctaaataagtcaccattgacttcttggtgctgttgaaaataatccattttcactaaaagtgtgtgaaacctacagcatattcttcacgcagagattttcatctattatactttatcaaagattggccatgttccacttggaaatggcatgcaaaagcaatcatagagaaacctgcgtaactccatctgacaaattcaaaagagagagagagatcttgagagagaaatgctgttcgttcaaaagtggagttgttttaacagatgccaattacggtgtacagtttaacagagttttctgttgcattacgataaacattaattggagtgcagctaacatgagtatcatcagactagtatcaagtgttctaaaatgaaatatgagaagatcctgtcacaattcttagatctggtgtccagcatggatgaaacctttgagtttggtccctaaatttgcatgaaagcacaaggtaaatattcatttgcttcaggagtttcatgttggatctgtcattatcaaaagtgatcagcaatgaagaactggtcggacaaaatttaacgttgatgtaatgaaattccagatgtaggcattccccccaggtcttttcatgtgcagattgcagttctgattcatttgaataaaaaggaacttggaaaacatg

SEQ ID NO: 2403 - protein, 865 aa, Homo sapiens; identical to SEQ ID NO: 2391

SEQ ID NO: 2404 - DNA, 4659 bp, Homo sapiens
tgggagcgaatatggctttatgctgtttttcaaccgcttcagccactagcattggtactgctgcacactaaggatccaaatgattgtttttttgttttttgttttgttttgttttgttttgttttgttttaaattgcattgggattaggcaacagaagggtctaatgcggccgggatgagacaggagagtttttaggagggtagctgcattctaagtaagggactctgcggggggaaaagaggcgcaagcgttgcaagaagggagtgcagggggttgagcaggcacctctacaggaaatggatgctgtccaggtgctggtgggcgccccagggctacgtggcgaagcagctcagccggtccaatcagagtgcgtccagggctcgggtttcgcgatctttaagtgactgaggcagatccccacgcggcacctggccatgctctcagctctcccgccgcggtgagtatgtttaaggaatcctttccattacggcggccccatacctaggtccccgtccgggacagaggaagccgcaacgggtccccccgggcacccgggcctttctcctgcctcccgccacgtccgagggtccggccgcagcgccgcctgagcccctccgcggccggcagtgggaggcgggctctccgaaagccgtcgcggtggtcccagaagccgggtcataaggatggtgccttgagtgaatgacccccttggagaacattcttccgcatccctcgcctcaagccagcctcagacagaaaactgaagattcagcagatccagtgcttcctgctcctcttctgcccaggaacacgcttgccttccccaaggcttccagaagctctgaggcaggaggcaccaagttctacctcatgtttggaggatcttgctagctatggccctcgtactcggctccctgttgctgctggggctgtgcgggaactccttttcaggagggcagccttcatccacagatgctcctaaggcttggaattatgaattgcctgcaacaaattatgagacccaagactcccataaagctggacccattggcattctctttgaactagtgcatatctttctctatgtggtacagccgcgtgatttcccagaagatactttgagaaaattcttacagaaggcatatgaatccaaaattgattatgacaagccagaaactgtaatcttaggtctaaagattgtctactatgaagcagggattattctatgctgtgtcctggggctgctgtttattattctgatgcctctggtggggtatttcttttgtatgtgtcgttgctgtaacaaatgtggtggagaaatgcaccagcgacagaaggaaaatgggcccttcctgaggaaatgctttgcaatctccctgttggtgatttgtataataataagcattggcatcttctatggttttgtggcaaatcaccaggtaagaacccggatcaaaaggagtcggaaactggcagatagcaatttcaaggacttgcgaactctcttgaatgaaactccagagcaaatcaaatatatattggcccagtacaacactaccaaggacaaggcgttcacagatctgaacagtatcaattcagtgctaggaggcggaattcttgaccgactgagacccaacatcatccctgttcttgatgagattaagtccatggcaacagcgatcaaggagaccaaagaggcgttggagaacatgaacagcaccttgaagagcttgcaccaacaaagtacacagcttagcagcagtctgaccagcgtgaaaactagcctgcggtcatctctcaatgaccctctgtgcttggtgcatccatcaagtgaaacctgcaacagcatcagattgtctctaagccagctgaatagcaaccctgaactgaggcagcttccacccgtggatgcagaacttgacaacgttaataacgttcttaggacagatttggatggcctggtccaacagggctatcaatcccttaatgatatacctgacagagtacaacgccaaaccacgactgtcgtagcaggtatcaaaagggtcttgaattccattggttcagatatcgacaatgtaactcagcgtcttcctattcaggatatactctcagcattctctgtttatgttaataacactgaaagttacatccacagaaatttacctacattggaagagtatgattcatactggtggctgggtggcctggtcatctgctctctgctgaccctcatcgtgattttttactacctgggcttactgtgtggcgtgtgcggctatgacaggcatgccaccccgaccacccgaggctgtgtctccaacaccggaggcgtcttcctcatggttggagttggattaagtttcctcttttgctggatattgatgatcattgtggttcttacctttgtctttggtgcaaatgtggaaaaactgatctgtgaaccttacacgagcaaggaattattccgggttttggatacaccctacttactaaatgaagactgggaatactatctctctgggaagctatttaataaatcaaaaatgaagctcacttttgaacaagtttacagtgactgcaaaaaaaatagaggcacttacggcactcttcacctgcagaacagcttcaatatcagtgaacatctcaacattaatgagcatactggaagcataagcagtgaattggaaagtctgaaggtaaatcttaatatctttctgttgggtgcagcaggaagaaaaaaccttcaggattttgctgcttgtggaatagacagaatgaattatgacagctacttggctcagactggtaaatcccccgcaggagtgaatcttttatcatttgcatatgatctagaagcaaaagcaaacagtttgcccccaggaaatttgaggaactccctgaaaagagatgcacaaactattaaaacaattcaccagcaacgagtccttcctatagaacaatcactgagcactctataccaaagcgtcaagatacttcaacgcacagggaatggattgttggagagagtaactaggattctagcttctctggattttgctcagaacttcatcacaaacaatacttcctctgttattattgaggaaactaagaagtatgggagaacaataataggatattttgaacattatctgcagtggatcgagttctctatcagtgagaaagtggcatcgtgcaaacctgtggccaccgctctagatactgctgttgatgtctttctgtgtagctacattatcgaccccttgaatttgttttggtttggcataggaaaagctactgtatttttacttccggctctaatttttgcggtaaaactggctaagtactatcgtcgaatggattcggaggacgtgtacgatgatgttgaaactatacccatgaaaaatatggaaaatggtaataatggttatcataaagatcatgtatatggtattcacaatcctgttatgacaagcccatcacaacattgatagctgatgttgaaactgcttgagcatcaggatactcaaagtggaaaggatcacagatttttggtagtttctgggtctacaaggactttccaaatccaggagcaacgccagtggcaacgtagtgactcaggcgggcaccaaggcaacggcaccattggtctctgggtagtgctttaagaatgaacacaatcacgttatagtccatggtccatcactattcaaggatgactccctcccttcctgtctatttttgttttttacttttttacactgagtttctatttagacactacaacatatggggtgtttgttcccattggatgcatttctatcaaaactctatcaaatgtgatggctagattctaacatattgccatgtgtggagtgtgctgaacacacaccagtttacaggaaagatgcattttgtgtacagtaaacggtgtatataccttttgttaccacagagttttttaaacaaatgagtattataggactttcttctaaatgagctaaataagtcaccattgacttcttggtgctgttgaaaataatccattttcactaaaagtgtgtgaaacctacagcatattcttcacgcagagattttcatctattatactttatcaaagattggccatgttccacttggaaatggcatgcaaaagcaatcatagagaaacctgcgtaactccatctgacaaattcaaaagagagagagagatcttgagagagaaatgctgttcgttcaaaagtggagttgttttaacagatgccaattacggtgtacagtttaacagagttttctgttgcattacgataaacattaattggagtgcagctaacatgagtatcatcagactagtatcaagtgttctaaaatgaaatatgagaagatcctgtcacaattcttagatctggtgtccagcatggatgaaacctttgagtttggtccctaaatttgcatgaaagcacaaggtaaatattcatttgcttcaggagtttcatgttggatctgtcattatcaaaagtgatcagcaatgaagaactggtcggacaaaatttaacgttgatgtaatgaaattccagatgtaggcattccccccaggtcttttcatgtgcagattgcagttctgattcatttgaataaaaaggaacttggaaaacatg

SEQ ID NO: 2405 - protein, 865 aa, Homo sapiens; identical to SEQ ID NO: 2391

SEQ ID NO: 2406 - DNA, 4721 bp, Homo sapiens
tgggagcgaatatggctttatgctgtttttcaaccgcttcagccactagcattggtactgctgcacactaaggatccaaatgattgtttttttgttttttgttttgttttgttttgttttgttttgttttaaattgcattgggattaggcaacagaagggtctaatgcggccgggatgagacaggagagtttttaggagggtagctgcattctaagtaagggactctgcggggggaaaagaggcgcaagcgttgcaagaagggagtgcagggggttgagcaggcacctctacaggaaatggatgctgtccaggtgctggtgggcgccccagggctacgtggcgaagcagctcagccggtccaatcagagtgcgtccagggctcgggtttcgcgatctttaagtgactgaggcagatccccacgcggcacctggccatgctctcagctctcccgccgcggtgagtatgtttaaggaatcctttccattacggcggccccatacctaggtccccgtccgggacagaggaagccgcaacgggtccccccgggcacccgggcctttctcctgcctcccgccacgtccgagggtccggccgcagcgccgcctgagcccctccgcggccggcagtgggaggcgggctctccgaaagccgtcgcggtggtcccagaagccgggtcataaataattcacgagccagggtctggcgagctaagggaagggcggcggcagcggtgactagggcgggagcaggagcgggagccgggtgcacgggatggtgccttgagtgaatgacccccttggagaacattcttccgcatccctcgcctcaagccagcctcagacagaaaactgaagattcagcagatccagtgcttcctgctcctcttctgcccaggaacacgcttgccttccccaaggcttccagaagctctgaggcaggaggcaccaagttctacctcatgtttggaggatcttgctagctatggccctcgtactcggctccctgttgctgctggggctgtgcgggaactccttttcaggagggcagccttcatccacagatgctcctaaggcttggaattatgaattgcctgcaacaaattatgagacccaagactcccataaagctggacccattggcattctctttgaactagtgcatatctttctctatgtggtacagccgcgtgatttcccagaagatactttgagaaaattcttacagaaggcatatgaatccaaaattgattatgacaagattgtctactatgaagcagggattattctatgctgtgtcctggggctgctgtttattattctgatgcctctggtggggtatttcttttgtatgtgtcgttgctgtaacaaatgtggtggagaaatgcaccagcgacagaaggaaaatgggcccttcctgaggaaatgctttgcaatctccctgttggtgatttgtataataataagcattggcatcttctatggttttgtggcaaatcaccaggtaagaacccggatcaaaaggagtcggaaactggcagatagcaatttcaaggacttgcgaactctcttgaatgaaactccagagcaaatcaaatatatattggcccagtacaacactaccaaggacaaggcgttcacagatctgaacagtatcaattcagtgctaggaggcggaattcttgaccgactgagacccaacatcatccctgttcttgatgagattaagtccatggcaacagcgatcaaggagaccaaagaggcgttggagaacatgaacagcaccttgaagagcttgcaccaacaaagtacacagcttagcagcagtctgaccagcgtgaaaactagcctgcggtcatctctcaatgaccctctgtgcttggtgcatccatcaagtgaaacctgcaacagcatcagattgtctctaagccagctgaatagcaaccctgaactgaggcagcttccacccgtggatgcagaacttgacaacgttaataacgttcttaggacagatttggatggcctggtccaacagggctatcaatcccttaatgatatacctgacagagtacaacgccaaaccacgactgtcgtagcaggtatcaaaagggtcttgaattccattggttcagatatcgacaatgtaactcagcgtcttcctattcaggatatactctcagcattctctgtttatgttaataacactgaaagttacatccacagaaatttacctacattggaagagtatgattcatactggtggctgggtggcctggtcatctgctctctgctgaccctcatcgtgattttttactacctgggcttactgtgtggcgtgtgcggctatgacaggcatgccaccccgaccacccgaggctgtgtctccaacaccggaggcgtcttcctcatggttggagttggattaagtttcctcttttgctggatattgatgatcattgtggttcttacctttgtctttggtgcaaatgtggaaaaactgatctgtgaaccttacacgagcaaggaattattccgggttttggatacaccctacttactaaatgaagactgggaatactatctctctgggaagctatttaataaatcaaaaatgaagctcacttttgaacaagtttacagtgactgcaaaaaaaatagaggcacttacggcactcttcacctgcagaacagcttcaatatcagtgaacatctcaacattaatgagcatactggaagcataagcagtgaattggaaagtctgaaggtaaatcttaatatctttctgttgggtgcagcaggaagaaaaaaccttcaggattttgctgcttgtggaatagacagaatgaattatgacagctacttggctcagactggtaaatcccccgcaggagtgaatcttttatcatttgcatatgatctagaagcaaaagcaaacagtttgcccccaggaaatttgaggaactccctgaaaagagatgcacaaactattaaaacaattcaccagcaacgagtccttcctatagaacaatcactgagcactctataccaaagcgtcaagatacttcaacgcacagggaatggattgttggagagagtaactaggattctagcttctctggattttgctcagaacttcatcacaaacaatacttcctctgttattattgaggaaactaagaagtatgggagaacaataataggatattttgaacattatctgcagtggatcgagttctctatcagtgagaaagtggcatcgtgcaaacctgtggccaccgctctagatactgctgttgatgtctttctgtgtagctacattatcgaccccttgaatttgttttggtttggcataggaaaagctactgtatttttacttccggctctaatttttgcggtaaaactggctaagtactatcgtcgaatggattcggaggacgtgtacgatgatgttgaaactatacccatgaaaaatatggaaaatggtaataatggttatcataaagatcatgtatatggtattcacaatcctgttatgacaagcccatcacaacattgatagctgatgttgaaactgcttgagcatcaggatactcaaagtggaaaggatcacagatttttggtagtttctgggtctacaaggactttccaaatccaggagcaacgccagtggcaacgtagtgactcaggcgggcaccaaggcaacggcaccattggtctctgggtagtgctttaagaatgaacacaatcacgttatagtccatggtccatcactattcaaggatgactccctcccttcctgtctatttttgttttttacttttttacactgagtttctatttagacactacaacatatggggtgtttgttcccattggatgcatttctatcaaaactctatcaaatgtgatggctagattctaacatattgccatgtgtggagtgtgctgaacacacaccagtttacaggaaagatgcattttgtgtacagtaaacggtgtatataccttttgttaccacagagttttttaaacaaatgagtattataggactttcttctaaatgagctaaataagtcaccattgacttcttggtgctgttgaaaataatccattttcactaaaagtgtgtgaaacctacagcatattcttcacgcagagattttcatctattatactttatcaaagattggccatgttccacttggaaatggcatgcaaaagcaatcatagagaaacctgcgtaactccatctgacaaattcaaaagagagagagagatcttgagagagaaatgctgttcgttcaaaagtggagttgttttaacagatgccaattacggtgtacagtttaacagagttttctgttgcattacgataaacattaattggagtgcagctaacatgagtatcatcagactagtatcaagtgttctaaaatgaaatatgagaagatcctgtcacaattcttagatctggtgtccagcatggatgaaacctttgagtttggtccctaaatttgcatgaaagcacaaggtaaatattcatttgcttcaggagtttcatgttggatctgtcattatcaaaagtgatcagcaatgaagaactggtcggacaaaatttaacgttgatgtaatgaaattccagatgtaggcattccccccaggtcttttcatgtgcagattgcagttctgattcatttgaataaaaaggaacttggaaaacatg

SEQ ID NO: 2407 - protein, 856 aa, Homo sapiens; identical to SEQ ID NO: 2399

SEQ ID NO: 2408 - DNA, 4419 bp, Homo sapiens
gtgggctcctttctcgtggatctggaccccaggagttcccaggcatagagaggaggggtgccagtggagtgtaagcaccatgacaacaggaactgtgtcttgaccactgttgacttccaagcacctcaaataggacctgtcacatagaagtttcaatcaatatttgttgagtgaatgaagacaacaggtgtcaacttagcttctactacagttctaagacttttgcgtcaagaagtggggacactccagatgcaatgtgccaacgacctcacagacacaggttgtggatagcagcagacatggaggtggaggctgggcggccagtgatgctgtgagtcagttctgcaggctgtacgggaagcacggcaccagtatctgcttctggtgaggactcaggagcttaaaatcatggtggaagcagggagagcaagcatgtcacaagggatggtgccttgagtgaatgacccccttggagaacattcttccgcatccctcgcctcaagccagcctcagacagaaaactgaagattcagcagatccagtgcttcctgctcctcttctgcccaggaacacgcttgccttccccaaggcttccagaagctctgaggcaggaggcaccaagttctacctcatgtttggaggatcttgctagctatggccctcgtactcggctccctgttgctgctggggctgtgcgggaactccttttcaggagggcagccttcatccacagatgctcctaaggcttggaattatgaattgcctgcaacaaattatgagacccaagactcccataaagctggacccattggcattctctttgaactagtgcatatctttctctatgtggtacagccgcgtgatttcccagaagatactttgagaaaattcttacagaaggcatatgaatccaaaattgattatgacaagccagaaactgtaatcttaggtctaaagattgtctactatgaagcagggattattctatgctgtgtcctggggctgctgtttattattctgatgcctctggtggggtatttcttttgtatgtgtcgttgctgtaacaaatgtggtggagaaatgcaccagcgacagaaggaaaatgggcccttcctgaggaaatgctttgcaatctccctgttggtgatttgtataataataagcattggcatcttctatggttttgtggcaaatcaccaggtaagaacccggatcaaaaggagtcggaaactggcagatagcaatttcaaggacttgcgaactctcttgaatgaaactccagagcaaatcaaatatatattggcccagtacaacactaccaaggacaaggcgttcacagatctgaacagtatcaattcagtgctaggaggcggaattcttgaccgactgagacccaacatcatccctgttcttgatgagattaagtccatggcaacagcgatcaaggagaccaaagaggcgttggagaacatgaacagcaccttgaagagcttgcaccaacaaagtacacagcttagcagcagtctgaccagcgtgaaaactagcctgcggtcatctctcaatgaccctctgtgcttggtgcatccatcaagtgaaacctgcaacagcatcagattgtctctaagccagctgaatagcaaccctgaactgaggcagcttccacccgtggatgcagaacttgacaacgttaataacgttcttaggacagatttggatggcctggtccaacagggctatcaatcccttaatgatatacctgacagagtacaacgccaaaccacgactgtcgtagcaggtatcaaaagggtcttgaattccattggttcagatatcgacaatgtaactcagcgtcttcctattcaggatatactctcagcattctctgtttatgttaataacactgaaagttacatccacagaaatttacctacattggaagagtatgattcatactggtggctgggtggcctggtcatctgctctctgctgaccctcatcgtgattttttactacctgggcttactgtgtggcgtgtgcggctatgacaggcatgccaccccgaccacccgaggctgtgtctccaacaccggaggcgtcttcctcatggttggagttggattaagtttcctcttttgctggatattgatgatcattgtggttcttacctttgtctttggtgcaaatgtggaaaaactgatctgtgaaccttacacgagcaaggaattattccgggttttggatacaccctacttactaaatgaagactgggaatactatctctctgggaagctatttaataaatcaaaaatgaagctcacttttgaacaagtttacagtgactgcaaaaaaaatagaggcacttacggcactcttcacctgcagaacagcttcaatatcagtgaacatctcaacattaatgagcatactggaagcataagcagtgaattggaaagtctgaaggtaaatcttaatatctttctgttgggtgcagcaggaagaaaaaaccttcaggattttgctgcttgtggaatagacagaatgaattatgacagctacttggctcagactggtaaatcccccgcaggagtgaatcttttatcatttgcatatgatctagaagcaaaagcaaacagtttgcccccaggaaatttgaggaactccctgaaaagagatgcacaaactattaaaacaattcaccagcaacgagtccttcctatagaacaatcactgagcactctataccaaagcgtcaagatacttcaacgcacagggaatggattgttggagagagtaactaggattctagcttctctggattttgctcagaacttcatcacaaacaatacttcctctgttattattgaggaaactaagaagtatgggagaacaataataggatattttgaacattatctgcagtggatcgagttctctatcagtgagaaagtggcatcgtgcaaacctgtggccaccgctctagatactgctgttgatgtctttctgtgtagctacattatcgaccccttgaatttgttttggtttggcataggaaaagctactgtatttttacttccggctctaatttttgcggtaaaactggctaagtactatcgtcgaatggattcggaggacgtgtacgatgatgttgaaactatacccatgaaaaatatggaaaatggtaataatggttatcataaagatcatgtatatggtattcacaatcctgttatgacaagcccatcacaacattgatagctgatgttgaaactgcttgagcatcaggatactcaaagtggaaaggatcacagatttttggtagtttctgggtctacaaggactttccaaatccaggagcaacgccagtggcaacgtagtgactcaggcgggcaccaaggcaacggcaccattggtctctgggtagtgctttaagaatgaacacaatcacgttatagtccatggtccatcactattcaaggatgactccctcccttcctgtctatttttgttttttacttttttacactgagtttctatttagacactacaacatatggggtgtttgttcccattggatgcatttctatcaaaactctatcaaatgtgatggctagattctaacatattgccatgtgtggagtgtgctgaacacacaccagtttacaggaaagatgcattttgtgtacagtaaacggtgtatataccttttgttaccacagagttttttaaacaaatgagtattataggactttcttctaaatgagctaaataagtcaccattgacttcttggtgctgttgaaaataatccattttcactaaaagtgtgtgaaacctacagcatattcttcacgcagagattttcatctattatactttatcaaagattggccatgttccacttggaaatggcatgcaaaagcaatcatagagaaacctgcgtaactccatctgacaaattcaaaagagagagagagatcttgagagagaaatgctgttcgttcaaaagtggagttgttttaacagatgccaattacggtgtacagtttaacagagttttctgttgcattacgataaacattaattggagtgcagctaacatgagtatcatcagactagtatcaagtgttctaaaatgaaatatgagaagatcctgtcacaattcttagatctggtgtccagcatggatgaaacctttgagtttggtccctaaatttgcatgaaagcacaaggtaaatattcatttgcttcaggagtttcatgttggatctgtcattatcaaaagtgatcagcaatgaagaactggtcggacaaaatttaacgttgatgtaatgaaattccagatgtaggcattccccccaggtcttttcatgtgcagattgcagttctgattcatttgaataaaaaggaacttggaaaacatg

SEQ ID NO: 2409 - protein, 865 aa, Homo sapiens; identical to SEQ ID NO: 2391

SEQ ID NO: 2410 - DNA, 4367 bp, Homo sapiens
agcagctcagtgcagtggaaaatttcatggaagccaaaatccctgcctcttactggatatgagggcctttgaggggaacatccaacctctctgagcctcagtgtcctcatccgcaaaacagataataactcctctctcacagagtgtggattcgtttttgagggctgctgtaacaaagtaccacagaccaagtagcttaaacaagtgccaacgacctcacagacacaggttgtggatagcagcagacatggaggtggaggctgggcggccagtgatgctgtgagtcagttctgcaggctgtacgggaagcacggcaccagtatctgcttctggtgaggactcaggagcttaaaatcatggtggaagcagggagagcaagcatgtcacaagggatggtgccttgagtgaatgacccccttggagaacattcttccgcatccctcgcctcaagccagcctcagacagaaaactgaagattcagcagatccagtgcttcctgctcctcttctgcccaggaacacgcttgccttccccaaggcttccagaagctctgaggcaggaggcaccaagttctacctcatgtttggaggatcttgctagctatggccctcgtactcggctccctgttgctgctggggctgtgcgggaactccttttcaggagggcagccttcatccacagatgctcctaaggcttggaattatgaattgcctgcaacaaattatgagacccaagactcccataaagctggacccattggcattctctttgaactagtgcatatctttctctatgtggtacagccgcgtgatttcccagaagatactttgagaaaattcttacagaaggcatatgaatccaaaattgattatgacaagccagaaactgtaatcttaggtctaaagattgtctactatgaagcagggattattctatgctgtgtcctggggctgctgtttattattctgatgcctctggtggggtatttcttttgtatgtgtcgttgctgtaacaaatgtggtggagaaatgcaccagcgacagaaggaaaatgggcccttcctgaggaaatgctttgcaatctccctgttggtgatttgtataataataagcattggcatcttctatggttttgtggcaaatcaccaggtaagaacccggatcaaaaggagtcggaaactggcagatagcaatttcaaggacttgcgaactctcttgaatgaaactccagagcaaatcaaatatatattggcccagtacaacactaccaaggacaaggcgttcacagatctgaacagtatcaattcagtgctaggaggcggaattcttgaccgactgagacccaacatcatccctgttcttgatgagattaagtccatggcaacagcgatcaaggagaccaaagaggcgttggagaacatgaacagcaccttgaagagcttgcaccaacaaagtacacagcttagcagcagtctgaccagcgtgaaaactagcctgcggtcatctctcaatgaccctctgtgcttggtgcatccatcaagtgaaacctgcaacagcatcagattgtctctaagccagctgaatagcaaccctgaactgaggcagcttccacccgtggatgcagaacttgacaacgttaataacgttcttaggacagatttggatggcctggtccaacagggctatcaatcccttaatgatatacctgacagagtacaacgccaaaccacgactgtcgtagcaggtatcaaaagggtcttgaattccattggttcagatatcgacaatgtaactcagcgtcttcctattcaggatatactctcagcattctctgtttatgttaataacactgaaagttacatccacagaaatttacctacattggaagagtatgattcatactggtggctgggtggcctggtcatctgctctctgctgaccctcatcgtgattttttactacctgggcttactgtgtggcgtgtgcggctatgacaggcatgccaccccgaccacccgaggctgtgtctccaacaccggaggcgtcttcctcatggttggagttggattaagtttcctcttttgctggatattgatgatcattgtggttcttacctttgtctttggtgcaaatgtggaaaaactgatctgtgaaccttacacgagcaaggaattattccgggttttggatacaccctacttactaaatgaagactgggaatactatctctctgggaagctatttaataaatcaaaaatgaagctcacttttgaacaagtttacagtgactgcaaaaaaaatagaggcacttacggcactcttcacctgcagaacagcttcaatatcagtgaacatctcaacattaatgagcatactggaagcataagcagtgaattggaaagtctgaaggtaaatcttaatatctttctgttgggtgcagcaggaagaaaaaaccttcaggattttgctgcttgtggaatagacagaatgaattatgacagctacttggctcagactggtaaatcccccgcaggagtgaatcttttatcatttgcatatgatctagaagcaaaagcaaacagtttgcccccaggaaatttgaggaactccctgaaaagagatgcacaaactattaaaacaattcaccagcaacgagtccttcctatagaacaatcactgagcactctataccaaagcgtcaagatacttcaacgcacagggaatggattgttggagagagtaactaggattctagcttctctggattttgctcagaacttcatcacaaacaatacttcctctgttattattgaggaaactaagaagtatgggagaacaataataggatattttgaacattatctgcagtggatcgagttctctatcagtgagaaagtggcatcgtgcaaacctgtggccaccgctctagatactgctgttgatgtctttctgtgtagctacattatcgaccccttgaatttgttttggtttggcataggaaaagctactgtatttttacttccggctctaatttttgcggtaaaactggctaagtactatcgtcgaatggattcggaggacgtgtacgatgatgttgaaactatacccatgaaaaatatggaaaatggtaataatggttatcataaagatcatgtatatggtattcacaatcctgttatgacaagcccatcacaacattgatagctgatgttgaaactgcttgagcatcaggatactcaaagtggaaaggatcacagatttttggtagtttctgggtctacaaggactttccaaatccaggagcaacgccagtggcaacgtagtgactcaggcgggcaccaaggcaacggcaccattggtctctgggtagtgctttaagaatgaacacaatcacgttatagtccatggtccatcactattcaaggatgactccctcccttcctgtctatttttgttttttacttttttacactgagtttctatttagacactacaacatatggggtgtttgttcccattggatgcatttctatcaaaactctatcaaatgtgatggctagattctaacatattgccatgtgtggagtgtgctgaacacacaccagtttacaggaaagatgcattttgtgtacagtaaacggtgtatataccttttgttaccacagagttttttaaacaaatgagtattataggactttcttctaaatgagctaaataagtcaccattgacttcttggtgctgttgaaaataatccattttcactaaaagtgtgtgaaacctacagcatattcttcacgcagagattttcatctattatactttatcaaagattggccatgttccacttggaaatggcatgcaaaagcaatcatagagaaacctgcgtaactccatctgacaaattcaaaagagagagagagatcttgagagagaaatgctgttcgttcaaaagtggagttgttttaacagatgccaattacggtgtacagtttaacagagttttctgttgcattacgataaacattaattggagtgcagctaacatgagtatcatcagactagtatcaagtgttctaaaatgaaatatgagaagatcctgtcacaattcttagatctggtgtccagcatggatgaaacctttgagtttggtccctaaatttgcatgaaagcacaaggtaaatattcatttgcttcaggagtttcatgttggatctgtcattatcaaaagtgatcagcaatgaagaactggtcggacaaaatttaacgttgatgtaatgaaattccagatgtaggcattccccccaggtcttttcatgtgcagattgcagttctgattcatttgaataaaaaggaacttggaaaacatg

SEQ ID NO: 2411 - protein, 865 aa, Homo sapiens; identical to SEQ ID NO: 2391

SEQ ID NO: 2412 - DNA, 510 bp, Homo sapiens
tgaactttgcttttttaggacttgagactacaccttagcaattttcccataaatatacatgaagaacttctttattcttgtagcttgtagcttttcctttaaagtctttgagattggaagacttggtttaatttctcactttagaccttaacgtgtgactgtgagcaaggtagttaagctttccaagactcagttcttcatctgtacacagggatccgatggttcctatatgtggggtctgcaggaccgggagctccctaagggctagagccatgtttcttcatggtttaacctccatttcttattgcagtgcctggtgctaggaagtgcccaataaacctgttgtgaagctgcccaagctccttcttgcccaaatgctttggaaactgccaaaggacactcagaggccagggaatgtaacaggcaagcataaatatgcagaagagatggaaccaaaatagcgggcaggcagggccggcgctcgtgggggtcggtgatctggagccgggc

SEQ ID NO: 2413 - protein, 34 aa, Homo sapiens
MVPICGVCRTGSSLRARAMFLHGLTSISYCSAWC

SEQ ID NO: 2414 - DNA, 1106 bp, Homo sapiens
atggcccatcttgtagaaaggagagatgccagagcagccatggaaaactctggaggaaggaatcctgagcctcagagaacctacacctacccagctggccacatacagcctacacctacccaactggagcaactacctttgctgatacgcagcgaaggagaaagtacctgcggaaacaaggatttcagggaattgctttatggagcacaagactacatgtcaggtctagatgttatgacagactccaactgctgtctgtctcgcaagaagatcaggaagacagagagtggtataccacatcagtgtcagatttgtaagaaagcgtttaaacacgagcatcaccttaacgagcactcaaggcttcactcgggcaagaagccctatcagtgtgataaatgtggcaagcgcttctcacactccggctcgtactcgcagcacaggaatcacaggtattcctactgcaagcgggagacggaggagcgggaagccgcggagagcaaggcacgcgagaaagggcacttggaacccaccctgctgatgaaccgggcttacctgcagagcattatccctccagggtactctgactcggaggagaggaagaatggcgacgaggagttcgaggcggaagaggaagaaagtgaaaataaaagtatggatacggatcccgaaacgatacgagataaagaagaaactggagatcactccatggacgatagttcggaggatgggaaaatggaaaccaaatcagaccacgaggaagacaatatggaacgtggcatggactaaactactgcatttgaagcttcctttttttttttccagtagtattgttacctgcttgaaaacattgctgtgttaagcggttcatgcacatgcctgacgcttccagaaagctgtggagagggacagaaggggtggttcagccaagacagatgtagacagagttggagctgggtattgttaaaaactgcattatgcaaaaattttgtacagtgttaaggcctaaaaactgtgtggttcagagactaattcctgtgtttaatagcatttatactttaagcacaactagaaaattgtaaaaattgcactctacttacgtatcacta

SEQ ID NO: 2415 - protein, 261 aa, Homo sapiens [sequence omitted]

SEQ ID NO: 2416 - DNA, 436 bp, Homo sapiens
agatgaggttcttgctatgttgcctaggctggtcttgaacttctggcctcaagaaatcctcctcctgatcctcctacctcagccttccaaagtgttgggattacagcactggctagaacttccatccctgtggtgaataagagtgatgaaagtggacaccatcgtattattgaattgaagggacacctctgaaaacgtgtttagagagagagtgaagaatgagggtgtacctggcggagccaccatcctctgccacttctgaaacaagcaggtcttcaggcagtctcggggactgaggttgtaagttttatgtctcgacatcagttcctgcattggctccaatattacacacaactgcaagaagttcaaagacattggcatttcactacttcataacactaattacaataaataatgctaacagctggaatcaagt

SEQ ID NO: 2417 - protein, 39 aa, Homo sapiens
MLPRLVLNFWPQEILLLILLPQPSKVLGLQHWLELPSLW

SEQ ID NO: 2418 - DNA, 368 bp, Homo sapiens
ttgctgccctggtctgttgcgagcatgtcaaggagatttctcacttcctcacaggacgtgtgggatcatctcccagatgaactaccagttcctaagtatttgtctgaagcactggctagaacttccatccctgtggtgaataagagtgatgaaagtggacaccatcgtattattgaattgaagggattcaaacctcttctgtgataatcatagaactgtagcatcagaaggcaattccctaagtgtggtctgcccacatccctggtggtaagccaaatgatcgtaagtggtagagcggcaattacttttaaaaaatttgacagtcatatatctatttcaatgtatagcaaatatagaattggaacatc

SEQ ID NO: 2419 - protein, 59 aa, Homo sapiens
MSRRFLTSSQDVWDHLPDELPVPKYLSEALARTSIPVVNKSDESGHHRIIELKGFKPLL

SEQ ID NO: 2420 - DNA, 5367 bp, Homo sapiens
gcagactagacgctgagcgctcccgtgcgcagcgccccacgcagccgggacgcggcgccgctctgcgggtggaaccgccgcgcgctcccggcctcgggagctgagcccgagagaacttcgctgccttcgggtcgccgctcccgctttccactgtggaatgtgcagcttgggatagagagaaaccagggtttggggagcggtcctcctggagactttctctctgcaagtctccaaggttaagcaattctgacccactggaattcccagagcctgggagttaagcctaaaacgctctgttgctttaagcggcgcggtggggagtcgctggacactccttattttggttttacattaaaaagaaggcggacgagaagatgttgtaggtgacttcctagctgtgttaagttgctcctgggctgtgaatggtgttaatttctgaagtgggcggctccaaaaacttaacaaggaaagctcaggtaacggaggccttggaaagagactctgcgtcaggtcacccagcagagatcagcaatccttggctcactgaggaggtttggatttgcctcaaagggcactgcaaaaattgaacagaggaatcccaaggaagctgcctgaatttgcctgtatactctcgttctgcgacttataaaggaccagacaaatcaaattagtggttttggtttccgccagctgtggatgcctttgacattatgaccgcagaggattccaccgcagccatgagcagtgactcggccgccgggtcctccgccaaggtgcccgagggcgtggcgggcgcgcccaacgaggcagcactgctggcgctgatggagcgcacgggctacagcatggtgcaagagaacgggcagcgcaagtacggcggcccaccgcccggctgggagggcccgcacccgcagcgtggctgcgaggtcttcgtgggcaagatcccgcgcgacgtgtacgaggacgagctggtgcccgtgttcgaggccgtgggccgcatctacgagctgcgcctcatgatggactttgacggcaagaaccgcggctacgccttcgtcatgtactgccacaagcacgaggccaagcgcgcagtgcgtgagctcaacaactacgagatccgcccgggccgcctgctcggcgtgtgctgcagcgtggacaactgccgcctcttcatcggcgggatccccaagatgaagaagcgcgaggaaatcctggaggagattgccaaggtcaccgagggcgtgctggacgtgatcgtctacgccagcgcggccgacaagatgaagaaccgcggcttcgccttcgtggagtacgagagccaccgcgcggctgccatggctcgccgcaagctcatgcctggccgcatccagctgtggggccaccagatcgccgtggactgggccgaacctgagatcgacgtggacgaggacgtgatggagaccgtgaagatcctctacgtgcgcaacctcatgatcgagaccaccgaggacaccatcaagaagagcttcggccagttcaaccccggctgcgtggagcgcgtcaagaagatccgcgactacgccttcgtgcacttcaccagccgcgaggatgccgtgcatgccatgaacaacctcaacggcactgagctggagggctcgtgcctggaggtcacgctggccaagcccgtggacaaggagcagtactcgcgctaccagaaggcagccaggggcggcggcgcggctgaggcagcgcagcagcccagctacgtgtactcctgcgacccctacacactggcctactacggctacccctacaacgcgctcattgggcccaacagggactactttgtgaaagatacaatcctagaaactcaccctgcaagtttgcctcttgtactaagaagacatgcttaggatgcaaatctaggctgaaatagaatgttggaagcatctttaccagcctattaaagagcaaaggtgtagccacctgcaattaagactggggcagttaaatgccgagaaccgagggctgaggtctgcctccagcaccgtcactgttggttgctgatcatcttttgtgttgttattacaagcaggcagcataagaggccgagggcgaggtgcagctggcaacagagccccagggcctaggggttcctacctcgggggatattctgctggtcgtggtatatatagccgatatcatgaagggaaaggaaagcagcaagaaaaaggatatgaactggtgccgaatttggaaatccctaccgtcaacccagttgccattaaacctggtacagtagccatccctgccattggggctcagtattccatgtttccagcagctccagcccctaaaatgattgaagatggcaaaatccacacagtggagcacatgatcagccccattgctgtgcagccagacccagccagtgctgctgccgccgcagccgcggccgcagccgccgcagccgctgtcattcccactgtgtcgacgccaccacctttccagggccgcccaataactccagtatacacggtggctccaaacgttcagagaattcctactgccgggatctacggggccagttacgtgccatttgctgctccagctacagccacgatcgccacactacagaagaacgcggcagccgcggccgccatgtatggaggatacgcaggctacatacctcaggccttccctgctgctgccattcaggtccccatccccgacgtctaccagacatactgaggctggtgaccagcacgaagacagaccacacaaacaccactgaaggaacgcttgactatttatgaagaaggaacatgttggattcacacatgcaacctgaaagtgaagaatgttagcagatttatttctgaattattttatatacatgaagttttcactagttttttaagactattttcaacttagcatgcctacgttcatacatttccaaaagacttgcaatggttcgtgccttcattccatcttttaaaaatttgtatgctgtactacatttgtatagaggtttttgttgttgtttttttaaggatatattttcagtatgaaggttattttcttaacttctgcactccagagatttctattttgtagtaccttcaataatatatcaactatatattaaaaaagcacacttgaggagctagggaactattttgaaaaatatatacaatatttaaagatacaaacagtagtgcttaaaaatactacataaagcattattttaaaggttatactggaaagtgcaattttaaaatgagtaaaacctctgtatttctgctggcattaagggttgatggtgttaccatgtatcatcatggcggtactattttttaaaagaaattaaacactggatctctccttaagccaacattgaaaagacttgccgcacttctgagtccaaacactggaaagctctcctttgccaccgttagccggggctcattctccatgtgccttagccttaaacatgcccccactcccacatctctcaccctgtcccctcctccccagattcccaatcccaccgcaatgtttggcaagcctaggactgataagtagctctgatagaggagctggtggcttttatacttcttcctgggtttttgttggggtttgttgtttcgttgttttttgtttttttttttgtttggttggggaagtattgtcttctacgtgtgctattttcagtagcagagtaagcacaaggttttaatcgagttgcataagacacctttgcatagctatttaattgcccaatgtaaaactttaatgccatttctaatgcttttattcatttttgaagtatgagtttgtagggacaaagaatgtatgttatcgtagacaagacccccagagactcttttcagcagaaagttatgcttctagttgccttaccatgtttcttgcaaaactgtccatggtcctcaagggtgttggaaacattatgtttattaaatgggcctctcttcctttgctgtgcacttgatgggtgaactggattggggtgtgcacatccaggaggaggaggagagacctgtagaagtttaaagatagtttgtaaatatcttctaatgcttgtttttagtccttttatgttggagaagttcatggtatgtagtttaatgcaaaatgaaaccattttatttcaatgttattaaaaaggtttgttttattaggaagttaatgtattgttgcagtgttttgtgcctgtttaaaggcttttgtttagcagagtgaatgtaaaatacagtaaaatgttaagattgtcatctactttttaaaaaaaaatatcaacttggaattgttttttaaaggctcaatcaaggaagtgaggtgtgcaataaggtagcaagtaaaacgcagttgcgtttttatgtcatgttagagatccatacaattttccactcacgggatttttgttgatggctgaattcttgtggattcataagaggatcatgcccttagcaagtacttttgttttgttttaaattaagagattcccaaatgcctttttccccctcatcttgaaatgagatgagtttttatgtgtaagcaatatttatttaactattctataaaattattgagtgcctactgaggcctttaagcaccgctaacattcctttccatcattcttttaaatgacataaaataattgtgcaatgttcctgatgatgtaccccacaagctgcattcaaactcaaatctgtgggaatgagtgactcgacaaaatgtaattcggatcagatcctcatcccctgactgtgtgaaaaaagtactctccttctagtgaaggattgtcacagagtttcactggatgaaactatgacccagtattcttactgtattttacatatgcctgtaaattatttgcaaaaaagaagaagaagaggaagaaagaaaagaaagaaaagaaagaaagaaagaaagaaagaaagaaagaaagaaagaaagaaagaaagaaagaaagaaaaagaaagaaagaataaaaaaaaatgataacatggcaaccaccaaactcccttaaaaacaaacattggtgacatggccaattaagtatcagtgagcctcctatctgggacttatctgttcctattgtttcaaaaccatttcatgtacactactgaggtaagtttataacttgaaatgtgaactttttttttttttagtgttaagaacaaactatataaatgtaaaaaaaaagttttagagttctgttttcaaacattgctagtggtttagttaactttagctgctttatatttgaaaagcttttatttagatcttgctccatttacagtacattcttaggatgtatgtagtaaataaagctttctttaaagcaatcgcaagacctta

SEQ ID NO: 2421 - protein, 393 aa, Homo sapiens
MTAEDSTAAMSSDSAAGSSAKVPEGVAGAPNEAALLALMERTGYSMVQENGQRKYGGPPPGWEGPHPQRGCEVFVGKIPRDVYEDELVPVFEAVGRIYELRLMMDFDGKNRGYAFVMYCHKHEAKRAVRELNNYEIRPGRLLGVCCSVDNCRLFIGGIPKMKKREEILEEIAKVTEGVLDVIVYASAADKMKNRGFAFVEYESHRAAAMARRKLMPGRIQLWGHQIAVDWAEPEIDVDEDVMETVKILYVRNLMIETTEDTIKKSFGQFNPGCVERVKKIRDYAFVHFTSREDAVHAMNNLNGTELEGSCLEVTLAKPVDKEQYSRYQKAARGGGAAEAAQQPSYVYSCDPYTLAYYGYPYNALIGPNRDYFVKDTILETHPASLPLVLRRHA

SEQ ID NO: 2422 - DNA, 1046 bp, Homo sapiens
gcagactagacgctgagcgctcccgtgcgcagcgccccacgcagccgggacgcggcgccgctctgcgggtggaaccgccgcgcgctcccggcctcgggagctgagcccgagagaacttcgctgccttcgggtcgccgctcccgctttccactgtggaatgtgcagcttgggatagagagaaaccagggtttggggagcggtcctcctggagactttctctctgcaagtctccaaggttaagcaattctgacccactggaattcccagagcctgggagttaagcctaaaacgctctgttgctttaagcggcgcggtggggagtcgctggacactccttattttggttttacattaaaaagaaggcggacgagaagatgttgtaggtgacttcctagctgtgttaagttgctcctgggctgtgaatggtgttaatttctgaagtgggcggctccaaaaacttaacaaggaaagctcaggtaacggaggccttggaaagagactctgcgtcaggtcacccagcagagatcagcaatccttggctcactgaggaggtttggatttgcctcaaagggcactgcaaaaattgaacagaggaatcccaaggaagctgcctgaatttgcctgtatactctcgttctgcgacttataaaggaccagacaaatcaaattagtggttttggtttccgccagctgtggatgcctttgacattatgaccgcagaggattccaccgcagccatgagcagtgactcggccgccgggtcctccgccaaggtgcccgagggcgtggcgggcgcgcccaacgaggcagcactgctggcgctgatggagcgcacgggctacagcatggtgcaagagaacgggcagcgcaagtacggcggcccaccgcccggctgggagggcccgcacccgcagcgtggctgcgaggtcttcgtgggcaagatcccgcgcgacgtgtacgaggacgagctggtgcccgtgttcgaggccgtgggccgcatctacgagctgcgcctcatgatggactttgacggcaagaaccgcggc

SEQ ID NO: 2423 - protein, 54 aa, Homo sapiens
MVLISEVGGSKNLTRKAQVTEALERDSASGHPAEISNPWLTEEVWICLKGHCKN

SEQ ID NO: 2424 - DNA, 899 bp, Homo sapiens
ataaacaggtaaggcggagggggtggggcgcggattgcggacatctgggtttcttgggaattgggatggggtgggggttcgagccaactccccagagagcaggcaaggtgaagcgagggcttggctgctgtttctaaatgcagtgtttttttgttccctttctagaaaccctccgtaactctaggtcagagcgcactaaaatgagccacttctgaacgagcagcgcccaggccccaggccctgctgcgaaggccccggcaaaggtcagggccccgtccgcgtgacgctcctgcctgcgcgcggccaagccatgctcggccccagctcaggtaacggaggccttggaaagagactctgcgtcaggtcacccagcagagatcagcaatccttggctcactgaggaggtttggatttgcctcaaagggcactgcaaaaattgaacagaggaatcccaaggaagctgcctgaatttgcctgtatactctcgttctgcgacttataaaggaccagacaaatcaaattagtggttttggtttccgccagctgtggatgcctttgacattatgaccgcagaggattccaccgcagccatgagcagtgactcggccgccgggtcctccgccaaggtgcccgagggcgtggcgggcgcgcccaacgaggcagcactgctggcgctgatggagcgcacgggctacagcatggtgcaagagaacgggcagcgcaagtacggcggcccaccgcccggctgggagggcccgcacccgcagcgtggctgcgaggtcttcgtgggcaagatcccgcgcgacgtgtacgaggacgagctggtgcccgtgttcgaggccgtgggccgcatctacgagctgcgcctcatgatggactttgacggcaagaaccgcggc

SEQ ID NO: 2425 - protein, 111 aa, Homo sapiens
MTAEDSTAAMSSDSAAGSSAKVPEGVAGAPNEAALLALMERTGYSMVQENGQRKYGGPPPGWEGPHPQRGCEVFVGKIPRDVYEDELVPVFEAVGRIYELRLMMDFDGKNR

SEQ ID NO: 2426 - DNA, 2967 bp, Homo sapiens
agacgctgagcgctcccgtgcgcagcgccccacgcagccgggacgcggcgccgctctgcgggtggaaccgccgcgcgctcccggcctcgggagctgagcccgagagaacttcgctgccttcgggtcgccgctcccgctttccactgtggaatgtgcagcttgggatagagagaaaccagggtttggggagcggtcctcctggagactttctctctgcaagtctccaaggttaagcaattctgacccactggaattcccagagcctgggagttaagcctaaaacgctctgttgctttaagcggcgcggtggggagtcgctggacactccttattttggttttacattaaaaagaaggcggacgagaagatgttgtaggtgacttcctagctgtgttaagttgctcctgggctgtgaatggtgttaatttctgaagtgggcggctccaaaaacttaacaaggaaagctcaggtaacggaggccttggaaagagactctgcgtcaggtcacccagcagagatcagcaatccttggctcactgaggaggtttggtaagttggcatcatcttcaccatgactcaaatgcacataacccggtggcgggggagaaaagtgggtgaacatcacatagcgacatcaaaatgctaatccttgccacccccctttgtttttgtttttacaaacgtattgttgttgtgtttgtttaatttactaggccagagtgccctgtatgtttgtaagcacaaatgtcctcagaggactcccacagccaaaaagaatgacagaggtgtatttgaatgatttcagtgaaactcttttaatactgatttcatgaaaatgtctggtggtgggttcttcctgtagcattactgcatatcatcaactagaatgcatcccccgcccttcacacatacaatttaacatgtctgaaattcggtgcaccttatgcaaacaggtctggtgaaatacagcatttctctgataatccccaaatgaccagcattaagtattccctaccttctatttttcacacaatacaaatgttttttttttttttttctttttagagggttgaatttttaagggtaagaaatgcatagtctgatgagtagatgattagtaagaagtctgtgcttaccaaagaaagaatttaggtttccttttttgtttttgtttttgaaatgaagtcacattatcacccaggctggagtgcagtggcacgatctcggctcactgcaacctctgctcctgggtttatgtgattctcctgcctcagcctcccgagtagctgggactgactacaggcacgcaccatcacacctggctaattattgtatttttagtcgagatggggtttcaccatgttggccaggctggtctcaaactcctgacctcaagtgatctgcccacctcagcctcccaaagtgctgggattataggcatgagccaccacacccagccagaatttagttttctaatactgaaagaaaaacttttttttttggtgacttcatatgatagtcttgagatgagcaccccaaggaccttgtaaatagtgggcgctggcactcagaacagcccatgtgagataatgaagcagccttccagacataagatcccagaatcagacacttatccaaggttcccctcctgcaatcagcgggtaggagtttgcaatgaaaacactccatgctatgtcccagagtgactcgttcatttatccgtgaaagcagagtccaaatccatgttcatgttaaatgtgcagaaaaatagcatcttgagagttaatgccacagaatgggcatgattccctaagccacatttgcctgattgagacagactttaacatttgcaaaacctccatgttatgagaccctataggtgatagtacatgatctgtagggatacaagtaaatccattaacaaacattttttgagcacctgctatgtgccaggctctgtgctaggctctgtgctagatgtagcataattaagaagtaattaggacagaaaggattgctgtccccacagggctactttagtagtcacagaagatattaaataatacattaacagagtaatgagtgggctgatgaagaactgtaaggagttaagagtctaaaacaagaaaacctaagctagccagagtggctcacgcctgcaatcccagcacatagggaggccagggtgagaggatcacttgagctcaggagttcaagaccaacctgggcaacataatgagacctgtctctacaaaaatttaaaaattgtcatcccattctctactggaaaataaaaaattagctgggtatgctggcacgcacccatagtcccagctacttgggaggctgcagtgagagaattgcttaggcctgggaggttgaggctacagtgagccaagattgcatcactgcagtctagccagggcaacagagcaagaccctatctcgaaaaaataaataaataaaaacaagaggacctaacataatctgagtcaggaggtgactattgggaaggttgcttggagtttgaatggcattctaactgagacctggaggataggcagagggggattggagacaggcggcagtggctacattaaacagcctttgcaggggcccagtatggagagagtgttggggtcaaggaatagcatgagctatggggggaaagggaaagggagagggagaggcttcagagaacaggtgtctcttgtaaaatgaaaacttagtcaaatttctggaagaatctttaaaacctcttaaagagattgatttcagactgatgatcagatttttttgtttttgtggttcagacagaaatcttaccttgtgtatcagcattattccctagagttagagcccaagtattgctcccctgctaatcctttgaattctccccaaatctatgttcttaatttacctcacctacctccccaaggaaggtaatcagcttctagtaagaggtgg

SEQ ID NO: 2427 - protein, 45 aa, Homo sapiens
MVLISEVGGSKNLTRKAQVTEALERDSASGHPAEISNPWLTEEVW

SEQ ID NO: 2428 - DNA, 592 bp, Homo sapiens
agacgctgagcgctcccgtgcgcagcgccccacgcagccgggacgcggcgccgctctgcgggtggaaccgccgcgcgctcccggcctcgggagctgagcccgagagaacttcgctgccttcgggtcgccgctcccgctttccactgtggaatgtgcagcttgggatagagagaaaccagggtttggggagcggtcctcctggagactttctctctgcaagtctccaaggttaagcaattctgacccactggaattcccagagcctgggagttaagcctaaaacgctctgttgctttaagcggcgcggtggggagtcgctggacactccttattttggttttacattaaaaagaaggcggacgagaagatgttgtaggtgacttcctagctgtgttaagttgctcctgggctgtgaatggtgttaatttctgaagtgggcggctccaaaaacttaacaaggaaagatatcttgggaatattgaatatattcacagatggtagaatcggagtttgcagttctgctttctttgccctgaccttgtttgagacgtgcttgcttctgatatgctgattccacgttgcaaaagtgaaa

SEQ ID NO: 2429 - protein, 51 aa, Homo sapiens
MVLISEVGGSKNLTRKDILGILNIFTDGRIGVCSSAFFALTLFETCLLLIC

SEQ ID NO: 2430 - DNA, 2661 bp, Homo sapiens
gcttcggcccctcctcccgccctccccacggagagccgagcagcagccctagagcctctcgcaagtctctctcacacttccccgccctcgccccaaaggagcagcagctccttcttgcctctccattgccgccgccgcaccggcggagctcctctctcgcgcgtctctcctccgatggagctcgggcgccgccgacgccgccgctgccccgaaccctgagcggggccgccccggtcggaggaacgcgccgcccagtccgagggcgcagagcgccaggagcacgcggagggctggggcgcgggctccgggaacgagaaagtgcagctctctcgggtcactgggccggcggcggggggactatggctctgaaggacacgggcagcggcggcagcaccatcctgcccattagcgagatggtttcctcgtccagctcgcccggcgcgtcggccgccgccgccccggggccctgcgcaccctcgcccttccctgaagtagtggagctgaacgtaggcggccaggtttatgtgaccaagcactcgacgctgctcagcgtcccggacagtactttggccagcatgttctcgccctctagtccccgtggcggcgcccggcgccggggcgagctgcccagggacagccgggcgcgcttcttcatcgaccgggacggcttccttttcaggtacgtgctggattatctgcgggacaagcaactcgcgctgccggagcacttccccgagaaggagcggctgctgcgcgaggccgagtatttccagctcaccgacttggtcaagctgctgtcgcccaaggtcaccaagcagaactctctcaacgacgagggctgccagagcgacctggaggacaacgtctcgcagggtagcagcgacgcgctgctgctgcgcggggcggcggccgccgtgccctcgggcccgggagcgcacggtggtggcggcggcggcggcgcgcaggacaagcgctcgggcttcctcacgctgggctaccggggctcctacaccaccgtgcgcgacaaccaggccgacgccaaattccggcgtgtggcgcgcatcatggtgtgcgggcgcatcgcgctggccaaggaggtcttcggggacacgctcaacgagagccgcgaccccgaccggcagccggagaagtacacgtcccgcttctacctcaagttcacctacttggagcaggcctttgatcgcctgtccgaggccggcttccacatggtggcgtgtaactcctcgggcaccgccgccttcgtcaaccagtaccgcgacgacaagatctggagcagctacaccgagtacattttcttccgaccacctcagaaaatagtatcacctaaacaagaacatgaagataggaaacatgacaaagtcactgataaaggaagtgaaagtgggacttcctgtaatgagctctccacttccagttgtgacagccattcagaggcaagcactccccaggacaacccatccagtgcccagcaggcaacagctcaccaacctaacactttaacattggatcgcccctctaaaaaagcacctgtacaatggatacccccaccagacaaacgcagaaacagtgaactctttcagaccctcatcagcaagtcccgggaaacaaatctgtccaaaaagaaagtctgtgagaagctaagtgtggaagaagaaatgaaaaagtgtattcaggattttaaaaaaatccacattccagattattttccagagcgcaaacgccaatggcaatctgaactgttgcagaagtatgggttatagtaattgtcacattcctgcagtattttgatgacattcaatgtttactacagtgtcaccacctgactgatgtcctaacaatggtcagtgtgattcttgctgctcttccttgttgtgaacagtggatgtgggacagtattttcttttatgttttagttgttgttctttttagaaacatgattaaaaaggaaaaaatattaaatcaataagtgttaaatcaaaatggaatatctgattcaaaccattttacaagaatgaaagtaaaatgtgcatgatcaagcttagtatcttggtttttgaactctggtcaactggatatgtttgtcattttgtaacttaccaaaaacaaaccatcatatcataccaactaaaatgatatatggatgaagcaacatcaagtaaaattttagacgatggctataggacccaaatctaaagctgtctaaatgttaattcaatgaaacaagtattatttttgcatgaatacaatgttacaaataaatcacaagaaatagggaagatctgtttgttgcttggaaagaaaaaaattacaaaaaaaagcaaaaaaaaatgttttagacaaagcctataaatgtaagctgtctaggagattgaattttctttgttctggatctgtgacttttttgtgtatgtgtatggtgtttatgtatattaagatggtgtaaatatgccttatactgttatttatggcatcaacattcatttactaatgctagtcatgattattactgtgaaatgagtcttacatcgggctgtgaaaattggtataatgatgctttgaaagatcctattatcatgttaatcaaaataatagagggaaatggtaaagagctttatgtatttattaaaaaaagaaaaatgt

SEQ ID NO: 2431 - protein, 473 aa, Homo sapiens; identical to SEQ ID NO: 226

SEQ ID NO: 2432 - DNA, 561 bp, Homo sapiens
aaaaggttcaggggtgccttgcatctcagaagcaaccggaaaacccaatgcagaaggcaaattgtttagctaaagatgtgaggtgaaactgttgtccatttaagtcagtgtacaccactgtggattaggagccccagcttgaggttctggctggacaagcaggtagattatcattaagacatgggttcacaacaaggtgacatcacagctaaaggatccttctactcaggaagatcaaacctacatgaatgaaaataatgtcatgcaatattggaggttcatcacaaacagagaagaaattaatagctgagaaaacctggactggaacattagtgcttggaactgtcaaacctgcatctttaaagaactgggcccttcttcagagagaaaagaaaacatcaaagctttactgaacaatgttaatggatgacttgtttctcttcatgttactgcaaagaaagataaatcatgaaccataaatctgtgtttcttttttctttcatctgtattcaaccttagttcactgacatactctaagatttcttgtcattaaaagctttt

SEQ ID NO: 2433 - protein, 54 aa, Homo sapiens
MKIMSCNIGGSSQTEKKLIAEKTWTGTLVLGTVKPASLKNWALLQREKKTSKLY

SEQ ID NO: 2434 - DNA, 6785 bp, Homo sapiens
attggctccctggctcaattctgctgggagtcgcatcctacctgtttgggaggtgcactgcctttccacactctcccttctgtactcagccagctgctgctgaggtgggaggaaaagtcctggctgggagaattgagctagtgcagcacacgtaaaaaagcgattccgatgggtcctttgaaagcttttctcttctccccttttcttctgcggagtcaaagtagaggggtgaggttggtcttcttgttactgaccctgcatttgggaaactgtgttgataaggcagatgatgaagatgatgaggatttaacggtgaacaaaacctgggtcttggccccaaaaattcatgaaggagatatcacacaaattctgaattcattgcttcaaggctatgacaataaacttcgtccagatataggagtgaggcccacagtaattgaaactgatgtttatgtaaacagcattggaccagttgatccaattaatatggaatatacaatagatataatttttgcccaaacctggtttgacagtcgtttaaaattcaatagtaccatgaaagtgcttatgcttaacagtaatatggttggaaaaatttggattcctgacactttcttcagaaactcaagaaaatctgatgctcactggataacaactcctaatcgtctgcttcgaatttggaatgatggacgagttctgtatactctaagattgacaattaatgcagaatgttatcttcagcttcataactttcccatggatgaacattcctgtccactggaattttcaagctatggataccctaaaaatgaaattgagtataagtggaaaaagccctccgtagaagtggctgatcctaaatactggagattatatcagtttgcatttgtagggttacggaactcaactgaaatcactcacacgatctctggggattatgttatcatgacaattttttttgacctgagcagaagaatgggatatttcactattcagacctacattccatgcattctgacagttgttctttcttgggtgtctttttggatcaataaagatgcagtgcctgcaagaacatcgttgggtatcactacagttctgactatgacaaccctgagtacaattgccaggaagtctttacctaaggtttcttatgtgactgcgatggatctctttgtttctgtttgtttcatttttgtttttgcagccttgatggaatatggaaccttgcattattttaccagcaaccaaaaaggaaagactgctactaaagacagaaagctaaaaaataaagcctcgatgactcctggtctccatcctggatccactctgattccaatgaataatatttctgtgccgcaagaagatgattatgggtatcagtgtttggagggcaaagattgtgccagcttcttctgttgctttgaagactgcagaacaggatcttggagggaaggaaggatacacatacgcattgccaaaattgactcttattctagaatatttttcccaaccgcttttgccctgttcaacttggtttattgggttggctatctttacttataaaatctacttcataagcaaaaatcaaaagaagtctgactaaattcagtagaatcttttgtgcttcagtaacttgaagtttaaatttaaaatgcagagagaccaatggttaaaatgtgaatagtattgtaactattttaaggccttcagaagtaaataaagtagcagctttcaggctaatttacgtgaaactgattagttgcaaaatccagtaggttaaaatactcacatatttttacttaaattttctttaatttacttatatgttattataattttgaatttttaagttctatgattcatgttttaaagatggaataattttaatacatattttgtttaaatataatctataattgttttgtaatgtaagactaattactaatatttatgtagcaacttttgtgccagaaaaaagactgttaatttgttttttcttgcttttcatttgattaccctgcttgaaatacagttagttgataacataaagccatagttttcttggattttcttccaagatattgtattcccaagaagaaattgatttatttttaaactatcagttactgaagacttatgaaaaggtcaatttttacctgtcttttaatccagtccattttctgacacaatattaaacagaacgccagttgcatttactttggtgatttgcaaacttggaatgaagccaccagtcattttttaagaatgcaagatgaaaaaatcaggtaaaatctaaccattttattctctgcttcatagcatttataatgtatgatgaggttaacactgaaatattaaaatctgcaaatgcacattaatgcaaattaaatgcagagagaaatgattatttttttctttatgttttatgaaagtgttgcagtccctaaaataaaaatattgaggaacattgcttgtatttactcacgtggttaaaaaattattacctggcaaactgagttgccggtcatattgaggacaaaatcttaaatatgtgctattagcattgtttttagactagtaatatgcagaaaacagttttaggcctgcgttacatattgcctcttccagctccaaagttttggaccctgtcagttttgcaactacattatacattattataatattcttttttttttctagaaactgggggcagcctcaaaatcatgttaaagagggagttttgttagaggcatctttaatgaacatgaatgtgagtgctctctaaattcttagcatctcactggatgtaaaatctatcagttaatagttttaaaaatgtctcttttgttaagaataaatttaggcttcaatcattataatcctgtaagtagcttgacataccaattgtttataagattcatcacataaatttctggagaaccaccaggtttagcttggaaataacctttaaagattgtttctgttgccaagaccaatgaccatgatgaagagttttatgatcacagcctatcttacttaaggtttgagaggaaacctgtcacctctgcaattgttactctagtttttaatgttataattccgctgcgtggttagtgaatgtctggcatgattatacacgtgtattggaaatatctagttttttaaatttttaattaatttatttataatttactgtgtgttcccagctaactctattttttttttcacttgctcataaacttctggaaaaaaataagcatgaatcaaatggtaatgcccaatatccaccgacactgcttttcttgaatgaacagccaaactaaactttggccatctatatattcatttacagattattcatacattcattttaataacattgagtactgatggatgttttgaaagtgagcattcatttaaggataaataaaaaataaagtagtaataaagaataaaatactttactaaaatattgtatggctattttcatgtttgaagctatagcttactatcatgagacagttttgattttgggactctttcaagtgtatctgagcatgactgtattttaaaatacttaaaagtgcttgatataaatagcttttccttctgaaccacgttctatgtaaaagaaaaaaaatagctttgattttctcactggtgtttcattaacttggttttaaatgttgacaatatttacaagtggaaataaaatttgtaaatatatgaaagatgcctttccttgtatataccatcaagcaagcactttgttttcaaagcaagtggtattttgatcagttttatttaaatgtgtgatcagaaagaatggcgtacaaatcttattatttctaaaaataagaataaaaaggtaaaactacatttagacttctttctcaagaaatcaaatacagctttttttcaaagctgattcagttcatttcctgttcctctattccaagtataagtttcaccaccttgagaaataatttttttaaaaaatcttcctctttctctggggagttatataataatttattgaatttattggaacttgattttcctggatgctttcaatgtttttaatgctaacatagaccccaaaattagatataaagaattgggaaggatacctggagcacaaggaataagatcatttgtaaaaatgtttgtttatatagacctatcctctaaatatgtgacaaggatctagaaattctgagaggggaaaatgtgattttggatttacaatgacagggtaatattttatttatcttcgaattccatggacaaaattaggctcacttaaattaatttttgtaaacccaagtaagttctaaaaaaaagtaaaaaatacatagaatacttgagaatttagcagggacagggaaaaatttcccagtaagtctgaagtcttgatgtaagtgggaattagataactaattggaggcattttattttaagttaaagacagatttctttaataagtttttaaaattgatcaactttaaattaagcacagtaaatgtgtataaatatgaaggcaatcataaggattttttcacttgtgtttccatattctggcattagtatatcatcataaaatagacaatgtttttgtctcaagaacaagaataaaattgaaatctgcattcatgccaattcagcataaaaaagaataggctacagttctctcacaccaagggccccatagttataaatgtgaaattatattccaggtcaaaatttgtgaaaaatacacaaaacactttgattttacaagagaggagctttaaataagatgattttagtagattgaaataaataaccagtatttaagtaaatgtataacgaatgaataaatacatgcataatattttcaaagttctataccagtacctatttttactcttacaaaatttcctgtaaaaaaatactacatttgaaattatttcattggttttagaactggcattgaaggtacccagtagactcttaagcctttactgcttgtctcactagaaacatttatttctgacctaccaagttttcttcacatcatcaaatttattcagcttctcagtgctgtaccgtatgatggcaagacatacttggtatttccatttttgttggtcattctttattgctttttactgctaggaaggtcttgccaggcttctatacagttacaaaaaccattaccaaactttatcaaggactttccaaatggagttttcaaatactattgaccacattgctctagttaatgtaaggtcagctctgactttttgtgtttgcatttcggaagtgaggtaacctcattcaaatatatatgcagcactttctgtgtacaaagtactgttctaaatacaaaagggaatataaagatgactttcaaggaacatataatgtagtcagaaagatgagaggattagttatacaatttaaggaagggaggataactttgggaaggttttgtggaggatatgtgtttagagatgcgagctggggattcaacaggtaagagggagagagatcacaatttccaactgggtaaacagcttgaaaaaagaaacagaagcctgggcacaaatgaaaattccatattaattggaagttaagattcatatagagacaatgaaaggttaggttagaacaataaactgagaagtacgaatgtggacttcaggaggctaggggaaattacgaagtcataaaaagttcacagagatacttgagtacaaaagatacattattaaaatttctgcagaagtttcatcttatttgtgtgtgatggtttggaatataacaagccagttaggcgtataagcttatagtggctaatatgaggatgaaatccgtactcttgtgacacaagtcttcagcggagatgggggatgataggcccaaatagaaagaaaagtggcagacattaagctttgactaacagacaacataactgagagacatggtgtgttgggtggaagggatcctgtagtagatacttgcttgcatgtagatgggtacaaagacaccataaggaaattctgaatgtaatacaaaggcttatttttcctgttgatttatctttttcacacataaaagatgaagaaaaaaataatctgaaatgtaaatcctaaagtgatctgtctagattcttattttttgaaaaatgttcctcactaaaagagttttctattcaaataaccatttccagttttctaactgagacatacatacatatatatatgtataaaattatatatatatttggacaaagagaataagagaattgcaggtagaaatagtctactgtgtgtagacaaatccagaaagttgatttctgttcctcaaacaatttctgaaatatttatgtcagaataaataaaagaattgttattgttggacaatgaaacatacctggaccctttgagtgtgtgaatagtaaaggctgtgataactgaaatgcagctaagcaaaaagggctaattagaagacttttgagacatgatttacctaaatggaaatagtttggttttcaatccttcactgtaataacaattatttgcatctattaagtgtttgtagtcactttgtataataaagttttatggcttgtgattataatggcttctgttattctgctactgcctcattgttttgaggaacatttgtaattttgtggcaaaggtgtctcaatttttcagtgttctttactctcatgatccttagaacaaaaaaaataccagtaacttgttataaataaagagtcacattctcttaaa

SEQ ID NO: 2435 - protein, 465 aa, Homo sapiens; identical to SEQ ID NO: 228

SEQ ID NO: 2436 - DNA, 1456 bp, Homo sapiens
ggcggtgatgaagacaaaattgaacatctacaacatgcagttcctgctttttgttttcttggtgtgggaccctgccaggttggtgctggctaacatccaagaagatgaggctaaaaataacattaccatctttacgagaattcttgacagacttctggatggttacgataatcggcttagaccaggactgggagaaaaaagaaaaggcttccgttatgatacagaacaacgcttatgcagtggctgttgccaattatgccccgaatctttcaaaagatccagttctctccaccatctccaagagtgcaaccacgccagaacccaacaagaagccagaaaacaagccagctgaagcaaagaaaactttcaacagtgttagcaaaattgacagaatgtccagaatagtttttccagttttgtttggtacctttaatttagtttactgggctacatatttaaacagagaacctgtattaggggtcagtccttgaattgagacccatgttatctttgggatgtatagcaacattaaatttggtttgttttgctatgtacagtctgactaataactgctaatttgtgatccaacatgtacagtatgtatatagtgacatagcttaccagtagacctttaatggagacatgcatttgctaactcatggaactgcagacagaaagcactccatgcgaaaacagccattgccttttttaaagatttaccctaggacctgatttaaagtgaatttcaagtgacctgattaatttcctattcttccaaatgagatgaaaatggggatcctgtacaaccctttgtggacccttttggtttagctcttaagtaggggtattttctactgttgcttaattatgatggaagataacattgtcattcctagatgaatcctttgaagtaacaaacattgtatctgacatcagctctgttcatgagtgctcagagtccctgctaatgtaattggaagcttggtacacataagaaaaactagagatttgaaatcagctatgaattactctatatagtatctatagccatgtacatattacagcatgacaagctcaaataattatgagtcagcccgaaaggatgttaattatgcctacgatgtaataactattggaatgtcatggtcattacatttttagcttcagagtttatttgaaagtaataattgaaatcctacaatttattttaatcattggaaactaccttaattaaaaaaaaagaaaagaaatgtgtcttaacatttccaggtatgtgttgtattgaaattgatcagctaaattttacgggtgctggagactggaaaaagcatccagtttggttgctgtggagcaacatgcatattggattagaaaattgtgccaaaaactcccactgatgagaattcataggtgccccacactatgacaaacacttatatgattctcctctttcctg

SEQ ID NO: 2437 - protein, 128 aa, Homo sapiens
MRLKITLPSLREFLTDFWMVTIIGLDQDWEKKEKASVMIQNNAYAVAVANYAPNLSKDPVLSTISKSATTPEPNKKPENKPAEAKKTFNSVSKIDRMSRIVFPVLFGTFNLVYWATYLNREPVLGVSP

SEQ ID NO: 2438 - DNA, 2429 bp, Homo sapiens
ggcggtgatgaagacaaaattgaacatctacaacatgcagttcctgctttttgttttcttggtgtgggaccctgccagagaccaatcaggaagaactaggctctaaggatctctgcagctgtgtatgtgttgctgatgctttcagagcccacctccacctcctggctacatggagcctggcacatagccagtggagtttccctgatgcttatattgcacttggccattgggtggaggtatacccaaagttggtgctggctaacatccaagaagatgaggctaaaaataacattaccatctttacgagaattcttgacagacttctggatggttacgataatcggcttagaccaggactgggaggaatatacaattgatgttttctttcgacaaaaatggaaagatgaacgtttaaaatttaaaggtcctatgaatatccttcgactaaacaatttaatggctagcaaaatctggactccagataccttttttcacaatgggaaaaaatcagtagctcataatatgacaatgccaaataagttgcttcgaattcaggatgatgggactctgctgtataccatgaggcttacagttcaagctgaatgcccaatgcacttggaggatttcccaatggatgctcattcatgtcctctgaaatttggcagctatgcatatacaacttcagaggtcacttatatttggacttacaatgcatctgattcagtacaggttgctcctgatggctctaggttaaatcaatatgacctgctgggccaatcaatcggaaaggagacaattaaatccagtacaggtgaatatactgtaatgacagctcatttccacctgaaaagaaaaattgggtattttgtgattcaaacctatctgccttgcatcatgactgtcattctctcccaagtttcattctggcttaacagagaatctgtgcctgcaagaactgtgtttggagtaacaactgtcctaacaatgacaactctaagcatcagtgctcggaattctctccccaaagtggcttatgcaactgccatggactggtttattgctgtttgttatgcatttgtgttctctgccctaattgaatttgcaactgttaattacttcaccaaaagaggatgggcttgggatgggaagagtgtagtaaatgacaagaaaaaagaaaaggcttccgttatgatacagaacaacgcttatgcagtggctgttgccaattatgccccgaatctttcaaaagatccagttctctccaccatctccaagagtgcaaccacgccagaacccaacaagaagccagaaaacaagccagctgaagcaaagaaaactttcaacagtgttagcaaaattgacagaatgtccagaatagtttttccagttttgtttggtacctttaatttagtttactgggctacatatttaaacagagaacctgtattaggggtcagtccttgaattgagacccatgttatctttgggatgtatagcaacattaaatttggtttgttttgctatgtacagtctgactaataactgctaatttgtgatccaacatgtacagtatgtatatagtgacatagcttaccagtagacctttaatggagacatgcatttgctaactcatggaactgcagacagaaagcactccatgcgaaaacagccattgccttttttaaagatttaccctaggacctgatttaaagtgaatttcaagtgacctgattaatttcctattcttccaaatgagatgaaaatggggatcctgtacaaccctttgtggacccttttggtttagctcttaagtaggggtattttctactgttgcttaattatgatggaagataacattgtcattcctagatgaatcctttgaagtaacaaacattgtatctgacatcagctctgttcatgagtgctcagagtccctgctaatgtaattggaagcttggtacacataagaaaaactagagatttgaaatcagctatgaattactctatatagtatctatagccatgtacatattacagcatgacaagctcaaataattatgagtcagcccgaaaggatgttaattatgcctacgatgtaataactattggaatgtcatggtcattacatttttagcttcagagtttatttgaaagtaataattgaaatcctacaatttattttaatcattggaaactaccttaattaaaaaaaaagaaaagaaatgtgtcttaacatttccaggtatgtgttgtattgaaattgatcagctaaattttacgggtgctggagactggaaaaagcatccagtttggttgctgtggagcaacatgcatattggattagaaaattgtgccaaaaactcccactgatgagaattcataggtgccccacactatgacaaacacttatatgattctcctctttcctg

SEQ ID NO: 2439 - protein, 442 aa, Homo sapiens
MLSEPTSTSWLHGAWHIASGVSLMLILHLAIGWRYTQSWCWLTSKKMRLKITLPSLREFLTDFWMVTIIGLDQDWEEYTIDVFFRQKWKDERLKFKGPMNILRLNNLMASKIWTPDTFFHNGKKSVAHNMTMPNKLLRIQDDGTLLYTMRLTVQAECPMHLEDFPMDAHSCPLKFGSYAYTTSEVTYIWTYNASDSVQVAPDGSRLNQYDLLGQSIGKETIKSSTGEYTVMTAHFHLKRKIGYFVIQTYLPCIMTVILSQVSFWLNRESVPARTVFGVTTVLTMTTLSISARNSLPKVAYATAMDWFIAVCYAFVFSALIEFATVNYFTKRGWAWDGKSVVNDKKKEKASVMIQNNAYAVAVANYAPNLSKDPVLSTISKSATTPEPNKKPENKPAEAKKTFNSVSKIDRMSRIVFPVLFGTFNLVYWATYLNREPVLGVSP

SEQ ID NO: 2440 - DNA, 2260 bp, Homo sapiens
ggcggtgatgaagacaaaattgaacatctacaacatgcagttcctgctttttgttttcttggtgtgggaccctgccaggttggtgctggctaacatccaagaagatgaggctaaaaataacattaccatctttacgagaattcttgacagacttctggatggttacgataatcggcttagaccaggactgggaggaatatacaattgatgttttctttcgacaaaaatggaaagatgaacgtttaaaatttaaaggtcctatgaatatccttcgactaaacaatttaatggctagcaaaatctggactccagataccttttttcacaatgggaaaaaatcagtagctcataatatgacaatgccaaataagttgcttcgaattcaggatgatgggactctgctgtataccatgaggcttacagttcaagctgaatgcccaatgcacttggaggatttcccaatggatgctcattcatgtcctctgaaatttggcagctatgcatatacaacttcagaggtcacttatatttggacttacaatgcatctgattcagtacaggttgctcctgatggctctaggttaaatcaatatgacctgctgggccaatcaatcggaaaggagacaattaaatccagtacaggtgaatatactgtaatgacagctcatttccacctgaaaagaaaaattgggtattttgtgattcaaacctatctgccttgcatcatgactgtcattctctcccaagtttcattctggcttaacagagaatctgtgcctgcaagaactgtgtttggagtaacaactgtcctaacaatgacaactctaagcatcagtgctcggaattctctccccaaagtggcttatgcaactgccatggactggtttattgctgtttgttatgcatttgtgttctctgccctaattgaatttgcaactgttaattacttcaccaaaagaggatgggcttgggatgggaagagtgtagtaaatgacaagaaaaaagaaaaggcttccgttatgatacagaacaacgcttatgcagtggctgttgccaattatgccccgaatctttcaaaagatccagttctctccaccatctccaagagtgcaaccacgccagaacccaacaagaagccagaaaacaagccagctgaagcaaagaaaactttcaacagtgttagcaaaattgacagaatgtccagaatagtttttccagttttgtttggtacctttaatttagtttactgggctacatatttaaacagagaacctgtattaggggtcagtccttgaattgagacccatgttatctttgggatgtatagcaacattaaatttggtttgttttgctatgtacagtctgactaataactgctaatttgtgatccaacatgtacagtatgtatatagtgacatagcttaccagtagacctttaatggagacatgcatttgctaactcatggaactgcagacagaaagcactccatgcgaaaacagccattgccttttttaaagatttaccctaggacctgatttaaagtgaatttcaagtgacctgattaatttcctattcttccaaatgagatgaaaatggggatcctgtacaaccctttgtggacccttttggtttagctcttaagtaggggtattttctactgttgcttaattatgatggaagataacattgtcattcctagatgaatcctttgaagtaacaaacattgtatctgacatcagctctgttcatgagtgctcagagtccctgctaatgtaattggaagcttggtacacataagaaaaactagagatttgaaatcagctatgaattactctatatagtatctatagccatgtacatattacagcatgacaagctcaaataattatgagtcagcccgaaaggatgttaattatgcctacgatgtaataactattggaatgtcatggtcattacatttttagcttcagagtttatttgaaagtaataattgaaatcctacaatttattttaatcattggaaactaccttaattaaaaaaaaagaaaagaaatgtgtcttaacatttccaggtatgtgttgtattgaaattgatcagctaaattttacgggtgctggagactggaaaaagcatccagtttggttgctgtggagcaacatgcatattggattagaaaattgtgccaaaaactcccactgatgagaattcataggtgccccacactatgacaaacacttatatgattctcctctttcctg

SEQ ID NO: 2441 - protein, 396 aa, Homo sapiens
MRLKITLPSLREFLTDFWMVTIIGLDQDWEEYTIDVFFRQKWKDERLKFKGPMNILRLNNLMASKIWTPDTFFHNGKKSVAHNMTMPNKLLRIQDDGTLLYTMRLTVQAECPMHLEDFPMDAHSCPLKFGSYAYTTSEVTYIWTYNASDSVQVAPDGSRLNQYDLLGQSIGKETIKSSTGEYTVMTAHFHLKRKIGYFVIQTYLPCIMTVILSQVSFWLNRESVPARTVFGVTTVLTMTTLSISARNSLPKVAYATAMDWFIAVCYAFVFSALIEFATVNYFTKRGWAWDGKSVVNDKKKEKASVMIQNNAYAVAVANYAPNLSKDPVLSTISKSATTPEPNKKPENKPAEAKKTFNSVSKIDRMSRIVFPVLFGTFNLVYWATYLNREPVLGVSP

SEQ ID NO: 2442 - DNA, 1963 bp, Homo sapiens
ggcggtgatgaagacaaaattgaacatctacaacatgcagttcctgctttttgttttcttggtgtgggaccctgccaggttggtgctggctaacatccaagaagatgaggctaaaaataacattaccatctttacgagaattcttgacagacttctggatggttacgataatcggcttagaccaggactgggaggaatatacaattgatgttttctttcgacaaaaatggaaagatgaacgtttaaaatttaaaggtcctatgaatatccttcgactaaacaatttaatggctagcaaaatctggactccagataccttttttcacaatgggaaaaaatcagtagctcataatatgacaatgccaaataagttgcttcgaattcaggatgatgggactctgctgtataccatgaggcttacagttcaagctgaatgcccaatgcacttggaggatttcccaatggatgctcattcatgtcctctgaaatttggcagctgagtaacaactgtcctaacaatgacaactctaagcatcagtgctcggaattctctccccaaagtggcttatgcaactgccatggactggtttattgctgtttgttatgcatttgtgttctctgccctaattgaatttgcaactgttaattacttcaccaaaagaggatgggcttgggatgggaagagtgtagtaaatgacaagaaaaaagaaaaggcttccgttatgatacagaacaacgcttatgcagtggctgttgccaattatgccccgaatctttcaaaagatccagttctctccaccatctccaagagtgcaaccacgccagaacccaacaagaagccagaaaacaagccagctgaagcaaagaaaactttcaacagtgttagcaaaattgacagaatgtccagaatagtttttccagttttgtttggtacctttaatttagtttactgggctacatatttaaacagagaacctgtattaggggtcagtccttgaattgagacccatgttatctttgggatgtatagcaacattaaatttggtttgttttgctatgtacagtctgactaataactgctaatttgtgatccaacatgtacagtatgtatatagtgacatagcttaccagtagacctttaatggagacatgcatttgctaactcatggaactgcagacagaaagcactccatgcgaaaacagccattgccttttttaaagatttaccctaggacctgatttaaagtgaatttcaagtgacctgattaatttcctattcttccaaatgagatgaaaatggggatcctgtacaaccctttgtggacccttttggtttagctcttaagtaggggtattttctactgttgcttaattatgatggaagataacattgtcattcctagatgaatcctttgaagtaacaaacattgtatctgacatcagctctgttcatgagtgctcagagtccctgctaatgtaattggaagcttggtacacataagaaaaactagagatttgaaatcagctatgaattactctatatagtatctatagccatgtacatattacagcatgacaagctcaaataattatgagtcagcccgaaaggatgttaattatgcctacgatgtaataactattggaatgtcatggtcattacatttttagcttcagagtttatttgaaagtaataattgaaatcctacaatttattttaatcattggaaactaccttaattaaaaaaaaagaaaagaaatgtgtcttaacatttccaggtatgtgttgtattgaaattgatcagctaaattttacgggtgctggagactggaaaaagcatccagtttggttgctgtggagcaacatgcatattggattagaaaattgtgccaaaaactcccactgatgagaattcataggtgccccacactatgacaaacacttatatgattctcctctttcctg

SEQ ID NO: 2443 - protein, 159 aa, Homo sapiens
MTTLSISARNSLPKVAYATAMDWFIAVCYAFVFSALIEFATVNYFTKRGWAWDGKSVVNDKKKEKASVMIQNNAYAVAVANYAPNLSKDPVLSTISKSATTPEPNKKPENKPAEAKKTFNSVSKIDRMSRIVFPVLFGTFNLVYWATYLNREPVLGVSP

SEQ ID NO: 2444 - DNA, 1956 bp, Homo sapiens
ggcggtgatgaagacaaaattgaacatctacaacatgcagttcctgctttttgttttcttggtgtgggaccctgccaggttggtgctggctaacatccaagaagatgaggctaaaaataacattaccatctttacgagaattcttgacagacttctggatggttacgataatcggcttagaccaggactgggagatgcatatacaacttcagaggtcacttatatttggacttacaatgcatctgattcagtacaggttgctcctgatggctctaggttaaatcaatatgacctgctgggccaatcaatcggaaaggagacaattaaatccagtacaggtgaatatactgtaatgacagctcatttccacctgaaaagaaaaattgggtattttgtgattcaaacctatctgccttgcatcatgactgtcattctctcccaagtttcattctggcttaacagagaatctgtgcctgcaagaactgtgtttggagtaacaactgtcctaacaatgacaactctaagcatcagtgctcggaattctctccccaaagtggcttatgcaactgccatggactggtttattgctgtttgttatgcatttgtgttctctgccctaattgaatttgcaactgttaattacttcaccaaaagaggatgggcttgggatgggaagagtgtagtaaatgacaagaaaaaagaaaaggcttccgttatgatacagaacaacgcttatgcagtggctgttgccaattatgccccgaatctttcaaaagatccagttctctccaccatctccaagagtgcaaccacgccagaacccaacaagaagccagaaaacaagccagctgaagcaaagaaaactttcaacagtgttagcaaaattgacagaatgtccagaatagtttttccagttttgtttggtacctttaatttagtttactgggctacatatttaaacagagaacctgtattaggggtcagtccttgaattgagacccatgttatctttgggatgtatagcaacattaaatttggtttgttttgctatgtacagtctgactaataactgctaatttgtgatccaacatgtacagtatgtatatagtgacatagcttaccagtagacctttaatggagacatgcatttgctaactcatggaactgcagacagaaagcactccatgcgaaaacagccattgccttttttaaagatttaccctaggacctgatttaaagtgaatttcaagtgacctgattaatttcctattcttccaaatgagatgaaaatggggatcctgtacaaccctttgtggacccttttggtttagctcttaagtaggggtattttctactgttgcttaattatgatggaagataacattgtcattcctagatgaatcctttgaagtaacaaacattgtatctgacatcagctctgttcatgagtgctcagagtccctgctaatgtaattggaagcttggtacacataagaaaaactagagatttgaaatcagctatgaattactctatatagtatctatagccatgtacatattacagcatgacaagctcaaataattatgagtcagcccgaaaggatgttaattatgcctacgatgtaataactattggaatgtcatggtcattacatttttagcttcagagtttatttgaaagtaataattgaaatcctacaatttattttaatcattggaaactaccttaattaaaaaaaaagaaaagaaatgtgtcttaacatttccaggtatgtgttgtattgaaattgatcagctaaattttacgggtgctggagactggaaaaagcatccagtttggttgctgtggagcaacatgcatattggattagaaaattgtgccaaaaactcccactgatgagaattcataggtgccccacactatgacaaacacttatatgattctcctctttcctg

SEQ ID NO: 2445 - protein, 327 aa, Homo sapiens
MKTKLNIYNMQFLLFVFLVWDPARLVLANIQEDEAKNNITIFTRILDRLLDGYDNRLRPGLGDAYTTSEVTYIWTYNASDSVQVAPDGSRLNQYDLLGQSIGKETIKSSTGEYTVMTAHFHLKRKIGYFVIQTYLPCIMTVILSQVSFWLNRESVPARTVFGVTTVLTMTTLSISARNSLPKVAYATAMDWFIAVCYAFVFSALIEFATVNYFTKRGWAWDGKSVVNDKKKEKASVMIQNNAYAVAVANYAPNLSKDPVLSTISKSATTPEPNKKPENKPAEAKKTFNSVSKIDRMSRIVFPVLFGTFNLVYWATYLNREPVLGVSP

SEQ ID NO: 2446 - DNA, 2994 bp, Homo sapiens
aaacgcgtcgtttcgcagcacttgatcggaacccggctgcctctaagacttggtcttgggcaaccgtgggtgggcaggaagggaaattatttattttattttgttaaggggagtgaagaaaagaagacgtgaggaccgcagttcactgtaatgtagagtaattgcaaaagtgggctgcctgcccctagcttttcccgctgtggttgcggaggtggtcttggttgagggggttgtggcgtgaagtacccatctctcctctcctctcctttcctcccctcccctccaacccattccctttccagctgctatgccagtttaaagtccagggtgttattattacgtgtgcgcaaaacagtgtttgctgacgatgaggctgggggacgttcctggcagagagaagtctgattacttggtcatcttgctgttaaagaaagaaagaaagaaaaaaagaaagaaagaaacagaaaggaaaagggtgggggtgggggtccataaaaaagaaatcgtctctcaatcatcaagtcctacacagagtccaggaagtaatctccatagctttaacacgaatccctaactaaaaggatattctttggggttacttggatagtgaaactgaaggcaattttaagtgtattttgtttttcattccatggctttgtaaagagcggcggtgatgaagacaaaattgaacatctacaacatgcagttcctgctttttgttttcttggtgtgggaccctgccaggttggtgctggctaacatccaagaagatgaggctaaaaataacattaccatctttacgagaattcttgacagacttctggatggttacgataatcggcttagaccaggactgggagacagtattactgaagtcttcactaacatctacgtgaccagttttggccctgtctcagatacagatatggaatatacaattgatgttttctttcgacaaaaatggaaagatgaacgtttaaaatttaaaggtcctatgaatatccttcgactaaacaatttaatggctagcaaaatctggactccagataccttttttcacaatgggaaaaaatcagtagctcataatatgacaatgccaaataagttgcttcgaattcaggatgatgggactctgctgtataccatgaggcttacagttcaagctgaatgcccaatgcacttggaggatttcccaatggatgctcattcatgtcctctgaaatttggcagctatgcatatacaacttcagaggtcacttatatttggacttacaatgcatctgattcagtacaggttgctcctgatggctctaggttaaatcaatatgacctgctgggccaatcaatcggaaaggagacaattaaatccagtacaggtgaatatactgtaatgacagctcatttccacctgaaaagaaaaattgggtattttgtgattcaaacctatctgccttgcatcatgactgtcattctctcccaagtttcattctggcttaacagagaatctgtgcctgcaagaactgtgtttggagtaacaactgtcctaacaatgacaactctaagcatcagtgctcggaattctctccccaaagtggcttatgcaactgccatggactggtttattgctgtttgttatgcatttgtgttctctgccctaattgaatttgcaactgttaattacttcaccaaaagaggatgggcttgggatgggaagagtgtagtaaatgacaagaaaaaagaaaaggcttccgttatgatacagaacaacgcttatgcagtggctgttgccaattatgccccgaatctttcaaaagatccagttctctccaccatctccaagagtgcaaccacgccagaacccaacaagaagccagaaaacaagccagctgaagcaaagaaaactttcaacagtgttagcaaaattgacagaatgtccagaatagtttttccagttttgtttggtacctttaatttagtttactgggctacatatttaaacagagaacctgtattaggggtcagtccttgaattgagacccatgttatctttgggatgtatagcaacattaaatttggtttgttttgctatgtacagtctgactaataactgctaatttgtgatccaacatgtacagtatgtatatagtgacatagcttaccagtagacctttaatggagacatgcatttgctaactcatggaactgcagacagaaagcactccatgcgaaaacagccattgccttttttaaagatttaccctaggacctgatttaaagtgaatttcaagtgacctgattaatttcctattcttccaaatgagatgaaaatggggatcctgtacaaccctttgtggacccttttggtttagctcttaagtaggggtattttctactgttgcttaattatgatggaagataacattgtcattcctagatgaatcctttgaagtaacaaacattgtatctgacatcagctctgttcatgagtgctcagagtccctgctaatgtaattggaagcttggtacacataagaaaaactagagatttgaaatcagctatgaattactctatatagtatctatagccatgtacatattacagcatgacaagctcaaataattatgagtcagcccgaaaggatgttaattatgcctacgatgtaataactattggaatgtcatggtcattacatttttagcttcagagtttatttgaaagtaataattgaaatcctacaatttattttaatcattggaaactaccttaattaaaaaaaaagaaaagaaatgtgtcttaacatttccaggtatgtgttgtattgaaattgatcagctaaattttacgggtgctggagactggaaaaagcatccagtttggttgctgtggagcaacatgcatattggattagaaaattgtgccaaaaactcccactgatgagaattcataggtgccccacactatgacaaacacttatatgattctcctctttcctg

SEQ ID NO: 2447 - protein, 451 aa, Homo sapiens
MKTKLNIYNMQFLLFVFLVWDPARLVLANIQEDEAKNNITIFTRILDRLLDGYDNRLRPGLGDSITEVFTNIYVTSFGPVSDTDMEYTIDVFFRQKWKDERLKFKGPMNILRLNNLMASKIWTPDTFFHNGKKSVAHNMTMPNKLLRIQDDGTLLYTMRLTVQAECPMHLEDFPMDAHSCPLKFGSYAYTTSEVTYIWTYNASDSVQVAPDGSRLNQYDLLGQSIGKETIKSSTGEYTVMTAHFHLKRKIGYFVIQTYLPCIMTVILSQVSFWLNRESVPARTVFGVTTVLTMTTLSISARNSLPKVAYATAMDWFIAVCYAFVFSALIEFATVNYFTKRGWAWDGKSVVNDKKKEKASVMIQNNAYAVAVANYAPNLSKDPVLSTISKSATTPEPNKKPENKPAEAKKTFNSVSKIDRMSRIVFPVLFGTFNLVYWATYLNREPVLGVSP

SEQ ID NO: 2448 - DNA, 2364 bp, Homo sapiens
aagcggcctcggggagcagcccgaggctgcgcgtgggctccgctcctccggcgaggtgtgggcgaggggagcggcgctccgagcgcacccaggcgcccgacgccgcccgggtctgcgccgctgctagtgccaggcgggcgacgagcggcggtgatgaagacaaaattgaacatctacaacatgcagttcctgctttttgttttcttggtgtgggaccctgccaggttggtgctggctaacatccaagaagatgaggctaaaaataacattaccatctttacgagaattcttgacagacttctggatggttacgataatcggcttagaccaggactgggagacagtattactgaagtcttcactaacatctacgtgaccagttttggccctgtctcagatacagatatggaatatacaattgatgttttctttcgacaaaaatggaaagatgaacgtttaaaatttaaaggtcctatgaatatccttcgactaaacaatttaatggctagcaaaatctggactccagataccttttttcacaatgggaaaaaatcagtagctcataatatgacaatgccaaataagttgcttcgaattcaggatgatgggactctgctgtataccatgaggcttacagttcaagctgaatgcccaatgcacttggaggatttcccaatggatgctcattcatgtcctctgaaatttggcagctatgcatatacaacttcagaggtcacttatatttggacttacaatgcatctgattcagtacaggttgctcctgatggctctaggttaaatcaatatgacctgctgggccaatcaatcggaaaggagacaattaaatccagtacaggtgaatatactgtaatgacagctcatttccacctgaaaagaaaaattgggtattttgtgattcaaacctatctgccttgcatcatgactgtcattctctcccaagtttcattctggcttaacagagaatctgtgcctgcaagaactgtgtttggagtaacaactgtcctaacaatgacaactctaagcatcagtgctcggaattctctccccaaagtggcttatgcaactgccatggactggtttattgctgtttgttatgcatttgtgttctctgccctaattgaatttgcaactgttaattacttcaccaaaagaggatgggcttgggatgggaagagtgtagtaaatgacaaggtaagtgagagcttccgtgttatcattattaagaaaataccctaatgaattccgcttgtaacagatatgtttctaaaaactgacattaaagacatccatatatatatgaatttgaatcatatcaatttcttttaaagtgttcttgcctgaaatcctttaggagttcttgtagtactaatacttccattaaaaccactccgtagcatctgttgagctgtatgtgtcaggcactgtgctaagtgttttacatatgctctctcacataatctttatagcatccttatgactagactgccttcttattcttatttttactcatgaagaatctgaagcagtaaagttattttcttgcccaagcttacacaacttgttagtaagtatacttgaactccgatctacctgtctgactgttaagttcatggttttaacaccacactgcattattataaagagattagaaaaagaaaatgggcattaattttacttattatagaattccaggctctatcaatgaattgaatcctcttcacctgttccagtctctgctgattgattgtaaaagcccggatagcatttttttaaaatctttcccatgttgtatggaataaatatgtcggtgctggaatgcttaggaattttaaattgttcatatggtctaaaagggaaaagttatttgtttttaagattaacttcttttgagattattgctgtccatatttaggtttcaagtactgaatctaatgggagatttgtgcattgatataacagctgtttcctttcatactctgtagattatgtatctgcctaagaggaggctttgaatgtatcataatcatctatattcttaataatggtaaaaagttgtattcagaggatatctttaacattgtatcaacctaaatgcttcttttattaaatttggattaacatacttgcagatttgatttctttttcagttatttgaatatattttttcatttctatgaccatgttacagtttaaatatacaagcagtaaatgttatagtttaaaagtcttggtctttttccttaattttgtaagccatagaaattttaataagactgattatttatttcattttataagttgtgttttccctactaacggagccaacaaataaatattaaaagg

SEQ ID NO: 2449 - protein, 367 aa, Homo sapiens
MKTKLNIYNMQFLLFVFLVWDPARLVLANIQEDEAKNNITIFTRILDRLLDGYDNRLRPGLGDSITEVFTNIYVTSFGPVSDTDMEYTIDVFFRQKWKDERLKFKGPMNILRLNNLMASKIWTPDTFFHNGKKSVAHNMTMPNKLLRIQDDGTLLYTMRLTVQAECPMHLEDFPMDAHSCPLKFGSYAYTTSEVTYIWTYNASDSVQVAPDGSRLNQYDLLGQSIGKETIKSSTGEYTVMTAHFHLKRKIGYFVIQTYLPCIMTVILSQVSFWLNRESVPARTVFGVTTVLTMTTLSISARNSLPKVAYATAMDWFIAVCYAFVFSALIEFATVNYFTKRGWAWDGKSVVNDKVSESFRVIIIKKIP

SEQ ID NO: 2450 - DNA, 550 bp, Homo sapiens
cctcagctttgggtggtggccgctgccgggcatcggcttccagtccgcggagggcgaggcggcgtggacagcggccccggcacccagcgccccgccgcccggaagccgcgcgcccgtccgccgcgccccgagcccgccgcttcctatctcagcgccctgccgccgccgccgcggcccagcgagcggccctgatgcaggccatcaagtttgtggtggtgggagacggagctgtagggtctagccatggctaaggagattggtgctgtaaaatacctggagcgctcggcgctcacacagcgaggcatcaagacagtgtttgacgaagcgatccgagcagtcctctgcccgcctcccgtgaagaagaggaagagaaaatgcctgctgttgtaaatgtctcagcccctcgttcttggtcctgtcccttggaacctttgtacgctttgctcaaaaaaaaaaaaaaaaaccaagaaaaaaaacggtggagccttcgcactcaatgccaactttttgttacagattaatttttccataaaaccattttttgaaccaa

SEQ ID NO: 2451 - protein, 52 aa, Homo sapiens
MSQPLVLGPVPWNLCTLCSKKKKKTKKKNGGAFALNANFLLQINFSIKPFFE

SEQ ID NO: 2452 - DNA, 863 bp, Homo sapiens
cagttttcctcagctttgggtggtggccgctgccgggcatcggcttccatccgccgcgccccgagcccgccgcttcctatctcagcgccctgccgccgccgccgcggcccagcgagcggccctgatgcaggccatcaagtttgtggtggtgggagacggagctgtaggtaaaacttgcctactgatcagttacacaaccaatgcatttcctggagaatatatccctactgtctttgacaattattctgccaatgttatggtagatggaaaaccggtgaatctgggcttatgggatacagctggacaagaagattatgacagattacgccccctatcctatccgcaaacagatgtgttcttaatttgcttttcccttgtgagtcctgcatcatttgaaaatgtccgtgcaaagtggtatcctgaggtgcggcaccactgtcccaacactcccatcatcctagtgggaactaaacttgatcttagggatgataaagacccgatcgagaaactgaaggagaagaagctgactcccatcacctatccgcagggtctagccatggctaaggagattggtgctgtaaaatacctggagcgctcggcgctcacacagcgaggcatcaagacagtgtttgacgaagcgatccgagcagtcctctgcccgcctcccgtgaagaagaggaagagaaaatgcctgctgttgtaaatgtctcagcccctcgttcttggtcctgtcccttggaacctttgtacgctttgctcaaaaaaaaaaaaaaaaaccaagaaaaaaaacggtggagccttcgcactcaatgccaactttttgttacagattaatttttccataaaaccattttttgaaccaa

SEQ ID NO: 2453 - protein, 192 aa, Homo sapiens [sequence omitted]

SEQ ID NO: 2454 - DNA, 828 bp, Homo sapiens
gcagttttcctcagctttgggtggtggccgctgccgggcatcggcttccagtccgcggagggcgaggcggcgtggacagcgcggccctgatgcaggccatcaagtttgtggtggtgggagacggagctgtaggtaaaacttgcctactgatcagttacacaaccaatgcatttcctggagaatatatccctactgtctttgacaattattctgccaatgttatggtagatggaaaaccggtgaatctgggcttatgggatacagctggacaagaagattatgacagattacgccccctatcctatccgcaaacagatgtgttcttaatttgcttttcccttgtgagtcctgcatcatttgaaaatgtccgtgcaaagtggtatcctgaggtgcggcaccactgtcccaacactcccatcatcctagtgggaactaaacttgatcttagggatgataaagacccgatcgagaaactgaaggagaagaagctgactcccatcacctatccgcagggtctagccatggctaaggagattggtgctgtaaaatacctggagcgctcggcgctcacacagcgaggcatcaagacagtgtttgacgaagcgatccgagcagtcctctgcccgcctcccgtgaagaagaggaagagaaaatgcctgctgttgtaaatgtctcagcccctcgttcttggtcctgtcccttggaacctttgtacgctttgctcaaaaaaaaaaaaaaaaaccaagaaaaaaaacggtggagccttcgcactcaatgccaactttttgttacagattaatttttccataaaaccattttttgaaccaa

SEQ ID NO: 2455 - protein, 192 aa, Homo sapiens [sequence omitted]

SEQ ID NO: 2456 - DNA, 781 bp, Homo sapiens
gcagttttcctcagctttgggtggtggccgctgccgggcatcggcttccagtccgcggagggcgaggcggcgtggacagcggccccggcacccagcgccccgccgcccggaagccgcgcgcccgtccgccgcgccccgagcccgccgcttcctatctcagcgccctgccgccgccgccgcggcccagcgagcggccctgatgcaggccatcaagtttgtggtggtgggagacggagctgtaggtaaaacttgcctactgatcagttacacaaccaatgcatttcctggagaatatatccctactgtctttgacaattattctgccaatgttatggtagatggaaaaccggtgaatctgggcttatgggatacagctggacaagaagattatgacagattacgccccctatcctatccgcaaacagatgtgttcttaatttgcttttcccttgtgagtcctgcatcatttgaaaatgtccgtgcaaaattggtgctgtaaaatacctggagcgctcggcgctcacacagcgaggcatcaagacagtgtttgacgaagcgatccgagcagtcctctgcccgcctcccgtgaagaagaggaagagaaaatgcctgctgttgtaaatgtctcagcccctcgttcttggtcctgtcccttggaacctttgtacgctttgctcaaaaaaaaaaaaaaaaaccaagaaaaaaaacggtggagccttcgcactcaatgccaactttttgttacagattaatttttccataaaaccattttttgaaccaa

SEQ ID NO: 2457 - protein, 99 aa, Homo sapiens
MQAIKFVVVGDGAVGKTCLLISYTTNAFPGEYIPTVFDNYSANVMVDGKPVNLGLWDTAGQEDYDRLRPLSYPQTDVFLICFSLVSPASFENVRAKLVL

SEQ ID NO: 2458 - DNA, 947 bp, Homo sapiens
ctatttatggcagttttcctcagctttgggtggtggccgctgccgggcatcggcttccagtccgcggagggcgaggcggcgtggacagcggccccggcacccagcgccccgccgcccggaagccgcgcgcccgtccgccgcgccccgagcccgccgcttcctatctcagcgccctgccgccgccgccgcggcccagcgagcggccctgatgcaggccatcaagtttgtggtggtgggagacggagctgtaggtaaaacttgcctactgatcagttacacaaccaatgcatttcctggagaatatatccctactgtctttgacaattattctgccaatgttatggtagatggaaaaccggtgaatctgggcttatgggatacagctggacaagaagattatgacagattacgccccctatcctatccgcaaacagatgtgttcttaatttgcttttcccttgtgagtcctgcatcatttgaaaatgtccgtgcaaagtggtatcctgaggtgcggcaccactgtcccaacactcccatcatcctagtgggaactaaacttgatcttagggatgataaagacccgatcgagaaactgaaggagaagaagctgactcccatcacctatccgcagggtctagccatggctaaggagattggtgctgtaaaatacctggagcgctcggcgctcacacagcgaggcatcaagacagtgtttgacgaagcgatccgagcagtcctctgcccgcctcccgtgaagaagaggaagagaaaatgcctgctgttgtaaatgtctcagcccctcgttcttggtcctgtcccttggaacctttgtacgctttgctcaaaaaaaaaaaaaaaaaccaagaaaaaaaacggtggagccttcgcactcaatgccaactttttgttacagattaatttttccataaaaccattttttgaaccaa

SEQ ID NO: 2459 - protein, 192 aa, Homo sapiens [sequence omitted]

SEQ ID NO: 2460 - DNA, 629 bp, Homo sapiens
ggcagttttcctcagctttgggtggtggccgctgccgggcatcggcttccagtccgcggagggcgaggcggcgtggacagcggccccggcacccagcgccccgccgcccggaagccgcgcgcccgtccgccgcgccccgagcccgccgcttcctatctcagcgccctgccgccgccgccgcggcccagcgagcggccctgatgcaggccatcaagtttgtggtggtgggagacggagctgtaggtaaaacttgcctactgatcagttacacaaccaatgcatttcctggagaatatatccctactgtctttgacaattattctgccaatgttatggtagatggaaaaccggtgaatctgggcttatgggatacagctggacaagaagattatgacagattacgccccctatcctatccgcaaacagatgtgttcttaatttgcttttcccttgtgagtcctgcatcatttgaaaatgtccgtgcaaagtggtatcctgaggtgcggcaccactgtcccaacactcccatcatcctagtgggaactaaacttgatcttagggatgataaagacccgatcgagaaagtgaagaagaggaagagaaaatgcctgctgttgtaaatgtctcag

SEQ ID NO: 2461 - protein, 139 aa, Homo sapiens
MQAIKFVVVGDGAVGKTCLLISYTTNAFPGEYIPTVFDNYSANVMVDGKPVNLGLWDTAGQEDYDRLRPLSYPQTDVFLICFSLVSPASFENVRAKWYPEVRHHCPNTPIILVGTKLDLRDDKDPIEKVKKRKRKCLLL

SEQ ID NO: 2462 - DNA, 618 bp, Homo sapiens
aatttgcctctgcgccgtctttttttgcctgttacctgtgacgtccttgaaaatgaaaagctttcttaagacaataggacgggccgggcgcggtggctcatgcctgtaatcctaacactctgggaggccgaggttggcggatcacgaggaagcagaatctgaaactttctgaggagagcatttgagcttcagatttctaacagcctctttgcaacaaaatagaccagtagctgaaggcaactgcaatccttcatgatgtttcccttggccagaaatgcactaagcagtctcaagattcaaagcattctgcaaagcatggcaagacatagccatgtaaaacactcaccagattttcatgataaatatggtaatgctgtgctagccagtggaactgctttctgtgttgctacatgggtgtttacagccactcagattggaatagaatggaacctatcccctgttggcagagttaccccaaaagagtggaaacatcagtaaccatcacagttgctgtaatgacagaattgtttaaaaaaccaacttgtcatgtaagcactctactgcttattaaaatatagcacaattgaaaaaataaaatgtgttttaaatctttaaaaa

SEQ ID NO: 2463 - protein, 81 aa, Homo sapiens; identical to SEQ ID NO: 232

SEQ ID NO: 2464 - DNA, 536 bp, Homo sapiens
gtaaaacggaaaggttcggaatttgcctctgcgccgtctttttttgcctgttacctgtgacgtccttggaagcagaatctgaaactttctgaggagagcatttgagcttcagatttctaacagcctctttgcaacaaaatagaccagtagctgaaggcaactgcaatccttcatgatgtttcccttggccagaaatgcactaagcagtctcaagattcaaagcattctgcaaagcatggcaagacatagccatgtaaaacactcaccagattttcatgataaatatggtaatgctgtgctagccagtggaactgctttctgtgttgctacatgggtgtttacagccactcagattggaatagaatggaacctatcccctgttggcagagttaccccaaaagagtggaaacatcagtaaccatcacagttgctgtaatgacagaattgtttaaaaaaccaacttgtcatgtaagcactctactgcttattaaaatatagcacaattgaaaaaataaaatgtgttttaaatctttaaa

SEQ ID NO: 2465 - protein, 81 aa, Homo sapiens; identical to SEQ ID NO: 232

SEQ ID NO: 2466 - DNA, 1687 bp, Homo sapiens
attgcagtacatttgagaaagtaaaggtgtagtggaaaccgagagcgaaatgagggcgtagggagaaaagggtggggaagcttagagaccggtgagggagcagagctggggcgcctgtgtacagggatagagcccggcggcagcagggcgcggcttccctttcccggggcctggggccgcaatcaggtggagtcgagaggccggaggaggggcaggaggaaggggtgcggtcgcgatccggacccggagccagcgcggagcacctgcgcccgcggctgacaccttcgctcgcagtttgttcgcagtttactcgcacaccagtttcccccaccgcgctttggattagtgtgatctcagctcaaggcaaaggtgggatatcatggcatctatctgggttggacaccgaggaacagtaagagattatccagactttagcccatcagtggatgctgaagctattcagaaagcaatcagaggaattggaactgatgagaaaatgctcatcagcattctgactgagaggtcaaatgcacagcggcagctgattgttaaggaatatcaagcagcatatggaaaggagctgaaagatgacttgaagggtgatctctctggccactttgagcatctcatggtggccctagtgactccaccagcagtctttgatgcaaagcagctaaagaaatccatgaagggcgcgggaacaaacgaagatgccttgattgaaatcttaactaccaggacaagcaggcaaatgaaggatatctctcaagcctattatacagtatacaagaagagtcttggagatgacattagttccgaaacatctggtgacttccggaaagctctgttgactttggcagatggcagaagagatgaaagtctgaaagtggatgagcatctggccaaacaagatgcccagattctctataaagctggtgagaacagatggggcacggatgaagacaaattcactgagatcctgtgtttaaggagctttcctcaattaaaactaacatttgatgaatacagaaatatcagccaaaaggacattgtggacagcataaaaggagaattatctgggcattttgaagacttactgttggccatagttaattgtgtgaggaacacgccggcctttttagccgaaagactgcatcgagccttgaagggtattggaactgatgagtttactctgaaccgaataatggtgtccagatcagaaattgaccttttggacattcgaacagagttcaagaagcattatggctattccctatattcagcaattaaatcggatacttctggagactatgaaatcacactcttaaaaatctgtggtggagatgactgaaccaagaagataatctccaaaggtccacgatgggctttcccaacagctccaccttacttcttctcatactatttaagagaacaagcaaatataaacagcaacttgtgttcctaacaggaattttcattgttctataacaacaacaacaaaagcgattattattttagagcatctcatttataatgtagcagctcataaatgaaattgaaaatggtattaaagatctgcaactactatccaacttatatttctgctttcaaagttaagaatctttatagttctactccattaaatataaagcaagataataaaaattgttgcttttgttaaaagtaa

SEQ ID NO: 2467 - protein, 323 aa, Homo sapiens; identical to SEQ ID NO: 234

SEQ ID NO: 2468 - DNA, 1037 bp, Homo sapiens
gcagggcgcggcttccctttcccggggcctggggccgcaatcaggtggagtcgagaggccggaggaggggcaggaggaaggggtgcggtcgcgatccggacccggagccagcgcggagcacctgcgcccgcggctgacaccttcgctcgcagtttgttcgcagtttactcgcacaccagtttcccccaccgcgctttggattagtgtgatctcagctcaaggcaaaggtgggatatcatggcatctatctgggttggacaccgaggaacagtaagagattatccagactttagcccatcagtggatgctgaagctattcagaaagcaatcagaggaattggaactgatgagaaaatgctcatcagcattctgactgagaggtcaaatgcacagcggcagctgattgttaaggaatatcaagcagcatatggaaaggagctgaaagatgacttgaagggtgatctctctggccactttgagcatctcatggtggccctagtgactccaccagcagtctttgatgcaaagcagctaaagaaatccatgaaggtatgagccccccacaagccatttctgcccagggtttgaccaagtcatcaaaaatagtgactttcttgcagtgcacacttgtgatgggtggacttggatgcccttttggtctggactctcccagtggtagaatgactctgaaataggcaacagctatagaaccttaagcccaaatgttcctgggctggaagaattttgtcatatcctttgtttgacatgaagagtcaagttctctaatttgtcatcgttgaaagtaaatagcactatgattaaccccaacactcaagctaaaaacctagcattatccttgagcccttgttttctcttacccttccaagctcccaaatctatcagcaagttccttagttttacttcaaaatccattataaatatgtgcacttctctcaaaatccattgctactgttctagtctgaccaccatcatctcttgactggtccatatcaataggcttctaactggtccctttg

SEQ ID NO: 2469 - protein, 105 aa, Homo sapiens
MASIWVGHRGTVRDYPDFSPSVDAEAIQKAIRGIGTDEKMLISILTERSNAQRQLIVKEYQAAYGKELKDDLKGDLSGHFEHLMVALVTPPAVFDAKQLKKSMKV

SEQ ID NO: 2470 - DNA, 1371 bp, Homo sapiens
ggtcgcgatccggacccggagccagcgcggagcacctgcgcccgcggctgacaccttcgctcgcagtttgttcgcagtttactcgcacaccagtttcccccaccgcgctttggattagtgtgatctcagctcaaggcaaaggtgggatatcatggcatctatctgggaactgatgagaaaatgctcatcagcattctgactgagaggtcaaatgcacagcggcagctgattgttaaggaatatcaagcagcatatggaaaggagctgaaagatgacttgaagggtgatctctctggccactttgagcatctcatggtggccctagtgactccaccagcagtctttgatgcaaagcagctaaagaaatccatgaagggcgcgggaacaaacgaagatgccttgattgaaatcttaactaccaggacaagcaggcaaatgaaggatatctctcaagcctattatacagtatacaagaagagtcttggagatgacattagttccgaaacatctggtgacttccggaaagctctgttgactttggcagatggcagaagagatgaaagtctgaaagtggatgagcatctggccaaacaagatgcccagattctctataaagctggtgagaacagatggggcacggatgaagacaaattcactgagatcctgtgtttaaggagctttcctcaattaaaactaacatttgatgaatacagaaatatcagccaaaaggacattgtggacagcataaaaggagaattatctgggcattttgaagacttactgttggccatagttaattgtgtgaggaacacgccggcctttttagccgaaagactgcatcgagccttgaagggtattggaactgatgagtttactctgaaccgaataatggtgtccagatcagaaattgaccttttggacattcgaacagagttcaagaagcattatggctattccctatattcagcaattaaatcggatacttctggagactatgaaatcacactcttaaaaatctgtggtggagatgactgaaccaagaagataatctccaaaggtccacgatgggctttcccaacagctccaccttacttcttctcatactatttaagagaacaagcaaatataaacagcaacttgtgttcctaacaggaattttcattgttctataacaacaacaacaaaagcgattattattttagagcatctcatttataatgtagcagctcataaatgaaattgaaaatggtattaaagatctgcaactactatccaacttatatttctgctttcaaagttaagaatctttatagttctactccattaaatataaagcaagataataaaaattgttgcttttgttaaaagtaa

SEQ ID NO: 2471 - protein, 284 aa, Homo sapiens
MLISILTERSNAQRQLIVKEYQAAYGKELKDDLKGDLSGHFEHLMVALVTPPAVFDAKQLKKSMKGAGTNEDALIEILTTRTSRQMKDISQAYYTVYKKSLGDDISSETSGDFRKALLTLADGRRDESLKVDEHLAKQDAQILYKAGENRWGTDEDKFTEILCLRSFPQLKLTFDEYRNISQKDIVDSIKGELSGHFEDLLLAIVNCVRNTPAFLAERLHRALKGIGTDEFTLNRIMVSRSEIDLLDIRTEFKKHYGYSLYSAIKSDTSGDYEITLLKICGGDD

SEQ ID NO: 2472 - DNA, 1600 bp, Homo sapiens
ggtcgcgatccggacccggagccagcgcggagcacctgcgcccgcggctgacaccttcgctcgcagtttgttcgcagtttactcgcacaccagtttcccccaccgcgctttggattagtgtgatctcagctcaaggcaaaggtgggatatcatggcatctatctggacacggtctcactctgtcacctagactacagtgcagtgacacaatcacagctcactgcagccttgaccttctgcgctcaagtggtcctcccacctcagcctcccaagtagctgggaccacacctgcacaccaccacacctggttggacaccgaggaacagtaagagattatccagactttagcccatcagtggatgctgaagctattcagaaagcaatcagaggaattggaactgatgagaaaatgctcatcagcattctgactgagaggtcaaatgcacagcggcagctgattgttaaggaatatcaagcagcatatggaaaggagctgaaagatgacttgaagggtgatctctctggccactttgagcatctcatggtggccctagtgactccaccagcagtctttgatgcaaagcagctaaagaaatccatgaagggcgcgggaacaaacgaagatgccttgattgaaatcttaactaccaggacaagcaggcaaatgaaggatatctctcaagcctattatacagtatacaagaagagtcttggagatgacattagttccgaaacatctggtgacttccggaaagctctgttgactttggcagatggcagaagagatgaaagtctgaaagtggatgagcatctggccaaacaagatgcccagattctctataaagctggtgagaacagatggggcacggatgaagacaaattcactgagatcctgtgtttaaggagctttcctcaattaaaactaacatttgatgaatacagaaatatcagccaaaaggacattgtggacagcataaaaggagaattatctgggcattttgaagacttactgttggccatagttaattgtgtgaggaacacgccggcctttttagccgaaagactgcatcgagccttgaagggtattggaactgatgagtttactctgaaccgaataatggtgtccagatcagaaattgaccttttggacattcgaacagagttcaagaagcattatggctattccctatattcagcaattaaatcggatacttctggagactatgaaatcacactcttaaaaatctgtggtggagatgactgaaccaagaagataatctccaaaggtccacgatgggctttcccaacagctccaccttacttcttctcatactatttaagagaacaagcaaatataaacagcaacttgtgttcctaacaggaattttcattgttctataacaacaacaacaaaagcgattattattttagagcatctcatttataatgtagcagctcataaatgaaattgaaaatggtattaaagatctgcaactactatccaacttatatttctgctttcaaagttaagaatctttatagttctactccattaaatataaagcaagataataaaaattgttgcttttgttaaaagtaa

SEQ ID NO: 2473 - protein, 284 aa, Homo sapiens; identical to SEQ ID NO: 2471

SEQ ID NO: 2474 - DNA, 1540 bp, Homo sapiens
actcgcacaccagtttcccccaccgcgctttggctagcagcgtaagggatccacttagccatctcggcctccccagtcctaaaggtctaggggacagaaaaaagctgggagtcggaaggttcctcgggtccccggcatggcagacggggctggctcagaggtctgctctgtggacttggaatcgcacccatcctattagtgtgatctcagctcaaggcaaaggtgggatatcatggcatctatctgggttggacaccgaggaacagtaagagattatccagactttagcccatcagtggatgctgaagctattcagaaagcaatcagaggaattggaactgatgagaaaatgctcatcagcattctgactgagaggtcaaatgcacagcggcagctgattgttaaggaatatcaagcagcatatggaaaggagctgaaagatgacttgaagggtgatctctctggccactttgagcatctcatggtggccctagtgactccaccagcagtctttgatgcaaagcagctaaagaaatccatgaagggcgcgggaacaaacgaagatgccttgattgaaatcttaactaccaggacaagcaggcaaatgaaggatatctctcaagcctattatacagtatacaagaagagtcttggagatgacattagttccgaaacatctggtgacttccggaaagctctgttgactttggcagatggcagaagagatgaaagtctgaaagtggatgagcatctggccaaacaagatgcccagattctctataaagctggtgagaacagatggggcacggatgaagacaaattcactgagatcctgtgtttaaggagctttcctcaattaaaactaacatttgatgaatacagaaatatcagccaaaaggacattgtggacagcataaaaggagaattatctgggcattttgaagacttactgttggccatagttaattgtgtgaggaacacgccggcctttttagccgaaagactgcatcgagccttgaagggtattggaactgatgagtttactctgaaccgaataatggtgtccagatcagaaattgaccttttggacattcgaacagagttcaagaagcattatggctattccctatattcagcaattaaatcggatacttctggagactatgaaatcacactcttaaaaatctgtggtggagatgactgaaccaagaagataatctccaaaggtccacgatgggctttcccaacagctccaccttacttcttctcatactatttaagagaacaagcaaatataaacagcaacttgtgttcctaacaggaattttcattgttctataacaacaacaacaaaagcgattattattttagagcatctcatttataatgtagcagctcataaatgaaattgaaaatggtattaaagatctgcaactactatccaacttatatttctgctttcaaagttaagaatctttatagttctactccattaaatataaagcaagataataaaaattgttgcttttgttaaaagtaa

SEQ ID NO: 2475 - protein, 323 aa, Homo sapiens; identical to SEQ ID NO: 234

SEQ ID NO: 2476 - DNA, 1725 bp, Homo sapiens
ctcgaccctgggcagggctggcggctggcgcccgcgcccggccccaacccagctgcgtgggtggggagctggagggacctcagtcctgcatttcagagtcgaggagactgggcccacgggggggaaagtgccgtgccatgggtgggtcacccaggtcttggtggggcccaagctgatactcagctgtcctcgctccctgaaagcttcgcttattacagctagcagcgtaagggatccacttagccatctcggcctccccagtcctaaaggtctaggggacagaaaaaagctgggagtcggaaggttcctcgggtccccggcatggcagacggggctggctcagaggtctgctctgtggacttggaatcgcacccatcctattagtgtgatctcagctcaaggcaaaggtgggatatcatggcatctatctgggttggacaccgaggaacagtaagagattatccagactttagcccatcagtggatgctgaagctattcagaaagcaatcagaggaattggaactgatgagaaaatgctcatcagcattctgactgagaggtcaaatgcacagcggcagctgattgttaaggaatatcaagcagcatatggaaaggagctgaaagatgacttgaagggtgatctctctggccactttgagcatctcatggtggccctagtgactccaccagcagtctttgatgcaaagcagctaaagaaatccatgaagggcgcgggaacaaacgaagatgccttgattgaaatcttaactaccaggacaagcaggcaaatgaaggatatctctcaagcctattatacagtatacaagaagagtcttggagatgacattagttccgaaacatctggtgacttccggaaagctctgttgactttggcagatggcagaagagatgaaagtctgaaagtggatgagcatctggccaaacaagatgcccagattctctataaagctggtgagaacagatggggcacggatgaagacaaattcactgagatcctgtgtttaaggagctttcctcaattaaaactaacatttgatgaatacagaaatatcagccaaaaggacattgtggacagcataaaaggagaattatctgggcattttgaagacttactgttggccatagttaattgtgtgaggaacacgccggcctttttagccgaaagactgcatcgagccttgaagggtattggaactgatgagtttactctgaaccgaataatggtgtccagatcagaaattgaccttttggacattcgaacagagttcaagaagcattatggctattccctatattcagcaattaaatcggatacttctggagactatgaaatcacactcttaaaaatctgtggtggagatgactgaaccaagaagataatctccaaaggtccacgatgggctttcccaacagctccaccttacttcttctcatactatttaagagaacaagcaaatataaacagcaacttgtgttcctaacaggaattttcattgttctataacaacaacaacaaaagcgattattattttagagcatctcatttataatgtagcagctcataaatgaaattgaaaatggtattaaagatctgcaactactatccaacttatatttctgctttcaaagttaagaatctttatagttctactccattaaatataaagcaagataataaaaattgttgcttttgttaaaagtaa

SEQ ID NO: 2477 - protein, 323 aa, Homo sapiens; identical to SEQ ID NO: 234

SEQ ID NO: 2478 - DNA, 1472 bp, Homo sapiens
cctcctcaaagagcagatgtgtctttataacagactgtaggcttggagccttgtaaaatgtacatggagtttcacaatcaagcacaaggaatccaactgaaggcagctaaactttgtgttgatttgattagtgtgatctcagctcaaggcaaaggtgggatatcatggcatctatctgggttggacaccgaggaacagtaagagattatccagactttagcccatcagtggatgctgaagctattcagaaagcaatcagaggaattggaactgatgagaaaatgctcatcagcattctgactgagaggtcaaatgcacagcggcagctgattgttaaggaatatcaagcagcatatggaaaggagctgaaagatgacttgaagggtgatctctctggccactttgagcatctcatggtggccctagtgactccaccagcagtctttgatgcaaagcagctaaagaaatccatgaagggcgcgggaacaaacgaagatgccttgattgaaatcttaactaccaggacaagcaggcaaatgaaggatatctctcaagcctattatacagtatacaagaagagtcttggagatgacattagttccgaaacatctggtgacttccggaaagctctgttgactttggcagatggcagaagagatgaaagtctgaaagtggatgagcatctggccaaacaagatgcccagattctctataaagctggtgagaacagatggggcacggatgaagacaaattcactgagatcctgtgtttaaggagctttcctcaattaaaactaacatttgatgaatacagaaatatcagccaaaaggacattgtggacagcataaaaggagaattatctgggcattttgaagacttactgttggccatagttaattgtgtgaggaacacgccggcctttttagccgaaagactgcatcgagccttgaagggtattggaactgatgagtttactctgaaccgaataatggtgtccagatcagaaattgaccttttggacattcgaacagagttcaagaagcattatggctattccctatattcagcaattaaatcggatacttctggagactatgaaatcacactcttaaaaatctgtggtggagatgactgaaccaagaagataatctccaaaggtccacgatgggctttcccaacagctccaccttacttcttctcatactatttaagagaacaagcaaatataaacagcaacttgtgttcctaacaggaattttcattgttctataacaacaacaacaaaagcgattattattttagagcatctcatttataatgtagcagctcataaatgaaattgaaaatggtattaaagatctgcaactactatccaacttatatttctgctttcaaagttaagaatctttatagttctactccattaaatataaagcaagataataaaaattgttgcttttgttaaaagtaa

SEQ ID NO: 2479 - protein, 323 aa, Homo sapiens; identical to SEQ ID NO: 234

SEQ ID NO: 2480 - DNA, 1301 bp, Homo sapiens
tgaaaaacaaaaaccagataaccctaggtctctctccaaaatttctttttttaaaaatgtattggggaaaaatatacttggcttacaaaatatgcctgtatacttggtgacatatgtacaggttttgcttggggcaaatactgatcaagaaattcaaatgccttctgggaggtgtgaagtaggccatgccaccttaggaaatgattcagcacaaggaagtcttcagaattaagatttctttaccagagaaaacatatttgactagtgattatagtatcatttcccaggtgctgctataaataaaatttaaaatagcccaacttactggataaattatttattatttaactatttaggctatttaaaatgcttactgcttgagagaaggggaaagagaaagagagatcattgaagaaaatcatctagggagtttgggttttgttgtagatgatttccttaaaaaggaacaaaagaaaaacaaaaacttctgtgcccagattttcatggtttaaagagggagttttttagcttgctacttgatcttctgcatatcaaataaaaaactagaatatattcaaatgtgctcaactgcgttgctttaaataattttgtggtgcttctttttagcatttgatgaatacagaaatatcagccaaaaggacattgtggacagcataaaaggagaattatctgggcattttgaagacttactgttggccatagttaattgtgtgaggaacacgccggcctttttagccgaaagactgcatcgagccttgaagggtattggaactgatgagtttactctgaaccgaataatggtgtccagatcagaaattgaccttttggacattcgaacagagttcaagaagcattatggctattccctatattcagcaattaaatcggatacttctggagactatgaaatcacactcttaaaaatctgtggtggagatgactgaaccaagaagataatctccaaaggtccacgatgggctttcccaacagctccaccttacttcttctcatactatttaagagaacaagcaaatataaacagcaacttgtgttcctaacaggaattttcattgttctataacaacaacaacaaaagcgattattattttagagcatctcatttataatgtagcagctcataaatgaaattgaaaatggtattaaagatctgcaactactatccaacttatatttctgctttcaaagttaagaatctttatagttctactccattaaatataaagcaagataataaaaattgttgcttttgttaaaagtaa

SEQ ID NO: 2481 - protein, 48 aa, Homo sapiens
MVSRSEIDLLDIRTEFKKHYGYSLYSAIKSDTSGDYEITLLKICGGDD

SEQ ID NO: 2482 - DNA, 2932 bp, Homo sapiens
agatgctaatattccacttgtatgaaagatgaaaattcatgtataatattaaattttaaaagttcatcctctattttaaatagaaaatgagaaggcaggccaggcgcggtggctcacgcctgtaatcccagcattttaggaggcccaggcgggtggatcacaaggtcaggagttcaagaccagcctggccagacggtgaaaccctgtctctactaaaaatacaaaaattagccgggcgtggtagcagatgcactgtaatcccagctactcgcgaggctgaggcagagaattgcttgaacccaggaggcagaggttgcagtgagcctagattgcgccactgcactccagtctgggcgacagagtgagactctgtctcaaaaaaaaaaaaaaaaaaagaaaatgagaaggtaaaaatatggcttaatgttgatagaatgtcatatttcttttccacttagattagttttctacagtagctaatttgtctactgatttgcctcataggttaatagtattctaacccatatagagataggtacagagaagtattgaccacattattttcactgcttcacagtaagtgcaggcagtaaaacttgttttagaatgccaaacctcaagcttgagacccagtagatcctgtggcctctcaaactgccttgcttaaaataaaccaagctgagttggcagcctttaatgatgccgtaaccctgtgtttgcttgtctgtctttactgccagatggtgcgctccatgagtacagactcctgtttatcctcagaccctagggccttgtgcacagaagatgcttacctccatctctttaccagccattttctgtggtcccacacgtaccttcaaagtcatatcctaagtgaacacatcctttccttcatctcgcccagccccacatctgctccccttcccctgttcagtcatcccagagaatggccccaacaggaatttgcccaactctctgaagtcgtaccattcctccccagacttcttgactatgcctcagccaccccaggcttctttccattcctcaactgtggcaagtctattctcacatcacagtctttgcatccattccttctctggaatgctcatcctctagatctttacctagctgactccttctcatctttcaggtttcagctctcctcctgagagaggtctcccctaactgtaccaggccaattggttccctttcagtcactctccatgccatttccagctttcttttcttcatatttctgatcactatttacttaagcaatagttaatttgctttgctgtctgtctccatctactagaacataagctccatgcagacagagatataatctgttctgttcaccgccattggcacagcacatggaataatgcctggctatagtcgacgctcataagcatttgctggatgaattacatagatgaatggaatatcatttagtatgttggccatcattaggtcaaaatccacctaactgctcagctagaaattttacactatctctctttttcattatcctgtagcgatacatcattatgttttgtcaatccatttacataagcaactctcaaatcttcccattttctccatccctactgcctttattctaaggatggccatcatcatctcttaattactcagtctcctcaagatgagtctcaaagcctctagtcttaactcccttatcttccttctactcctaccttgcaatctgtttctcatgctgcagtcaaagtgattttctgaaaccacgaatttgatctgatctcaacattctcatgtttaaaatattacaagagctctccacacttaggataaagtcagaatttcatttcatggttaacaaggtctggcctttccagacacatttctttttatccctctttgttaacttacgtatccttgaacgtggcgttctttattgccctaaaccttcacgcctgctatttcctctataggaagtttctctcctccctacatgaacctactccttcctcttgttgactgtttagtccttgcttaaatgtcactttctcagacttttcctaatccctaatctttcttaggcccccctgaagtatgctcccatggtacccaatattttcaacatgtcagactgttttgcaatggcttactttcttgcctgtattctttacaaaactggaagcttaacatgggtatctcatctctgctttgcagcatttagcatgatgctgtcacagagtaggtgctcaacaaatatttcttgaataatgaatgatgagtttgataataaatgaaaaagaatcactatagttgaatattttgcacaccattatctgattcttataaatatagatctctatgttgctttgtgaccaatgacatttgtgttgtgaacacctgcattccttaacagggtattggaactgatgagtttactctgaaccgaataatggtgtccagatcagaaattgaccttttggacattcgaacagagttcaagaagcattatggctattccctatattcagcaattaaatcggatacttctggagactatgaaatcacactcttaaaaatctgtggtggagatgactgaaccaagaagataatctccaaaggtccacgatgggctttcccaacagctccaccttacttcttctcatactatttaagagaacaagcaaatataaacagcaacttgtgttcctaacaggaattttcattgttctataacaacaacaacaaaagcgattattattttagagcatctcatttataatgtagcagctcataaatgaaattgaaaatggtattaaagatctgcaactactatccaacttatatttctgctttcaaagttaagaatctttatagttctactccattaaatataaagcaagataataaaaattgttgcttttgttaaaagtaa

SEQ ID NO: 2483 - protein, 48 aa, Homo sapiens; identical to SEQ ID NO: 2481

SEQ ID NO: 2484 - DNA, 792 bp, Homo sapiens
ttttcagttctgtcttcctgaggctgctgtttctgggcatggccaggggatcttcagactttacaaaccagttgtgcagagccaggcatttcaataaggaacaaaatgctgagtaacaacatgaagtcagagtgttgcttgccaagagctgggaggcctgggtggtttcccaatcttaaagaagcagaaggatattaaagtgagcctcccaaaggaaaacgtggatctacttaccaacgcagaaaatgatacacacggattcgatttaggcacgctacattcaaatgacttggaagagcaggttctctgagccaggatactaaagtccctgtttaggaaagagccacgttgtatgtttaccctaccacaaagatacagtcatgtgcctgggaaagattgatgccagctccagaaaggcatccgaatggtctaagtaatgccatccatctgtcagtaatagattcagaaatgggtatgtgattcaagtctggccaatgagatgtatgcagaagagtgctgggtattctggaaaattatcccttgtcattcagagatccacaggaatccagccttttgctccttgaatgggataaggaagcacataatcccagttgctcttccagtcatcccagacccacagccctgctttagccatcctatagccatcatatattcacaaggggagagcaactgaggacaacactgtggatccttgtgacataaccaagccagtgaaccaatcaatacatttatttattgtttgagccattgtagttgagcttacgttactgg

SEQ ID NO: 2485 - protein, 64 aa, Homo sapiens
MYAEECWVFWKIIPCHSEIHRNPAFCSLNGIRKHIIPVALPVIPDPQPCFSHPIAIIYSQGESN

SEQ ID NO: 2486 - DNA, 2389 bp, Homo sapiens
ttttcagttctgtcttcctgaggctgctgtttctgggcatggccaggggatcttcagactttacaaaccagttgtgcagagccaggcatttcaataaggaacaaaatgctgagtaacaacatgaagtcagagtgttgcttgccaagagctgggaggcctgggtggtttcccaatcttaaagaagcagaaggatattaaagtgagcctcccaaaggaaaacgtggatctacttaccaacgcagaaaatgatacacacggattcgatttaggcacgctacattcaaatgacttggaagagcaggttctctgagccaggatactaaagtccctgtttaggaaagagccacgttgtatgtttaccctaccacaaagatacagtgctggcagaggaaacagcagcaatgatgctctgcgagcctgactcagggccagcagtgatggcagcccaagaattctggaggaaagtggctctgggaattgaacagtggctcagtgatgttggggccaccaagtctgcaattctccctacctgttcttcatggttgtaagatgactgctgcaattctcggcatcatgtgcatgttaatgtcaggaggaagaaaggaagagggagcactgggatgttacattcattttgtcaggaaaagcaaagcctttccagacagctccgaaacttgcttacctctcattggccagcaccatcacttgaccacttgtccactcctagctgcaaggaaagtggcaaagtagaaggtatttgagaatgtctgctgggttagccaaaacaatagtgacttctacacccaattttctgggcactgcagaagtatccttgagtcctatgtgatcagagggagagcaaacctcaataatgaaacagattcaatttccatcacccagtgagacaccatgggattagaataaatttttaaaaaaacaaattgaaaaaaatgcatttttaaaacaacaaaatcagaaaggatgaaaggtgatatttctagcatatcagtttgtggtggtaaattaattaccttatacaaaggcctcagtgactttcttctccttacctaacgaatcatctttaaaataagtaaaataaagaaacaagagcagcagcagatgcttcctaaaaagaagttaccaaatctgttcaccacaaacctgagaattcaactgtggacatttggacaccagcaatgaacatgaaactcagcttatgaggcatatttggctaaaggtcaaggtgacttaaagttcatcataggacatctacaatttgcaaagcaggtgactggatatggactccttccaagtctcatttaattggataatgcctacgttttaagtatcagaagtgagtctttctctattaaatgaagtcagttccactaaaacctaaatcttgtttggcaggcactccatgtttcttaatttttattccatgctgtatattcttttagacttgattttcacttttttttcttttttcctgtacatttatctttgctgtgaaacaaagtgccctgctttgaaggacaggtttgtgggctgctggtggtgagacaacagcagtccttccaagtcttcctcccatcactctgttagctctccctttgtttttaattagcattacaccagttaattctgttatctcttaaccctggttctgcatcctcttcttcttttctattccttactccgctcctgttttttcttgttctgcttttccaagaaatgtcttgtctcctcatcagttgactgtcttctctttccagagggaccataaaggtgccagcctaaggaacacgtaaaacgtgggaacagacaaacaagctgctgcctattacagagatagataattaactttggaccattacatgcaattcatcagcttatctttttcaaactttatataagaagtcatttcccaatggtaaccacttgccagctgcaactttgacgcatattatcaggataggtgagattgatgggggccctttgaactcttcccagggaattatctttataatgttacagttttctctatagcatggtcatattgttaacattggttataaggtcatatggttagtatggttagtattggtggctcacagctgtaataccagcactttgggaggccaaggtgggaggatcacttgagccctggtgttcaaaaccagctctggaaacatagcaagaccttgtctctacaaaaaaaaattaaataaattaaaagattagctgggcatggtggcacatgcctgtagtcctcactacttgggaaactaaggtgggaggatcctttgagcttgggaggttgaggctgcagtgagctgtggttgtgccatggcactccagcctgggtgacagagtgagagcctgtctc

SEQ ID NO: 2487 - protein, 48 aa, Homo sapiens
MMLCEPDSGPAVMAAQEFWRKVALGIEQWLSDVGATKSAILPTCSSWL

SEQ ID NO: 2488 - DNA, 2483 bp, Homo sapiens
ttttcagttctgtcttcctgaggctgctgtttctgggcatggccaggggatcttcagactttacaaaccagttgtgcagagccaggcatttcaataaggaacaaaatgctgagtaacaacatgaagtcagagtgttgcttgccaagagctgggaggcctgggtggtttcccaatcttaaagaagcagaaggatattaaagtgagcctcccaaaggaaaacgtggatctacttaccaacgcagaaaatgatacacacggattcgatttaggcacgctacattcaaatgacttggaagagcaggttctctgagccaggatactaaagtccctgtttaggaaagagccacgttgtatgtttaccctaccacaaagatacagtcatgtgcctgggaaagattgatgccagctccagaaaggcatccgaatggtctaagtaatgccatccatctgtcagtaatagattcagaaatggtgctggcagaggaaacagcagcaatgatgctctgcgagcctgactcagggccagcagtgatggcagcccaagaattctggaggaaagtggctctgggaattgaacagtggctcagtgatgttggggccaccaagtctgcaattctccctacctgttcttcatggttgtaagatgactgctgcaattctcggcatcatgtgcatgttaatgtcaggaggaagaaaggaagagggagcactgggatgttacattcattttgtcaggaaaagcaaagcctttccagacagctccgaaacttgcttacctctcattggccagcaccatcacttgaccacttgtccactcctagctgcaaggaaagtggcaaagtagaaggtatttgagaatgtctgctgggttagccaaaacaatagtgacttctacacccaattttctgggcactgcagaagtatccttgagtcctatgtgatcagagggagagcaaacctcaataatgaaacagattcaatttccatcacccagtgagacaccatgggattagaataaatttttaaaaaaacaaattgaaaaaaatgcatttttaaaacaacaaaatcagaaaggatgaaaggtgatatttctagcatatcagtttgtggtggtaaattaattaccttatacaaaggcctcagtgactttcttctccttacctaacgaatcatctttaaaataagtaaaataaagaaacaagagcagcagcagatgcttcctaaaaagaagttaccaaatctgttcaccacaaacctgagaattcaactgtggacatttggacaccagcaatgaacatgaaactcagcttatgaggcatatttggctaaaggtcaaggtgacttaaagttcatcataggacatctacaatttgcaaagcaggtgactggatatggactccttccaagtctcatttaattggataatgcctacgttttaagtatcagaagtgagtctttctctattaaatgaagtcagttccactaaaacctaaatcttgtttggcaggcactccatgtttcttaatttttattccatgctgtatattcttttagacttgattttcacttttttttcttttttcctgtacatttatctttgctgtgaaacaaagtgccctgctttgaaggacaggtttgtgggctgctggtggtgagacaacagcagtccttccaagtcttcctcccatcactctgttagctctccctttgtttttaattagcattacaccagttaattctgttatctcttaaccctggttctgcatcctcttcttcttttctattccttactccgctcctgttttttcttgttctgcttttccaagaaatgtcttgtctcctcatcagttgactgtcttctctttccagagggaccataaaggtgccagcctaaggaacacgtaaaacgtgggaacagacaaacaagctgctgcctattacagagatagataattaactttggaccattacatgcaattcatcagcttatctttttcaaactttatataagaagtcatttcccaatggtaaccacttgccagctgcaactttgacgcatattatcaggataggtgagattgatgggggccctttgaactcttcccagggaattatctttataatgttacagttttctctatagcatggtcatattgttaacattggttataaggtcatatggttagtatggttagtattggtggctcacagctgtaataccagcactttgggaggccaaggtgggaggatcacttgagccctggtgttcaaaaccagctctggaaacatagcaagaccttgtctctacaaaaaaaaattaaataaattaaaagattagctgggcatggtggcacatgcctgtagtcctcactacttgggaaactaaggtgggaggatcctttgagcttgggaggttgaggctgcagtgagctgtggttgtgccatggcactccagcctgggtgacagagtgagagcctgtctc

SEQ ID NO: 2489 - protein, 80 aa, Homo sapiens [sequence omitted]

SEQ ID NO: 2490 - DNA, 2317 bp, Homo sapiens
ttttcagttctgtcttcctgaggctgctgtttctgggcatggccaggggatcttcagactttacaaaccagttgtgcagagccaggcatttcaataaggaacaaaatgctgagtaacaacatgaagtcagagtgttgcttgccaagagctgggaggcctgggtggtttcccaatcttaaagaagcagaaggatattaaagtgagcctcccaaaggaaaacgtggatctacttaccaacgcagaaaatgatacacacggattcgatttaggcacgctacattcaaatgacttggaagagcaggttctctgagccaggatactaaagtccctgtttaggaaagagccacgttgtatgtttaccctaccacaaagatacagaattctggaggaaagtggctctgggaattgaacagtggctcagtgatgttggggccaccaagtctgcaattctccctacctgttcttcatggttgtaagatgactgctgcaattctcggcatcatgtgcatgttaatgtcaggaggaagaaaggaagagggagcactgggatgttacattcattttgtcaggaaaagcaaagcctttccagacagctccgaaacttgcttacctctcattggccagcaccatcacttgaccacttgtccactcctagctgcaaggaaagtggcaaagtagaaggtatttgagaatgtctgctgggttagccaaaacaatagtgacttctacacccaattttctgggcactgcagaagtatccttgagtcctatgtgatcagagggagagcaaacctcaataatgaaacagattcaatttccatcacccagtgagacaccatgggattagaataaatttttaaaaaaacaaattgaaaaaaatgcatttttaaaacaacaaaatcagaaaggatgaaaggtgatatttctagcatatcagtttgtggtggtaaattaattaccttatacaaaggcctcagtgactttcttctccttacctaacgaatcatctttaaaataagtaaaataaagaaacaagagcagcagcagatgcttcctaaaaagaagttaccaaatctgttcaccacaaacctgagaattcaactgtggacatttggacaccagcaatgaacatgaaactcagcttatgaggcatatttggctaaaggtcaaggtgacttaaagttcatcataggacatctacaatttgcaaagcaggtgactggatatggactccttccaagtctcatttaattggataatgcctacgttttaagtatcagaagtgagtctttctctattaaatgaagtcagttccactaaaacctaaatcttgtttggcaggcactccatgtttcttaatttttattccatgctgtatattcttttagacttgattttcacttttttttcttttttcctgtacatttatctttgctgtgaaacaaagtgccctgctttgaaggacaggtttgtgggctgctggtggtgagacaacagcagtccttccaagtcttcctcccatcactctgttagctctccctttgtttttaattagcattacaccagttaattctgttatctcttaaccctggttctgcatcctcttcttcttttctattccttactccgctcctgttttttcttgttctgcttttccaagaaatgtcttgtctcctcatcagttgactgtcttctctttccagagggaccataaaggtgccagcctaaggaacacgtaaaacgtgggaacagacaaacaagctgctgcctattacagagatagataattaactttggaccattacatgcaattcatcagcttatctttttcaaactttatataagaagtcatttcccaatggtaaccacttgccagctgcaactttgacgcatattatcaggataggtgagattgatgggggccctttgaactcttcccagggaattatctttataatgttacagttttctctatagcatggtcatattgttaacattggttataaggtcatatggttagtatggttagtattggtggctcacagctgtaataccagcactttgggaggccaaggtgggaggatcacttgagccctggtgttcaaaaccagctctggaaacatagcaagaccttgtctctacaaaaaaaaattaaataaattaaaagattagctgggcatggtggcacatgcctgtagtcctcactacttgggaaactaaggtgggaggatcctttgagcttgggaggttgaggctgcagtgagctgtggttgtgccatggcactccagcctgggtgacagagtgagagcctgtctc

SEQ ID NO: 2491 - protein, 84 aa, Homo sapiens
MLGPPSLQFSLPVLHGCKMTAAILGIMCMLMSGGRKEEGALGCYIHFVRKSKAFPDSSETCLPLIGQHHHLTTCPLLAARKVAK

SEQ ID NO: 2492 - DNA, 2411 bp, Homo sapiens
ttttcagttctgtcttcctgaggctgctgtttctgggcatggccaggggatcttcagactttacaaaccagttgtgcagagccaggcatttcaataaggaacaaaatgctgagtaacaacatgaagtcagagtgttgcttgccaagagctgggaggcctgggtggtttcccaatcttaaagaagcagaaggatattaaagtgagcctcccaaaggaaaacgtggatctacttaccaacgcagaaaatgatacacacggattcgatttaggcacgctacattcaaatgacttggaagagcaggttctctgagccaggatactaaagtccctgtttaggaaagagccacgttgtatgtttaccctaccacaaagatacagtcatgtgcctgggaaagattgatgccagctccagaaaggcatccgaatggtctaagtaatgccatccatctgtcagtaatagattcagaaatggaattctggaggaaagtggctctgggaattgaacagtggctcagtgatgttggggccaccaagtctgcaattctccctacctgttcttcatggttgtaagatgactgctgcaattctcggcatcatgtgcatgttaatgtcaggaggaagaaaggaagagggagcactgggatgttacattcattttgtcaggaaaagcaaagcctttccagacagctccgaaacttgcttacctctcattggccagcaccatcacttgaccacttgtccactcctagctgcaaggaaagtggcaaagtagaaggtatttgagaatgtctgctgggttagccaaaacaatagtgacttctacacccaattttctgggcactgcagaagtatccttgagtcctatgtgatcagagggagagcaaacctcaataatgaaacagattcaatttccatcacccagtgagacaccatgggattagaataaatttttaaaaaaacaaattgaaaaaaatgcatttttaaaacaacaaaatcagaaaggatgaaaggtgatatttctagcatatcagtttgtggtggtaaattaattaccttatacaaaggcctcagtgactttcttctccttacctaacgaatcatctttaaaataagtaaaataaagaaacaagagcagcagcagatgcttcctaaaaagaagttaccaaatctgttcaccacaaacctgagaattcaactgtggacatttggacaccagcaatgaacatgaaactcagcttatgaggcatatttggctaaaggtcaaggtgacttaaagttcatcataggacatctacaatttgcaaagcaggtgactggatatggactccttccaagtctcatttaattggataatgcctacgttttaagtatcagaagtgagtctttctctattaaatgaagtcagttccactaaaacctaaatcttgtttggcaggcactccatgtttcttaatttttattccatgctgtatattcttttagacttgattttcacttttttttcttttttcctgtacatttatctttgctgtgaaacaaagtgccctgctttgaaggacaggtttgtgggctgctggtggtgagacaacagcagtccttccaagtcttcctcccatcactctgttagctctccctttgtttttaattagcattacaccagttaattctgttatctcttaaccctggttctgcatcctcttcttcttttctattccttactccgctcctgttttttcttgttctgcttttccaagaaatgtcttgtctcctcatcagttgactgtcttctctttccagagggaccataaaggtgccagcctaaggaacacgtaaaacgtgggaacagacaaacaagctgctgcctattacagagatagataattaactttggaccattacatgcaattcatcagcttatctttttcaaactttatataagaagtcatttcccaatggtaaccacttgccagctgcaactttgacgcatattatcaggataggtgagattgatgggggccctttgaactcttcccagggaattatctttataatgttacagttttctctatagcatggtcatattgttaacattggttataaggtcatatggttagtatggttagtattggtggctcacagctgtaataccagcactttgggaggccaaggtgggaggatcacttgagccctggtgttcaaaaccagctctggaaacatagcaagaccttgtctctacaaaaaaaaattaaataaattaaaagattagctgggcatggtggcacatgcctgtagtcctcactacttgggaaactaaggtgggaggatcctttgagcttgggaggttgaggctgcagtgagctgtggttgtgccatggcactccagcctgggtgacagagtgagagcctgtctc

SEQ ID NO: 2493 - protein, 56 aa, Homo sapiens
MPAPERHPNGLSNAIHLSVIDSEMEFWRKVALGIEQWLSDVGATKSAILPTCSSWL

SEQ ID NO: 2494 - DNA, 1985 bp, Homo sapiens
ttttcagttctgtcttcctgaggctgctgtttctgggcatggccaggggatcttcagactttacaaaccagttgtgcagagccaggcatttcaataaggaacaaaatgctgagtaacaacatgaagtcagagtgttgcttgccaagagctgggaggcctgggtggtttcccaatcttaaagaagcagaaggatattaaagtgagcctcccaaaggaaaacgtggatctacttaccaacgcagaaaatgatacacacggattcgatttaggcacgctacattcaaatgacttggaagagcaggttctctgagccaggatactaaagtccctgtttaggaaagagccacgttgtatgtttaccctaccacaaagataaaggtatttgagaatgtctgctgggttagccaaaacaatagtgacttctacacccaattttctgggcactgcagaagtatccttgagtcctatgtgatcagagggagagcaaacctcaataatgaaacagattcaatttccatcacccagtgagacaccatgggattagaataaatttttaaaaaaacaaattgaaaaaaatgcatttttaaaacaacaaaatcagaaaggatgaaaggtgatatttctagcatatcagtttgtggtggtaaattaattaccttatacaaaggcctcagtgactttcttctccttacctaacgaatcatctttaaaataagtaaaataaagaaacaagagcagcagcagatgcttcctaaaaagaagttaccaaatctgttcaccacaaacctgagaattcaactgtggacatttggacaccagcaatgaacatgaaactcagcttatgaggcatatttggctaaaggtcaaggtgacttaaagttcatcataggacatctacaatttgcaaagcaggtgactggatatggactccttccaagtctcatttaattggataatgcctacgttttaagtatcagaagtgagtctttctctattaaatgaagtcagttccactaaaacctaaatcttgtttggcaggcactccatgtttcttaatttttattccatgctgtatattcttttagacttgattttcacttttttttcttttttcctgtacatttatctttgctgtgaaacaaagtgccctgctttgaaggacaggtttgtgggctgctggtggtgagacaacagcagtccttccaagtcttcctcccatcactctgttagctctccctttgtttttaattagcattacaccagttaattctgttatctcttaaccctggttctgcatcctcttcttcttttctattccttactccgctcctgttttttcttgttctgcttttccaagaaatgtcttgtctcctcatcagttgactgtcttctctttccagagggaccataaaggtgccagcctaaggaacacgtaaaacgtgggaacagacaaacaagctgctgcctattacagagatagataattaactttggaccattacatgcaattcatcagcttatctttttcaaactttatataagaagtcatttcccaatggtaaccacttgccagctgcaactttgacgcatattatcaggataggtgagattgatgggggccctttgaactcttcccagggaattatctttataatgttacagttttctctatagcatggtcatattgttaacattggttataaggtcatatggttagtatggttagtattgtacctgtaaggtctttgggattttgaagatgaaaggtgttgcataaattgaatgaattcacttagagagatagaaggcaactacagggaatattacgtacatcatggagcggaaagcactaaggcctgtggaattattctcagtgacacgtcgttgagggcagtggtccacatgttttgaacatggtttctcccaggtgaaaaggatgagtaatttgttctccttcacatgtgtgtatgtaggtcttatacaca

SEQ ID NO: 2495 - protein, 46 aa, Homo sapiens
MFLNFYSMLYILLDLIFTFFSFFLYIYLCCETKCPALKDRFVGCWW

SEQ ID NO: 2496 - DNA, 2111 bp, Homo sapiens
atattaaagtgagcctcccaaaggaaaacgtggatctacttaccaacgcagaaaatgatacacacggattcgatttagtcatgtgcctgggaaagattgatgccagctccagaaaggcatccgaatggtctaagtaatgccatccatctgtcagtaatagattcagaaatggaattctggaggaaagtggctctgggaattgaacagtggctcagtgatgttggggccaccaagtctgcaattctccctacctgttcttcatggttgtaagatgactgctgcaattctcggcatcatgtgcatgttaatgtcaggaggaagaaaggaagagggagcactgggatgttacattcattttgtcaggaaaagcaaagcctttccagacagctccgaaacttgcttacctctcattggccagcaccatcacttgaccacttgtccactcctagctgcaaggaaagtggcaaagtagaaggtatttgagaatgtctgctgggttagccaaaacaatagtgacttctacacccaattttctgggcactgcagaagtatccttgagtcctatgtgatcagagggagagcaaacctcaataatgaaacagattcaatttccatcacccagtgagacaccatgggattagaataaatttttaaaaaaacaaattgaaaaaaatgcatttttaaaacaacaaaatcagaaaggatgaaaggtgatatttctagcatatcagtttgtggtggtaaattaattaccttatacaaaggcctcagtgactttcttctccttacctaacgaatcatctttaaaataagtaaaataaagaaacaagagcagcagcagatgcttcctaaaaagaagttaccaaatctgttcaccacaaacctgagaattcaactgtggacatttggacaccagcaatgaacatgaaactcagcttatgaggcatatttggctaaaggtcaaggtgacttaaagttcatcataggacatctacaatttgcaaagcaggtgactggatatggactccttccaagtctcatttaattggataatgcctacgttttaagtatcagaagtgagtctttctctattaaatgaagtcagttccactaaaacctaaatcttgtttggcaggcactccatgtttcttaatttttattccatgctgtatattcttttagacttgattttcacttttttttcttttttcctgtacatttatctttgctgtgaaacaaagtgccctgctttgaaggacaggtttgtgggctgctggtggtgagacaacagcagtccttccaagtcttcctcccatcactctgttagctctccctttgtttttaattagcattacaccagttaattctgttatctcttaaccctggttctgcatcctcttcttcttttctattccttactccgctcctgttttttcttgttctgcttttccaagaaatgtcttgtctcctcatcagttgactgtcttctctttccagagggaccataaaggtgccagcctaaggaacacgtaaaacgtgggaacagacaaacaagctgctgcctattacagagatagataattaactttggaccattacatgcaattcatcagcttatctttttcaaactttatataagaagtcatttcccaatggtaaccacttgccagctgcaactttgacgcatattatcaggataggtgagattgatgggggccctttgaactcttcccagggaattatctttataatgttacagttttctctatagcatggtcatattgttaacattggttataaggtcatatggttagtatggttagtattggtggctcacagctgtaataccagcactttgggaggccaaggtgggaggatcacttgagccctggtgttcaaaaccagctctggaaacatagcaagaccttgtctctacaaaaaaaaattaaataaattaaaagattagctgggcatggtggcacatgcctgtagtcctcactacttgggaaactaaggtgggaggatcctttgagcttgggaggttgaggctgcagtgagctgtggttgtgccatggcactccagcctgggtgacagagtgagagcctgtctc

SEQ ID NO: 2497 - protein, 56 aa, Homo sapiens; identical to SEQ ID NO: 2493

SEQ ID NO: 2498 - DNA, 3834 bp, Homo sapiens
ggatctacttaccaacgcagaaaatgatacacacggattcgatttagtcatgtgcctgggaaagattgatgccagctccagaaaggcatccgaatggtctaaaattctggaggaaagtggctctgggaattgaacagtggctcagtgatgttggggccaccaagtctgcaattctccctacctgttcttcatggttgtaagatgactgctgcaattctcggcatcatgtgcatgttaatgtcaggaggaagaaaggaagagggagcactgggatgttacattcattttgtcaggaaaagcaaagcctttccagacagctccgaaacttgcttacctctcattggccagcaccatcacttgaccacttgtccactcctagctgcaaggaaagtggcaaagtagaaggtatttgagaatgtctgctgggttagccaaaacaatagtgacttctacacccaattttctgggcactgcagaagtatccttgagtcctatgtgatcagagggagagcaaacctcaataatgaaacagattcaatttccatcacccagtgagacaccatgggattagaataaatttttaaaaaaacaaattgaaaaaaatgcatttttaaaacaacaaaatcagaaaggatgaaaggtgatatttctagcatatcagtttgtggtggtaaattaattaccttatacaaaggcctcagtgactttcttctccttacctaacgaatcatctttaaaataagtaaaataaagaaacaagagcagcagcagatgcttcctaaaaagaagttaccaaatctgttcaccacaaacctgagaattcaactgtggacatttggacaccagcaatgaacatgaaactcagcttatgaggcatatttggctaaaggtcaaggtgacttaaagttcatcataggacatctacaatttgcaaagcaggtgactggatatggactccttccaagtctcatttaattggataatgcctacgttttaagtatcagaagtgagtctttctctattaaatgaagtcagttccactaaaacctaaatcttgtttggcaggcactccatgtttcttaatttttattccatgctgtatattcttttagacttgattttcacttttttttcttttttcctgtacatttatctttgctgtgaaacaaagtgccctgctttgaaggacaggtttgtgggctgctggtggtgagacaacagcagtccttccaagtcttcctcccatcactctgttagctctccctttgtttttaattagcattacaccagttaattctgttatctcttaaccctggttctgcatcctcttcttcttttctattccttactccgctcctgttttttcttgttctgcttttccaagaaatgtcttgtctcctcatcagttgactgtcttctctttccagagggaccataaaggtgccagcctaaggaacacgtaaaacgtgggaacagacaaacaagctgctgcctattacagagatagataattaactttggaccattacatgcaattcatcagcttatctttttcaaactttatataagaagtcatttcccaatggtaaccacttgccagctgcaactttgacgcatattatcaggataggtgagattgatgggggccctttgaactcttcccagggaattatctttataatgttacagttttctctatagcatggtcatattgttaacattggttataaggtcatatggttagtatggttagtattggtggctcacagctgtaataccagcactttgggaggccaaggtgggaggatcacttgagccctggtgttcaaaaccagctctggaaacatagcaagaccttgtctctacaaaaaaaaattaaataaattaaaagattagctgggcatggtggcacatgcctgtagtcctcactacttgggaaactaaggtgggaggatcctttgagcttgggaggttgaggctgcagtgagctgtggttgtgccatggcactccagcctgggtgacagagtgagagcctgtctcaaaaaaaaaaaaaaaaaaaaaaaaaagtacctgtaaggtctttgggattttgaagatgaaaggtgttgcataaattgaatgaattcacttagagagatagaaggcaactacagggaatattacgtacatcatggagcggaaagcactaaggcctgtggaattattctcagtgacacgtcgttgagggcagtggtccacatgttttgaacatggtttctcccaggtgaaaaggatgagtaatttgttctccttcacatgtgtgtatgtaggtcttatacacagcagatttgccacaaaacaaatgaagattacactttgggcccctctctcacatgagccccttccaaagttctgtttgctaattttacattttgtaatttcttattatttttcttaaagaagcctcctccaattgcataaacttcaagcctcacaaaatttggatccatacctgagccaacatacaatacaattttccatttctaacttttagttgtacctagtgttttattggaaatgatcaagtacatgagtggtgtctttttaaaaaatttactttatttgcttctctagcttcatcgttagttaggcagttaaatctaaccatttggaggtattttcatataacctccattgaggacaatttggcaatagcttttaaaattataaatatatttgtacagttataagctgccatatctataaaactatttgatagacaaaagttgaaaaccctccaagagctcatcaataaaagattaaattaattatgatacatccatatgagcactgagcagctgtgaaaaaaatgaggaagtaattcctgtgctgatatgggaagacttccaagacatgttgttaagtacagaatggtgtatacagtatgctatatagtgtggtaaaaggtttagggataagcatttatatttataactgtttatatttacataaagtaattctgaaaggatacaaaaaagctaacaaaagagattacctgtggtagtgtggggcttggggattggatgggtgagaaacagtagtggaaatgagatattgtacagtttaaggcattatacacctataaaaacatgggaatgtattacctactcaaaaagtgaaattaagagagatacaagaaactgtttggatgttccttcccgtttcaatgtatctatattttttcagccctcaaagttattataaatgtcattataataacttcataaagcttcccctataatgagaatcttaccattctcctaactccaatagcactgtaatccacctctgttaggacacatcactcttcatcatgtgtgattattatttgcagatatcatcttcaaggctcttctctatttaccacctgccattcttgttctcacctctacatgaccttcacattttatttctctcggttttttggacaagctacattcccttccacagagaaggcttccctgacccctttcacttggttggattaccttgctattcttttctatctttgtacattccttttcaaaatacttatctcccttgttgttacctataatgtctgtcttctttactcaagagtctagacaaaaagctccacgccagcctcggctgtgtttgtattgtttacgtctgtgttcctagtgcttaataaaatacctagcaagggttaataagtacttgttgactggaagggaatgacttccttcccttactagagagtgatttccttacaggcgagatgtgtcaaccttctatagcccacataaaataaaggacaatatctcctattggat

SEQ ID NO: 2499 - protein, 43 aa, Homo sapiens
MPAPERHPNGLKFWRKVALGIEQWLSDVGATKSAILPTCSSWL

SEQ ID NO: 2500 - DNA, 2519 bp, Homo sapiens
agccgggcagctgcagcggagccgcggagcgggcggcggggcccaggctgtgcgcttggggagcgcggaatgtgaggcttggcgggccgcagcacgctcggacgggccaggggcggcgacccctcgcggacgcccggctgcgcgccgggccggggacttgcccttgcacgctccctgcgccctccagctcgccggcgggaccatgaagaagttctctcggatgcccaagtcggagtcgtccgtgggggtccgggtgttcgcggtcggccgccaccaggtcaccctggaagagtcgctggccgaaggtggattctccacagttttcctcgtgcgtactcacggtggaatccgatgtgcattgaagcgaatgtatgtcaataacatgccagacctcaatgtttgtaaaagggaaattacaattatgaaagagctatctggtcacaaaaatattgtgggctatttggactgtgctgttaattcaattagtgataatgtatgggaagtccttatcttaatggaatattgtcgagctggacaggtagtgaatcaaatgaataagaagctacagacgggttttacagaaccagaagtgttacagatattctgtgatacctgtgaagctgttgcaaggttgcatcagtgtaagactccaataattcaccgggatctgaaggtagaaaatattttgttgaatgatggtgggaactatgtactttgtgactttggcagtgccactaataaatttcttaatcctcaaaaagatggagttaatgtagtagaagaagaaattaaaaagtatacaactctgtcatacagagcccctgaaatgatcaacctttatggagggaaacccatcaccaccaaggctgatatctgggcactgggatgtctactctataaactttgtttcttcactcttccttttggtgagagtcaggttgctatctgtgatggcaacttcaccatcccagacaattctcgttactcccgtaacatacattgcttaataaggttcatgcttgaaccagatccggaacatagacctgatatatttcaagtgtcatattttgcatttaaatttgccaaaaaggattgtccagtctccaacatcaataattcttctattccttcagctcttcctgaaccgatgactgctagtgaagcagctgctaggaaaagccaaataaaagccagaataacagataccattggaccaacagaaacctcaattgcaccaagacaaagaccaaaggccaactctgctactactgccactcccagtgtgctgaccattcaaagttcagcaacacctgttaaagtccttgctcctggtgaattcggtaaccatagaccaaaaggggcactaagacctggaaatggccctgaaattttattgggtcagggacctcctcagcagccgccacagcagcatagagtactccagcaactacagcagggagattggagattacagcaactccatttacagcatcgtcatcctcactacttcaagatgcttatatgcagcagtatcaacatgcaacacagcagcaacagatgcttcaacaacaatttttaatgcattcggtatatcaaccacaaccttctgcatcacagtatcctacaatgatgccgcagtatcagcaggctttctttcaacagcagatgctagctcaacatcagccgtctcaacaacaggcatcacctgaatatcttacctcccctcaagagttctcaccagccttagtttcctacacttcatcacttccagctcaggttggaaccataatggactcctcctatagtgccaataggcaattgctgataaagaggccattgcaaatttcacaaatcagaagaacatcagcaatccacctgatatgtcagggtggaatccttttggagaggataatttctctaagttaacagaagaggaactattggacagagaatttgaccttctaagatcaagtaagggacacttgaaggcttattttgcttcacagtaaaataacagctctattattattcagcaaggccaaagacttttgagaatgtgtatggaaaattctttttgtgcatttgagggcaaaattcaggccatcttcttatacatatactatcaaattatgttgtgtgcattagaaatcagttgcttgatagtagctattaaacccaatattgctgatagtatgctaatatcctaaaacttaaatattgcatatctatgaatgttaaattcagaatatctctaaaacatggaaaattgatgtttcaataaaaagggagacattttattattttgccttactaatgattttgcagctctgtttttctgcacactcaatagaaaatattgtgggtctgagatgccctttgaaaatgcctgaaagaaaacatgggctactacattatgttaatgttttgtaatgtccttttaatgagtggtgacataaaagggctgctttgttgtcctgatatggcaaaaattaaataaattctttttcactttaaatcag

SEQ ID NO: 2501 - protein, 458 aa, Homo sapiens
MKKFSRMPKSESSVGVRVFAVGRHQVTLEESLAEGGFSTVFLVRTHGGIRCALKRMYVNNMPDLNVCKREITIMKELSGHKNIVGYLDCAVNSISDNVWEVLILMEYCRAGQVVNQMNKKLQTGFTEPEVLQIFCDTCEAVARLHQCKTPIIHRDLKVENILLNDGGNYVLCDFGSATNKFLNPQKDGVNVVEEEIKKYTTLSYRAPEMINLYGGKPITTKADIWALGCLLYKLCFFTLPFGESQVAICDGNFTIPDNSRYSRNIHCLIRFMLEPDPEHRPDIFQVSYFAFKFAKKDCPVSNINNSSIPSALPEPMTASEAAARKSQIKARITDTIGPTETSIAPRQRPKANSATTATPSVLTIQSSATPVKVLAPGEFGNHRPKGALRPGNGPEILLGQGPPQQPPQQHRVLQQLQQGDWRLQQLHLQHRHPHYFKMLICSSINMQHSSNRCFNNNF

SEQ ID NO: 2502 - DNA, 1493 bp, Homo sapiens
tctaatgatatttatgcttctttggtttacaggcactgggatgtctactctataaactttgtttcttcactcttccttttggtgagagtcaggttgctatctgtgatggcaacttcaccatcccagacaattctcgttactcccgtaacatacattgcttaataaggttcatgcttgaaccagatccggaacatagacctgatatatttcaagtgtcatattttgcatttaaatttgccaaaaaggattgtccagtctccaacatcaataattcttctattccttcagctcttcctgaaccgatgactgctagtgaagcagctgctaggaaaagccaaataaaagccagaataacagataccattggaccaacagaaacctcaattgcaccaagacaaagaccaaaggccaactctgctactactgccactcccagtgtgctgaccattcaaagttcagcaacacctgttaaagtccttgctcctggtgaattcggtaaccatagaccaaaaggtaatagagccccgccaacctcatcctcttaaaggttaatgttaataaacctttcatgatttgatttcctgacctcaggtgatccttaatattgtaaagtagataacataatgctttcagaaactttctattgatgtctaataaattcagttggtttctcaacaattcaattgttgtaggcaaagggaagttactggcaatataaaagtatggtacaaaaaactcacaatttgctttgatactataaatacaaactcttatccctagagtcatcaactaatagggtttgaggttgggaataaagttcaacggtatggaaaaagtctatgttatatgagaaagaaagttgaaacactagtcttacaaagtttatgtctttgtattgcacctagagccttggtgaagggctatcttgaaccatccatatggacattacaacataaaaacttacctgattttgagaaaaatttactcatctaaagtatctcctaagcattatggtacagtgtggtacttaaaaaaaatttttccccccaaagaaatgtccgtaacatttgagtaaacttatttttctcaaggatctgggagtataacctgaagactcaccttaaagaaatcctgttttgcactttatttcatgataaatctgtcgtgttttaatgttaaaatgtttttaatgaggataccctaatggttaagagtgtacgttttgagtctcacgaacctgatttgagtcctatttctcccattttttagtaatatagcttctaaaagtactagtacctatcttaataggattattgggaggattaaatggctgtttaatgtgctacctgatacacggtatgcctttgataaatgttaactattaactactgttgttactatcaagtaaagtatatgttcaggaaaggtgatgtttttattttttatttatttatttttttgagatgaagtctcactcttgtcccccaggctgg

SEQ ID NO: 2503 - protein, 124 aa, Homo sapiens [sequence omitted]

SEQ ID NO: 2504 - DNA, 991 bp, Homo sapiens
gcggccgccgagctctccccgcccggcccagcccctccgccgcagccgcggggcagccccgagccacggccccggctggcgggcgggctgcgggcaggatcctggcgctcgggctctggcaaggggaaaggacagaaacggcgcatcgggagggaccctgcctcaccgcttgtatatggcaaagtttctcgccgagctcctgggctgcacgttgccgagcaagggcgcctctcccatgtttgagtctaaaagtcattcccgagttggcctgaaatcaagcaccaagcaaaagaccaccattttcagcacattggccagtgagaagtccttatctgactgcaaaaagataattgaaccagggcacaaggagacttttgtacttgttcaggtcacacagtaagtgatggagccaggattacaacctgcccttccttacaacctgctcttccttacaacctctgacaccatattctgaaagaggaaagtatgcctcagactcctcccttttcagcaatgtttgacagcagtggttacaatcgaaacctctatcagtctgcagaggacagctgtggagggttgtattaccatgacaacaacctcctctctggatccctggaagcactcatccagcacttagtacctaatgtggattactatccagatgtaggtattcatgtttctctgaaacacatccttggcaatgagtagaaattgcagtacagtaggcagggaccatagataatacagaattatatctaggttgctaagaatttttctaacaagaaattgcatattgattatcaagtgcattgaaatcaaatcgagcctggataaggatcagattttggtatactatgtgtatcaatttcttttcaggttagttacaacattgtagatggtctgataccatctaaatgaagtatctgtagagttgattcatgcatatagcttagtccttaaatagaaatgtcagagaacattggatgctccc

SEQ ID NO: 2505 - protein, 74 aa, Homo sapiens
MAKFLAELLGCTLPSKGASPMFESKSHSRVGLKSSTKQKTTIFSTLASEKSLSDCKKIIEPGHKETFVLVQVTQ

SEQ ID NO: 2506 - DNA, 633 bp, Homo sapiens
gcggccgccgagctctccccgcccggcccagcccctccgccgcagccgcggggcagccccgagccacggccccggctggcgggcgggctgcgggcaggatcctggcgctcgggctctggcaaggggaaaggacagaaacggcgcatcgggagggaccctgcctcaccgcttgtatatggcaaagtttctcgccgagctcctgggctgcacgttgccgagcaagggcgcctctcccatgtttgagtctaaaagtcattcccgagttggcctgaaatcaagcaccaagcaaaagaccaccattttcagcacattggccagtgagaagtccttatctgactgcaaaaagaggctgtgttccctgccacgtggggtgagccaatgggctgaagaagcatgaggaaaaggagactcgggtatggcaggtggctgtgtggagaggacacttggaacagcaatggaaaccttccatgtacagcagcataactccagtttgctttccaagccctctgattgagaagccaataggcaaagtaagaatgaacctacttttatcagacactatgattcgagccagttggctgttatttctttttgccttgagctatttcggtgaaataataaaattgatcttat

SEQ ID NO: 2507 - protein, 73 aa, Homo sapiens
MAKFLAELLGCTLPSKGASPMFESKSHSRVGLKSSTKQKTTIFSTLASEKSLSDCKKRLCSLPRGVSQWAEEA

SEQ ID NO: 2508 - DNA, 677 bp, Homo sapiens
gcggccgccgagctctccccgcccggcccagcccctccgccgcagccgcggggcagccccgagccacggccccggctggcgggcgggctgcgggcaggatcctggcgctcgggctctggcaaggggaaaggacagaaacggcgcatcgggagggaccctgcctcaccgcttgtatatggcaaagtttctcgccgagctcctgggctgcacgttgccgagcaagggcgcctctcccatgtttgagtctaaaagtcattcccgagttggcctgaaatcaagcaccaagcaaaagtttatgtattcatcctcctgtagcttcctgagaagtcatgggagaccaccattttcagcacattggccagtgagaagtccttatctgactgcaaaaagaggctgtgttccctgccacgtggggtgagccaatgggctgaagaagcatgaggaaaaggagactcgggtatggcaggtggctgtgtggagaggacacttggaacagcaatggaaaccttccatgtacagcagcataactccagtttgctttccaagccctctgattgagaagccaataggcaaagtaagaatgaacctacttttatcagacactatgattcgagccagttggctgttatttctttttgccttgagctatttcggtgaaataataaaattgatcttat

SEQ ID NO: 2509 - protein, 80 aa, Homo sapiens
MAKFLAELLGCTLPSKGASPMFESKSHSRVGLKSSTKQKFMYSSSCSFLRSHGRPPFSAHWPVRSPYLTAKRGCVPCHVG

SEQ ID NO: 2510 - DNA, 533 bp, Homo sapiens
gcggccgccgagctctccccgcccggcccagcccctccgccgcagccgcggggcagccccgagccacggccccggctggcgggcgggctgcgggcaggatcctggcgctcgggctctggcaaggggaaaggacagaaacggcgcatcgggagggaccctgcctcaccgcttgtatatggcaaagtttctcgccgagctcctgggctgcacgttgccgagcaagggcgcctctcccatgtttgagtctaaaagtcattcccgagttggcctgaaatcaagcaccaagcaaaagaccaccattttcagcacattggccagtgagaagtccttatctgactgcaaaaaggaacagcaatggaaaccttccatgtacagcagcataactccagtttgctttccaagccctctgattgagaagccaataggcaaagtaagaatgaacctacttttatcagacactatgattcgagccagttggctgttatttctttttgccttgagctatttcggtgaaataataaaattgatcttat

SEQ ID NO: 2511 - protein, 118 aa, Homo sapiens
MAKFLAELLGCTLPSKGASPMFESKSHSRVGLKSSTKQKTTIFSTLASEKSLSDCKKEQQWKPSMYSSITPVCFPSPLIEKPIGKVRMNLLLSDTMIRASWLLFLFALSYFGEIIKLI

SEQ ID NO: 2512 - DNA, 504 bp, Homo sapiens
gcggccgccgagctctccccgcccggcccagcccctccgccgcagccgcggggcagccccgagccacggccccggctggcgggcgggctgcgggcaggatcctggcgctcgggctctggcaaggggaaaggacagaaacggcgcatcgggagggaccctgcctcaccgcttgtatatggcaaagtttctcgccgagctcctgggctgcacgttgccgagcaagggcgcctctcccatgtttgagtctaaaagtcattcccgagttggcctgaaatcaagcaccaagcaaaagaccaccattttcagcacattggccagtgagaagtccttatctgactgcaaaaagcatactcagaccagaccctggaacggagcaggtttttgatgaatgcctgttgaatgatgaataaacggatgaagggaaccaagaggctgtgttccctgccacgtggggtgagccaatgggctgaagaagcatgaggaaaaggagactcgggtatggca

SEQ ID NO: 2513 - protein, 69 aa, Homo sapiens
MAKFLAELLGCTLPSKGASPMFESKSHSRVGLKSSTKQKTTIFSTLASEKSLSDCKKHTQTRPWNGAGF

SEQ ID NO: 2514 - DNA, 4633 bp, Homo sapiens
accagtcctgctggcggctcagcgcggcaggacacgtgtgcgctttcagccgggtcgcagggcgcttatcgcggcccggcagtcggggccacgcctcacccccgcccgcgaaccccgacctggggaaacccggggcgctggggaggggccactgcgttcagctctggcggtccacagcccgaagcgcggcttaggaagttcgtgtcagcgctgcctgagctcgtcccctggatgtccgggtctccccaggcggccacccgccggctcccatcgtgacctccagccgcagcgcctcccacgccggccgccgcgcgaggggagcgctcgggcgcgccgggtgtggttgggggaaggggttgtgccgcgcgcgggctgcgtgctgtgcccactcaaaaggttccgggcgcgcaggagggaagaggcagtgcccgccactcccactgagattgagagacgcggcaaggaggcagcctgtggaggaactgggtaggatttaggaacgcaccgtgcacatgcttggtggtcttgttaagtggaaactgctgctttagagtttgtttggaaggtccgggtgactcatcccaacatttacatccttaattgttaaagcgctgcctccgagcgcacgcatcctgagatcctgagcctttggttaagaccgagctctattaagctgaaaagataaaaactctccagatgtcttccagtaatgtcgaagtttttatcccagtgtcacaaggaaacaccaatggcttccccgcgacagcttccaatgacctgaaggcatttactgaaggagctgtgttaagttttcataacatctgctatcgagtaaaactgaagagtggctttctaccttgtcgaaaaccagttgagaaagaaatattatcgaatatcaatgggatcatgaaacctggtctcaacgccatcctgggacccacaggtggaggcaaatcttcgttattagatgtcttagctgcaaggaaagatccaagtggattatctggagatgttctgataaatggagcaccgcgacctgccaatttcaaatgtaattcaggttacgtggtacaagatgatgttgtgatgggcactctgacggtgagagaaaacttacagttctcagcagctcttcggcttgcaacaactatgacgaatcatgaaaaaaacgaacggattaacagggtcattcaagagttaggtctggataaagtggcagactccaaggttggaactcagtttatccgtggtgtgtctggaggagaaagaaaaaggactagtataggaatggagcttatcactgatccttccatcttgttcttggatgagcctacaactggcttagactcaagcacagcaaatgctgtccttttgctcctgaaaaggatgtctaagcagggacgaacaatcatcttctccattcatcagcctcgatattccatcttcaagttgtttgatagcctcaccttattggcctcaggaagacttatgttccacgggcctgctcaggaggccttgggatactttgaatcagctggttatcactgtgaggcctataataaccctgcagacttcttcttggacatcattaatggagattccactgctgtggcattaaacagagaagaagactttaaagccacagagatcatagagccttccaagcaggataagccactcatagaaaaattagcggagatttatgtcaactcctccttctacaaagagacaaaagctgaattacatcaactttccgggggtgagaagaagaagaagatcacagtcttcaaggagatcagctacaccacctccttctgtcatcaactcagatgggtttccaagcgttcattcaaaaacttgctgggtaatccccaggcctctatagctcagatcattgtcacagtcgtactgggactggttataggtgccatttactttgggctaaaaaatgattctactggaatccagaacagagctggggttctcttcttcctgacgaccaaccagtgtttcagcagtgtttcagccgtggaactctttgtggtagagaagaagctcttcatacatgaatacatcagcggatactacagagtgtcatcttatttccttggaaaactgttatctgatttattacccatgaggatgttaccaagtattatatttacctgtatagtgtacttcatgttaggattgaagccaaaggcagatgccttcttcgttatgatgtttacccttatgatggtggcttattcagccagttccatggcactggccatagcagcaggtcagagtgtggtttctgtagcaacacttctcatgaccatctgttttgtgtttatgatgattttttcaggtctgttggtcaatctcacaaccattgcatcttggctgtcatggcttcagtacttcagcattccacgatatggatttacggctttgcagcataatgaatttttgggacaaaacttctgcccaggactcaatgcaacaggaaacaatccttgtaactatgcaacatgtactggcgaagaatatttggtaaagcagggcatcgatctctcaccctggggcttgtggaagaatcacgtggccttggcttgtatgattgttattttcctcacaattgcctacctgaaattgttatttcttaaaaaatattcttaaatttccccttaattcagtatgatttatcctcacataaaaaagaagcactttgattgaagtattcaatcaagtttttttgttgttttctgttcccttgccatcacactgttgcacagcagcaattgttttaaagagatacatttttagaaatcacaacaaactgaattaaacatgaaagaacccaagacatcatgtatcgcatattagttaatctcctcagacagtaaccatggggaagaaatctggtctaatttattaatctaaaaaaggagaattgaattctggaaactcctgacaagttattactgtctctggcatttgtttcctcatctttaaaatgaataggtaggttagtagcccttcagtcttaatactttatgatgctatggtttgccattatttaataaatgacaaatgtattaatgctatactggaaatgtaaaattgaaaatatgttggaaaaaagattctgtcttatagggtaaaaaaagccaccgtgatagaaaaaaaatctttttgataagcacattaaagttaatagaacttactgatattcctgtctagtggtataatatctcaggaatcttggctgagggtttggaactgtgggtagagtagagggccaggagtccagtaatagaattcttgcaccatttctggaacattctagctctgggaggtcacgtaaccttcttggggtagttcagtggtttagtggtttataatccaggtgtgcgtcagaatcatctgaggaactttgctaaaatacaaaaatctggcctaagtagctccagatctaccttcataaaggaatctgaccactcctggatttggtaatttccaagttctgaaaattttacttaggatttaataactattaacatctgtccctacataggttttctttcctacttatataccttatgttctcttcattctaaccttcatcagtaatagggaaatgttttaattttatttttttagttgaagggtaatgtaccaaaaaatatagttcagtgaattaaaatgaacacacatgtgcaaccatcaattcaggtcaagaaatagaagattgtagcacacaaaagcctactcagccattctcccagtcactacttccttccttacccctgggttatttttgaaatgacacttgatgtatttccctctgttgctgttatgagaacattgctacagccaagtgttgtgtttctgtgtgcataggttgatacttaattatctccccactttttaataaacttttaatttggaaataattttagattgacagaaaagttgcaaagatagtgaggaaagttcctgtctactctttgctcagcttcccttaatgttaacattttatatagcaagatgcatttgtcaaagctaacaagttaacattggtacaatcactgttaattaaactgcacacaatattcagatttcaccacttttccactaatattctttcattgttctaggattcaattcaggagaccacatttcatctagccctcttttttaaaagtaaatacttttcagcacttacaggagttaactgagctggggcatcatggtgtatagacgccctgacactggtcatcttggaattcatttagtttgtcagtgggtgccctgacattctgtcacaacatcaatttgggaacatggcattatatttttatctttgaacttttttctttttggatgacatttgattaatgcgtcatcttggaacacattatcttttttcttggttatgtgatcaggaagattaatcagtttttcctgttcttggtataattcctgcttttcacatacctgtcccttacagttctctatatatacccttcccttattacacagagagaaatatctatctatactttttacacaaaatatacttcaaaagaaacaaaacagccacaattattaactttttaaataaatgagaatttaattatatcct

SEQ ID NO: 2515 - protein, 655 aa, Homo sapiens; identical to SEQ ID NO: 240

SEQ ID NO: 2516 - DNA, 4380 bp, Homo sapiens
agaagaggatcccacgctgactggaaccattaggtcttttgtttgaatcccagtgatcgagaaagaaatgtggttcataatcagctagtagtggagaaaaaaggaacccaaggagataggagagctgttaatttcactcgggacatttcctcgaggctagtttactcggaaagcctcaatgttccctggtagctgcaggatctactttgggggctgccaagtttcctctctcattctttctcctgccccaagagcaggcaggaaggaaagttcctggactgatactcgtctgtttagtaggcgtgggtcctggttgaagtctgtctaggaaaactcctaagtgtagaaatcttcttcgtattaccactgtctctgcactgagatttgggctgctttgcttccagcgtcacacatcataactgagaaagataaaaactctccagatgtcttccagtaatgtcgaagtttttatcccagtgtcacaaggaaacaccaatggcttccccgcgacagcttccaatgacctgaaggcatttactgaaggagctgtgttaagttttcataacatctgctatcgagtaaaactgaagagtggctttctaccttgtcgaaaaccagttgagaaagaaatattatcgaatatcaatgggatcatgaaacctggtctcaacgccatcctgggacccacaggtggaggcaaatcttcgttattagatgtcttagctgcaaggaaagatccaagtggattatctggagatgttctgataaatggagcaccgcgacctgccaatttcaaatgtaattcaggttacgtggtacaagatgatgttgtgatgggcactctgacggtgagagaaaacttacagttctcagcagctcttcggcttgcaacaactatgacgaatcatgaaaaaaacgaacggattaacagggtcattcaagagttaggtctggataaagtggcagactccaaggttggaactcagtttatccgtggtgtgtctggaggagaaagaaaaaggactagtataggaatggagcttatcactgatccttccatcttgttcttggatgagcctacaactggcttagactcaagcacagcaaatgctgtccttttgctcctgaaaaggatgtctaagcagggacgaacaatcatcttctccattcatcagcctcgatattccatcttcaagttgtttgatagcctcaccttattggcctcaggaagacttatgttccacgggcctgctcaggaggccttgggatactttgaatcagctggttatcactgtgaggcctataataaccctgcagacttcttcttggacatcattaatggagattccactgctgtggcattaaacagagaagaagactttaaagccacagagatcatagagccttccaagcaggataagccactcatagaaaaattagcggagatttatgtcaactcctccttctacaaagagacaaaagctgaattacatcaactttccgggggtgagaagaagaagaagatcacagtcttcaaggagatcagctacaccacctccttctgtcatcaactcagatgggtttccaagcgttcattcaaaaacttgctgggtaatccccaggcctctatagctcagatcattgtcacagtcgtactgggactggttataggtgccatttactttgggctaaaaaatgattctactggaatccagaacagagctggggttctcttcttcctgacgaccaaccagtgtttcagcagtgtttcagccgtggaactctttgtggtagagaagaagctcttcatacatgaatacatcagcggatactacagagtgtcatcttatttccttggaaaactgttatctgatttattacccatgaggatgttaccaagtattatatttacctgtatagtgtacttcatgttaggattgaagccaaaggcagatgccttcttcgttatgatgtttacccttatgatggtggcttattcagccagttccatggcactggccatagcagcaggtcagagtgtggtttctgtagcaacacttctcatgaccatctgttttgtgtttatgatgattttttcaggtctgttggtcaatctcacaaccattgcatcttggctgtcatggcttcagtacttcagcattccacgatatggatttacggctttgcagcataatgaatttttgggacaaaacttctgcccaggactcaatgcaacaggaaacaatccttgtaactatgcaacatgtactggcgaagaatatttggtaaagcagggcatcgatctctcaccctggggcttgtggaagaatcacgtggccttggcttgtatgattgttattttcctcacaattgcctacctgaaattgttatttcttaaaaaatattcttaaatttccccttaattcagtatgatttatcctcacataaaaaagaagcactttgattgaagtattcaatcaagtttttttgttgttttctgttcccttgccatcacactgttgcacagcagcaattgttttaaagagatacatttttagaaatcacaacaaactgaattaaacatgaaagaacccaagacatcatgtatcgcatattagttaatctcctcagacagtaaccatggggaagaaatctggtctaatttattaatctaaaaaaggagaattgaattctggaaactcctgacaagttattactgtctctggcatttgtttcctcatctttaaaatgaataggtaggttagtagcccttcagtcttaatactttatgatgctatggtttgccattatttaataaatgacaaatgtattaatgctatactggaaatgtaaaattgaaaatatgttggaaaaaagattctgtcttatagggtaaaaaaagccaccgtgatagaaaaaaaatctttttgataagcacattaaagttaatagaacttactgatattcctgtctagtggtataatatctcaggaatcttggctgagggtttggaactgtgggtagagtagagggccaggagtccagtaatagaattcttgcaccatttctggaacattctagctctgggaggtcacgtaaccttcttggggtagttcagtggtttagtggtttataatccaggtgtgcgtcagaatcatctgaggaactttgctaaaatacaaaaatctggcctaagtagctccagatctaccttcataaaggaatctgaccactcctggatttggtaatttccaagttctgaaaattttacttaggatttaataactattaacatctgtccctacataggttttctttcctacttatataccttatgttctcttcattctaaccttcatcagtaatagggaaatgttttaattttatttttttagttgaagggtaatgtaccaaaaaatatagttcagtgaattaaaatgaacacacatgtgcaaccatcaattcaggtcaagaaatagaagattgtagcacacaaaagcctactcagccattctcccagtcactacttccttccttacccctgggttatttttgaaatgacacttgatgtatttccctctgttgctgttatgagaacattgctacagccaagtgttgtgtttctgtgtgcataggttgatacttaattatctccccactttttaataaacttttaatttggaaataattttagattgacagaaaagttgcaaagatagtgaggaaagttcctgtctactctttgctcagcttcccttaatgttaacattttatatagcaagatgcatttgtcaaagctaacaagttaacattggtacaatcactgttaattaaactgcacacaatattcagatttcaccacttttccactaatattctttcattgttctaggattcaattcaggagaccacatttcatctagccctcttttttaaaagtaaatacttttcagcacttacaggagttaactgagctggggcatcatggtgtatagacgccctgacactggtcatcttggaattcatttagtttgtcagtgggtgccctgacattctgtcacaacatcaatttgggaacatggcattatatttttatctttgaacttttttctttttggatgacatttgattaatgcgtcatcttggaacacattatcttttttcttggttatgtgatcaggaagattaatcagtttttcctgttcttggtataattcctgcttttcacatacctgtcccttacagttctctatatatacccttcccttattacacagagagaaatatctatctatactttttacacaaaatatacttcaaaagaaacaaaacagccacaattattaactttttaaataaatgagaatttaattatatcct

SEQ ID NO: 2517 - protein, 655 aa, Homo sapiens; identical to SEQ ID NO: 240

SEQ ID NO: 2518 - DNA, 2728 bp, Homo sapiens
accagtcctgctggcggctcagcgcggcaggacacgtgtgcgctttcagccgggtcgcagggcgcttatcgcggcccggcagtcggggccacgcctcacccccgcccgcgaaccccgacctggggaaacccggggcgctggggaggggccactgcgttcagctctggcggtccacagcccgaagcgcggcttaggaagttcgtgtcagcgctgcctgagctcgtcccctggatgtccgggtctccccaggcggccacccgccggctcccatcgtgacctccagccgcagcgcctcccacgccggccgccgcgcgaggggagcgctcgggcgcgccgggtgtggttgggggaaggggttgtgccgcgcgcgggctgcgtgctgtgcccactcaaaaggttccgggcgcgcaggagggaagaggcagtgcccgccactcccactgagattgagagacgcggcaaggaggcagcctgtggaggaactgggtaggatttaggaacgcaccgtgcacatgcttggtggtcttgttaagtggaaactgctgctttagagtttgtttggaaggtccgggtgactcatcccaacatttacatccttaattgttaaagcgctgcctccgagcgcacgcatcctgagatcctgagcctttggttaagaccgagctctattaagctgaaaagataaaaactctccagatgtcttccagtaatgtcgaagtttttatcccagtgtcacaaggaaacaccaatggcttccccgcgacagcttccaatgacctgaaggcatttactgaaggagctgtgttaagttttcataacatctgctatcgagtaaaactgaagagtggctttctaccttgtcgaaaaccagttgagaaagaaatattatcgaatatcaatgggatcatgaaacctggtctcaacgccatcctgggacccacaggtggaggcaaatcttcgttattagatgtcttagctgcaaggaaagatccaagtggattatctggagatgttctgataaatggagcaccgcgacctgccaatttcaaatgtaattcaggttacgtggtacaagatgatgttgtgatgggcactctgacggtgagagaaaacttacagttctcagcagctcttcggcttgcaacaactatgacgaatcatgaaaaaaacgaacggattaacagggtcattcaagagttaggtctggataaagtggcagactccaaggttggaactcagtttatccgtggtgtgtctggaggagaaagaaaaaggactagtataggaatggagcttatcactgatccttccatcttgttcttggatgagcctacaactggcttagactcaagcacagcaaatgctgtccttttgctcctgaaaaggatgtctaagcagggacgaacaatcatcttctccattcatcagcctcgatattccatcttcaagttgtttgatagcctcaccttattggcctcaggaagacttatgttccacgggcctgctcaggaggccttgggatactttgaatcagctggttatcactgtgaggcctataataaccctgcagacttcttcttggacatcattaatggagattccactgctgtggcattaaacagagaagaagactttaaagccacagagatcatagagccttccaagcaggataagccactcatagaaaaattagcggagatttatgtcaactcctccttctacaaagagacaaaagctgaattacatcaactttccgggggtgagaagaagaagaagatcacagtcttcaaggagatcagctacaccacctccttctgtcatcaactcagatgggtttccaagcgttcattcaaaaacttgctgggtaatccccaggcctctatagctcagatcattgtcacagtcgtactgggactggttataggtgccatttactttgggctaaaaaatgattctactggaatccagaacagagctggggttctcttcttcctgacgaccaaccagtgtttcagcagtgtttcagccgtggaactctttgtggtagagaagaagctcttcatacatgaatacatcagcggatactacagagtgtcatcttatttccttggaaaactgttatctgatttattacccatgaggatgttaccaagtattatatttacctgtatagtgtacttcatgttaggattgaagccaaaggcagatgccttcttcgttatgatgtttacccttatgatggtggcttattcagccagttccatggcactggccatagcagcaggtcagagtgtggtttctgtagcaacacttctcatgaccatctgttttgtgtttatgatgattttttcaggtctgttggtcaatctcacaaccattgcatcttggctgtcatggcttcagtacttcagcattccacgatatggatttacggctttgcagcataatgaatttttgggacaaaacttctgcccaggactcaatgcaacaggaaacaatccttgtaactatgcaacatgtactggcgaagaatatttggtaaagcagggcatcgatctctcaccctggggcttgtggaagaatcacgtggccttggcttgtatgattgttattttcctcacaattgcctacctgaaattgttatttcttaaaaaatattcttaaatttccccttaattcagtatgatttatcctcacataaaaaagaagcactttgattgaagtattc

SEQ ID NO: 2519 - protein, 655 aa, Homo sapiens; identical to SEQ ID NO: 240

SEQ ID NO: 2520 - DNA, 1154 bp, Homo sapiens
accagtcctgctggcggctcagcgcggcaggacacgtgtgcgctttcagccgggtcgcagggcgcttatcgcggcccggcagtcggggccacgcctcacccccgcccgcgaaccccgacctggggaaacccggggcgctggggaggggccactgcgttcagctctggcggtccacagcccgaagcgcggcttaggaagttcgtgtcagcgctgcctgagctcgtcccctggatgtccgggtctccccaggcggccacccgccggctcccatcgtgacctccagccgcagcgcctcccacgccggccgccgcgcgaggggagcgctcgggcgcgccgggtgtggttgggggaaggggttgtgccgcgcgcgggctgcgtgctgtgcccactcaaaaggttccgggcgcgcaggagggaagaggcagtgcccgccactcccactgagattgagagacgcggcaaggaggcagcctgtggaggaactgggtaggatttaggaacgcaccgtgcacatgcttggtggtcttgttaagtggaaactgctgctttagagtttgtttggaaggtccgggtgactcatcccaacatttacatccttaattgttaaagcgctgcctccgagcgcacgcatcctgagatcctgagcctttggttaagaccgagctctattaagctgaaaagataaaaactctccagatgtcttccagtaatgtcgaagtttttatcccagtgtcacaaggaaacaccaatggcttccccgcgacagcttccaatgacctgaaggcatttactgaaggagctgtgttaagttttcataacatctgctatcgagtaaaactgaagagtggctttctaccttgtcgaaaaccagttgagaaagaaatattatcgaatatcaatgggatcatgaaacctggtctcaacgccatcctgggacccacaggtggaggcaaatcttcgttattagatgtcttagctgcaaggaaagatccaagtggattatctggagatgttctgataaatggagcaccgcgacctgccaatttcaaatgtaattcaggttacgtggtacaagatgatgttgtgatgggcactctgacggtgagagaaaacttacagttctcagcagctcttcggcttgcaacaactatgac

SEQ ID NO: 2521 - protein, 151 aa, Homo sapiens
MSSSNVEVFIPVSQGNTNGFPATASNDLKAFTEGAVLSFHNICYRVKLKSGFLPCRKPVEKEILSNINGIMKPGLNAILGPTGGGKSSLLDVLAARKDPSGLSGDVLINGAPRPANFKCNSGYVVQDDVVMGTLTVRENLQFSAALRLATT

SEQ ID NO: 2522 - DNA, 648 bp, Homo sapiens
tttcgaaaataaagttgctgtttgtgttggagatgctgtcatcagaattccgcggcacaaagagaaagatacaaaaatatctctctgacatgtaactttcccccttcttctagccccttgctaggaatgccagaagaggatcccacgctgactggaaccattaggtcttttgtttgaatcccagtgatcgagaaagaaatgtggttcataatcagctagtagtggagaaaaaaggaacccaaggagataggagagctgttaatttcactcgggacatttcctcgaggctagtttactcggaaagcctcaatgttccctggtagctgcaggatctactttgggggctgccaagtttcctctctcattctttctcctgccccaagagcaggcaggaaggaaagttcctggactgatactcgtctgtttagtaggcgtgggtcctggttgaagtctgtctaggaaaactcctaagtgtagaaatcttcttcgtattaccactgtctctgcactgagatttgggctgctttgcttccagcgtcacacatcataactgagcgacagggtctcgctacatttcccgggctgttctcaaactcctgggctcaagtgatcttcccatctcagcctcccaaagtgttgggattacag

SEQ ID NO: 2523 - protein, 49 aa, Homo sapiens
MFPGSCRIYFGGCQVSSLILSPAPRAGRKESSWTDTRLFSRRGSWLKSV

SEQ ID NO: 2524 - DNA, 3266 bp, Homo sapiens
tcgttcccatcggcatctgtgactggctgcgatcgagggcccgggcggccggccagccgtctcgccgagtgcggactggccggatctgctgtcagtcagcgggaacagacttctccctctccatctggtcaactgcgggagaaaaattttcgagaatttccagcaggcaaggcagtggccgctttgactgcttgcttcggagatccgagacgacggagaaggcactcttatttaccgaccaagaaagctcctcccccgtcctccgttagctaattaaaacatttttcagggacgtagccatccagagggatttgcttcctaaggagaagaacttggaaactctgttgaccttggcttttctagaaatagataaagccttttcgagtcatgcccgcctgtctgctgatgcaactcttctgacctctgggactactgcaacagtagccctattgcgagatggtattgaactggttgtagccagtgttggggacagccgggctattttgtgtagaaaaggaaaacccatgaagctgaccattgaccatactccagaaagaaaagatgaaaaagaaaggatcaagaaatgtggtggttttgtagcttggaatagtttggggcagcctcacgtaaatggcaggcttgcaatgacaagaagtattggagatttggaccttaagaccagtggtgtcatagcagaacctgaaactaagaggattaagttacatcatgctgatgacagcttcctggtcctcaccacagatggaattaacttcatggtgaatagtcaagagatttgtgactttgtcaatcagtgccatgatcccaacgaagcagcccatgcggtgactgaacaggcaatacagtacggtactgaggataacagtactgcagtagtagtgccttttggtgcctggggaaaatataagaactctgaaatcaacttctcattcagcagaagctttgcctccagtggacgatgggcctgattaccagctgggacttagagtttctgtgcaacagtttttcactgagcatgtcaagaaactgataagatcaaaaaggtctcctaactcactagatcagcgcacaagtcagtgtaaaccacttagatagtagttttttcataaatgctcatcatatttatgttccgctgtacatgttcagtataaatatatgtgtagtgaagctactgtgagtctttaaatggaaagagcaaatgagaagtggtttggatacacttgatgagagatgagagtgtcacattaataatttttaagactcttaggcagctatgggtttcttttgatcatttttgttctttattcatttgaacacgtttttgaagttcttcaaaactagtcagtttgaattttgacagctattcaatatgtgatctccaagtttaaaaaaatttttttccagacttccctaatcctaaaatgcgagtttttatttttaataactgtaccaaggaataagtatgaaaacagttctctgttaccatattttgtattctggaccacttactggtgaaagcaaccatgcaaaagaaattaatttggccaggcacagtggctcatgcctgtaatcccagcactttgagaggccaaggtgggtagatcatctgaggtcaggaattcaagaccagcctggccaacatggtgaaaccctgtctctagtaaaaatccaaaaaaaaaaaaaaaaaaaaaaaaaaaattggctgggcgtggtggcagacacctgtaatcccagctactcgggaggctgaggaaagaggaatcacttgaacccaggagatgggggttgcagtgagctgagatcatgccattgcactccagcctgggcagcaagagcgaaaaactccatctcaaaaaaaaaaaaaaaaagaaagaaaagaaattaattcagatgatgtgacattactaaattgtatacatatttataaatgtgtatttcagctgtctcatcagccctcccctccatttattcctatttttctgtagttaagaatactgtaaaaatgtgactattccttaatatcagaaaagaatgcacaggctgagtcttccggtcaaaagttaaatactgatggaatcaagtattttgtatgaagttctcatttgttatctctaacgctattttgtgttttgcatatagtattatagtatgtgtatatcactttttgtatagagtaagcaattgaataatttgttaataaaaataataccacattgactgatactgctatagacatagcttgagttttatgtctcctttttgctcattttctaagacttaggagaaagaataaatctaaaatgaccattaaaacattctccatttcagcttgctgtgtaacttaggaagtataaaactatacttctctttatctgcatgtaagtttgctgttaaaatgtgaatttctaaatgtgtatttggaattatttccgtagtttatttctgcaaactatgtaaatttgttatatgtgtgagtatgtgtacatatgtatattttagagtaatataaaattaaagggaacaatcttgcatagctctttcaccagttttaaattattgatacgttatttttaaggactcttgacaaactaggggcaattttcttatagtggagacccagtgattatcagcagatgaggaaataggttaaaaattgctatatggcaatttgtatataaagtaataggatgtgagaaaaatactgaatcttaagaatgacatggaattctgtggcagaaacaaaagaaaaagttgatgtagtatataccttcaactgtgttttgagttgacttttttttttttctttaagctttgggtaaaaatgtatgaggagggagagggcccaatataaatatttacatcttcttacctttttggaaatggaagaagataaatcttgagtttttctgcctatattaatcaggaattgccctttgaaaaaagtgctaaataaatattttgattttttttttcaagggaagttaggtgaaagaaggaaaaacatcacaggaaagactgttaacattctgtttgttgtctgagaggtgaggaaccaaagggaggcaactaaagcgggaaaccatcttgctttttctaatcagttcttggaacagaaatgtggaagctacctttaggaacatggagaatttccaaaccaacaggcaaaggaaaactaacgcacaaaaatgacattctgaagatgcaggtttcagccaggcgcggtggctcaagcctgtaatcctagcact

SEQ ID NO: 2525 - protein, 153 aa, Homo sapiens
MKLTIDHTPERKDEKERIKKCGGFVAWNSLGQPHVNGRLAMTRSIGDLDLKTSGVIAEPETKRIKLHHADDSFLVLTTDGINFMVNSQEICDFVNQCHDPNEAAHAVTEQAIQYGTEDNSTAVVVPFGAWGKYKNSEINFSFSRSFASSGRWA

SEQ ID NO: 2526 - DNA, 3789 bp, Homo sapiens
gtcaaatagcagccgcggggaggctcgttcccatcggcatctgtgactggctgcgatcgagggcccgggcggccggccagccgtctcgccgagtgcggactggccggatctgctgtcagtcagcgggaacagacttctccctctccatctggtcaactgcgggagaaaaattttcgagaatttccagcaggcaaggcagtggccgctttgactgcttgcttcggagatccgagacgacggagaaggcactcttatttaccgaccaagaaagctcctcccccgtcctccgttagctaattaaaacatttttcagggacgtagccatccagagacattccattattgttccattgacctttccctcatcactgagtcctttggagctgagttatgtcaacagctgccttaattactttggtcagaagtggtgggaaccaggtgagaaggagagtgctgctaagctcccgcctgctgcaggacgacaggcgggtgacacccacgtgccacagctccacttcagagcctaggtgttctcggtttgacccagatggtagtgggagtccagctacctgggacaattttgggatctgggataaccgcattgatgagccaattctgctgccacccagcattaagtatggcaagccaattcccaaaatcagcttggaaaatgtggggtgcgcctcacagattggcaaacggaaagagaatgaagatcggtttgacttcgctcagctgacagatgaggtcctgtactttgcagtgtatgatggacacggtggacctgcagcagctgatttctgtcatacccacatggagaaatgtattatggatttgcttcctaaggagaagaacttggaaactctgttgaccttggcttttctagaaatagataaagccttttcgagtcatgcccgcctgtctgctgatgcaactcttctgacctctgggactactgcaacagtagccctattgcgagatggtattgaactggttgtagccagtgttggggacagccgggctattttgtgtagaaaaggaaaacccatgaagctgaccattgaccatactccagaaagaaaagatgaaaaagaaaggatcaagaaatgtggtggttttgtagcttggaatagtttggggcagcctcacgtaaatggcaggcttgcaatgacaagaagtattggagatttggaccttaagaccagtggtgtcatagcagaacctgaaactaagaggattaagttacatcatgctgatgacagcttcctggtcctcaccacagatggaattaacttcatggtgaatagtcaagagatttgtgactttgtcaatcagtgccatgatcccaacgaagcagcccatgcggtgactgaacaggcaatacagtacggtactgaggataacagtactgcagtagtagtgccttttggtgcctggggaaaatataagaactctgaaatcaacttctcattcagcagaagctttgcctccagtggacgatgggcctgattaccagctgggacttagagtttctgtgcaacagtttttcactgagcatgtcaagaaactgataagatcaaaaaggtctcctaactcactagatcagcgcacaagtcagtgtaaaccacttagatagtagttttttcataaatgctcatcatatttatgttccgctgtacatgttcagtataaatatatgtgtagtgaagctactgtgagtctttaaatggaaagagcaaatgagaagtggtttggatacacttgatgagagatgagagtgtcacattaataatttttaagactcttaggcagctatgggtttcttttgatcatttttgttctttattcatttgaacacgtttttgaagttcttcaaaactagtcagtttgaattttgacagctattcaatatgtgatctccaagtttaaaaaaatttttttccagacttccctaatcctaaaatgcgagtttttatttttaataactgtaccaaggaataagtatgaaaacagttctctgttaccatattttgtattctggaccacttactggtgaaagcaaccatgcaaaagaaattaatttggccaggcacagtggctcatgcctgtaatcccagcactttgagaggccaaggtgggtagatcatctgaggtcaggaattcaagaccagcctggccaacatggtgaaaccctgtctctagtaaaaatccaaaaaaaaaaaaaaaaaaaaaaaaaaaattggctgggcgtggtggcagacacctgtaatcccagctactcgggaggctgaggaaagaggaatcacttgaacccaggagatgggggttgcagtgagctgagatcatgccattgcactccagcctgggcagcaagagcgaaaaactccatctcaaaaaaaaaaaaaaaaagaaagaaaagaaattaattcagatgatgtgacattactaaattgtatacatatttataaatgtgtatttcagctgtctcatcagccctcccctccatttattcctatttttctgtagttaagaatactgtaaaaatgtgactattccttaatatcagaaaagaatgcacaggctgagtcttccggtcaaaagttaaatactgatggaatcaagtattttgtatgaagttctcatttgttatctctaacgctattttgtgttttgcatatagtattatagtatgtgtatatcactttttgtatagagtaagcaattgaataatttgttaataaaaataataccacattgactgatactgctatagacatagcttgagttttatgtctcctttttgctcattttctaagacttaggagaaagaataaatctaaaatgaccattaaaacattctccatttcagcttgctgtgtaacttaggaagtataaaactatacttctctttatctgcatgtaagtttgctgttaaaatgtgaatttctaaatgtgtatttggaattatttccgtagtttatttctgcaaactatgtaaatttgttatatgtgtgagtatgtgtacatatgtatattttagagtaatataaaattaaagggaacaatcttgcatagctctttcaccagttttaaattattgatacgttatttttaaggactcttgacaaactaggggcaattttcttatagtggagacccagtgattatcagcagatgaggaaataggttaaaaattgctatatggcaatttgtatataaagtaataggatgtgagaaaaatactgaatcttaagaatgacatggaattctgtggcagaaacaaaagaaaaagttgatgtagtatataccttcaactgtgttttgagttgacttttttttttttctttaagctttgggtaaaaatgtatgaggagggagagggcccaatataaatatttacatcttcttacctttttggaaatggaagaagataaatcttgagtttttctgcctatattaatcaggaattgccctttgaaaaaagtgctaaataaatattttgattttttttttcaagggaagttaggtgaaagaaggaaaaacatcacaggaaagactgttaacattctgtttgttgtctgagaggtgaggaaccaaagggaggcaactaaagcgggaaaccatcttgctttttctaatcagttcttggaacagaaatgtggaagctacctttaggaacatggagaatttccaaaccaacaggcaaaggaaaactaacgcacaaaaatgacattctgaagatgcaggtttcagccaggcgcggtggctcaagcctgtaatcctagcact

SEQ ID NO: 2527 - protein, 372 aa, Homo sapiens
MSTAALITLVRSGGNQVRRRVLLSSRLLQDDRRVTPTCHSSTSEPRCSRFDPDGSGSPATWDNFGIWDNRIDEPILLPPSIKYGKPIPKISLENVGCASQIGKRKENEDRFDFAQLTDEVLYFAVYDGHGGPAAADFCHTHMEKCIMDLLPKEKNLETLLTLAFLEIDKAFSSHARLSADATLLTSGTTATVALLRDGIELVVASVGDSRAILCRKGKPMKLTIDHTPERKDEKERIKKCGGFVAWNSLGQPHVNGRLAMTRSIGDLDLKTSGVIAEPETKRIKLHHADDSFLVLTTDGINFMVNSQEICDFVNQCHDPNEAAHAVTEQAIQYGTEDNSTAVVVPFGAWGKYKNSEINFSFSRSFASSGRWA

SEQ ID NO: 2528 - DNA, 1448 bp, Homo sapiens
catttataaaattaaaacagttttagaagcatacaggggtagaatatgcaaatggtatacccttggcatgtctcacttagcctactaactgataatatgttcacagcataggagtgaaaaatggaagagaaaaccttctaaatccatagactatagaaaagtcagcttgcctccatgggctcaagtagacctaagtcatcccaccatcatagccaacctaattaaattttaatactttcagtctggacaccagatatccatgaaggtgttgttataagttcaagtcagctctacttgatatgaatagaggccatttgtagatagtgatgcagtgtttgccaaataaggttagcaacctttccgtttgcatggagacttgttactgaattaaatacttgtttctctgcatgctgttacttacatagttcatttgcattttatttgcttagctctagttaaattagaatgatatattccagcattagtttatcatgcttgtgttttattttgtaataaaaattccatatccaatcatttgactgtcactaacttgtactctttttttcataatacttgtagcaactcttctgacctctgggactactgcaacagtagccctattgcgagatggtattgaactggttgtagccagtgttggggacagccgggctattttgtgtagaaaaggaaaacccatgaagctgaccattgaccatactccagaaagaaaagatgaaaaagaaaggatcaagaaatgtggtggttttgtagcttggaatagtttggggcagcctcacgtaaatggcaggcttgcaatgacaagaagtattggagatttggaccttaagaccagtggtgtcatagcagaacctgaaactaagaggattaagttacatcatgctgatgacagcttcctggtcctcaccacagatggaattaacttcatggtgaatagtcaagagatttgtgactttgtcaatcagtgccatgatcccaacgaagcagcccatgcggtgactgaacaggtgacccagagcttctgcctgaaaagtcccaaggagaaggaaggaaaggacagtccaggcattgtgttttagcttttgagtgttgcagtgaattttacacttgattccataatatttccaattataaaatttttatttccccaagttaaaattttaatatgccaaggaaatgtgctttgtttattctttggctttgtatataccttgaaatgatagtaacagcaatagtaaattataatagtaaactaatattcacttgctatgtgtcagacaatattcatatgtattagctcattactgtatgtattgtacagtatgtacagttacatatattgtaatcatcacaataaccctattaggttggagctattattgtcctttttcacagatgaggaaaacaggtacagaggctacagagttaat

SEQ ID NO: 2529 - protein, 133 aa, Homo sapiens [sequence omitted]

SEQ ID NO: 2530 - DNA, 762 bp, Homo sapiens
cccaatcagctaacacctgcacccaatcagcatcacctgcacccattcagccagcatcacctgcacccaatcagcatcacctgcacccaatcagccagcaacacctgcacccagccagcatcacctgcacccaatcaatcagcatcacctgcacccaatcagccagcatcacctccacttggaagctgccccaacttcccttttccaccaagccaaataatcgcccacctctacttctgtggcatcctttgcatgctactaatcagtgtcttcattgtcctgaactgccccccaacacacacccagtccatgagctgacagttctctaaaactcctgagccactatagtctctagcacagtatagtgtaggcttccaaaactggcagcaaacacttgttaattaattgcatgaagggtttcaagtctatagatatcccacatcgtgtgttatagatatcccacttcattttatctaacagatacttaggcagagtttactatgtgctgggctctgttcaaaataagtactactatccccatttttcaaggaaaatctaaagcatacagaggtcaatgcacctctgctcacccagccagataatagaggcaggattcaaatcctagaagcctgctcttagagacagcactcataaccattacattgagctacctctcaccattgggctatctggattctccctttgtgatgttaaattatggaattaaatcaagatatcttgaagggtgtttgctaaattgtt

SEQ ID NO: 2531 - protein, 33 aa, Homo sapiens
MCWALFKISTTIPIFQGKSKAYRGQCTSAHPAR

SEQ ID NO: 2532 - DNA, 968 bp, Homo sapiens
atctgctgtcagtcagcgggaacagacttctccctctccatctggtcaactgcgggagaaaaattttcgagaatttccagcaggcaaggcagtggccgctttgactgcttgcttcggagatccgagacgacggagaaggcactcttatttaccgaccaagaaagctcctcccccgtcctccgttagctaattaaaacatttttcagggacgtagccatccagagacattccattattgttccattgacctttccctcatcactgagtcctttggagctgagttatgtcaacagctgccttaattactttggtcagaagtggtgggaaccaggtgagaaggagagtgctgctaagctcccgcctgctgcaggacgacaggcgggtgacacccacgtgccacagctccacttcagagcctaggtgttctcggtttgacccagatggtagtgggagtccagctacctgggacaattttgggatctgggataaccgcattgatgagccaattctgctgccacccagcattaagtatggcaagccaattcccaaaatcagcttggaaaatgtggggtgcgcctcacagattggcaaacggaaagagaatgaagatcggtttgacttcgctcagctgacagatgaggtcctgtactttgcagtgtatgatggacacggtggacctgcagcagctgatttctgtcatacccacatggagaaatgtattatggatttgcttcctaaggagaagaacttggaaactctgttgaccttggcttttctagaaatagataaagccttttcgagtcatgcccgcctgtctgctgatgcaactcttctgacctctgggactactgcaacagtagccctattgcgagatggtattgaactggttgtagccagtgttggggacagccgggctattttgtgtagaaaaggaaaacccatgaagctgaccattgaccatactccag

SEQ ID NO: 2533 - protein, 227 aa, Homo sapiens
MSTAALITLVRSGGNQVRRRVLLSSRLLQDDRRVTPTCHSSTSEPRCSRFDPDGSGSPATWDNFGIWDNRIDEPILLPPSIKYGKPIPKISLENVGCASQIGKRKENEDRFDFAQLTDEVLYFAVYDGHGGPAAADFCHTHMEKCIMDLLPKEKNLETLLTLAFLEIDKAFSSHARLSADATLLTSGTTATVALLRDGIELVVASVGDSRAILCRKGKPMKLTIDHT

SEQ ID NO: 2534 - DNA, 529 bp, Homo sapiens
agaggtaagagcctagagagtgcaattcatttatttctgctaaccatgtatgctgttctttattggcggtcgcggaatggagagtaaacggagaagggtttcccgggaggtcgaaggggagacgtcggtttccgttcccccgccccccgagtcggcgcttggccggcggcctctcggagttctcagagcgtcgctttcttccctttggaggtcgtgagcagctcgtcgggggatttgcttcctaaggagaagaacttggaaactctgttgaccttggcttttctagaaatagataaagccttttcgagtcatgcccgcctgtctgctgatggtttgtaatgtttgagcacaattcctgggtgaaattcgtatttgcctctgtgcgtgttatttgtggcagagaactgtgcctggtcagcagctctagacctggagcccgtggacactatatgcggggcttcagtggaaagagagatctgcttaattttgtcccaggtgaaggagtccagcggttcctatcctggactac

SEQ ID NO: 2535 - protein, 62 aa, Homo sapiens
MFEHNSWVKFVFASVRVICGRELCLVSSSRPGARGHYMRGFSGKRDLLNFVPGEGVQRFLSW

SEQ ID NO: 2536 - DNA, 2960 bp, Homo sapiens
cgtcgctccgccgcgcagctggaagcctgcgaagtcaaatagcagccgcggggaggctcgttcccatcggcatctgtgactggctgcgatcgagggcccgggcggccggccagccgtctcgccgagtgcggactggccggatctgctgtcagtcagcgggaacagacttctccctctccatctggtcaactgcgggagaaaaattttcgagaatttccagcaggcaaggcagtggccgctttgactgcttgcttcggagatccgagacgacggagaaggcactcttatttaccgaccaagaaagctcctcccccgtcctccgttagctaattaaaacatttttcagggacgtagccatccagagacattccattattgttccattgacctttccctcatcactgagtcctttggagctgagttatgtcaacagctgccttaattactttggtcagaagtggtgggaaccaggtgagaaggagagtgctgctaagctcccgcctgctgcaggacgacaggcgggtgacacccacgtgccacagctccacttcagagcctaggtgttctcggtttgacccagatggtagtgggagtccagctacctgggacaattttgggatctgggataaccgcattgatgagccaattctgctgccacccagcattaagtatggcaagccaattcccaaaatcagcttggaaaatgtggggtgcgcctcacagattggcaaacggaaagagaatgaagatcggtttgacttcgctcagctgacagatgaggtcctgtactttgcagtgtatgatggacacggtggacctgcagcagctgatttctgtcatacccacatggagaaatgtattatggatttgcttcctaaggagaagaacttggaaactctgttgaccttggcttttctagaaatagataaagccttttcgagtcatgcccgcctgtctgctgatggtatgtaaaactatcacattccttggatcctagggagtacatggggtgggggaggagtaaaaaggaaacactttaagtcctttgggggaggggattttaatggacaattgtttgtaaggatttatgtagaaatgagtttatatgaagaatcacattaaatgctgttgggaactccaattaatgttaatacctcacttttaaatgaaatatattggagaatttttcagaaagagaagccccgaaacagttctgatgttgtactttagtttttaaaagattttaaaaatgtttaatctgtttgcttattttatggacaaaatgtccatactatgagttttgttttgggtttttggttttttttttagatggatctggtgaccaagtgctgaaatacactacagggtaatcacatctagcgaggacagtcattgtccaacaagaaaaaaattgcaaataggtcctaaatagaaaaagacaatggttaatatgcactaatttgtataactagaaggaaaatatttttctgtcacttcttaaaaagctcaatcttgcagcttttctctggtaactagtgatattttcagcataaggtcatgctagctgaatttaaaattttgtgtactgtatgtccttaaattttgaaagtgaaatgtttctggttttgactaaatttatcaaaaccatttcacgaaaattcagcaaacgttttctagttagctagtcccaaatcttttgctgttaaagttaaccctgaaaatttctgtaccagccaaatgaatgtgtgcatgtaaccttgtaaatgatttgaaaatgaatcatgcaataatcttgatctgtatttggttcatccttttcttaaaaaaaagaaagaaaccaagtgcaccacagaaatgtcatttgcacagtcttcagttggaatacataaggatagagattgtttgcatttcacagcgaaggaactgaagattagagtggtaaaggtcagttcagagttagggctgggattttcctgaccaccagcattatctctcttctctcatgaggagaggagaaggtaactctgcgatggctctatttaccatcttgagattttttcctgagctttttttgagaaccttactatcacactcctcaggaaagcattacagtccactctcttcagggatatgttttccagtttgtagatcatttaggcccattttcttttctttcattcctttggaatttttctttttcctttcaactggacccttacctttaagaagacagaagctgaaagaggtaaactttatgcataagacttagctcttgttccaaatagttaaaacacatgaaggaaaagaggaaatgaaatattttcttatggttttatttttattacttcctgaattttggtatgctcttatttcatagtaactgagttggctgtgcatctggctatgtctcacaccacaatgtttgttgactgtagtgtcggtggtgtgccccagctgttctgtaaatagctgcagcttactgggcaaggtttttggatgagaatgtccaaatttatcccaggcatgtgaccaccaaccaaaaacattggccttctcaatgccatcagcctcttttaaaagtatctagtcaatgtagatgcttaaaccaatcggtgattgacttgatgtaaaatatgacaggactccttttattattgaatgaagtataactcaacagaattttgaacttaaagaatttaattaacttgcctatcttaaaagaaactttctaaagatacctttgtcacaaaaacattaaacagttgtataaagaaattaatcacaaaaatgtaattcatatgctaacttcagcagcacatacactaaaattggaatgatacagagatcagcatggtccttgtgcaaggatggcacacaaatgcatgaagagttccatattttttattcttactaaaatcaattcatttgtaataaagaaattaaaatgcattatttaattt

SEQ ID NO: 2537 - protein, 182 aa, Homo sapiens
MSTAALITLVRSGGNQVRRRVLLSSRLLQDDRRVTPTCHSSTSEPRCSRFDPDGSGSPATWDNFGIWDNRIDEPILLPPSIKYGKPIPKISLENVGCASQIGKRKENEDRFDFAQLTDEVLYFAVYDGHGGPAAADFCHTHMEKCIMDLLPKEKNLETLLTLAFLEIDKAFSSHARLSADGM

SEQ ID NO: 2538 - DNA, 737 bp, Homo sapiens
gcaggcaaggcagtggccgctttgactgcttgcttcggagatccgagacgacggagaaggcactcttatttaccgaccaagaaagctcctcccccgtcctccgttagctaattaaaacatttttcagggacgtagccatccagagacattccattattgttccattgacctttccctcatcactgagtcctttggagctgagttatgtcaacagctgccttaattactttggtcagaagtggtgggaaccaggtgagaaggagagtgctgctaagctcccgcctgctgcaggacgacaggcgggtgacacccacgtgccacagctccacttcagagcctaggtgttctcggtttgacccagatggtagtgggagtccagctacctgggacaattttgggatctgggataaccgcattgatgagccaattctgctgccacccagcattaagtatggcaagccaattcccaaaatcagcttggaaaatgtggggtgcgcctcacagattggcaaacggaaagagaatgaagatcggtttgacttcgctcagctgacagatgaggtcctgtactttgcagtgtatgatggacacggtggacctgcagcagctgatttctgtcatacccacatggagaaatgtattatgtatgtacaatgactttcactcctgactttgcagttcctatacttcctacttaaactttcaccctttggctgaggcttccagcgtaaacatag

SEQ ID NO: 2539 - protein, 150 aa, Homo sapiens
MSTAALITLVRSGGNQVRRRVLLSSRLLQDDRRVTPTCHSSTSEPRCSRFDPDGSGSPATWDNFGIWDNRIDEPILLPPSIKYGKPIPKISLENVGCASQIGKRKENEDRFDFAQLTDEVLYFAVYDGHGGPAAADFCHTHMEKCIMYVQ

SEQ ID NO: 2540 - DNA, 563 bp, Homo sapiens
gagtcggcgcttggccggcggcctctcggagttctcagagcgtcgctttcttccctttggaggtcgtgagcagctcgtcggggtgaggcggggcccagctgggctgcctgcgccccgggcggcgggtttccagcccagactgcgctcggccttgaatgtggccgcaggctggagggccagcgcggcgcgaggcgggcagggtgggtgggctgggactggagacccttgcccgaggccccggaagcgaggatgctgcggggtgggtgccgcgttgcctcccgggcgagggaaacgtggcgacaacgggctcggtacgcccagagggaggttgggaggcggagacctggcggcagaaggtgccgagggagcccagctatttgcgaggcttcgcaggcaggcgggcgtgtgttcttcccaccgtgtgtcaccctgaccacccgcctgtcagggccagcgagccgaggccaggatcctgagctgtacccagacattccattattgttccattgacctttccctcatcactgagtcctttggagctgagttatgtcaacagctgcctt

SEQ ID NO: 2541 - protein, 86 aa, Homo sapiens
MLRGGCRVASRARETWRQRARYAQREVGRRRPGGRRCRGSPAICEASQAGGRVFFPPCVTLTTRLSGPASRGQDPELYPDIPLLFH

SEQ ID NO: 2542 - DNA, 3955 bp, Homo sapiens
attcatttcctcctacggtggatgcggacgccgggaggaggagagccccagagagaggagctgggagcggaggcgcaggcaatgctcagccctggatgtagctgagaggctgggagaagagacgaccgctggagaccgagcggcgtggggaagacctaggggggtgggtgggggaagcagacaggagaacattcaacgagaatgaagccatccaatggatgcaggaaaactggaagaaatctttcctgttttctgctctgtatgctgcctttatattcggtggtcggcacctaatgaataaacgagcaaagtttgaactgaggaagccattagtgctctggtctctgacccttgcagtcttcagtatattcggtgctcttcgaactggtgcttatatggtgtacattttgatgaccaaaggcctgaagcagtcagtttgtgaccagggtttttacaatggacctgtcagcaaattctgggcttatgcatttgtgctaagcaaagcacccgaactaggagatacaatattcattattctgaggaagcagaagctgatcttcctgcactggtatcaccacatcactgtgctcctgtactcttggtactcctacaaagacatggttgccgggggaggttggttcatgactatgaactatggcgtgcacgccgtgatgtactcttactatgccttgcgggcggcaggtttccgagtctcccggaagtttgccatgttcatcaccttgtcccagatcactcagatgctgatgggctgtgtggttaactacctggtcttctgctggatgcagcatgaccagtgtcactctcactttcagaacatcttctggtcctcactcatgtacctcagctaccttgtgctcttctgccatttcttctttgaggcctacatcggcaaaatgaggaaaacaacgaaagctgaatagtgttggaactgaggaggaagccatagctcagggtcatcaagaaaaataatagacaaaagaaaatggcacaaggaatcacacgtggtgcagctaaaacaaaacaaaacatgagcaaacacaaaacccaaggcagcttagggataattaggttgatttaacccagtaagtttatgatccttttagggtgaggactcactgagtgcacctccatctccaagcactgctgctggaagaccccattccctctttatctatcaactctaggacaagggagaacaaaagcaagccagaagcagaggagactaatcaaaggcaaacaaaggctattaacacataggaaaaaatgtatttactaagtgtcacatttctctaagatgaaagatttttactctagaaactgtgcgagcacaacacacacaatcctttctaactttatggacactaaactggagccaatagaaaagacaaaaatgaaagagacacagggtgtatatctagaacgataatgcttttgcagaaactaaagcctttttaagaaatgccagctgctgtagaccccatgagaaaagatgtcttaatcatccttatgaaaacagatgtaaacaactatatttcaactaacttcatcttcactgcatagcctcaggctagtgagtttgccaaaaccaaagggggtgaatacttccccaagattcttcctgggaggatggaaacagtgcagcccaggtcccatgggggcagctccatcccagagcatttctgatagttgaactgtaatttctactcttaagtgagatatgaagcattatccttttgttcagttgccccgggcttttgaacagaagagtaaatacagaattgaaaaagataaacactcaaccaaacaatgtgaaaacgggttctgtagtatttgtaaaaaggcccggcccaggaccactgtgagctggaaaagggagaaaggcagtgggaaaagaggtgagccgaagatcaattcgacagacagatggtgtgtatgcccctccctgtttgacttcacacacactcataactttccaaatgaaaccccacagtatagcgcatattttcgatatttttgtgaattccaaaaggaaatcacagggctgttcgaaatattgggggaacactgtgtttctgcatcatctgcatttgctccccaagcaatgtagaggtgtttaaagggccctctgctggctgagtggcaatactacaacaaacttcaaggcaagtttggctgaaaacagttgacaacaaagggcccccatacacttatccctcaaattttaagtgatatgaaatacttgtcatgtctttggccaaatcagaagatattcatcctgcttcaagtcagcttcagaaatgttttaaaagggactttagctctggaactcaaaatcaatttattaagagccatattctttaaaaaaaaaaagctggataatattctctgtaatatttcagtcctttacaagccaaatacatgtgtcaatgtttctagtatttcaaagaagcaattatgtaaagttgttcaatgtgacataatagtattataattggttaagtagcttaatgattaggcaaactagatgaaaagattaggggcttccacactgcatagattacacgcacatagccacgcatacacacacagacacacagatgtggggtacactgaacttcaaagcccaaatgaatagaaacacattttctggctagcagaaaaaaacaaaacaaaactgttgtttctctttcttgctttgagagtgtacagtaaaagggattttttcgaattatttttatattattttagctttaattgtgctgtcgttcatgaaacagagctgctctgcttttctgtcagagatggcaagggctttttcagcatctcgtttatgtgtggaatttaaaaagaataaagttttattccattctgtgtgaatggtttgagcagtgaacaaagaatccatgcaaaccaagtcatgactggaagaaatggggagtgggggacagtgcaggggaggaaagctgttacatctatgttaaatgattgtgagcagtctataatgtcttgatgttggttcataggtgagacacaactgatggaggaatgtattataaattatgcaaaatctgacatgagctgaaaagacaggtccttttataagagctaatagatgcttaggatgcaaatgttattttgagcttcgcaaatacatgataccgtgcaataagccttttttccttataacagaaaatgagaataattaaaatgaggagaaggccacataacagttgacttgaatttaattgaaggacccattggaggctcatctggttgatttaattatttaattgagtgatttattgcagatctcttaatgcaggttagaaacggaagtgagcataaaccttaaaaagactctaaatgatgcttccaaagcactttcattttggtattaggttcatgtttgtttgtctttacttgtaaaataatttggaatttttgtttacagggtgaatgtcttaatagttttaaaattagctaaatatatctaaaggcatttccaatgtttatcatgggaggaaaaaagccacattttttttaaaacaaaacaaaacaaaacaaaattttggtaatataggttcaatacactgtttttaacatctcagcttagccgctttaatcatatcaagatatgaggctggatcactggcccatgacaaatctgaaacctaccagagaattgactgctgcatagataatcctgctgccagttaacattccagaaaaacttgggcaggcaagtttttatagctgccccactatgctgcaatagagtatctttctattgaagattttccactgcatcccgatcctactatggtgaaagcattgttcttgggctaaaaaaaaatcctttatttcatacacacatgatttcatacactaggtctgagcatcaagccaagtccatgagtttgcaatgaagttctag

SEQ ID NO: 2543 - protein, 240 aa, Homo sapiens
MQENWKKSFLFSALYAAFIFGGRHLMNKRAKFELRKPLVLWSLTLAVFSIFGALRTGAYMVYILMTKGLKQSVCDQGFYNGPVSKFWAYAFVLSKAPELGDTIFIILRKQKLIFLHWYHHITVLLYSWYSYKDMVAGGGWFMTMNYGVHAVMYSYYALRAAGFRVSRKFAMFITLSQITQMLMGCVVNYLVFCWMQHDQCHSHFQNIFWSSLMYLSYLVLFCHFFFEAYIGKMRKTTKAE

SEQ ID NO: 2544 - DNA, 4004 bp, Homo sapiens
aatcgcacgagggggaggagatttccctgtagacgagtaaaaagggtgatggacaaacgtgcgggcactaagaccgcaaggcattcatttcctcctacggtggatgcggacgccgggaggaggagagccccagagagaggagctgggagcggaggcgcagagaacacgtagcgactccgaagatcagccccaatgaacatgtcagtgttgactttacaagaatatgaattcgaaaagcagttcaacgagaatgaagccatccaatggatgcaggaaaactggaagaaatctttcctgttttctgctctgtatgctgcctttatattcggtggtcggcacctaatgaataaacgagcaaagtttgaactgaggaagccattagtgctctggtctctgacccttgcagtcttcagtatattcggtgctcttcgaactggtgcttatatggtgtacattttgatgaccaaaggcctgaagcagtcagtttgtgaccagggtttttacaatggacctgtcagcaaattctgggcttatgcatttgtgctaagcaaagcacccgaactaggagatacaatattcattattctgaggaagcagaagctgatcttcctgcactggtatcaccacatcactgtgctcctgtactcttggtactcctacaaagacatggttgccgggggaggttggttcatgactatgaactatggcgtgcacgccgtgatgtactcttactatgccttgcgggcggcaggtttccgagtctcccggaagtttgccatgttcatcaccttgtcccagatcactcagatgctgatgggctgtgtggttaactacctggtcttctgctggatgcagcatgaccagtgtcactctcactttcagaacatcttctggtcctcactcatgtacctcagctaccttgtgctcttctgccatttcttctttgaggcctacatcggcaaaatgaggaaaacaacgaaagctgaatagtgttggaactgaggaggaagccatagctcagggtcatcaagaaaaataatagacaaaagaaaatggcacaaggaatcacacgtggtgcagctaaaacaaaacaaaacatgagcaaacacaaaacccaaggcagcttagggataattaggttgatttaacccagtaagtttatgatccttttagggtgaggactcactgagtgcacctccatctccaagcactgctgctggaagaccccattccctctttatctatcaactctaggacaagggagaacaaaagcaagccagaagcagaggagactaatcaaaggcaaacaaaggctattaacacataggaaaaaatgtatttactaagtgtcacatttctctaagatgaaagatttttactctagaaactgtgcgagcacaacacacacaatcctttctaactttatggacactaaactggagccaatagaaaagacaaaaatgaaagagacacagggtgtatatctagaacgataatgcttttgcagaaactaaagcctttttaagaaatgccagctgctgtagaccccatgagaaaagatgtcttaatcatccttatgaaaacagatgtaaacaactatatttcaactaacttcatcttcactgcatagcctcaggctagtgagtttgccaaaaccaaagggggtgaatacttccccaagattcttcctgggaggatggaaacagtgcagcccaggtcccatgggggcagctccatcccagagcatttctgatagttgaactgtaatttctactcttaagtgagatatgaagcattatccttttgttcagttgccccgggcttttgaacagaagagtaaatacagaattgaaaaagataaacactcaaccaaacaatgtgaaaacgggttctgtagtatttgtaaaaaggcccggcccaggaccactgtgagctggaaaagggagaaaggcagtgggaaaagaggtgagccgaagatcaattcgacagacagatggtgtgtatgcccctccctgtttgacttcacacacactcataactttccaaatgaaaccccacagtatagcgcatattttcgatatttttgtgaattccaaaaggaaatcacagggctgttcgaaatattgggggaacactgtgtttctgcatcatctgcatttgctccccaagcaatgtagaggtgtttaaagggccctctgctggctgagtggcaatactacaacaaacttcaaggcaagtttggctgaaaacagttgacaacaaagggcccccatacacttatccctcaaattttaagtgatatgaaatacttgtcatgtctttggccaaatcagaagatattcatcctgcttcaagtcagcttcagaaatgttttaaaagggactttagctctggaactcaaaatcaatttattaagagccatattctttaaaaaaaaaaagctggataatattctctgtaatatttcagtcctttacaagccaaatacatgtgtcaatgtttctagtatttcaaagaagcaattatgtaaagttgttcaatgtgacataatagtattataattggttaagtagcttaatgattaggcaaactagatgaaaagattaggggcttccacactgcatagattacacgcacatagccacgcatacacacacagacacacagatgtggggtacactgaacttcaaagcccaaatgaatagaaacacattttctggctagcagaaaaaaacaaaacaaaactgttgtttctctttcttgctttgagagtgtacagtaaaagggattttttcgaattatttttatattattttagctttaattgtgctgtcgttcatgaaacagagctgctctgcttttctgtcagagatggcaagggctttttcagcatctcgtttatgtgtggaatttaaaaagaataaagttttattccattctgtgtgaatggtttgagcagtgaacaaagaatccatgcaaaccaagtcatgactggaagaaatggggagtgggggacagtgcaggggaggaaagctgttacatctatgttaaatgattgtgagcagtctataatgtcttgatgttggttcataggtgagacacaactgatggaggaatgtattataaattatgcaaaatctgacatgagctgaaaagacaggtccttttataagagctaatagatgcttaggatgcaaatgttattttgagcttcgcaaatacatgataccgtgcaataagccttttttccttataacagaaaatgagaataattaaaatgaggagaaggccacataacagttgacttgaatttaattgaaggacccattggaggctcatctggttgatttaattatttaattgagtgatttattgcagatctcttaatgcaggttagaaacggaagtgagcataaaccttaaaaagactctaaatgatgcttccaaagcactttcattttggtattaggttcatgtttgtttgtctttacttgtaaaataatttggaatttttgtttacagggtgaatgtcttaatagttttaaaattagctaaatatatctaaaggcatttccaatgtttatcatgggaggaaaaaagccacattttttttaaaacaaaacaaaacaaaacaaaattttggtaatataggttcaatacactgtttttaacatctcagcttagccgctttaatcatatcaagatatgaggctggatcactggcccatgacaaatctgaaacctaccagagaattgactgctgcatagataatcctgctgccagttaacattccagaaaaacttgggcaggcaagtttttatagctgccccactatgctgcaatagagtatctttctattgaagattttccactgcatcccgatcctactatggtgaaagcattgttcttgggctaaaaaaaaatcctttatttcatacacacatgatttcatacactaggtctgagcatcaagccaagtccatgagtttgcaatgaagttctag

SEQ ID NO: 2545 - protein, 265 aa, Homo sapiens; identical to SEQ ID NO: 244

SEQ ID NO: 2546 - DNA, 4357 bp, Homo sapiens
gcaagctgaaacttcattcaaagcaaggcggcccacgaggttgggcttaggggatctggatgacctccaggccacttcctttctctctgcgcccttcccccactcttccaaccaccttcgctgtaaacaaaactgtcccccccgggcggagagaggtcgcgctctttcgcacactccctcgccaagggttaatttctcaaatcgcacgagggggaggagatttccctgtagacgagtaaaaagggtgatggacaaacgtgcgggcactaagaccgcaaggcattcatttcctcctacggtggatgcggacgccgggaggaggagagccccagagagaggagctgggagcggaggcgcaggcaatgctcagccctggatgtagctgagaggctgggagaagagacgaccgctggagaccgagcggcgtggggaagacctaggggggtgggtgggggaagcagacaggagaacactcgaaatcaagcgctttacagattattttattttgtatagagaacacgtagcgactccgaagatcagccccaatgaacatgtcagtgttgactttacaagaatatgaattcgaaaagcagttcaacgagaatgaagccatccaatggatgcaggaaaactggaagaaatctttcctgttttctgctctgtatgctgcctttatattcggtggtcggcacctaatgaataaacgagcaaagtttgaactgaggaagccattagtgctctggtctctgacccttgcagtcttcagtatattcggtgctcttcgaactggtgcttatatggtgtacattttgatgaccaaaggcctgaagcagtcagtttgtgaccagggtttttacaatggacctgtcagcaaattctgggcttatgcatttgtgctaagcaaagcacccgaactaggagatacaatattcattattctgaggaagcagaagctgatcttcctgcactggtatcaccacatcactgtgctcctgtactcttggtactcctacaaagacatggttgccgggggaggttggttcatgactatgaactatggcgtgcacgccgtgatgtactcttactatgccttgcgggcggcaggtttccgagtctcccggaagtttgccatgttcatcaccttgtcccagatcactcagatgctgatgggctgtgtggttaactacctggtcttctgctggatgcagcatgaccagtgtcactctcactttcagaacatcttctggtcctcactcatgtacctcagctaccttgtgctcttctgccatttcttctttgaggcctacatcggcaaaatgaggaaaacaacgaaagctgaatagtgttggaactgaggaggaagccatagctcagggtcatcaagaaaaataatagacaaaagaaaatggcacaaggaatcacacgtggtgcagctaaaacaaaacaaaacatgagcaaacacaaaacccaaggcagcttagggataattaggttgatttaacccagtaagtttatgatccttttagggtgaggactcactgagtgcacctccatctccaagcactgctgctggaagaccccattccctctttatctatcaactctaggacaagggagaacaaaagcaagccagaagcagaggagactaatcaaaggcaaacaaaggctattaacacataggaaaaaatgtatttactaagtgtcacatttctctaagatgaaagatttttactctagaaactgtgcgagcacaacacacacaatcctttctaactttatggacactaaactggagccaatagaaaagacaaaaatgaaagagacacagggtgtatatctagaacgataatgcttttgcagaaactaaagcctttttaagaaatgccagctgctgtagaccccatgagaaaagatgtcttaatcatccttatgaaaacagatgtaaacaactatatttcaactaacttcatcttcactgcatagcctcaggctagtgagtttgccaaaaccaaagggggtgaatacttccccaagattcttcctgggaggatggaaacagtgcagcccaggtcccatgggggcagctccatcccagagcatttctgatagttgaactgtaatttctactcttaagtgagatatgaagcattatccttttgttcagttgccccgggcttttgaacagaagagtaaatacagaattgaaaaagataaacactcaaccaaacaatgtgaaaacgggttctgtagtatttgtaaaaaggcccggcccaggaccactgtgagctggaaaagggagaaaggcagtgggaaaagaggtgagccgaagatcaattcgacagacagatggtgtgtatgcccctccctgtttgacttcacacacactcataactttccaaatgaaaccccacagtatagcgcatattttcgatatttttgtgaattccaaaaggaaatcacagggctgttcgaaatattgggggaacactgtgtttctgcatcatctgcatttgctccccaagcaatgtagaggtgtttaaagggccctctgctggctgagtggcaatactacaacaaacttcaaggcaagtttggctgaaaacagttgacaacaaagggcccccatacacttatccctcaaattttaagtgatatgaaatacttgtcatgtctttggccaaatcagaagatattcatcctgcttcaagtcagcttcagaaatgttttaaaagggactttagctctggaactcaaaatcaatttattaagagccatattctttaaaaaaaaaaagctggataatattctctgtaatatttcagtcctttacaagccaaatacatgtgtcaatgtttctagtatttcaaagaagcaattatgtaaagttgttcaatgtgacataatagtattataattggttaagtagcttaatgattaggcaaactagatgaaaagattaggggcttccacactgcatagattacacgcacatagccacgcatacacacacagacacacagatgtggggtacactgaacttcaaagcccaaatgaatagaaacacattttctggctagcagaaaaaaacaaaacaaaactgttgtttctctttcttgctttgagagtgtacagtaaaagggattttttcgaattatttttatattattttagctttaattgtgctgtcgttcatgaaacagagctgctctgcttttctgtcagagatggcaagggctttttcagcatctcgtttatgtgtggaatttaaaaagaataaagttttattccattctgtgtgaatggtttgagcagtgaacaaagaatccatgcaaaccaagtcatgactggaagaaatggggagtgggggacagtgcaggggaggaaagctgttacatctatgttaaatgattgtgagcagtctataatgtcttgatgttggttcataggtgagacacaactgatggaggaatgtattataaattatgcaaaatctgacatgagctgaaaagacaggtccttttataagagctaatagatgcttaggatgcaaatgttattttgagcttcgcaaatacatgataccgtgcaataagccttttttccttataacagaaaatgagaataattaaaatgaggagaaggccacataacagttgacttgaatttaattgaaggacccattggaggctcatctggttgatttaattatttaattgagtgatttattgcagatctcttaatgcaggttagaaacggaagtgagcataaaccttaaaaagactctaaatgatgcttccaaagcactttcattttggtattaggttcatgtttgtttgtctttacttgtaaaataatttggaatttttgtttacagggtgaatgtcttaatagttttaaaattagctaaatatatctaaaggcatttccaatgtttatcatgggaggaaaaaagccacattttttttaaaacaaaacaaaacaaaacaaaattttggtaatataggttcaatacactgtttttaacatctcagcttagccgctttaatcatatcaagatatgaggctggatcactggcccatgacaaatctgaaacctaccagagaattgactgctgcatagataatcctgctgccagttaacattccagaaaaacttgggcaggcaagtttttatagctgccccactatgctgcaatagagtatctttctattgaagattttccactgcatcccgatcctactatggtgaaagcattgttcttgggctaaaaaaaaatcctttatttcatacacacatgatttcatacactaggtctgagcatcaagccaagtccatgagtttgcaatgaagttctag

SEQ ID NO: 2547 - protein, 265 aa, Homo sapiens; identical to SEQ ID NO: 244

SEQ ID NO: 2548 - DNA, 4014 bp, Homo sapiens
gtattcccttcactggtgatctcaacgtagatttgcccggagttctcttgcaagagagctggcaggttttactatttcccaatcgtttactcgccaagctctcgggtccacgcgccgcggggatgcgccctgcaagctgaaacttcattcaaagcaaggcggcccacgagagaacacgtagcgactccgaagatcagccccaatgaacatgtcagtgttgactttacaagaatatgaattcgaaaagcagttcaacgagaatgaagccatccaatggatgcaggaaaactggaagaaatctttcctgttttctgctctgtatgctgcctttatattcggtggtcggcacctaatgaataaacgagcaaagtttgaactgaggaagccattagtgctctggtctctgacccttgcagtcttcagtatattcggtgctcttcgaactggtgcttatatggtgtacattttgatgaccaaaggcctgaagcagtcagtttgtgaccagggtttttacaatggacctgtcagcaaattctgggcttatgcatttgtgctaagcaaagcacccgaactaggagatacaatattcattattctgaggaagcagaagctgatcttcctgcactggtatcaccacatcactgtgctcctgtactcttggtactcctacaaagacatggttgccgggggaggttggttcatgactatgaactatggcgtgcacgccgtgatgtactcttactatgccttgcgggcggcaggtttccgagtctcccggaagtttgccatgttcatcaccttgtcccagatcactcagatgctgatgggctgtgtggttaactacctggtcttctgctggatgcagcatgaccagtgtcactctcactttcagaacatcttctggtcctcactcatgtacctcagctaccttgtgctcttctgccatttcttctttgaggcctacatcggcaaaatgaggaaaacaacgaaagctgaatagtgttggaactgaggaggaagccatagctcagggtcatcaagaaaaataatagacaaaagaaaatggcacaaggaatcacacgtggtgcagctaaaacaaaacaaaacatgagcaaacacaaaacccaaggcagcttagggataattaggttgatttaacccagtaagtttatgatccttttagggtgaggactcactgagtgcacctccatctccaagcactgctgctggaagaccccattccctctttatctatcaactctaggacaagggagaacaaaagcaagccagaagcagaggagactaatcaaaggcaaacaaaggctattaacacataggaaaaaatgtatttactaagtgtcacatttctctaagatgaaagatttttactctagaaactgtgcgagcacaacacacacaatcctttctaactttatggacactaaactggagccaatagaaaagacaaaaatgaaagagacacagggtgtatatctagaacgataatgcttttgcagaaactaaagcctttttaagaaatgccagctgctgtagaccccatgagaaaagatgtcttaatcatccttatgaaaacagatgtaaacaactatatttcaactaacttcatcttcactgcatagcctcaggctagtgagtttgccaaaaccaaagggggtgaatacttccccaagattcttcctgggaggatggaaacagtgcagcccaggtcccatgggggcagctccatcccagagcatttctgatagttgaactgtaatttctactcttaagtgagatatgaagcattatccttttgttcagttgccccgggcttttgaacagaagagtaaatacagaattgaaaaagataaacactcaaccaaacaatgtgaaaacgggttctgtagtatttgtaaaaaggcccggcccaggaccactgtgagctggaaaagggagaaaggcagtgggaaaagaggtgagccgaagatcaattcgacagacagatggtgtgtatgcccctccctgtttgacttcacacacactcataactttccaaatgaaaccccacagtatagcgcatattttcgatatttttgtgaattccaaaaggaaatcacagggctgttcgaaatattgggggaacactgtgtttctgcatcatctgcatttgctccccaagcaatgtagaggtgtttaaagggccctctgctggctgagtggcaatactacaacaaacttcaaggcaagtttggctgaaaacagttgacaacaaagggcccccatacacttatccctcaaattttaagtgatatgaaatacttgtcatgtctttggccaaatcagaagatattcatcctgcttcaagtcagcttcagaaatgttttaaaagggactttagctctggaactcaaaatcaatttattaagagccatattctttaaaaaaaaaaagctggataatattctctgtaatatttcagtcctttacaagccaaatacatgtgtcaatgtttctagtatttcaaagaagcaattatgtaaagttgttcaatgtgacataatagtattataattggttaagtagcttaatgattaggcaaactagatgaaaagattaggggcttccacactgcatagattacacgcacatagccacgcatacacacacagacacacagatgtggggtacactgaacttcaaagcccaaatgaatagaaacacattttctggctagcagaaaaaaacaaaacaaaactgttgtttctctttcttgctttgagagtgtacagtaaaagggattttttcgaattatttttatattattttagctttaattgtgctgtcgttcatgaaacagagctgctctgcttttctgtcagagatggcaagggctttttcagcatctcgtttatgtgtggaatttaaaaagaataaagttttattccattctgtgtgaatggtttgagcagtgaacaaagaatccatgcaaaccaagtcatgactggaagaaatggggagtgggggacagtgcaggggaggaaagctgttacatctatgttaaatgattgtgagcagtctataatgtcttgatgttggttcataggtgagacacaactgatggaggaatgtattataaattatgcaaaatctgacatgagctgaaaagacaggtccttttataagagctaatagatgcttaggatgcaaatgttattttgagcttcgcaaatacatgataccgtgcaataagccttttttccttataacagaaaatgagaataattaaaatgaggagaaggccacataacagttgacttgaatttaattgaaggacccattggaggctcatctggttgatttaattatttaattgagtgatttattgcagatctcttaatgcaggttagaaacggaagtgagcataaaccttaaaaagactctaaatgatgcttccaaagcactttcattttggtattaggttcatgtttgtttgtctttacttgtaaaataatttggaatttttgtttacagggtgaatgtcttaatagttttaaaattagctaaatatatctaaaggcatttccaatgtttatcatgggaggaaaaaagccacattttttttaaaacaaaacaaaacaaaacaaaattttggtaatataggttcaatacactgtttttaacatctcagcttagccgctttaatcatatcaagatatgaggctggatcactggcccatgacaaatctgaaacctaccagagaattgactgctgcatagataatcctgctgccagttaacattccagaaaaacttgggcaggcaagtttttatagctgccccactatgctgcaatagagtatctttctattgaagattttccactgcatcccgatcctactatggtgaaagcattgttcttgggctaaaaaaaaatcctttatttcatacacacatgatttcatacactaggtctgagcatcaagccaagtccatgagtttgcaatgaagttctag

SEQ ID NO: 2549 - protein, 265 aa, Homo sapiens; identical to SEQ ID NO: 244

SEQ ID NO: 2550 - DNA, 3953 bp, Homo sapiens
ctctcgcctatccactatcctcacactcagcatcccctgtctgtacgagattaaggagctctgccgtccgcagggcctggagaacacgtagcgactccgaagatcagccccaatgaacatgtcagtgttgactttacaagaatatgaattcgaaaagcagttcaacgagaatgaagccatccaatggatgcaggaaaactggaagaaatctttcctgttttctgctctgtatgctgcctttatattcggtggtcggcacctaatgaataaacgagcaaagtttgaactgaggaagccattagtgctctggtctctgacccttgcagtcttcaggtgctataacaacttgaaacagctgacattatattcggtgctcttcgaactggtgcttatatggtgtacattttgatgaccaaaggcctgaagcagtcagtttgtgaccagggtttttacaatggacctgtcagcaaattctgggcttatgcatttgtgctaagcaaagcacccgaactaggagatacaatattcattattctgaggaagcagaagctgatcttcctgcactggtatcaccacatcactgtgctcctgtactcttggtactcctacaaagacatggttgccgggggaggttggttcatgactatgaactatggcgtgcacgccgtgatgtactcttactatgccttgcgggcggcaggtttccgagtctcccggaagtttgccatgttcatcaccttgtcccagatcactcagatgctgatgggctgtgtggttaactacctggtcttctgctggatgcagcatgaccagtgtcactctcactttcagaacatcttctggtcctcactcatgtacctcagctaccttgtgctcttctgccatttcttctttgaggcctacatcggcaaaatgaggaaaacaacgaaagctgaatagtgttggaactgaggaggaagccatagctcagggtcatcaagaaaaataatagacaaaagaaaatggcacaaggaatcacacgtggtgcagctaaaacaaaacaaaacatgagcaaacacaaaacccaaggcagcttagggataattaggttgatttaacccagtaagtttatgatccttttagggtgaggactcactgagtgcacctccatctccaagcactgctgctggaagaccccattccctctttatctatcaactctaggacaagggagaacaaaagcaagccagaagcagaggagactaatcaaaggcaaacaaaggctattaacacataggaaaaaatgtatttactaagtgtcacatttctctaagatgaaagatttttactctagaaactgtgcgagcacaacacacacaatcctttctaactttatggacactaaactggagccaatagaaaagacaaaaatgaaagagacacagggtgtatatctagaacgataatgcttttgcagaaactaaagcctttttaagaaatgccagctgctgtagaccccatgagaaaagatgtcttaatcatccttatgaaaacagatgtaaacaactatatttcaactaacttcatcttcactgcatagcctcaggctagtgagtttgccaaaaccaaagggggtgaatacttccccaagattcttcctgggaggatggaaacagtgcagcccaggtcccatgggggcagctccatcccagagcatttctgatagttgaactgtaatttctactcttaagtgagatatgaagcattatccttttgttcagttgccccgggcttttgaacagaagagtaaatacagaattgaaaaagataaacactcaaccaaacaatgtgaaaacgggttctgtagtatttgtaaaaaggcccggcccaggaccactgtgagctggaaaagggagaaaggcagtgggaaaagaggtgagccgaagatcaattcgacagacagatggtgtgtatgcccctccctgtttgacttcacacacactcataactttccaaatgaaaccccacagtatagcgcatattttcgatatttttgtgaattccaaaaggaaatcacagggctgttcgaaatattgggggaacactgtgtttctgcatcatctgcatttgctccccaagcaatgtagaggtgtttaaagggccctctgctggctgagtggcaatactacaacaaacttcaaggcaagtttggctgaaaacagttgacaacaaagggcccccatacacttatccctcaaattttaagtgatatgaaatacttgtcatgtctttggccaaatcagaagatattcatcctgcttcaagtcagcttcagaaatgttttaaaagggactttagctctggaactcaaaatcaatttattaagagccatattctttaaaaaaaaaaagctggataatattctctgtaatatttcagtcctttacaagccaaatacatgtgtcaatgtttctagtatttcaaagaagcaattatgtaaagttgttcaatgtgacataatagtattataattggttaagtagcttaatgattaggcaaactagatgaaaagattaggggcttccacactgcatagattacacgcacatagccacgcatacacacacagacacacagatgtggggtacactgaacttcaaagcccaaatgaatagaaacacattttctggctagcagaaaaaaacaaaacaaaactgttgtttctctttcttgctttgagagtgtacagtaaaagggattttttcgaattatttttatattattttagctttaattgtgctgtcgttcatgaaacagagctgctctgcttttctgtcagagatggcaagggctttttcagcatctcgtttatgtgtggaatttaaaaagaataaagttttattccattctgtgtgaatggtttgagcagtgaacaaagaatccatgcaaaccaagtcatgactggaagaaatggggagtgggggacagtgcaggggaggaaagctgttacatctatgttaaatgattgtgagcagtctataatgtcttgatgttggttcataggtgagacacaactgatggaggaatgtattataaattatgcaaaatctgacatgagctgaaaagacaggtccttttataagagctaatagatgcttaggatgcaaatgttattttgagcttcgcaaatacatgataccgtgcaataagccttttttccttataacagaaaatgagaataattaaaatgaggagaaggccacataacagttgacttgaatttaattgaaggacccattggaggctcatctggttgatttaattatttaattgagtgatttattgcagatctcttaatgcaggttagaaacggaagtgagcataaaccttaaaaagactctaaatgatgcttccaaagcactttcattttggtattaggttcatgtttgtttgtctttacttgtaaaataatttggaatttttgtttacagggtgaatgtcttaatagttttaaaattagctaaatatatctaaaggcatttccaatgtttatcatgggaggaaaaaagccacattttttttaaaacaaaacaaaacaaaacaaaattttggtaatataggttcaatacactgtttttaacatctcagcttagccgctttaatcatatcaagatatgaggctggatcactggcccatgacaaatctgaaacctaccagagaattgactgctgcatagataatcctgctgccagttaacattccagaaaaacttgggcaggcaagtttttatagctgccccactatgctgcaatagagtatctttctattgaagattttccactgcatcccgatcctactatggtgaaagcattgttcttgggctaaaaaaaaatcctttatttcatacacacatgatttcatacactaggtctgagcatcaagccaagtccatgagtttgcaatgaagttctag

SEQ ID NO: 2551 - protein, 181 aa, Homo sapiens [sequence omitted]

SEQ ID NO: 2552 - DNA, 3944 bp, Homo sapiens
ccacttccggctactagcctctctcgcctatccactatcctcacactcagcatcccctgtctgtacgagattaaggagctctgccgtccgcagggcctggagaacacgtagcgactccgaagatcagccccaatgaacatgtcagtgttgactttacaagaatatgaattcgaaaagcagttcaacgagaatgaagccatccaatggatgcaggaaaactggaagaaatctttcctgttttctgctctgtatgctgcctttatattcggtggtcggcacctaatgaataaacgagcaaagtttgaactgaggaagccattagtgctctggtctctgacccttgcagtcttcagtatattcggtgctcttcgaactggtgcttatatggtgtacattttgatgaccaaaggcctgaagcagtcagtttgtgaccagggtttttacaatggacctgtcagcaaattctgggcttatgcatttgtgctaagcaaagcacccgaactaggagatacaatattcattattctgaggaagcagaagctgatcttcctgcactggtatcaccacatcactgtgctcctgtactcttggtactcctacaaagacatggttgccgggggaggttggttcatgactatgaactatggcgtgcacgccgtgatgtactcttactatgccttgcgggcggcaggtttccgagtctcccggaagtttgccatgttcatcaccttgtcccagatcactcagatgctgatgggctgtgtggttaactacctggtcttctgctggatgcagcatgaccagtgtcactctcactttcagaacatcttctggtcctcactcatgtacctcagctaccttgtgctcttctgccatttcttctttgaggcctacatcggcaaaatgaggaaaacaacgaaagctgaatagtgttggaactgaggaggaagccatagctcagggtcatcaagaaaaataatagacaaaagaaaatggcacaaggaatcacacgtggtgcagctaaaacaaaacaaaacatgagcaaacacaaaacccaaggcagcttagggataattaggttgatttaacccagtaagtttatgatccttttagggtgaggactcactgagtgcacctccatctccaagcactgctgctggaagaccccattccctctttatctatcaactctaggacaagggagaacaaaagcaagccagaagcagaggagactaatcaaaggcaaacaaaggctattaacacataggaaaaaatgtatttactaagtgtcacatttctctaagatgaaagatttttactctagaaactgtgcgagcacaacacacacaatcctttctaactttatggacactaaactggagccaatagaaaagacaaaaatgaaagagacacagggtgtatatctagaacgataatgcttttgcagaaactaaagcctttttaagaaatgccagctgctgtagaccccatgagaaaagatgtcttaatcatccttatgaaaacagatgtaaacaactatatttcaactaacttcatcttcactgcatagcctcaggctagtgagtttgccaaaaccaaagggggtgaatacttccccaagattcttcctgggaggatggaaacagtgcagcccaggtcccatgggggcagctccatcccagagcatttctgatagttgaactgtaatttctactcttaagtgagatatgaagcattatccttttgttcagttgccccgggcttttgaacagaagagtaaatacagaattgaaaaagataaacactcaaccaaacaatgtgaaaacgggttctgtagtatttgtaaaaaggcccggcccaggaccactgtgagctggaaaagggagaaaggcagtgggaaaagaggtgagccgaagatcaattcgacagacagatggtgtgtatgcccctccctgtttgacttcacacacactcataactttccaaatgaaaccccacagtatagcgcatattttcgatatttttgtgaattccaaaaggaaatcacagggctgttcgaaatattgggggaacactgtgtttctgcatcatctgcatttgctccccaagcaatgtagaggtgtttaaagggccctctgctggctgagtggcaatactacaacaaacttcaaggcaagtttggctgaaaacagttgacaacaaagggcccccatacacttatccctcaaattttaagtgatatgaaatacttgtcatgtctttggccaaatcagaagatattcatcctgcttcaagtcagcttcagaaatgttttaaaagggactttagctctggaactcaaaatcaatttattaagagccatattctttaaaaaaaaaaagctggataatattctctgtaatatttcagtcctttacaagccaaatacatgtgtcaatgtttctagtatttcaaagaagcaattatgtaaagttgttcaatgtgacataatagtattataattggttaagtagcttaatgattaggcaaactagatgaaaagattaggggcttccacactgcatagattacacgcacatagccacgcatacacacacagacacacagatgtggggtacactgaacttcaaagcccaaatgaatagaaacacattttctggctagcagaaaaaaacaaaacaaaactgttgtttctctttcttgctttgagagtgtacagtaaaagggattttttcgaattatttttatattattttagctttaattgtgctgtcgttcatgaaacagagctgctctgcttttctgtcagagatggcaagggctttttcagcatctcgtttatgtgtggaatttaaaaagaataaagttttattccattctgtgtgaatggtttgagcagtgaacaaagaatccatgcaaaccaagtcatgactggaagaaatggggagtgggggacagtgcaggggaggaaagctgttacatctatgttaaatgattgtgagcagtctataatgtcttgatgttggttcataggtgagacacaactgatggaggaatgtattataaattatgcaaaatctgacatgagctgaaaagacaggtccttttataagagctaatagatgcttaggatgcaaatgttattttgagcttcgcaaatacatgataccgtgcaataagccttttttccttataacagaaaatgagaataattaaaatgaggagaaggccacataacagttgacttgaatttaattgaaggacccattggaggctcatctggttgatttaattatttaattgagtgatttattgcagatctcttaatgcaggttagaaacggaagtgagcataaaccttaaaaagactctaaatgatgcttccaaagcactttcattttggtattaggttcatgtttgtttgtctttacttgtaaaataatttggaatttttgtttacagggtgaatgtcttaatagttttaaaattagctaaatatatctaaaggcatttccaatgtttatcatgggaggaaaaaagccacattttttttaaaacaaaacaaaacaaaacaaaattttggtaatataggttcaatacactgtttttaacatctcagcttagccgctttaatcatatcaagatatgaggctggatcactggcccatgacaaatctgaaacctaccagagaattgactgctgcatagataatcctgctgccagttaacattccagaaaaacttgggcaggcaagtttttatagctgccccactatgctgcaatagagtatctttctattgaagattttccactgcatcccgatcctactatggtgaaagcattgttcttgggctaaaaaaaaatcctttatttcatacacacatgatttcatacactaggtctgagcatcaagccaagtccatgagtttgcaatgaagttctag

SEQ ID NO: 2553 - protein, 265 aa, Homo sapiens; identical to SEQ ID NO: 244

SEQ ID NO: 2554 - DNA, 2896 bp, Homo sapiens
attcatttcctcctacggtggatgcggacgccgggaggaggagagccccagagagaggagctgggagcggaggcgcaggcaatgctcagccctggatgtagctgagaggctgggagaagagacgaccgctggagaccgagcggcgtggggaagacctaggggggtgggtgggggaagcagacaggagaacattcaacgagaatgaagccatccaatggatgcaggaaaactggaagaaatctttcctgttttctgctctgtatgctgcctttatattcggtggtcggcacctaatgaataaacgagcaaagtttgaactgaggaagccattagtgctctggtctctgacccttgcagtcttcagtatattcggtgctcttcgaactggtgcttatatggtgtacattttgatgaccaaaggcctgaagcagtcagtttgtgaccagggtttttacaatggacctgtcagcaaattctgggcttatgcatttgtgctaagcaaagcacccgaactaggagatacaatattcattattctgaggaagcagaagctgatcttcctgcactggtatcaccacatcactgtgctcctgtactcttggtactcctacaaagacatggttgccgggggaggttggttcatgactatgaactatggcgtgcacgccgtgatgtactcttactatgccttgcgggcggcaggtttccgagtctcccggaagtttgccatgttcatcaccttgtcccagatcactcagatgctgatgggctgtgtggttaactacctggtcttctgctggatgcagcatgaccagtgtcactctcactttcagaacatcttctggtcctcactcatgtacctcagctaccttgtgctcttctgccatttcttctttgaggcctacatcggcaaaatgaggaaaacaacgaaagctgaatagtgttggaactgaggaggaagccatagctcagggtcatcaagaaaaataatagacaaaagaaaatggcacaaggaatcacacgtggtgcagctaaaacaaaacaaaacatgagcaaacacaaaacccaaggcagcttagggataattaggttgatttaacccagtaagtttatgatccttttagggtgaggactcactgagtgcacctccatctccaagcactgctgctggaagaccccattccctctttatctatcaactctaggacaagggagaacaaaagcaagccagaagcagaggagactaatcaaaggcaaacaaaggctattaacacataggaaaaaatgtatttactaagtgtcacatttctctaagatgaaagatttttactctagaaactgtgcgagcacaacacacacaatcctttctaactttatggacactaaactggagccaatagaaaagacaaaaatgaaagagacacagggtgtatatctagaacgataatgcttttgcagaaactaaagcctttttaagaaatgccagctgctgtagaccccatgagaaaagatgtcttaatcatccttatgaaaacagatgtaaacaactatatttcaactaacttcatcttcactgcatagcctcaggctagtgagtttgccaaaaccaaagggggtgaatacttccccaagattcttcctgggaggatggaaacagtgcagcccaggtcccatgggggcagctccatcccagagcatttctgatagttgaactgtaatttctactcttaagtgagatatgaagcattatccttttgttcagttgccccgggcttttgaacagaagagtaaatacagaattgaaaaagataaacactcaaccaaacaatgtgaaaacgggttctgtagtatttgtaaaaaggcccggcccaggaccactgtgagctggaaaagggagaaaggcagtgggaaaagaggtgagccgaagatcaattcgacagacagatggtgtgtatgcccctccctgtttgacttcacacacactcataactttccaaatgaaaccccacagtatagcgcatattttcgatatttttgtgaattccaaaaggaaatcacagggctgttcgaaatattgggggaacactgtgtttctgcatcatctgcatttgctccccaagcaatgtagaggtgtttaaagggccctctgctggctgagtggcaatactacaacaaacttcaaggcaagtttggctgaaaacagttgacaacaaagggcccccatacacttatccctcaaattttaagtgatatgaaatacttgtcatgtctttggccaaatcagaagatattcatcctgcttcaagtcagcttcagaaatgttttaaaagggactttagctctggaactcaaaatcaatttattaagagccatattctttaaaaaaaaaaagctggataatattctctgtaatatttcagtcctttacaagccaaatacatgtgtcaatgtttctagtatttcaaagaagcaattatgtaaagttgttcaatgtgacataatagtattataattggttaagtagcttaatgattaggcaaactagatgaaaagattaggggcttccacactgcatagattacacgcacatagccacgcatacacacacagacacacagatgtggggtacactgaacttcaaagcccaaatgaatagaaacacattttctggctagcagaaaaaaacaaaacaaaactgttgtttctctttcttgctttgagagtgtacagtaaaagggattttttcgaattatttttatattattttagctttaattgtgctgtcgttcatgaaacagagctgctctgcttttctgtcagagatggcaagggctttttcagcatctcgtttatgtgtggaatttaaaaagaataaagttttattccattctgtgtg

SEQ ID NO: 2555 - protein, 240 aa, Homo sapiens; identical to SEQ ID NO: 2543

SEQ ID NO: 2556 - DNA, 2945 bp, Homo sapiens
aatcgcacgagggggaggagatttccctgtagacgagtaaaaagggtgatggacaaacgtgcgggcactaagaccgcaaggcattcatttcctcctacggtggatgcggacgccgggaggaggagagccccagagagaggagctgggagcggaggcgcagagaacacgtagcgactccgaagatcagccccaatgaacatgtcagtgttgactttacaagaatatgaattcgaaaagcagttcaacgagaatgaagccatccaatggatgcaggaaaactggaagaaatctttcctgttttctgctctgtatgctgcctttatattcggtggtcggcacctaatgaataaacgagcaaagtttgaactgaggaagccattagtgctctggtctctgacccttgcagtcttcagtatattcggtgctcttcgaactggtgcttatatggtgtacattttgatgaccaaaggcctgaagcagtcagtttgtgaccagggtttttacaatggacctgtcagcaaattctgggcttatgcatttgtgctaagcaaagcacccgaactaggagatacaatattcattattctgaggaagcagaagctgatcttcctgcactggtatcaccacatcactgtgctcctgtactcttggtactcctacaaagacatggttgccgggggaggttggttcatgactatgaactatggcgtgcacgccgtgatgtactcttactatgccttgcgggcggcaggtttccgagtctcccggaagtttgccatgttcatcaccttgtcccagatcactcagatgctgatgggctgtgtggttaactacctggtcttctgctggatgcagcatgaccagtgtcactctcactttcagaacatcttctggtcctcactcatgtacctcagctaccttgtgctcttctgccatttcttctttgaggcctacatcggcaaaatgaggaaaacaacgaaagctgaatagtgttggaactgaggaggaagccatagctcagggtcatcaagaaaaataatagacaaaagaaaatggcacaaggaatcacacgtggtgcagctaaaacaaaacaaaacatgagcaaacacaaaacccaaggcagcttagggataattaggttgatttaacccagtaagtttatgatccttttagggtgaggactcactgagtgcacctccatctccaagcactgctgctggaagaccccattccctctttatctatcaactctaggacaagggagaacaaaagcaagccagaagcagaggagactaatcaaaggcaaacaaaggctattaacacataggaaaaaatgtatttactaagtgtcacatttctctaagatgaaagatttttactctagaaactgtgcgagcacaacacacacaatcctttctaactttatggacactaaactggagccaatagaaaagacaaaaatgaaagagacacagggtgtatatctagaacgataatgcttttgcagaaactaaagcctttttaagaaatgccagctgctgtagaccccatgagaaaagatgtcttaatcatccttatgaaaacagatgtaaacaactatatttcaactaacttcatcttcactgcatagcctcaggctagtgagtttgccaaaaccaaagggggtgaatacttccccaagattcttcctgggaggatggaaacagtgcagcccaggtcccatgggggcagctccatcccagagcatttctgatagttgaactgtaatttctactcttaagtgagatatgaagcattatccttttgttcagttgccccgggcttttgaacagaagagtaaatacagaattgaaaaagataaacactcaaccaaacaatgtgaaaacgggttctgtagtatttgtaaaaaggcccggcccaggaccactgtgagctggaaaagggagaaaggcagtgggaaaagaggtgagccgaagatcaattcgacagacagatggtgtgtatgcccctccctgtttgacttcacacacactcataactttccaaatgaaaccccacagtatagcgcatattttcgatatttttgtgaattccaaaaggaaatcacagggctgttcgaaatattgggggaacactgtgtttctgcatcatctgcatttgctccccaagcaatgtagaggtgtttaaagggccctctgctggctgagtggcaatactacaacaaacttcaaggcaagtttggctgaaaacagttgacaacaaagggcccccatacacttatccctcaaattttaagtgatatgaaatacttgtcatgtctttggccaaatcagaagatattcatcctgcttcaagtcagcttcagaaatgttttaaaagggactttagctctggaactcaaaatcaatttattaagagccatattctttaaaaaaaaaaagctggataatattctctgtaatatttcagtcctttacaagccaaatacatgtgtcaatgtttctagtatttcaaagaagcaattatgtaaagttgttcaatgtgacataatagtattataattggttaagtagcttaatgattaggcaaactagatgaaaagattaggggcttccacactgcatagattacacgcacatagccacgcatacacacacagacacacagatgtggggtacactgaacttcaaagcccaaatgaatagaaacacattttctggctagcagaaaaaaacaaaacaaaactgttgtttctctttcttgctttgagagtgtacagtaaaagggattttttcgaattatttttatattattttagctttaattgtgctgtcgttcatgaaacagagctgctctgcttttctgtcagagatggcaagggctttttcagcatctcgtttatgtgtggaatttaaaaagaataaagttttattccattctgtgtg

SEQ ID NO: 2557 - protein, 265 aa, Homo sapiens; identical to SEQ ID NO: 244

SEQ ID NO: 2558 - DNA, 3298 bp, Homo sapiens
gcaagctgaaacttcattcaaagcaaggcggcccacgaggttgggcttaggggatctggatgacctccaggccacttcctttctctctgcgcccttcccccactcttccaaccaccttcgctgtaaacaaaactgtcccccccgggcggagagaggtcgcgctctttcgcacactccctcgccaagggttaatttctcaaatcgcacgagggggaggagatttccctgtagacgagtaaaaagggtgatggacaaacgtgcgggcactaagaccgcaaggcattcatttcctcctacggtggatgcggacgccgggaggaggagagccccagagagaggagctgggagcggaggcgcaggcaatgctcagccctggatgtagctgagaggctgggagaagagacgaccgctggagaccgagcggcgtggggaagacctaggggggtgggtgggggaagcagacaggagaacactcgaaatcaagcgctttacagattattttattttgtatagagaacacgtagcgactccgaagatcagccccaatgaacatgtcagtgttgactttacaagaatatgaattcgaaaagcagttcaacgagaatgaagccatccaatggatgcaggaaaactggaagaaatctttcctgttttctgctctgtatgctgcctttatattcggtggtcggcacctaatgaataaacgagcaaagtttgaactgaggaagccattagtgctctggtctctgacccttgcagtcttcagtatattcggtgctcttcgaactggtgcttatatggtgtacattttgatgaccaaaggcctgaagcagtcagtttgtgaccagggtttttacaatggacctgtcagcaaattctgggcttatgcatttgtgctaagcaaagcacccgaactaggagatacaatattcattattctgaggaagcagaagctgatcttcctgcactggtatcaccacatcactgtgctcctgtactcttggtactcctacaaagacatggttgccgggggaggttggttcatgactatgaactatggcgtgcacgccgtgatgtactcttactatgccttgcgggcggcaggtttccgagtctcccggaagtttgccatgttcatcaccttgtcccagatcactcagatgctgatgggctgtgtggttaactacctggtcttctgctggatgcagcatgaccagtgtcactctcactttcagaacatcttctggtcctcactcatgtacctcagctaccttgtgctcttctgccatttcttctttgaggcctacatcggcaaaatgaggaaaacaacgaaagctgaatagtgttggaactgaggaggaagccatagctcagggtcatcaagaaaaataatagacaaaagaaaatggcacaaggaatcacacgtggtgcagctaaaacaaaacaaaacatgagcaaacacaaaacccaaggcagcttagggataattaggttgatttaacccagtaagtttatgatccttttagggtgaggactcactgagtgcacctccatctccaagcactgctgctggaagaccccattccctctttatctatcaactctaggacaagggagaacaaaagcaagccagaagcagaggagactaatcaaaggcaaacaaaggctattaacacataggaaaaaatgtatttactaagtgtcacatttctctaagatgaaagatttttactctagaaactgtgcgagcacaacacacacaatcctttctaactttatggacactaaactggagccaatagaaaagacaaaaatgaaagagacacagggtgtatatctagaacgataatgcttttgcagaaactaaagcctttttaagaaatgccagctgctgtagaccccatgagaaaagatgtcttaatcatccttatgaaaacagatgtaaacaactatatttcaactaacttcatcttcactgcatagcctcaggctagtgagtttgccaaaaccaaagggggtgaatacttccccaagattcttcctgggaggatggaaacagtgcagcccaggtcccatgggggcagctccatcccagagcatttctgatagttgaactgtaatttctactcttaagtgagatatgaagcattatccttttgttcagttgccccgggcttttgaacagaagagtaaatacagaattgaaaaagataaacactcaaccaaacaatgtgaaaacgggttctgtagtatttgtaaaaaggcccggcccaggaccactgtgagctggaaaagggagaaaggcagtgggaaaagaggtgagccgaagatcaattcgacagacagatggtgtgtatgcccctccctgtttgacttcacacacactcataactttccaaatgaaaccccacagtatagcgcatattttcgatatttttgtgaattccaaaaggaaatcacagggctgttcgaaatattgggggaacactgtgtttctgcatcatctgcatttgctccccaagcaatgtagaggtgtttaaagggccctctgctggctgagtggcaatactacaacaaacttcaaggcaagtttggctgaaaacagttgacaacaaagggcccccatacacttatccctcaaattttaagtgatatgaaatacttgtcatgtctttggccaaatcagaagatattcatcctgcttcaagtcagcttcagaaatgttttaaaagggactttagctctggaactcaaaatcaatttattaagagccatattctttaaaaaaaaaaagctggataatattctctgtaatatttcagtcctttacaagccaaatacatgtgtcaatgtttctagtatttcaaagaagcaattatgtaaagttgttcaatgtgacataatagtattataattggttaagtagcttaatgattaggcaaactagatgaaaagattaggggcttccacactgcatagattacacgcacatagccacgcatacacacacagacacacagatgtggggtacactgaacttcaaagcccaaatgaatagaaacacattttctggctagcagaaaaaaacaaaacaaaactgttgtttctctttcttgctttgagagtgtacagtaaaagggattttttcgaattatttttatattattttagctttaattgtgctgtcgttcatgaaacagagctgctctgcttttctgtcagagatggcaagggctttttcagcatctcgtttatgtgtggaatttaaaaagaataaagttttattccattctgtgtg

SEQ ID NO: 2559 - protein, 265 aa, Homo sapiens; identical to SEQ ID NO: 244

SEQ ID NO: 2560 - DNA, 2955 bp, Homo sapiens
gtattcccttcactggtgatctcaacgtagatttgcccggagttctcttgcaagagagctggcaggttttactatttcccaatcgtttactcgccaagctctcgggtccacgcgccgcggggatgcgccctgcaagctgaaacttcattcaaagcaaggcggcccacgagagaacacgtagcgactccgaagatcagccccaatgaacatgtcagtgttgactttacaagaatatgaattcgaaaagcagttcaacgagaatgaagccatccaatggatgcaggaaaactggaagaaatctttcctgttttctgctctgtatgctgcctttatattcggtggtcggcacctaatgaataaacgagcaaagtttgaactgaggaagccattagtgctctggtctctgacccttgcagtcttcagtatattcggtgctcttcgaactggtgcttatatggtgtacattttgatgaccaaaggcctgaagcagtcagtttgtgaccagggtttttacaatggacctgtcagcaaattctgggcttatgcatttgtgctaagcaaagcacccgaactaggagatacaatattcattattctgaggaagcagaagctgatcttcctgcactggtatcaccacatcactgtgctcctgtactcttggtactcctacaaagacatggttgccgggggaggttggttcatgactatgaactatggcgtgcacgccgtgatgtactcttactatgccttgcgggcggcaggtttccgagtctcccggaagtttgccatgttcatcaccttgtcccagatcactcagatgctgatgggctgtgtggttaactacctggtcttctgctggatgcagcatgaccagtgtcactctcactttcagaacatcttctggtcctcactcatgtacctcagctaccttgtgctcttctgccatttcttctttgaggcctacatcggcaaaatgaggaaaacaacgaaagctgaatagtgttggaactgaggaggaagccatagctcagggtcatcaagaaaaataatagacaaaagaaaatggcacaaggaatcacacgtggtgcagctaaaacaaaacaaaacatgagcaaacacaaaacccaaggcagcttagggataattaggttgatttaacccagtaagtttatgatccttttagggtgaggactcactgagtgcacctccatctccaagcactgctgctggaagaccccattccctctttatctatcaactctaggacaagggagaacaaaagcaagccagaagcagaggagactaatcaaaggcaaacaaaggctattaacacataggaaaaaatgtatttactaagtgtcacatttctctaagatgaaagatttttactctagaaactgtgcgagcacaacacacacaatcctttctaactttatggacactaaactggagccaatagaaaagacaaaaatgaaagagacacagggtgtatatctagaacgataatgcttttgcagaaactaaagcctttttaagaaatgccagctgctgtagaccccatgagaaaagatgtcttaatcatccttatgaaaacagatgtaaacaactatatttcaactaacttcatcttcactgcatagcctcaggctagtgagtttgccaaaaccaaagggggtgaatacttccccaagattcttcctgggaggatggaaacagtgcagcccaggtcccatgggggcagctccatcccagagcatttctgatagttgaactgtaatttctactcttaagtgagatatgaagcattatccttttgttcagttgccccgggcttttgaacagaagagtaaatacagaattgaaaaagataaacactcaaccaaacaatgtgaaaacgggttctgtagtatttgtaaaaaggcccggcccaggaccactgtgagctggaaaagggagaaaggcagtgggaaaagaggtgagccgaagatcaattcgacagacagatggtgtgtatgcccctccctgtttgacttcacacacactcataactttccaaatgaaaccccacagtatagcgcatattttcgatatttttgtgaattccaaaaggaaatcacagggctgttcgaaatattgggggaacactgtgtttctgcatcatctgcatttgctccccaagcaatgtagaggtgtttaaagggccctctgctggctgagtggcaatactacaacaaacttcaaggcaagtttggctgaaaacagttgacaacaaagggcccccatacacttatccctcaaattttaagtgatatgaaatacttgtcatgtctttggccaaatcagaagatattcatcctgcttcaagtcagcttcagaaatgttttaaaagggactttagctctggaactcaaaatcaatttattaagagccatattctttaaaaaaaaaaagctggataatattctctgtaatatttcagtcctttacaagccaaatacatgtgtcaatgtttctagtatttcaaagaagcaattatgtaaagttgttcaatgtgacataatagtattataattggttaagtagcttaatgattaggcaaactagatgaaaagattaggggcttccacactgcatagattacacgcacatagccacgcatacacacacagacacacagatgtggggtacactgaacttcaaagcccaaatgaatagaaacacattttctggctagcagaaaaaaacaaaacaaaactgttgtttctctttcttgctttgagagtgtacagtaaaagggattttttcgaattatttttatattattttagctttaattgtgctgtcgttcatgaaacagagctgctctgcttttctgtcagagatggcaagggctttttcagcatctcgtttatgtgtggaatttaaaaagaataaagttttattccattctgtgtg

SEQ ID NO: 2561 - protein, 265 aa, Homo sapiens; identical to SEQ ID NO: 244

SEQ ID NO: 2562 - DNA, 2894 bp, Homo sapiens
ctctcgcctatccactatcctcacactcagcatcccctgtctgtacgagattaaggagctctgccgtccgcagggcctggagaacacgtagcgactccgaagatcagccccaatgaacatgtcagtgttgactttacaagaatatgaattcgaaaagcagttcaacgagaatgaagccatccaatggatgcaggaaaactggaagaaatctttcctgttttctgctctgtatgctgcctttatattcggtggtcggcacctaatgaataaacgagcaaagtttgaactgaggaagccattagtgctctggtctctgacccttgcagtcttcaggtgctataacaacttgaaacagctgacattatattcggtgctcttcgaactggtgcttatatggtgtacattttgatgaccaaaggcctgaagcagtcagtttgtgaccagggtttttacaatggacctgtcagcaaattctgggcttatgcatttgtgctaagcaaagcacccgaactaggagatacaatattcattattctgaggaagcagaagctgatcttcctgcactggtatcaccacatcactgtgctcctgtactcttggtactcctacaaagacatggttgccgggggaggttggttcatgactatgaactatggcgtgcacgccgtgatgtactcttactatgccttgcgggcggcaggtttccgagtctcccggaagtttgccatgttcatcaccttgtcccagatcactcagatgctgatgggctgtgtggttaactacctggtcttctgctggatgcagcatgaccagtgtcactctcactttcagaacatcttctggtcctcactcatgtacctcagctaccttgtgctcttctgccatttcttctttgaggcctacatcggcaaaatgaggaaaacaacgaaagctgaatagtgttggaactgaggaggaagccatagctcagggtcatcaagaaaaataatagacaaaagaaaatggcacaaggaatcacacgtggtgcagctaaaacaaaacaaaacatgagcaaacacaaaacccaaggcagcttagggataattaggttgatttaacccagtaagtttatgatccttttagggtgaggactcactgagtgcacctccatctccaagcactgctgctggaagaccccattccctctttatctatcaactctaggacaagggagaacaaaagcaagccagaagcagaggagactaatcaaaggcaaacaaaggctattaacacataggaaaaaatgtatttactaagtgtcacatttctctaagatgaaagatttttactctagaaactgtgcgagcacaacacacacaatcctttctaactttatggacactaaactggagccaatagaaaagacaaaaatgaaagagacacagggtgtatatctagaacgataatgcttttgcagaaactaaagcctttttaagaaatgccagctgctgtagaccccatgagaaaagatgtcttaatcatccttatgaaaacagatgtaaacaactatatttcaactaacttcatcttcactgcatagcctcaggctagtgagtttgccaaaaccaaagggggtgaatacttccccaagattcttcctgggaggatggaaacagtgcagcccaggtcccatgggggcagctccatcccagagcatttctgatagttgaactgtaatttctactcttaagtgagatatgaagcattatccttttgttcagttgccccgggcttttgaacagaagagtaaatacagaattgaaaaagataaacactcaaccaaacaatgtgaaaacgggttctgtagtatttgtaaaaaggcccggcccaggaccactgtgagctggaaaagggagaaaggcagtgggaaaagaggtgagccgaagatcaattcgacagacagatggtgtgtatgcccctccctgtttgacttcacacacactcataactttccaaatgaaaccccacagtatagcgcatattttcgatatttttgtgaattccaaaaggaaatcacagggctgttcgaaatattgggggaacactgtgtttctgcatcatctgcatttgctccccaagcaatgtagaggtgtttaaagggccctctgctggctgagtggcaatactacaacaaacttcaaggcaagtttggctgaaaacagttgacaacaaagggcccccatacacttatccctcaaattttaagtgatatgaaatacttgtcatgtctttggccaaatcagaagatattcatcctgcttcaagtcagcttcagaaatgttttaaaagggactttagctctggaactcaaaatcaatttattaagagccatattctttaaaaaaaaaaagctggataatattctctgtaatatttcagtcctttacaagccaaatacatgtgtcaatgtttctagtatttcaaagaagcaattatgtaaagttgttcaatgtgacataatagtattataattggttaagtagcttaatgattaggcaaactagatgaaaagattaggggcttccacactgcatagattacacgcacatagccacgcatacacacacagacacacagatgtggggtacactgaacttcaaagcccaaatgaatagaaacacattttctggctagcagaaaaaaacaaaacaaaactgttgtttctctttcttgctttgagagtgtacagtaaaagggattttttcgaattatttttatattattttagctttaattgtgctgtcgttcatgaaacagagctgctctgcttttctgtcagagatggcaagggctttttcagcatctcgtttatgtgtggaatttaaaaagaataaagttttattccattctgtgtg

SEQ ID NO: 2563 - protein, 181 aa, Homo sapiens [sequence omitted]

SEQ ID NO: 2564 - DNA, 2885 bp, Homo sapiens
ccacttccggctactagcctctctcgcctatccactatcctcacactcagcatcccctgtctgtacgagattaaggagctctgccgtccgcagggcctggagaacacgtagcgactccgaagatcagccccaatgaacatgtcagtgttgactttacaagaatatgaattcgaaaagcagttcaacgagaatgaagccatccaatggatgcaggaaaactggaagaaatctttcctgttttctgctctgtatgctgcctttatattcggtggtcggcacctaatgaataaacgagcaaagtttgaactgaggaagccattagtgctctggtctctgacccttgcagtcttcagtatattcggtgctcttcgaactggtgcttatatggtgtacattttgatgaccaaaggcctgaagcagtcagtttgtgaccagggtttttacaatggacctgtcagcaaattctgggcttatgcatttgtgctaagcaaagcacccgaactaggagatacaatattcattattctgaggaagcagaagctgatcttcctgcactggtatcaccacatcactgtgctcctgtactcttggtactcctacaaagacatggttgccgggggaggttggttcatgactatgaactatggcgtgcacgccgtgatgtactcttactatgccttgcgggcggcaggtttccgagtctcccggaagtttgccatgttcatcaccttgtcccagatcactcagatgctgatgggctgtgtggttaactacctggtcttctgctggatgcagcatgaccagtgtcactctcactttcagaacatcttctggtcctcactcatgtacctcagctaccttgtgctcttctgccatttcttctttgaggcctacatcggcaaaatgaggaaaacaacgaaagctgaatagtgttggaactgaggaggaagccatagctcagggtcatcaagaaaaataatagacaaaagaaaatggcacaaggaatcacacgtggtgcagctaaaacaaaacaaaacatgagcaaacacaaaacccaaggcagcttagggataattaggttgatttaacccagtaagtttatgatccttttagggtgaggactcactgagtgcacctccatctccaagcactgctgctggaagaccccattccctctttatctatcaactctaggacaagggagaacaaaagcaagccagaagcagaggagactaatcaaaggcaaacaaaggctattaacacataggaaaaaatgtatttactaagtgtcacatttctctaagatgaaagatttttactctagaaactgtgcgagcacaacacacacaatcctttctaactttatggacactaaactggagccaatagaaaagacaaaaatgaaagagacacagggtgtatatctagaacgataatgcttttgcagaaactaaagcctttttaagaaatgccagctgctgtagaccccatgagaaaagatgtcttaatcatccttatgaaaacagatgtaaacaactatatttcaactaacttcatcttcactgcatagcctcaggctagtgagtttgccaaaaccaaagggggtgaatacttccccaagattcttcctgggaggatggaaacagtgcagcccaggtcccatgggggcagctccatcccagagcatttctgatagttgaactgtaatttctactcttaagtgagatatgaagcattatccttttgttcagttgccccgggcttttgaacagaagagtaaatacagaattgaaaaagataaacactcaaccaaacaatgtgaaaacgggttctgtagtatttgtaaaaaggcccggcccaggaccactgtgagctggaaaagggagaaaggcagtgggaaaagaggtgagccgaagatcaattcgacagacagatggtgtgtatgcccctccctgtttgacttcacacacactcataactttccaaatgaaaccccacagtatagcgcatattttcgatatttttgtgaattccaaaaggaaatcacagggctgttcgaaatattgggggaacactgtgtttctgcatcatctgcatttgctccccaagcaatgtagaggtgtttaaagggccctctgctggctgagtggcaatactacaacaaacttcaaggcaagtttggctgaaaacagttgacaacaaagggcccccatacacttatccctcaaattttaagtgatatgaaatacttgtcatgtctttggccaaatcagaagatattcatcctgcttcaagtcagcttcagaaatgttttaaaagggactttagctctggaactcaaaatcaatttattaagagccatattctttaaaaaaaaaaagctggataatattctctgtaatatttcagtcctttacaagccaaatacatgtgtcaatgtttctagtatttcaaagaagcaattatgtaaagttgttcaatgtgacataatagtattataattggttaagtagcttaatgattaggcaaactagatgaaaagattaggggcttccacactgcatagattacacgcacatagccacgcatacacacacagacacacagatgtggggtacactgaacttcaaagcccaaatgaatagaaacacattttctggctagcagaaaaaaacaaaacaaaactgttgtttctctttcttgctttgagagtgtacagtaaaagggattttttcgaattatttttatattattttagctttaattgtgctgtcgttcatgaaacagagctgctctgcttttctgtcagagatggcaagggctttttcagcatctcgtttatgtgtggaatttaaaaagaataaagttttattccattctgtgtg

SEQ ID NO: 2565 - protein, 265 aa, Homo sapiens; identical to SEQ ID NO: 244

SEQ ID NO: 2566 - DNA, 2800 bp, Homo sapiens
aatcgcacgagggggaggagatttccctgtagacgagtaaaaagggtgatggacaaacgtgcgggcactaagaccgcaaggcattcatttcctcctacggtggatgcggacgccgggaggaggagagccccagagagaggagctgggagcggaggcgcagagaacacgtagcgactccgaagatcagccccaatgaacatgtcagtgttgactttacaagaatatgaattcgaaaagcagttcaacgagaatgaagccatccaatggatgcaggaaaactggaagaaatctttcctgttttctgctctgtatgctgcctttatattcggtggtcggcacctaatgaataaacgagcaaagtttgaactgaggaagccattagtgctctggtctctgacccttgcagtcttcagtatattcggtgctcttcgaactggtgcttatatggtgtacattttgatgaccaaaggcctgaagcagtcagtttgtgaccagggtttttacaatggacctgtcagcaaattctgggcttatgcatttgtgctaagcaaagcacccgaactaggagatacaatattcattattctgaggaagcagaagctgatcttcctgcactggtatcaccacatcactgtgctcctgtactcttggtactcctacaaagacatggttgccgggggaggttggttcatgactatgaactatggcgtgcacgccgtgatgtactcttactatgccttgcgggcggcaggtttccgagtctcccggaagtttgccatgttcatcaccttgtcccagatcactcagatgctgatgggctgtgtggttaactacctggtcttctgctggatgcagcatgaccagtgtcactctcactttcagaacatcttctggtcctcactcatgtacctcagctaccttgtgctcttctgccatttcttctttgaggcctacatcggcaaaatgaggaaaacaacgaaagctgaatagtgttggaactgaggaggaagccatagctcagggtcatcaagaaaaataatagacaaaagaaaatggcacaaggaatcacacgtggtgcagctaaaacaaaacaaaacatgagcaaacacaaaacccaaggcagcttagggataattaggttgatttaacccagtaagtttatgatccttttagggtgaggactcactgagtgcacctccatctccaagcactgctgctggaagaccccattccctctttatctatcaactctaggacaagggagaacaaaagcaagccagaagcagaggagactaatcaaaggcaaacaaaggctattaacacataggaaaaaatgtatttactaagtgtcacatttctctaagatgaaagatttttactctagaaactgtgcgagcacaacacacacaatcctttctaactttatggacactaaactggagccaatagaaaagacaaaaatgaaagagacacagggtgtatatctagaacgataatgcttttgcagaaactaaagcctttttaagaaatgccagctgctgtagaccccatgagaaaagatgtcttaatcatccttatgaaaacagatgtaaacaactatatttcaactaacttcatcttcactgcatagcctcaggctagtgagtttgccaaaaccaaagggggtgaatacttccccaagattcttcctgggaggatggaaacagtgcagcccaggtcccatgggggcagctccatcccagagcatttctgatagttgaactgtaatttctactcttaagtgagatatgaagcattatccttttgttcagttgccccgggcttttgaacagaagagtaaatacagaattgaaaaagataaacactcaaccaaacaatgtgaaaacgggttctgtagtatttgtaaaaaggcccggcccaggaccactgtgagctggaaaagggagaaaggcagtgggaaaagaggtgagccgaagatcaattcgacagacagatggtgtgtatgcccctccctgtttgacttcacacacactcataactttccaaatgaaaccccacagtatagcgcatattttcgatatttttgtgaattccaaaaggaaatcacagggctgttcgaaatattgggggaacactgtgtttctgcatcatctgcatttgctccccaagcaatgtagaggtgtttaaagggccctctgctggctgagtggcaatactacaacaaacttcaaggcaagtttggctgaaaacagttgacaacaaagggcccccatacacttatccctcaaattttaagtgatatgaaatacttgtcatgtctttggccaaatcagaagatattcatcctgcttcaagtcagcttcagaaatgttttaaaagggactttagctctggaactcaaaatcaatttattaagagccatattctttaaaaaaaaaaagctggataatattctctgtaatatttcagtcctttacaagccaaatacatgtgtcaatgtttctagtatttcaaagaagcaattatgtaaagttgttcaatgtgacataatagtattataattggttaagtagcttaatgattaggcaaactagatgaaaagattaggggcttccacactgcatagattacacgcacatagccacgcatacacacacagacacacagatgtggggtacactgaacttcaaagcccaaatgaatagaaacacattttctggctagcagaaaaaaacaaaacaaaactgttgtttctctttcttgctttgagagtgtacagtaaaagggattttttcgaatt

SEQ ID NO: 2567 - protein, 265 aa, Homo sapiens; identical to SEQ ID NO: 244

SEQ ID NO: 2568 - DNA, 785 bp, Homo sapiens
actaagaccgcaaggcattcatttcctcctacggtggatgcggacgccgggaggaggagagccccagagagaggagctgggagcggaggcgcaggcaatgctcagccctggatgtagctgagaggctgggagaagagacgaccgctggagaccgagcggcgtggggaagacctaggggggtgggtgggggaagcagacaggagaacactcgaaatcaagcgctttacagattattttattttgtatagagaacacgtagcgactccgaagatcagccccaatgaacatgtcagtgttgactttacaagaatatgaattcgaaaagcagttcaacgagaatgaagccatccaatggatgcaggaaaactgggtgatgtctgcgcgacagggaaggcgggagagatgccacagtccagatcgcctacctgtgctcccctcccctcccccggttttcatctagatttgggttttctcgcttggcctctcccgcaaccggagtgtgaaaggcagtggagggaggaccttgtctcctgttgcctttaaccctctcccgcccgccgcccttggccctggtcctcgctgtctctccatccctcgtgtccttcctttctccttgcagcgctcctacttcaccgtcctcctctgtctgccgctcctcaggcggatgccccctttttagtacccctttccccacgcggttccctttccggtttcatagagagaccgggtgggagggaggaggggacaatgaaaacagtaataaatgaatgaacccgagcgagtgg

SEQ ID NO: 2569 - protein, 63 aa, Homo sapiens
MDAGKLGDVCATGKAGEMPQSRSPTCAPLPSPGFHLDLGFLAWPLPQPECERQWREDLVSCCL

SEQ ID NO: 2570 - DNA, 689 bp, Homo sapiens
aatcgcacgagggggaggagatttccctgtagacgagtaaaaagggtgatggacaaacgtgcgggcactaagaccgcaaggcattcatttcctcctacggtggatgcggacgccgggaggaggagagccccagagagaggagctgggagcggaggcgcagagaacacgtagcgactccgaagatcagccccaatgaacatgtcagtgttgactttacaagaatatgaattcgaaaagcagttcaacgagaatgaagccatccaatggatgcaggaaaactgggtgatgtctgcgcgacagggaaggcgggagagatgccacagtccagatcgcctacctgtgctcccctcccctcccccggttttcatctagatttgggttttctcgcttggcctctcccgcaaccggagtgtgaaaggcagtggagggaggaccttgtctcctgttgcctttaaccctctcccgcccgccgcccttggccctggtcctcgctgtctctccatccctcgtgtccttcctttctccttgcagcgctcctacttcaccgtcctcctctgtctgccgctcctcaggcggatgccccctttttagtacccctttccccacgcggttccctttccggtttcatagagagaccgggtgggagggaggaggggacaatgaaaacagtaataaatgaatgaacccga

SEQ ID NO: 2571 - protein, 63 aa, Homo sapiens; identical to SEQ ID NO: 2569

SEQ ID NO: 2572 - DNA, 267 bp, Homo sapiens
atgggcaccagggatatagccgagactgaccccaagaatgagcaggaactcacctcagtggtgcagaaactcctgcagcagatccaagataaatttcagaccatgtctgaccagatcattgggagaactgatgatatgagtagttgcactgatgatctggaaaagaacatcgcagatctcatgacacaggctggggtggaagaactggaaagtaaaaacaagatacctgccacacaagaggtgaaggttgctaataatttatactga

SEQ ID NO: 2573 - protein, 88 aa, Homo sapiens [sequence omitted]

SEQ ID NO: 2574 - DNA, 300 bp, Homo sapiens; identical to SEQ ID NO: 245

SEQ ID NO: 2575 - protein, 99 aa, Homo sapiens [sequence omitted]

SEQ ID NO: 2576 - DNA, 378 bp, Homo sapiens; identical to SEQ ID NO: 247

SEQ ID NO: 2577 - protein, 125 aa, Homo sapiens; identical to SEQ ID NO: 248

SEQ ID NO: 2578 - DNA, 1962 bp, Homo sapiens
cttggaattctccctctcaggaaactaacagcctgctatgaagcccaagccacaaagagaggccaaggggaaataaacagagtgtgattatatgcaaaacctacaagaatgaggacctccaaactcagtgtacagagtgattttctgctgaaacaattggcttttaaaaaattgtgtgactgaccagcagcagtggctcacatctgtaatcccagcactttgggaggccgagaaaataaaagagacatcagtgtgtgaatgacgactttctgttgctgacttggaagacagaggaattgggtcatgagccgaggaaggtgggcagcttctaaaaggcggaaaagaactgaattgaattcaaatcaaaaaaggtctgaacctcatttaaaagatggttttgtaactgaagaattgaaaggatttctttatgaactagcatcatcttaagacaaaggataaggaccctgaagacagcattatagtgaatcccagaggtgctctccaaaatggtgctaatacagccaagaatacaggtatgaggaaggatgtggaagggtaccttacaggagaaagcaccacttatccaccaagatggcagaggccttcttttctgacccgtggtacaaaaagaaaacattataaggagagacaataggcaaaaaagagcacacgagaagaaacatagaatgaaagaaaagagagggtcaaagagaagaaaaataagatcacatgaaggtgataatacaattttatatagaacacggcaatttgcaatccacaagctgatctaatatttaatgtttaagaaatccaggctgtgtaaataaattttggaaatgagaactctccaagagcagactcaaggtgatctgggctggatcttactccttccatgtctcaggtggccccaggaggacaacattgtcaaataaagtttagcctaaagctgactccttacttattttaagttcagcctaaagatttatctgtacatcatgaactatagcctaaacggaagtataaacaggctacaatctactcttgtgccaatcactgagttttggccaatcgattgcggtcaacagttcaaatcatgtttgaataagacaaatgccgagctgttaccaatctggctgtttctgtacctcacttctgttttgtgtatgtcactttattttttctgtccataaatcctcttccaccacgcagctgcgctgcagtctctgagcctactctggctctggaggcggcccgataggcgaattgttctttgctcaattaaattcttaaatgtaatacggctgaagtttttcctttaacagtatacaactgtgaagtggttttatcaggcatcataggtggagaaatagtagaccagaagtgcaagaggcatatgcaacaccattccctgctgtaccagtattatccagtgacaccttatctggttattaaccaaagctgctttggcataattccagtggctgaagtgagaggaagcgaggatatggctgacattctccaagaagcagtgacttcagaagatgactggcatcttgaacttcaggaaaatgcttggcctttttaactctgaaagtctgtttgaaactcagaagaagaaaattaggtgaatacaaaactgctgccaaacttagaaacttggttaaatatcctgcagaaaatatcatgggcttttcagagtccagttaaatatctacagattatatttccagtttcatacctggggcattaactctattcattttactagctttagtgaattttacttctggagcataacattgcattgaaaatgtgtcctctaacctatgatatttatgtatcgtttaatatgaaatttatgaggttccatttctgatttccaaatggatgcaaattagaacacaggatatttacattctttcatttctaacccacatacataaagtttgactttaaaatgcc

SEQ ID NO: 2579 - protein, 47 aa, Homo sapiens
MSRGRWAASKRRKRTELNSNQKRSEPHLKDGFVTEELKGFLYELASS

SEQ ID NO: 2580 - DNA, 653 bp, Homo sapiens
gctcttggaattctccctctcaggaaactaacagcctgctatgaagcccaagccacaaagagaggccaaggggaaataaacagagtgtgattatatgcaaaacctacaagaatgaggacctccaaactcagtgtacagagtgattttctgctgaaacaattggttggtgtaagaatattggaagcctgaacctagcactgtctgctactggcctgacgtcttttccacaacatgggaagagattgcctgggaaggaagccaactctgtggaaagcataagaaataaccaaagaaagatggcacatcttatctggacagtgttgaagtgaacttttaaaatgaagtaaattttgttgaatcgtagcctgagacaatgaaggggtaatttaggggaagaacccctacctctaagttgccttttttgaccacatgctggaagctgggtgtcggttacaagctgactgtaaaaaacggcaggaaggagaggggcttcttctcagccttacctttaggaaatcaaaaaaaaaccaaaactgaatcctcacttagcggaggggaacaaagaactcagattctaaggacaaggcagaatccattaggtatagggcagaagctaaaaaaaaggagaggactctgattaaaacataaaaccc

SEQ ID NO: 2581 - protein, 35 aa, Homo sapiens
MLEAGCRLQADCKKRQEGEGLLLSLTFRKSKKNQN

SEQ ID NO: 2582 - DNA, 617 bp, Homo sapiens
gctatcattgccaactgtattcagcggatccaatgaagaattctgcatccagccctagagatgttggagacacaagctgcagatgtccagtaatttcctggatagaaattttattatctgcaaagaatgatatcacatcacaaggatgtccaggtaatccagttccctgtgcactatattactacacatgccaaaagagttaacactacccttgagcaagaaggtgtagcactaggagcctggtgaagccaaacaagggtgaaggcctggccagaatgtgaccaaaggctctattcctagcttcggtaacacatgaaaaaggacattgagttcttccttcactgcagtcctgcctcaagtgagctgtgcctgtaccctggaaatggaaacattagctcttcctttcctcaacacctacttcctcagcattctgcaaagccttcagctggagtgaagtcttccatgacacaagatttttctaaatcacttcctgattgaaaacattgcttacattgccccaggatacccattcttgaccatgaggtattatatttgaatatacactgatggatttagtttgataacatttttattacagattttacattcttgtttgt

SEQ ID NO: 2583 - protein, 56 aa, Homo sapiens
MKNSASSPRDVGDTSCRCPVISWIEILLSAKNDITSQGCPGNPVPCALYYYTCQKS

SEQ ID NO: 2584 - DNA, 5404 bp, Homo sapiens
aaaagggccagccctccagctggcccactccccctccgggctttcgcccgccctctctccctcccttttttgcccgccctggccctgcccctgcccctgccccctcctctcagcccctccgcgcccggggtgtcattgggcccgggagacgggagccaacttcaggctgctcagaggaagcccgtgcagtcagtcacctgggtgcaagagcgttgctgcctcgggctctcccgctgcagggagagcggcactcgctggcctggatgtggttggatttaggggggctccgcagcaggggtttcgtggcggtggcaagcgctgcaacaggtagacggcgagagacggaccccggccgaggcagcgatggagaccaaaggctaccacagtctccctgaaggtctagatatggaaagacggtggggtcaagtttctcaggctgtggagcgttcttccctgggacctacagagaggaccgatgagaataactacatggagattgtcaacgtaagctgtgtttccggtgctattccaaacaacagtactcaaggaagcagcaaagaaaaacaagaactactcccttgccttcagcaagacaataatcggcctgggattttaacatctgatattaaaactgagctggaatctaaggaactttcagcaactgtagctgagtccatgggtttatatatggattctgtaagagatgctgactattcctatgagcagcagaaccaacaaggaagcatgagtccagctaagatttatcagaatgttgaacagctggtgaaattttacaaaggaaatggccatcgtccttccactctaagttgtgtgaacacgcccttgagatcatttatgtctgactctgggagctccgtgaatggtggcgtcatgcgcgccgttgttaaaagccctatcatgtgtcatgagaaaagcccgtctgtttgcagccctctgaacatgacatcttcggtttgcagccctgctggaatcaactctgtgtcctccaccacagccagctttggcagttttccagtgcacagcccaatcacccagggaactcctctgacatgctcccctaatgttgaaaatcgaggctccaggtcgcacagccctgcacatgctagcaatgtgggctctcctctctcaagtccgttaagtagcatgaaatcctcaatttccagccctccaagtcactgcagtgtaaaatctccagtctccagtcccaataatgtcactctgagatcctctgtgtctagccctgcaaatattaacaactcaaggtgctctgtttccagcccttcgaacactaataacagatccacgctttccagtccggcagccagtactgtgggatctatctgtagccctgtaaacaatgccttcagctacactgcttctggcacctctgctggatccagtacattgcgggatgtggttcccagtccagacacgcaggagaaaggtgctcaagaggtcccttttcctaagactgaggaagtagagagtgccatctcaaatggtgtgactggccagcttaatattgtccagtacataaaaccagaaccagatggagcttttagcagctcatgtctaggaggaaatagcaaaataaattcggattcttcattctcagtaccaataaagcaagaatcaaccaagcattcatgttcaggcacctcttttaaagggaatccaacagtaaacccgtttccatttatggatggctcgtatttttcctttatggatgataaagactattattccctatcaggaattttaggaccacctgtgcccggctttgatggtaactgtgaaggcagcggattcccagtgggtattaaacaagaaccagatgatgggagctattacccagaggccagcatcccttcctctgctattgttggggtgaattcaggtggacagtccttccactacaggattggtgctcaaggtacaatatctttatcacgatcggctagagaccaatctttccaacacctgagttcctttcctcctgtcaatactttagtggagtcatggaaatcacacggcgacctgtcgtctagaagaagtgatgggtatccggtcttagaatacattccagaaaatgtatcaagctctactttacgaagtgtttctactggatcttcaagaccttcaaaaatatgtttggtgtgtggggatgaggcttcaggatgccattatggggtagtcacctgtggcagctgcaaagttttcttcaaaagagcagtggaagggcaacacaactatttatgtgctggaagaaatgattgcatcattgataagattcgacgaaagaattgtcctgcttgcagacttcagaaatgtcttcaagctggaatgaatttaggagagagaagatgcatcagtctgccatgtatgaactatgccaggggatgcaccaaatcagccttcagttcgttcgactgcagctcacctttgaagaatacaccatcatgaaagttttgctgctactaagcacaattccaaaggatggcctcaaaagccaggctgcatttgaagaaatgaggacaaattacatcaaagaactgaggaagatggtaactaagtgtcccaacaattctgggcagagctggcagaggttctaccaactgaccaagctgctggactccatgcatgacctggtgagcgacctgctggaattctgcttctacaccttccgagagtcccatgcgctgaaggtagagttccccgcaatgctggtggagatcatcagcgaccagctgcccaaggtggagtcggggaacgccaagccgctctacttccaccggaagtgactgcccgctgcccagaagaactttgccttaagtttccctgtgttgttccacacccagaaggacccaagaaaacctgtttttaacatgtgatggttgattcacacttgttcaacagtttctcaagtttaaagtcatgtcagaggtttggagccgggaaagctgtttttccgtggatttggcgagaccagagcagtctgaaggattccccacctccaatcccccagcgcttagaaacatgttcctgttcctcgggatgaaaagccatatctagtcaataactctgattttgatattttcacagatggaagaagttttaactatgccgtgtagtttctggtatcgttcgcttgttttaaaagggttcaaggactaacgaacgttttaaagcttacccttggtttgcacataaaacgtatagtcaatatggggcattaatattcttttgttattaaaaaaacacaaaaaaataataaaaaaatatatacagattcctgttgtgtaataacagaactcgtggcgtggggcagcagctgcctctgagccctcgctcgtccacggtcttctgcatcactggtatacacactcgttagcgtccatttcttatttaattagaatggataagatgatgttaaatgccttggtttgatttctagtatctattgtgttggctttacaaataattttttgcagtcttttgctgtgctgtacattactgtatgtataaattatgaaggacctgaaataaggtataaggatcttttgtaaatgagacacatacaaaaaaaatctttaatggttaataggatgaatgggaaagtatttttgaaagaattctattttgctggagactatttaagtactatctttgtctaaacaaggtaatttttttttgtaaagtgcaatgtcctgcatgcataatgaaccgtttacagtgtatttaagaaagggaaagctgtgccttttttagcttcatatctaatttaccattattttacagtctctgttgtaaataaccacactgaaacctcttcggttgtcttgaaacctttctactttttctgtactttttgttttgttcttggtctcccgcttggggcatttgtgggactccagcacgttttctggcttctgcttcatcctgctccatcggggaatgacacactgcggtgtctgcagctcctggaaggtgtcatttgacaacacatgtgggagaggaggtccttggagtgctgcagctttgggaaagctgcctcgtttcccttttcctctagaagcagaaccagctctacgagagtgagactgggaacttgatggctcagagagcatcttttcctcccattttagaaaatcagattttctcctgtgggaaaaaaaaattccatgcactctctctctgttaaagatcagctattcccttctgatcttggaaagaggttctgcactcctggaaccggtcacaggaacgcacagatcatggcaggatgcgctgggacggcccatcttggcaaggttcagtctgaatggcatggagaccgggagatagaggggttttagatttttaaaaggtaggttttaaaaataagttttatacataaacagttttggagaaaaattacagatcatataagcaagacagtggcactaaaatgtttaattcattaatctgtttgtttggcactgatgcaatgtatggcttttctcttgccccaaatcacaaacatatgtatctttggggaaactaacaatatgattgcactaaataaactactttgaatagaggccaaattaatcttttaaaaatgatgataatcatcaggtttactcagtgaaatcatattaattattttccaaaatctaaaagctgtagctggagaagcccatggccacgaggaagcagcaattaattagatcaacacttttctccagggttcaccatgcaggcaacattaccttgtctttcaaaagacacctgccttatgcaaggggaaacctgtgaaagctgcactcagagggaggagtttttcttacataatttgcaatttcaggaatttaatttataggcagatctttaaatacagtcaacttacggtgcacagtaatatgaaagccacactttgaaggtaataaatacacagcatgcagactgggagttgctagcaaacaaatggcttacttacaaaagcagcttttagttcagacttagtttttataaaatgggaattctgacttacttaaccaggtttgggatggagatggtctgcatcagctttttgtattaacaaagttactggctctttgtgtgtctccaggtaactttgcttgattaaacagcaaagccatattctaaattcactgttgaatgcctgtcccagtccaaattgtctgtctgctcttatttttgtaccatattgctcttaaaaatcttggtttggtacagttcataattcaccaaaagttcatataatttaaagaaacactaaattagtttaaaatgaagcaatttatatctttatgcaaaaacatatgtctgtctttgcaaaggactgtaagcagattacaataaatcctttactttaatcacc

SEQ ID NO: 2585 - protein, 706 aa, Homo sapiens
METKGYHSLPEGLDMERRWGQVSQAVERSSLGPTERTDENNYMEIVNVSCVSGAIPNNSTQGSSKEKQELLPCLQQDNNRPGILTSDIKTELESKELSATVAESMGLYMDSVRDADYSYEQQNQQGSMSPAKIYQNVEQLVKFYKGNGHRPSTLSCVNTPLRSFMSDSGSSVNGGVMRAVVKSPIMCHEKSPSVCSPLNMTSSVCSPAGINSVSSTTASFGSFPVHSPITQGTPLTCSPNVENRGSRSHSPAHASNVGSPLSSPLSSMKSSISSPPSHCSVKSPVSSPNNVTLRSSVSSPANINNSRCSVSSPSNTNNRSTLSSPAASTVGSICSPVNNAFSYTASGTSAGSSTLRDVVPSPDTQEKGAQEVPFPKTEEVESAISNGVTGQLNIVQYIKPEPDGAFSSSCLGGNSKINSDSSFSVPIKQESTKHSCSGTSFKGNPTVNPFPFMDGSYFSFMDDKDYYSLSGILGPPVPGFDGNCEGSGFPVGIKQEPDDGSYYPEASIPSSAIVGVNSGGQSFHYRIGAQGTISLSRSARDQSFQHLSSFPPVNTLVESWKSHGDLSSRRSDGYPVLEYIPENVSSSTLRSVSTGSSRPSKICLVCGDEASGCHYGVVTCGSCKVFFKRAVEGQHNYLCAGRNDCIIDKIRRKNCPACRLQKCLQAGMNLGERRCISLPCMNYARGCTKSAFSSFDCSSPLKNTPS

SEQ ID NO: 2586 - DNA, 5549 bp, Homo sapiens
aaaagggccagccctccagctggcccactccccctccgggctttcgcccgccctctctccctcccttttttgcccgccctggccctgcccctgcccctgccccctcctctcagcccctccgcgcccggggtgtcattgggcccgggagacgggagccaacttcaggctgctcagaggaagcccgtgcagtcagtcacctgggtgcaagagcgttgctgcctcgggctctcccgctgcagggagagcggcactcgctggcctggatgtggttggatttaggggggctccgcagcaggggtttcgtggcggtggcaagcgctgcaacaggtagacggcgagagacggaccccggccgaggcagcgatggagaccaaaggctaccacagtctccctgaaggtctagatatggaaagacggtggggtcaagtttctcaggctgtggagcgttcttccctgggacctacagagaggaccgatgagaataactacatggagattgtcaacgtaagctgtgtttccggtgctattccaaacaacagtactcaaggaagcagcaaagaaaaacaagaactactcccttgccttcagcaagacaataatcggcctgggattttaacatctgatattaaaactgagctggaatctaaggaactttcagcaactgtagctgagtccatgggtttatatatggattctgtaagagatgctgactattcctatgagcagcagaaccaacaaggaagcatgagtccagctaagatttatcagaatgttgaacagctggtgaaattttacaaaggaaatggccatcgtccttccactctaagttgtgtgaacacgcccttgagatcatttatgtctgactctgggagctccgtgaatggtggcgtcatgcgcgccgttgttaaaagccctatcatgtgtcatgagaaaagcccgtctgtttgcagccctctgaacatgacatcttcggtttgcagccctgctggaatcaactctgtgtcctccaccacagccagctttggcagttttccagtgcacagcccaatcacccagggaactcctctgacatgctcccctaatgttgaaaatcgaggctccaggtcgcacagccctgcacatgctagcaatgtgggctctcctctctcaagtccgttaagtagcatgaaatcctcaatttccagccctccaagtcactgcagtgtaaaatctccagtctccagtcccaataatgtcactctgagatcctctgtgtctagccctgcaaatattaacaactcaaggtgctctgtttccagcccttcgaacactaataacagatccacgctttccagtccggcagccagtactgtgggatctatctgtagccctgtaaacaatgccttcagctacactgcttctggcacctctgctggatccagtacattgcgggatgtggttcccagtccagacacgcaggagaaaggtgctcaagaggtcccttttcctaagactgaggaagtagagagtgccatctcaaatggtgtgactggccagcttaatattgtccagtacataaaaccagaaccagatggagcttttagcagctcatgtctaggaggaaatagcaaaataaattcggattcttcattctcagtaccaataaagcaagaatcaaccaagcattcatgttcaggcacctcttttaaagggaatccaacagtaaacccgtttccatttatggatggctcgtatttttcctttatggatgataaagactattattccctatcaggaattttaggaccacctgtgcccggctttgatggtaactgtgaaggcagcggattcccagtgggtattaaacaagaaccagatgatgggagctattacccagaggccagcatcccttcctctgctattgttggggtgaattcaggtggacagtccttccactacaggattggtgctcaaggtacaatatctttatcacgatcggctagagaccaatctttccaacacctgagttcctttcctcctgtcaatactttagtggagtcatggaaatcacacggcgacctgtcgtctagaagaagtgatgggtatccggtcttagaatacattccagaaaatgtatcaagctctactttacgaagtgtttctactggatcttcaagaccttcaaaaatatgtttggtgtgtggggatgaggcttcaggatgccattatggggtagtcacctgtggcagctgcaaagttttcttcaaaagagcagtggaagggcaacacaactatttatgtgctggaagaaatgattgcatcattgataagattcgacgaaagaattgtcctgcttgcagacttcagaaatgtcttcaagctggaatgaatttaggaggatttaaaaacttgcctcttgaggaccaaattaccctaatccagtattcttggatgtgtctatcatcatttgccttgagctggagatcgtacaaacatacgaacagccaatttctctattttgcaccagacctagtctttaatgaagagaagatgcatcagtctgccatgtatgaactatgccaggggatgcaccaaatcagccttcagttcgttcgactgcagctcacctttgaagaatacaccatcatgaaagttttgctgctactaagcacaattccaaaggatggcctcaaaagccaggctgcatttgaagaaatgaggacaaattacatcaaagaactgaggaagatggtaactaagtgtcccaacaattctgggcagagctggcagaggttctaccaactgaccaagctgctggactccatgcatgacctggtgagcgacctgctggaattctgcttctacaccttccgagagtcccatgcgctgaaggtagagttccccgcaatgctggtggagatcatcagcgaccagctgcccaaggtggagtcggggaacgccaagccgctctacttccaccggaagtgactgcccgctgcccagaagaactttgccttaagtttccctgtgttgttccacacccagaaggacccaagaaaacctgtttttaacatgtgatggttgattcacacttgttcaacagtttctcaagtttaaagtcatgtcagaggtttggagccgggaaagctgtttttccgtggatttggcgagaccagagcagtctgaaggattccccacctccaatcccccagcgcttagaaacatgttcctgttcctcgggatgaaaagccatatctagtcaataactctgattttgatattttcacagatggaagaagttttaactatgccgtgtagtttctggtatcgttcgcttgttttaaaagggttcaaggactaacgaacgttttaaagcttacccttggtttgcacataaaacgtatagtcaatatggggcattaatattcttttgttattaaaaaaacacaaaaaaataataaaaaaatatatacagattcctgttgtgtaataacagaactcgtggcgtggggcagcagctgcctctgagccctcgctcgtccacggtcttctgcatcactggtatacacactcgttagcgtccatttcttatttaattagaatggataagatgatgttaaatgccttggtttgatttctagtatctattgtgttggctttacaaataattttttgcagtcttttgctgtgctgtacattactgtatgtataaattatgaaggacctgaaataaggtataaggatcttttgtaaatgagacacatacaaaaaaaatctttaatggttaataggatgaatgggaaagtatttttgaaagaattctattttgctggagactatttaagtactatctttgtctaaacaaggtaatttttttttgtaaagtgcaatgtcctgcatgcataatgaaccgtttacagtgtatttaagaaagggaaagctgtgccttttttagcttcatatctaatttaccattattttacagtctctgttgtaaataaccacactgaaacctcttcggttgtcttgaaacctttctactttttctgtactttttgttttgttcttggtctcccgcttggggcatttgtgggactccagcacgttttctggcttctgcttcatcctgctccatcggggaatgacacactgcggtgtctgcagctcctggaaggtgtcatttgacaacacatgtgggagaggaggtccttggagtgctgcagctttgggaaagctgcctcgtttcccttttcctctagaagcagaaccagctctacgagagtgagactgggaacttgatggctcagagagcatcttttcctcccattttagaaaatcagattttctcctgtgggaaaaaaaaattccatgcactctctctctgttaaagatcagctattcccttctgatcttggaaagaggttctgcactcctggaaccggtcacaggaacgcacagatcatggcaggatgcgctgggacggcccatcttggcaaggttcagtctgaatggcatggagaccgggagatagaggggttttagatttttaaaaggtaggttttaaaaataagttttatacataaacagttttggagaaaaattacagatcatataagcaagacagtggcactaaaatgtttaattcattaatctgtttgtttggcactgatgcaatgtatggcttttctcttgccccaaatcacaaacatatgtatctttggggaaactaacaatatgattgcactaaataaactactttgaatagaggccaaattaatcttttaaaaatgatgataatcatcaggtttactcagtgaaatcatattaattattttccaaaatctaaaagctgtagctggagaagcccatggccacgaggaagcagcaattaattagatcaacacttttctccagggttcaccatgcaggcaacattaccttgtctttcaaaagacacctgccttatgcaaggggaaacctgtgaaagctgcactcagagggaggagtttttcttacataatttgcaatttcaggaatttaatttataggcagatctttaaatacagtcaacttacggtgcacagtaatatgaaagccacactttgaaggtaataaatacacagcatgcagactgggagttgctagcaaacaaatggcttacttacaaaagcagcttttagttcagacttagtttttataaaatgggaattctgacttacttaaccaggtttgggatggagatggtctgcatcagctttttgtattaacaaagttactggctctttgtgtgtctccaggtaactttgcttgattaaacagcaaagccatattctaaattcactgttgaatgcctgtcccagtccaaattgtctgtctgctcttatttttgtaccatattgctcttaaaaatcttggtttggtacagttcataattcaccaaaagttcatataatttaaagaaacactaaattagtttaaaatgaagcaatttatatctttatgcaaaaacatatgtctgtctttgcaaaggactgtaagcagattacaataaatcctttactttaatcacc

SEQ ID NO: 2587 - protein, 867 aa, Homo sapiens
METKGYHSLPEGLDMERRWGQVSQAVERSSLGPTERTDENNYMEIVNVSCVSGAIPNNSTQGSSKEKQELLPCLQQDNNRPGILTSDIKTELESKELSATVAESMGLYMDSVRDADYSYEQQNQQGSMSPAKIYQNVEQLVKFYKGNGHRPSTLSCVNTPLRSFMSDSGSSVNGGVMRAVVKSPIMCHEKSPSVCSPLNMTSSVCSPAGINSVSSTTASFGSFPVHSPITQGTPLTCSPNVENRGSRSHSPAHASNVGSPLSSPLSSMKSSISSPPSHCSVKSPVSSPNNVTLRSSVSSPANINNSRCSVSSPSNTNNRSTLSSPAASTVGSICSPVNNAFSYTASGTSAGSSTLRDVVPSPDTQEKGAQEVPFPKTEEVESAISNGVTGQLNIVQYIKPEPDGAFSSSCLGGNSKINSDSSFSVPIKQESTKHSCSGTSFKGNPTVNPFPFMDGSYFSFMDDKDYYSLSGILGPPVPGFDGNCEGSGFPVGIKQEPDDGSYYPEASIPSSAIVGVNSGGQSFHYRIGAQGTISLSRSARDQSFQHLSSFPPVNTLVESWKSHGDLSSRRSDGYPVLEYIPENVSSSTLRSVSTGSSRPSKICLVCGDEASGCHYGVVTCGSCKVFFKRAVEGQHNYLCAGRNDCIIDKIRRKNCPACRLQKCLQAGMNLGGFKNLPLEDQITLIQYSWMCLSSFALSWRSYKHTNSQFLYFAPDLVFNEEKMHQSAMYELCQGMHQISLQFVRLQLTFEEYTIMKVLLLLSTIPKDGLKSQAAFEEMRTNYIKELRKMVTKCPNNSGQSWQRFYQLTKLLDSMHDLVSDLLEFCFYTFRESHALKVEFPAMLVEIISDQLPKVESGNAKPLYFHRK

SEQ ID NO: 2588 - DNA, 5900 bp, Homo sapiens
aaaagggccagccctccagctggcccactccccctccgggctttcgcccgccctctctccctcccttttttgcccgccctggccctgcccctgcccctgccccctcctctcagcccctccgcgcccggggtgtcattgggcccgggagacgggagccaacttcaggctgctcagaggaagcccgtgcagtcagtcacctgggtgcaagagcgttgctgcctcgggctctcccgctgcagggagagcggcactcgctggcctggatgtggttggatttaggggggctccgcagcaggggtttcgtggcggtggcaagcgctgcaacaggtagacggcgagagacggaccccggccgaggcagcgatggagaccaaaggctaccacagtctccctgaaggtctagatatggaaagacggtggggtcaagtttctcaggctgtggagcgttcttccctgggacctacagagaggaccgatgagaataactacatggagattgtcaacgtaagctgtgtttccggtgctattccaaacaacagtactcaaggaagcagcaaagaaaaacaagaactactcccttgccttcagcaagacaataatcggcctgggattttaacatctgatattaaaactgagctggaatctaaggaactttcagcaactgtagctgagtccatgggtttatatatggattctgtaagagatgctgactattcctatgagcagcagaaccaacaaggaagcatgagtccagctaagatttatcagaatgttgaacagctggtgaaattttacaaaggaaatggccatcgtccttccactctaagttgtgtgaacacgcccttgagatcatttatgtctgactctgggagctccgtgaatggtggcgtcatgcgcgccgttgttaaaagccctatcatgtgtcatgagaaaagcccgtctgtttgcagccctctgaacatgacatcttcggtttgcagccctgctggaatcaactctgtgtcctccaccacagccagctttggcagttttccagtgcacagcccaatcacccagggaactcctctgacatgctcccctaatgttgaaaatcgaggctccaggtcgcacagccctgcacatgctagcaatgtgggctctcctctctcaagtccgttaagtagcatgaaatcctcaatttccagccctccaagtcactgcagtgtaaaatctccagtctccagtcccaataatgtcactctgagatcctctgtgtctagccctgcaaatattaacaactcaaggtgctctgtttccagcccttcgaacactaataacagatccacgctttccagtccggcagccagtactgtgggatctatctgtagccctgtaaacaatgccttcagctacactgcttctggcacctctgctggatccagtacattgcgggatgtggttcccagtccagacacgcaggagaaaggtgctcaagaggtcccttttcctaagactgaggaagtagagagtgccatctcaaatggtgtgactggccagcttaatattgtccagtacataaaaccagaaccagatggagcttttagcagctcatgtctaggaggaaatagcaaaataaattcggattcttcattctcagtaccaataaagcaagaatcaaccaagcattcatgttcaggcacctcttttaaagggaatccaacagtaaacccgtttccatttatggatggctcgtatttttcctttatggatgataaagactattattccctatcaggaattttaggaccacctgtgcccggctttgatggtaactgtgaaggcagcggattcccagtgggtattaaacaagaaccagatgatgggagctattacccagaggccagcatcccttcctctgctattgttggggtgaattcaggtggacagtccttccactacaggattggtgctcaaggtacaatatctttatcacgatcggctagagaccaatctttccaacacctgagttcctttcctcctgtcaatactttagtggagtcatggaaatcacacggcgacctgtcgtctagaagaagtgatgggtatccggtcttagaatacattccagaaaatgtatcaagctctactttacgaagtgtttctactggatcttcaagaccttcaaaaatatgtttggtgtgtggggatgaggcttcaggatgccattatggggtagtcacctgtggcagctgcaaagttttcttcaaaagagcagtggaagggcaacacaactatttatgtgctggaagaaatgattgcatcattgataagattcgacgaaagaattgtcctgcttgcagacttcagaaatgtcttcaagctggaatgaatttaggagcacgaaagtcaaagaagttgggaaagttaaaagggattcacgaggagcagccacagcagcagcagcccccacccccacccccacccccgcaaagcccagaggaagggacaacgtacatcgctcctgcaaaagaaccctcggtcaacacagcactggttcctcagctctccacaatctcacgagcgctcacaccttcccccgttatggtccttgaaaacattgaacctgaaattgtatatgcaggctatgacagctcaaaaccagatacagccgaaaatctgctctccacgctcaaccgcttagcaggcaaacagatgatccaagtcgtgaagtgggcaaaggtacttccaggatttaaaaacttgcctcttgaggaccaaattaccctaatccagtattcttggatgtgtctatcatcatttgccttgagctggagatcgtacaaacatacgaacagccaatttctctattttgcaccagacctagtctttaatgaagagaagatgcatcagtctgccatgtatgaactatgccaggggatgcaccaaatcagccttcagttcgttcgactgcagctcacctttgaagaatacaccatcatgaaagttttgctgctactaagcacaattccaaaggatggcctcaaaagccaggctgcatttgaagaaatgaggacaaattacatcaaagaactgaggaagatggtaactaagtgtcccaacaattctgggcagagctggcagaggttctaccaactgaccaagctgctggactccatgcatgacctggtgagcgacctgctggaattctgcttctacaccttccgagagtcccatgcgctgaaggtagagttccccgcaatgctggtggagatcatcagcgaccagctgcccaaggtggagtcggggaacgccaagccgctctacttccaccggaagtgactgcccgctgcccagaagaactttgccttaagtttccctgtgttgttccacacccagaaggacccaagaaaacctgtttttaacatgtgatggttgattcacacttgttcaacagtttctcaagtttaaagtcatgtcagaggtttggagccgggaaagctgtttttccgtggatttggcgagaccagagcagtctgaaggattccccacctccaatcccccagcgcttagaaacatgttcctgttcctcgggatgaaaagccatatctagtcaataactctgattttgatattttcacagatggaagaagttttaactatgccgtgtagtttctggtatcgttcgcttgttttaaaagggttcaaggactaacgaacgttttaaagcttacccttggtttgcacataaaacgtatagtcaatatggggcattaatattcttttgttattaaaaaaacacaaaaaaataataaaaaaatatatacagattcctgttgtgtaataacagaactcgtggcgtggggcagcagctgcctctgagccctcgctcgtccacggtcttctgcatcactggtatacacactcgttagcgtccatttcttatttaattagaatggataagatgatgttaaatgccttggtttgatttctagtatctattgtgttggctttacaaataattttttgcagtcttttgctgtgctgtacattactgtatgtataaattatgaaggacctgaaataaggtataaggatcttttgtaaatgagacacatacaaaaaaaatctttaatggttaataggatgaatgggaaagtatttttgaaagaattctattttgctggagactatttaagtactatctttgtctaaacaaggtaatttttttttgtaaagtgcaatgtcctgcatgcataatgaaccgtttacagtgtatttaagaaagggaaagctgtgccttttttagcttcatatctaatttaccattattttacagtctctgttgtaaataaccacactgaaacctcttcggttgtcttgaaacctttctactttttctgtactttttgttttgttcttggtctcccgcttggggcatttgtgggactccagcacgttttctggcttctgcttcatcctgctccatcggggaatgacacactgcggtgtctgcagctcctggaaggtgtcatttgacaacacatgtgggagaggaggtccttggagtgctgcagctttgggaaagctgcctcgtttcccttttcctctagaagcagaaccagctctacgagagtgagactgggaacttgatggctcagagagcatcttttcctcccattttagaaaatcagattttctcctgtgggaaaaaaaaattccatgcactctctctctgttaaagatcagctattcccttctgatcttggaaagaggttctgcactcctggaaccggtcacaggaacgcacagatcatggcaggatgcgctgggacggcccatcttggcaaggttcagtctgaatggcatggagaccgggagatagaggggttttagatttttaaaaggtaggttttaaaaataagttttatacataaacagttttggagaaaaattacagatcatataagcaagacagtggcactaaaatgtttaattcattaatctgtttgtttggcactgatgcaatgtatggcttttctcttgccccaaatcacaaacatatgtatctttggggaaactaacaatatgattgcactaaataaactactttgaatagaggccaaattaatcttttaaaaatgatgataatcatcaggtttactcagtgaaatcatattaattattttccaaaatctaaaagctgtagctggagaagcccatggccacgaggaagcagcaattaattagatcaacacttttctccagggttcaccatgcaggcaacattaccttgtctttcaaaagacacctgccttatgcaaggggaaacctgtgaaagctgcactcagagggaggagtttttcttacataatttgcaatttcaggaatttaatttataggcagatctttaaatacagtcaacttacggtgcacagtaatatgaaagccacactttgaaggtaataaatacacagcatgcagactgggagttgctagcaaacaaatggcttacttacaaaagcagcttttagttcagacttagtttttataaaatgggaattctgacttacttaaccaggtttgggatggagatggtctgcatcagctttttgtattaacaaagttactggctctttgtgtgtctccaggtaactttgcttgattaaacagcaaagccatattctaaattcactgttgaatgcctgtcccagtccaaattgtctgtctgctcttatttttgtaccatattgctcttaaaaatcttggtttggtacagttcataattcaccaaaagttcatataatttaaagaaacactaaattagtttaaaatgaagcaatttatatctttatgcaaaaacatatgtctgtctttgcaaaggactgtaagcagattacaataaatcctttactttaatcacc

SEQ ID NO: 2589 - protein, 984 aa, Homo sapiens; identical to SEQ ID NO: 250

SEQ ID NO: 2590 - DNA, 3272 bp, Homo sapiens
aaaagggccagccctccagctggcccactccccctccgggctttcgcccgccctctctccctcccttttttgcccgccctggccctgcccctgcccctgccccctcctctcagcccctccgcgcccggggtgtcattgggcccgggagacgggagccaacttcaggctgctcagaggaagcccgtgcagtcagtcacctgggtgcaagagcgttgctgcctcgggctctcccgctgcagggagagcggcactcgctggcctggatgtggttggatttaggggggctccgcagcaggggtttcgtggcggtggcaagcgctgcaacaggtagacggcgagagacggaccccggccgaggcagcgatggagaccaaaggctaccacagtctccctgaaggtctagatatggaaagacggtggggtcaagtttctcaggctgtggagcgttcttccctgggacctacagagaggaccgatgagaataactacatggagattgtcaacgtaagctgtgtttccggtgctattccaaacaacagtactcaaggaagcagcaaagaaaaacaagaactactcccttgccttcagcaagacaataatcggcctgggattttaacatctgatattaaaactgagctggaatctaaggaactttcagcaactgtagctgagtccatgggtttatatatggattctgtaagagatgctgactattcctatgagcagcagaaccaacaaggaagcatgagtccagctaagatttatcagaatgttgaacagctggtgaaattttacaaaggaaatggccatcgtccttccactctaagttgtgtgaacacgcccttgagatcatttatgtctgactctgggagctccgtgaatggtggcgtcatgcgcgccgttgttaaaagccctatcatgtgtcatgagaaaagcccgtctgtttgcagccctctgaacatgacatcttcggtttgcagccctgctggaatcaactctgtgtcctccaccacagccagctttggcagttttccagtgcacagcccaatcacccagggaactcctctgacatgctcccctaatgttgaaaatcgaggctccaggtcgcacagccctgcacatgctagcaatgtgggctctcctctctcaagtccgttaagtagcatgaaatcctcaatttccagccctccaagtcactgcagtgtaaaatctccagtctccagtcccaataatgtcactctgagatcctctgtgtctagccctgcaaatattaacaactcaaggtgctctgtttccagcccttcgaacactaataacagatccacgctttccagtccggcagccagtactgtgggatctatctgtagccctgtaaacaatgccttcagctacactgcttctggcacctctgctggatccagtacattgcgggatgtggttcccagtccagacacgcaggagaaaggtgctcaagaggtcccttttcctaagactgaggaagtagagagtgccatctcaaatggtgtgactggccagcttaatattgtccagtacataaaaccagaaccagatggagcttttagcagctcatgtctaggaggaaatagcaaaataaattcggattcttcattctcagtaccaataaagcaagaatcaaccaagcattcatgttcaggcacctcttttaaagggaatccaacagtaaacccgtttccatttatggatggctcgtatttttcctttatggatgataaagactattattccctatcaggaattttaggaccacctgtgcccggctttgatggtaactgtgaaggcagcggattcccagtgggtattaaacaagaaccagatgatgggagctattacccagaggccagcatcccttcctctgctattgttggggtgaattcaggtggacagtccttccactacaggattggtgctcaaggtacaatatctttatcacgatcggctagagaccaatctttccaacacctgagttcctttcctcctgtcaatactttagtggagtcatggaaatcacacggcgacctgtcgtctagaagaagtgatgggtatccggtcttagaatacattccagaaaatgtatcaagctctactttacgaagtgtttctactggatcttcaagaccttcaaaaatatgtttggtgtgtggggatgaggcttcaggatgccattatggggtagtcacctgtggcagctgcaaagttttcttcaaaagagcagtggaagggcaacacaactatttatgtgctggaagaaatgattgcatcattgataagattcgacgaaagaattgtcctgcttgcagacttcagaaatgtcttcaagctggaatgaatttaggagagagaagatgcatcagtctgccatgtatgaactatgccaggggatgcaccaaatcagccttcagttcgttcgactgcagctcacctttgaagaatacaccatcatgaaagttttgctgctactaagcacaattccaaaggatggcctcaaaagccaggctgcatttgaagaaatgaggacaaattacatcaaagaactgaggaagatggtaactaagtgtcccaacaattctgggcagagctggcagaggttctaccaactgaccaagctgctggactccatgcatgacctggtgagcgacctgctggaattctgcttctacaccttccgagagtcccatgcgctgaaggtagagttccccgcaatgctggtggagatcatcagcgaccagctgcccaaggtggagtcggggaacgccaagccgctctacttccaccggaagtgactgcccgctgcccagaagaactttgccttaagtttccctgtgttgttccacacccagaaggacccaagaaaacctgtttttaacatgtgatggttgattcacacttgttcaacagtttctcaagtttaaagtcatgtcagaggtttggagccgggaaagctgtttttccgtggatttggcgagaccagagcagtctgaaggattccccacctccaatcccccagcgcttagaaacatgttcctgttcctcgggatgaaaagccatatctagtcaataactctgattttgatattttcacagatggaagaagttttaactatgccgtgtagtttctggtatcgttcgcttgttttaaaagggttcaaggactaacgaacgttttaaagcttacccttggtttgcacataaaacgtatagtcaatatggggcattaatattcttttgttatt

SEQ ID NO: 2591 - protein, 706 aa, Homo sapiens; identical to SEQ ID NO: 2585

SEQ ID NO: 2592 - DNA, 669 bp, Homo sapiens
ggcccggggagaactctcactgaggacaactggacagcgccagcacactgacccagcgactggggacacaaagaaacagattatggttgacactgtggggacctgaaaccaaggagcatgaaaccactgacaaacggggaactactgtacacttaaaatgcctagaaccatgtgtggaacacaactggcgctcaacaaactttctactcttccccaaggtcacagcccttgagatcaggaagcaccttagtgcaatggcagagcactgttccgggagcagatggcttggttcctgtctggtttcaccactcactgactgtgagagctacagttagccacaccaagctctacccagtcccaagactggggctctgacacctgcctttcttgagagcctacctgctgagatttctaaatgcagtctcctcctacacccaaagactctcatgatgtcctactcagaccaccagcagtttctgcactctgccttctgggctggacttccttgtgacacctgtacccatactccagatattatcccaccttggtctgattcatatcctaggcctttccagtttgtcccattattaccttaatttccaaagaaatatttcctgtcaccatttcttgtatatagaaggaaaataataataaaataatacaatagag

SEQ ID NO: 2593 - protein, 49 aa, Homo sapiens
MMSYSDHQQFLHSAFWAGLPCDTCTHTPDIIPPWSDSYPRPFQFVPLLP

SEQ ID NO: 2594 - DNA, 8912 bp, Homo sapiens
atgagactggatgagataacgaaatcagagaatgaagacggagaaaagaagatgtttactcagcagtttgaaagtactgatgcctgtgtatatgaggtgtatgtgaaaataaattccattgtgaaatctcagagtcagtgtggattgaaaagaggtagtcccgagactgagctctggggtgctatagtgttcagaagccaggaagagaacgcaaaaccagtgaaggaaactgaggtgacagcctctgatgcagattcaggactctatggctttattgaatattctctttatgatggattcctgagctatgaagcacctcaggcattccggatcgaccctcatgatgggcaaatctgtgtttctcaagatatcgacagggaaagggatccagctacctatgatctcctggtggaagctaaggatggggatgagcagagaatgacacatttagccctggtgaagggtgggctaagtgcccaagcctttgttcgtgtggacctggaggacgtgaatgataatcatcctgtgtttaacccatcaacctatgtgacgagcatcagtgatgagacccagccaggcaccgagatcatcaatgttcttgccactgaccaggactctgggatatatgggacagtggcttatgagcttattccaggaaacgtgtcgtccctttttaccattgactccaccacaggactctatagtccagaggtagaaattctgagtgctgtcaacttttcagcagacaaggaagtaatgaacagtttagagatgtttttacctctgctaaggcacttcaagaaggttgaaagagatgaggaagctgcagaaaaaaaatttgaagctagcagaggttggttcatgaggtttaagggaagacgccatctccattacctaaaagtgcaagatgaagcagcaagtgctgatggagaagctgcagcaaggtatgtagcaaatctagctaagattcttggtgaaggaattatttacttaacattacctcttagtcatttggaatctaccacactttcgttgatggtctctgctcaagacggtggtgggctcacagctgtcattaatgccgatgtcaccatacacattttccagacaactctggcacctgctgagtttgaaaggcctaagtacactttcttagtttatgaagatgtgcctgaagatagtcccattggaacagtgaaagcaagagagcccttgaactcctcagaaccaatcttttacaggatttcttctggtgatctcggcggaaagttctccattcacccgcggctgggcactattcgcacccggaagcccctggatcacgagacgcagcccgtggttgtgctcacggtgcaggcgcagctcggcagcgccccagcctgcagcagcaccgaggtcaacataacagtcatggatgtcaatgacaaccacccagcgttcctcaggacctcggatgagattagaatatcccagaccacgccccctggcacagccttgtacctcgcacgtgcggaagacagagacagtgggcggaacggactcatccggtactccatcgccagcccgcagccaggcgtctttgccatcgacagagccctgggggtgctgttcctcaacggcagcctgggcgcgggcgagcagcgggagctcacgctgactctcagggccgaggaccaaggcgtgcatcctcaggcagccctgctggtgctgacagtcgttatcgagaaacgcgaacacagcccatcctggactttcgaacatttggtctatcaagtggaagtcagtgagtctctctcaccgatgacacaaatgctgcaaacacaggcgcacccacttggcccccagcgtgcagcctcgcctcttaggtactcgctggaacccagcgtagactctgctatgtttggaatccgcccttacacgggctggatttatttgcggcgacagtttgactatgaatccacccaaacatataattttagagtgtttgcttggatccccgaggacggattcttgcaaaatgtgagcactacagtcattgttcgtgtctgggatgagaatgacaattcccccaccttcttgcatgatgtgttgtttttgaaagtcgaagagagccctgttccccaaggggtaataggcaaaattacagctattgacatggactctggaaagaatggacagctattatatttccttttgtctgatggaaaattcttcaagatgaatcctaatacaggtccagcaggcaccatctatgtcataacctgggcagatggtgctgctgcctttagtgggacagactttgcattcagttctgatgaacttcaagcctttgttctcaagtctctgttctgtgaattaggagaaggagagttaatcaattgggtggcactggatcgtgagcaccgggggcaccatgagatgactgtgctagtgacagaccgcggctccccaccacgaaacgccaccatggcggtttacgtctcagttactgacatcaatgataacaggcccttcttcccccagtgtctccctggaaaggagttacacgtgaaggttctggaaggtcaaccagtaaatatgttggttacaactgtgtttgcaaaggatcctgatgaaggaaataatgcagaagttacatactcagtatcttcagaagatagttctgatcactttaagattgacgccaacaatggtgaaataagaacaaccacaatactttcgtatgattatagaccttcctacagaatgagtgtcattgccactgaccagggagtgcctcctcttcaaggacaggcagttgttaatattcaggtgatcccactatccaaagggagagcaatcatgtctcagaatattagacatttaattataccagaaaatttgaagcccacaaaaataatgagcttgataaagtcatctgatcaccttcaacaacattataatggaaagttacattttagtattgttgcagatgataaggatggacactttgaaatagacagctcaaccggagacttgtttctttctaaggaacttgattatgagacgacatctcattatcttttcagagtgattactacagaccatagcaaaaacctttccctgagtagcacagtcttccttagtatcgatgtggaagatcagaatgaccattccccatctttccaggatgagctcattgtgatcagtgtagaggagaatgttcccataggaaccctggtgtatgtcttcaatgccaaagatgatgacggcagttttttgaacagtagaatacaatactacattgaatcccacaaccctggcacgaatccatttctcatccacccctcatttggcacactagtcactgtgtcccgtcttgacagagaaagcattccaactgtcatcctgacagtaacagcatctgatcaggctgtgaatgtgacagaccggcgactgagatcactgacagcacaaatagtgattttggatgtaaatgaccacaaccccacttttatttctttccccaatgcccatgtcaaagaggatgtcacagtgggctccttggtccaccacataactgctcacgatccagacgaaggaaggaatggaaaagtaacatacagcatcctctcaggaaatgaaaacatgacgtttatgctagatgagtcatcaggcttactaaccacaacctgtcctttggattatgaaatgaaaactcagcatattctgactgttctggcactggatgatggcacaccagcactttcttcatcccagactttgacagttactgttcttgatgtaaatgatgaagctccagtatttaagcagcacctgtatgaagcctcagtgaaagaaaaccaaaatccaggggagtttgttaccagggttgaagctctggacagagattcaggagtcaattccaagcttcagtttgaaatcatgccaggtgcttcatttgaattattcgagataaattctgacactggagaggtagtgacaaccaccatacttgacagagaaattcaagaagtcttcacccttcgagtactagtacgagatgggggattcccttcattgtccagcaccacaacaatcctctgcactgttgaagatgaaaacgatcacgcaccagagtttattgtttccagttatgacattgaggttctggaaaaccaggaaccagaggttgtctatacggttttagcctctgatatggatgctggcaataacagagctgttgaatatcacataattgatggaaatactgatgagtgctttactataaatgagatgtcaggagaactctcaaccactcgtgctttggaccgggagcaaatcagcaattttacccttgtcattctgtgctctgacctgggagatccacctaggagctctgtaatacacctgcaagttagagttttggatgccaatgaccacagtccttcttttcccacactttattaccagtcctctgtgagagaagatgctgaagtgggaacagtggttcttgtgctttcagctgtggacaaggatgaaggcctgaatgggcaaactgagtattttctgactgatgaggcttctggtgcattcaccattgatcctatgtcaggcacattgaaaaccagcaacaccctcgaccgtgaagccagatctcagcatacatttagtgctgtggccagagactgtagcatccagggttcacgaagcaccactgtaattataaaagtatatgtcactgatgttaatgacaatgatccagttttggaacagaacccttttgatgtgtttctttcccccgagtcgcctacaaaccagacaactgtcattgtgagagctgatgacctggacttggggcccaatggaactgtggtttttagttttgcagagacccagtcaatgttttctattgataaatacacaggagaaattcaatttcagcaaaatccatcttcagaatacttccctatctggctgcagttaaaagttacagaccagggcattccagccaggacaaccacgggtctcttggtcattcacatggaaggagaagatgtaaagatttccttcagccaccacctgtataaagggctcgtgactgaaaattgtgaggcaggtacttctattgtgactgttaaagcttttgctcctgactcaattcaggacagcatgaaatattcaatttttagtggaaatgaagatggagttctttccctgtgctctaagtcaggacaactcactgtgaaagaacccaagtttcttgattttgaagtcagaaatgaggttcaactcatcgttttagctgaaagtagtgggcatagagcctattgcaaagtagcagtcttgatacaggatgagaatgataattcaccatgctttgaacaaagcatttaccaggcatcagtgtctgaaagccaactctacaatgctcatgtcatacaggtttttgctaccgacttggacagtggtttgaacggcctgattgagtattctattctgtctggcaaccaagaagaagcattccagattgatgcactgagtggtgtgataacaacaaaagcgattctagattacgagctcaccagctcctacagcttgattgtccaagccacagataaagggatgcccaggctttctaatacgactgtaatcaaggtacaggtgactgatataaatgacaatgccccagcttttctcccctctgaagcagtggaaattacagaagattctttgcctggtgtaattgtgactcatgtgtcagttcatgatgtggatttgaattcagctttcatattcagttttgccaaagagagtaatcctggaaccaagtttgctattgatcagaacactggagtggtggtgttggtgaaaacattggattttgaagaaatgactgaatatgagctgctcatccaaatttctgattcagtgcactacacagagggagcacttgtagtccgtgtgctggatgtcaatgataatccaccagtgttttctcaagatttctatcaggtcacagttcctgaatcaatacctgtggggtattcagtgctgactctgtcagccacagacttagaaagcaatgagaacatttcttacagaattctatcctcttctaaggaattctccattgatcctaagaatggcacaatatttactatcagtcccgtattacttctggatacaatatcaacaactcaatttcttgtggaagccagtgatggtggaaatcctgacctgagagctcttactttagtggagataggaatagaagatatgaacaattatgcccctgaattcacagtcaaatcctataatcttagcctaagtgaggatgctctggttggaagcacgcttgttacattttcaaacatcgaccatgactggacccgtgaaaacacatatgttgaatattccatcatcagtggtaattcacagaacaattttcatgtggaaactaagttctttcattcagaatatccttataagcaagtcggttatcttgtgttgcttcacagtctggacagagaagcaagtgctagccatgagcttgtcattctggcatctgacagtggctgccctccattgagttccacagctgtcatatcaatacaagtacttgatgtcaatgacaatcccccaaacttcagcagcctgagctatcacacccatgtcaaggaaagcacccctctagggagtcacatcactgtggtctcagcaaatgaccgtgacacagggtcacatgcagaaatcatctacaacatcatctctggaaatgagaagggacatttttacttagaagaaaacactggagttctttatttgattaaacctctggattatgaaaaaatgacaaaattcaccttaactgtccaagcttcagatgcagaaaagaaacatttttcttttgcagttgtgtttgtcagtgtcctggatgataacgaccatgcacctcagtttatgttctcaagcttcagctgtattgttccagaaaatctgcctatttcctctaccatatgctctataaatgctctggattttgatgctggtccgtatggagaattgacctattctattgtatcaccctgttttctcactcatggaatgtcttatgatcatgatctcttcctcattgaccctttgacaggggatattcatgctaagcaaatccttgactatgaaaatggcaataaatactgcctcacagtccaagccaaagacaaaggtgatgcaactgcctccttagtggtctgggtggatattgaagggatagatgaatttgagcccattttcactcaagatcagtattttttcaccctcccagaaaagaataaagacagacagttgattggcagagtggaagcctcagatgcagatgctggtattgatggagtcattctttactcccttggaacctcatctcctttcttttcagtaaataaaaccaatggaaatatttatttgattagagcccttcccctaataaaaagtcaactcaacaaagaagacaccttggaaatgaaaataatcgctcatagtcccaaatcagattccaagtttgcatcttgcactgtttttgtgaatgtgtctttctcctctgaaggaacacccttggcagtgttcgccagcagcttttcaatcagcctggtggtctcctttttagtgtttctgatactcatctgcattctaattgtaatgattttaagacataaacaaaaagacacaataaacaattatgaggagaagaaaacctcatctttagatgcggacttgagagtgacccgggatgccagtgtgctcaaagccttccagaaaactgacgactgcagtaacgaggtggtccctgtggatgccactccggaatggttgagtttaataagtatcatggagaaggatattgtcaatctgtacagacactcaaactccagtggccactgttctgtggaaggagaaactgcagaagataaggaaatccagaggataaatgagcatccctacagaaagtgctcagactcagctctgagtgaccacgagtccagggtgccagactcgggtatcccgagggactcagaccagctctcctgcctatctggggaaactgatgtgatggtgactgccgaaacagcagaagccagccaaacatttggggaaggagatcaaggggaaggctgcagcaccacctgtgctcaaaataatgtgttaccccagacagttcagaagagagaggcaaaagagagcatcctggctgacgttagaaaagagtctgtctttatttcaggtgatcaggaagtaaggtgtgcagctctttcaactcagacgacctctgatcatgatggaaaagacaactatcactggaattatcttcttagttgggagcccaaattccaacctcttgcctcagtatttaatgatattgcaaaactaaaggatgaacatttgcatatgcctggcattccaaaagagaagaaatcttttgtttttccaccccctttgataacagcagtagcccagcctgggattaaagcagtcccaccaagaatgccggcagtaaacctggggcaggtgcctccgaaacacccacgctctcccatcccctaccatcttggttctctgccagaaggcatgactcccaatttttctccatctctttccctattgacgatgcagcctcctgccttgtctccactgttgagagaaggagaattattaggaacacacatcagtggtacatgccatgaacttaaagcagaagatgaagttcaaatatgaaaccactgggatgccaagtacctgctcaccattggtcatgaatgaatgaacaaaatgttttcaagccagcaactcgagattgggctcatttttatctaaaagcaagtgatgtaatttagttagagtttttaaaacttccccattaaagtttctccaatttc

SEQ ID NO: 2595 - protein, 2916 aa, Homo sapiens
MRLDEITKSENEDGEKKMFTQQFESTDACVYEVYVKINSIVKSQSQCGLKRGSPETELWGAIVFRSQEENAKPVKETEVTASDADSGLYGFIEYSLYDGFLSYEAPQAFRIDPHDGQICVSQDIDRERDPATYDLLVEAKDGDEQRMTHLALVKGGLSAQAFVRVDLEDVNDNHPVFNPSTYVTSISDETQPGTEIINVLATDQDSGIYGTVAYELIPGNVSSLFTIDSTTGLYSPEVEILSAVNFSADKEVMNSLEMFLPLLRHFKKVERDEEAAEKKFEASRGWFMRFKGRRHLHYLKVQDEAASADGEAAARYVANLAKILGEGIIYLTLPLSHLESTTLSLMVSAQDGGGLTAVINADVTIHIFQTTLAPAEFERPKYTFLVYEDVPEDSPIGTVKAREPLNSSEPIFYRISSGDLGGKFSIHPRLGTIRTRKPLDHETQPVVVLTVQAQLGSAPACSSTEVNITVMDVNDNHPAFLRTSDEIRISQTTPPGTALYLARAEDRDSGRNGLIRYSIASPQPGVFAIDRALGVLFLNGSLGAGEQRELTLTLRAEDQGVHPQAALLVLTVVIEKREHSPSWTFEHLVYQVEVSESLSPMTQMLQTQAHPLGPQRAASPLRYSLEPSVDSAMFGIRPYTGWIYLRRQFDYESTQTYNFRVFAWIPEDGFLQNVSTTVIVRVWDENDNSPTFLHDVLFLKVEESPVPQGVIGKITAIDMDSGKNGQLLYFLLSDGKFFKMNPNTGPAGTIYVITWADGAAAFSGTDFAFSSDELQAFVLKSLFCELGEGELINWVALDREHRGHHEMTVLVTDRGSPPRNATMAVYVSVTDINDNRPFFPQCLPGKELHVKVLEGQPVNMLVTTVFAKDPDEGNNAEVTYSVSSEDSSDHFKIDANNGEIRTTTILSYDYRPSYRMSVIATDQGVPPLQGQAVVNIQVIPLSKGRAIMSQNIRHLIIPENLKPTKIMSLIKSSDHLQQHYNGKLHFSIVADDKDGHFEIDSSTGDLFLSKELDYETTSHYLFRVITTDHSKNLSLSSTVFLSIDVEDQNDHSPSFQDELIVISVEENVPIGTLVYVFNAKDDDGSFLNSRIQYYIESHNPGTNPFLIHPSFGTLVTVSRLDRESIPTVILTVTASDQAVNVTDRRLRSLTAQIVILDVNDHNPTFISFPNAHVKEDVTVGSLVHHITAHDPDEGRNGKVTYSILSGNENMTFMLDESSGLLTTTCPLDYEMKTQHILTVLALDDGTPALSSSQTLTVTVLDVNDEAPVFKQHLYEASVKENQNPGEFVTRVEALDRDSGVNSKLQFEIMPGASFELFEINSDTGEVVTTTILDREIQEVFTLRVLVRDGGFPSLSSTTTILCTVEDENDHAPEFIVSSYDIEVLENQEPEVVYTVLASDMDAGNNRAVEYHIIDGNTDECFTINEMSGELSTTRALDREQISNFTLVILCSDLGDPPRSSVIHLQVRVLDANDHSPSFPTLYYQSSVREDAEVGTVVLVLSAVDKDEGLNGQTEYFLTDEASGAFTIDPMSGTLKTSNTLDREARSQHTFSAVARDCSIQGSRSTTVIIKVYVTDVNDNDPVLEQNPFDVFLSPESPTNQTTVIVRADDLDLGPNGTVVFSFAETQSMFSIDKYTGEIQFQQNPSSEYFPIWLQLKVTDQGIPARTTTGLLVIHMEGEDVKISFSHHLYKGLVTENCEAGTSIVTVKAFAPDSIQDSMKYSIFSGNEDGVLSLCSKSGQLTVKEPKFLDFEVRNEVQLIVLAESSGHRAYCKVAVLIQDENDNSPCFEQSIYQASVSESQLYNAHVIQVFATDLDSGLNGLIEYSILSGNQEEAFQIDALSGVITTKAILDYELTSSYSLIVQATDKGMPRLSNTTVIKVQVTDINDNAPAFLPSEAVEITEDSLPGVIVTHVSVHDVDLNSAFIFSFAKESNPGTKFAIDQNTGVVVLVKTLDFEEMTEYELLIQISDSVHYTEGALVVRVLDVNDNPPVFSQDFYQVTVPESIPVGYSVLTLSATDLESNENISYRILSSSKEFSIDPKNGTIFTISPVLLLDTISTTQFLVEASDGGNPDLRALTLVEIGIEDMNNYAPEFTVKSYNLSLSEDALVGSTLVTFSNIDHDWTRENTYVEYSIISGNSQNNFHVETKFFHSEYPYKQVGYLVLLHSLDREASASHELVILASDSGCPPLSSTAVISIQVLDVNDNPPNFSSLSYHTHVKESTPLGSHITVVSANDRDTGSHAEIIYNIISGNEKGHFYLEENTGVLYLIKPLDYEKMTKFTLTVQASDAEKKHFSFAVVFVSVLDDNDHAPQFMFSSFSCIVPENLPISSTICSINALDFDAGPYGELTYSIVSPCFLTHGMSYDHDLFLIDPLTGDIHAKQILDYENGNKYCLTVQAKDKGDATASLVVWVDIEGIDEFEPIFTQDQYFFTLPEKNKDRQLIGRVEASDADAGIDGVILYSLGTSSPFFSVNKTNGNIYLIRALPLIKSQLNKEDTLEMKIIAHSPKSDSKFASCTVFVNVSFSSEGTPLAVFASSFSISLVVSFLVFLILICILIVMILRHKQKDTINNYEEKKTSSLDADLRVTRDASVLKAFQKTDDCSNEVVPVDATPEWLSLISIMEKDIVNLYRHSNSSGHCSVEGETAEDKEIQRINEHPYRKCSDSALSDHESRVPDSGIPRDSDQLSCLSGETDVMVTAETAEASQTFGEGDQGEGCSTTCAQNNVLPQTVQKREAKESILADVRKESVFISGDQEVRCAALSTQTTSDHDGKDNYHWNYLLSWEPKFQPLASVFNDIAKLKDEHLHMPGIPKEKKSFVFPPPLITAVAQPGIKAVPPRMPAVNLGQVPPKHPRSPIPYHLGSLPEGMTPNFSPSLSLLTMQPPALSPLLREGELLGTHISGTCHELKAEDEVQI

SEQ ID NO: 2596 - DNA, 4490 bp, Homo sapiens
agatccccatcctctccttgtgtgtgcgcgcttcatataatctcctcctttttggcaaaagaaataatgcacctgactttaccaggggggaacaaccagccgagtagaacaaggaacagatgtaaagggaataaaaggagagagaaaaagagatgagattcgtttaaagaaatccaggggcagaagaggtggctgccgcggcagaggcagctagagcttacttccctgtctgcgtgagctgcaggcagaggacgctttcaccagttgcagatgtaacctcgggaattcctgggccgtcggtttgtttgccaaacaaagtcttttcttctctggctcagacactgaagaggctcctggatttttctgcgatcctgccacaagctggcagttacccgagagccttcccaaggagctggaggagaaatgagcccttgtgggcggaagatgggcgaagggcgtcagcagcggcgggctccggtcgggaagctccttctgctccccgggaggagagatacaccccatgggcggtcaggcagcagcggcgccaggacgcagcgctccctgctctggctcttggtgcacgtgtggctgtgggcggcctcgggctcctctgcccagttgttcaacctcaccctttccgtagatgaggggcttcccccggacacgctggtaggtgacatccgcgccgggctgccggccgcgcagcagcaggaggggagcggcttctttctgtcggaggactccgatgactccccgctgctggacgacttccacgtgcacccggacaccggcatcatccgcactgcgcggcgcctggaccgcgagcggcgggaccactacagcttcgtcgccgccacgctgctgggcgctgtggtgcaggtggagattcgcgtcaacgacgtgaatgaccactcgccccgctttcccctcgactccctgcaactcgacgtctccgagctcagcccgccagggaccgccttccgcctgccagttgcccacgatccggacgccggactgttcagcactcagggctacaccctggtgcaaccgtccgacctgcccaaggaccccgcaggcccgttcttccagttgcgctaccggactccggggccactaccgtcaccgcttttgccaggctcctcgtcacccctggagcctctagatctggtgctgctgcggcgcttggaccgagaggaggcggcggcgcaccggctgcagatcgaggcatgggacggcggccgaccccggcgcaccggcctcctgagcgtggagctgcgcgtgctggatgagaacgacaacccgccggtctttgagcaggacgagtaccgcgccgcggtgcgcgaggacgcccagccgggcgccgaggtctgtcgcgtgcgcgccaccgaccgcgacctggggcccaatggcttcgtgcgctacagcgtccgcgcccggcaagtgcctggggcgggtagcggcggcggggcactgggcgacgcggcctacttcgcggtggaggagctgagcggcgtggtgcgagtgtggagacctctggaccgcgaggcacaggcctggcaccagttggtggtggaggcccgcgatggaggcgccgagcctgaggttgccacggtgcgcgtgtccatcgccgtgctggacgtgaatgacaaccggccagcaattcacgtgctctttctcacagagggaggcgtcgcccgtgtctctgaaggcgcccgaccgggcgactacgtggctcgcgtctcggtgtctgacgcggacggtgactgggagaaggaagatgaggccacaggggagcttggtgtgggtcttggagacgggagcatctctctgtccttggaaggcggagagggagacttcgcgttgctacccggcggccccccaggggtatttttcctttgcgtggaggggcccctggacagagagagccgcgatctgtatgagttactactggtggccacggacgcggggtccccgccgctgagcacggaggagacgctgctactccgggtcgctgacctcaatgaccaaccacctctcttcagccaacagcattacaaggcctcagtgtccgaggccgcggcccctggcactgtagtcatgtgggtcagcgcctccgatgccgacgaggcaggcagtgatcacgcctggctgcgctacactgtagtccaactctcggctccctgcaatctcggctccctgcaatcaaagatggtccacaccgcagagtgtggaccatcttttgccattgattccgaaagcggtgcgatcagcactatccggactctagaccgagaggtccaggaggcggtggagctgaaagtggtggcccaggacctcggagagcccccactctctgccacctgcctggtgagcatcaccgtagatgatgtgaatgacaatgagcccatcttctggaggcaggtgtacaatgccaccattgcagagcatgccccggttggacactgctttctgcaggtgacagcctctgatgcagattcaggactctatggctttattgaatattctctttatgatggattcctgagctatgaagcacctcaggcattccggatcgaccctcatgatgggcaaatctgtgtttctcaagatatcgacagggaaagggatccagctacctatgatctcctggtggaagctaaggatgggggtgggctaagtgcccaagcctttgttcgtgtggacctggaggacgtgaatgataatcatcctgtgtttaacccatcaacctatgtgacgagcatcagtgatgagacccagccaggcaccgagatcatcaatgttcttgccactgaccaggactctgggatatatgggacagtggcttatgagcttattccaggaaacgtgtcgtccctttttaccattgactccaccacaggaattatttacttaacattacctcttagtcatttggaatctaccacactttcgttgatggtctctgctcaagacggtggtgggctcacagctgtcattaatgccgatgtcaccatacacattttccagacaactctggcacctgctgagtttgaaaggcctaagtacactttcttagtttatgaagatgtgcctgaagatagtcccattggaacagtgaaagcaagagagcccttgaactcctcagaaccaatcttttacaggatttcttctggtgatctcggcggaaagttctccattcacccgcggctgggcactattcgcacccggaagcccctggatcacgagacgcagcccgtggttgtgctcacggtgcaggcgcagctcggcagcgccccagcctgcagcagcaccgaggtcaacataacagtcatggatgtcaatgacaaccacccagcgttcctcaggacctcggatgagattagaatatcccagaccacgccccctggcacagccttgtacctcgcacgtgcggaagacagagacagtgggcggaacggactcatccggtactccatcgccagcccgcagccaggcgtctttgccatcgacagagccctgggggtgctgttcctcaacggcagcctgggcgcgggcgagcagcgggagctcacgctgactctcagggccgaggaccaaggcgtgcatcctcaggcagccctgctggtgctgacagtcgttatcgagaaacgcgaacacagcccatcctggactttcgaacatttggtctatcaagtggaagtcagtgagtctctctcaccgatgacacaaatgctgcaaacacaggcgcacccacttggcccccagcgtgcagcctcgcctcttaggtactcgctggaacccagcgtagactctgctatgtttggaatccgcccttacacgggctggatttatttgcggcgacagtttgactatgaatccacccaaacatataattttagagtgtttgcttggatccccgaggacggattcttgcaaaatgtgagcactacagtcattgttcgtgtctgggatgagaatgacaattcccccaccttcttgcatgatgtgttgtttttgaaagtcgaagagagccctgttccccaaggggtaataggcaaaattacagctattgacatggactctggaaagaatggacagctattatatttccttttgtctgatggaaaattcttcaagatgaatcctaatacaggagagttaatcaattgggtggcactggatcgtgagcaccgggggcaccatgagatgactgtgctagtgacagaccgcggctccccaccacgaaacgccaccatggcggtttacgtctcagttactgacatcaatgataacaggcccttcttcccccagtgtctccctggaaaggagttacacgtgaaggttctggaaggtcaaccagtaaatatgttggttacaactgtgtttgcaaaggatcctgatgaaggaaataatgcagaagttacatactcagtatcttcagctagacctatgcctctgaagggaaaaacagcatttgggaagcagtcgtg

SEQ ID NO: 2597 - protein, 1354 aa, Homo sapiens
MSPCGRKMGEGRQQRRAPVGKLLLLPGRRDTPHGRSGSSGARTQRSLLWLLVHVWLWAASGSSAQLFNLTLSVDEGLPPDTLVGDIRAGLPAAQQQEGSGFFLSEDSDDSPLLDDFHVHPDTGIIRTARRLDRERRDHYSFVAATLLGAVVQVEIRVNDVNDHSPRFPLDSLQLDVSELSPPGTAFRLPVAHDPDAGLFSTQGYTLVQPSDLPKDPAGPFFQLRYRTPGPLPSPLLPGSSSPLEPLDLVLLRRLDREEAAAHRLQIEAWDGGRPRRTGLLSVELRVLDENDNPPVFEQDEYRAAVREDAQPGAEVCRVRATDRDLGPNGFVRYSVRARQVPGAGSGGGALGDAAYFAVEELSGVVRVWRPLDREAQAWHQLVVEARDGGAEPEVATVRVSIAVLDVNDNRPAIHVLFLTEGGVARVSEGARPGDYVARVSVSDADGDWEKEDEATGELGVGLGDGSISLSLEGGEGDFALLPGGPPGVFFLCVEGPLDRESRDLYELLLVATDAGSPPLSTEETLLLRVADLNDQPPLFSQQHYKASVSEAAAPGTVVMWVSASDADEAGSDHAWLRYTVVQLSAPCNLGSLQSKMVHTAECGPSFAIDSESGAISTIRTLDREVQEAVELKVVAQDLGEPPLSATCLVSITVDDVNDNEPIFWRQVYNATIAEHAPVGHCFLQVTASDADSGLYGFIEYSLYDGFLSYEAPQAFRIDPHDGQICVSQDIDRERDPATYDLLVEAKDGGGLSAQAFVRVDLEDVNDNHPVFNPSTYVTSISDETQPGTEIINVLATDQDSGIYGTVAYELIPGNVSSLFTIDSTTGIIYLTLPLSHLESTTLSLMVSAQDGGGLTAVINADVTIHIFQTTLAPAEFERPKYTFLVYEDVPEDSPIGTVKAREPLNSSEPIFYRISSGDLGGKFSIHPRLGTIRTRKPLDHETQPVVVLTVQAQLGSAPACSSTEVNITVMDVNDNHPAFLRTSDEIRISQTTPPGTALYLARAEDRDSGRNGLIRYSIASPQPGVFAIDRALGVLFLNGSLGAGEQRELTLTLRAEDQGVHPQAALLVLTVVIEKREHSPSWTFEHLVYQVEVSESLSPMTQMLQTQAHPLGPQRAASPLRYSLEPSVDSAMFGIRPYTGWIYLRRQFDYESTQTYNFRVFAWIPEDGFLQNVSTTVIVRVWDENDNSPTFLHDVLFLKVEESPVPQGVIGKITAIDMDSGKNGQLLYFLLSDGKFFKMNPNTGELINWVALDREHRGHHEMTVLVTDRGSPPRNATMAVYVSVTDINDNRPFFPQCLPGKELHVKVLEGQPVNMLVTTVFAKDPDEGNNAEVTYSVSSARPMPLKGKTAFGKQ

SEQ ID NO: 2598 - DNA, 1854 bp, Homo sapiens
gagagtctggctggaggccaaacaacacaaaaccagcacacttaacaaaaatataaccaatgacccttgcagagtccacttaactcccctccaccagagcaggtgctggtatccacagctgagagacctgaagatggatcacatcacaggactccttgcagacattctccagtaccagcccagagcctggtaggtctgttgggtggctagaccagtattctaagtgaagtaactcggaaatggaaaaccaaacatcatctgttctcactcatcagtaggagctaagctatgagaacacaaagacctgtccacgctgagtttatagcaactgtcaattacggttcagattttcctaccccagcgtgactttccaaagaggcttctgctcatggatttctgctccaggaagatgcaacaggaaggtcctcacaagatggctgaacagatgcaggtgctgtgcctctggactgcctagcctccagaactgatacatatgcaggatgtgcagctttgttacacagtatgaagcatgtctttaggactttctgtgccatctggtatccatcaaggggagagtcccaaactgcactggaaggcatcttccagatggtggtgggcgctaaagatcagctgtgtgggtgtgagcttcccatgcctgtggagaagcagcaattgaattgctcatctggaatgaagtttcgtggattttttttttttttgaacagatcactgactacttccaatatgcaataccaagtaaagactgcaaatgactgtgccacagggaggaaaagcagtcaacctgtctttagggacctgttcaaatttctggtgtctcagtggatgttgatttctgacataaagccatttgtgcacatgaggaagatactgtaggaggcatttgctgtgagccagtgtttggtctttagctgaaacagacatttagccataaaccaccaaccagaaagatcaataagacacggttcctcttctggtgggccacataaaggaagttgtcatgttccaacttaatgtgtgggttgagagggatctgcacaaacgagcgtcatcggggagaaaaatatatcccagtctgcgtggtcacggggagcttcctgggcaagcaacatctagactggtgtttgaccaaactactgggcaccataccccagccaagtcagcatataatgtgaaccatcacagtgggagacatgtcacaaagtggtaagacagcaagaattggtggtctgggctggattccagagaacctggactgtgcctatgaagcaccactgccctgtagacctgggataataaacactgatgcctaaagggaccaggcaggaactccttcatagatgaatgcttggtgttattcattacccagtcttgagggactcactggtgagctcggggctcagggagtagacctgactggggagctaagtgatctcgtgtgactctctatgcctcgttgccaccagcgtgggccatctccaggggctctcaaaccgatagaagaccttgcggtgtgggaaaacagctccagagcttctaagctgagcggattgttcctagtgaggaaggtcttgtcccatctgttccaagctatttgtccatgtaaaactgtcaacgttccaagccactgactgacagggtaagaagagtgagtctcaagagagtgaggaacggtgaatctttggcagactctgtgtgtgcccatggaagagacagtgacagaaattatgtaatgaaaaaaatgtagcacaagccttatgaatttttacttttcactccatgggattcccatatcaaaagacctattctacacaaaataaagttctctatgaagaa

SEQ ID NO: 2599 - protein, 123 aa, Homo sapiens
MKHVFRTFCAIWYPSRGESQTALEGIFQMVVGAKDQLCGCELPMPVEKQQLNCSSGMKFRGFFFFLNRSLTTSNMQYQVKTANDCATGRKSSQPVFRDLFKFLVSQWMLISDIKPFVHMRKIL

SEQ ID NO: 2600 - DNA, 516 bp, Homo sapiens
gcagctgcagcaagcctcacccaaggagagtctggctggaggccaaacaacacaaaaccagcacacttaacaaaaatataaccaatgacccttgcagagtccacttaactcccctccaccagagcaggtgctggtatccacagctgagagacctgaagatggatcacatcacaggactccttgcagacattctccagtaccagcccagagcctgacctgtccacgctgagtttatagcaactgtcaattacggttcagattttcctaccccagcgtgactttccaaagaggcttctgctcatggatttctgctccaggaagatgcaacaggaaggtcctcacaagatggctgaacagatgcaggtgctgtgcctctggactgcctagcctccagaactatgcaataccaagtaaagactgcaaatgactgtgccacagggaggaaaagcagtcaacctgtctttagggacctgttcaaatttctggtgtctcagtggatgttgatttctgacataa

SEQ ID NO: 2601 - protein, 38 aa, Homo sapiens
MQYQVKTANDCATGRKSSQPVFRDLFKFLVSQWMLISD

SEQ ID NO: 2602 - DNA, 2867 bp, Homo sapiens
atgagcaccaatcgcctacgggaggccagaaaaggctgcgtggtgctcccctctcagggcctggccctgtccacctgggccttggtgacccgcagccgggactcttgctgtaaagtgacgcagtgctctccctgggaggacaaaagaatccccggagtagagaaggaggccagcgagtctcagttcgctgctcgctcagagccgcccaggtgcgagggcgtcttcaccagaaatcggtgctcccgcgcgccccaccctccggggccctgcagatgccgggtcgggggccgccagcaggccctttggctcctgctggagacactggaagaccaggcgaccaggacagcgggtcgggccagtgcgcttgcccagcggcacgtgggcctcaagcctggtccccagcggctgcgccagcctagctgtgttcaccttggggccgcgagggcctcccaccggctggcagctggtggacacgctgtcaagatcgggggaaaaaaaggaaggaaggaggctagggggacacagggctggtggcctccgcagtctttgacctgcgacgggcgcgagcgcacctccgcgcctttgcgcagagaccttcccccaagattggctcacgacgcctcctaccccgaagtcaagggctccctgtggcaaatcctcacacgccctcctcctccccgcccatccccggcgccaggactgacggggagagggcaaggccgggccagaggggctgtgggcctggactgcggctgtcgcccgcggccctgctcttttgggcagccagacgtggggtcagcgcccagtcgcagcctccggggatgctccctgaggttccggaacaccccgccccccatcccaggatctgaccaaccctcaagccacggccggccccggttccgcgagacgggggactctgaggattgtcctcccttccgggctgggactcccccacagcagccgaccgcccccagttcagagtggcccggcccgcagcgctccccgggcacaggtcccaggtggacggctccgctcccgcgcccggctcctctgcccgccaagcgccccggggattccccggcctccaagcggccgcggccgggtggagtcagccccgaagcccgggatcccccgaagggagaaaacccgctctgctcctctgaagcggcgggagaaaccggccccacccaggtccgggggcccgacgccctcggcggaggccggctccagggccgcctggtgccggtttccgccgagctggagcgcgcgggccacggcttctctggggacgcagaagcgagaagcggggacctcggcgcgcgccccgcgtcccgctcttcctgcccgcgccccggcccccggcccgcgccccggccgccggcatggtgctgctggccgggaccgggccggagggcggcggggcgcgctgcatgaccccaccaccgccgtccccaccccggggcgcgcaggtcgaggaggaccccgctgactacgaagagtttgaggacttctcgagtctgccagacacccgcagcatcgcctcggacgactctttctaccctttcgaggacgaggaggagcacggcgtcgagagcgcggagagcgtcccggagggcgtcccggaaagcgtcccggagacggcgaccctcctgcgcgccgcctgcgccaacaacgtggggctgctgcggacgctggtgcggcgcggggtgagcgtcgaggaggcgcaggagactgaccgcaacggcaggaccggccttattgtcgcctgctaccacggctttgtggataccgtggtggccttagcagagtgcccccacgttgacgtcaactggcaggacagcgaggggaacacagccctaatcacagctgcacaggcagggcacgctatcatcactaactacttgttgaactatttccctggtcttgaccttgaaaggaggaacgcgttcgggttcaccgccctgatgaaagccgccatgcagggtcgaacggactgcatccgagccctgatgctagcaggggcggatgtccacgcgagggacccccgccgtgggatgtcgccgcaggagtgggccacttacacgggccgcgtggatgccgtccgtctcatgcagaggctgctggagcgcccctgcccggagcagttctgggagaagtaccggcccgagctgccgccgccccctgaagcggcgcggaagcccgcgggctccaagaactgcctgcagaggctcacagactgcgtgctgtccgtgctgacgccgcgctccgtgcggggcccggaggacgggggcgtcctggaccacatggtccggatgaccacgagcctctacagccccgccgtggccatcgtgtgccagaccgtgtgccctgagagccctccgagcgtggggaagaggcggctggcggtgcaggagatcctggcggcgcgggctgcacggggcccccaggcgcaggaggaggatgaggtggggggcgcggggcagcgcgggcggaccggacaggaggacgcggactcccgggagggctccccgagagccggcctccctcccgccctggggtcccggggccccgcagcgcccgccccgcggaaggccagcctcctgcccctgcagcgcctgcggcggagaagcgtgcggcccggtgtggtggtgccccgggtccgagtcagcaaggcgcccgcgcccaccttccagcccgagcggccggcgcggaagggcagcaccaaggacagcggccacctgcagatccccaagtggcggtacaaggaggccaaggaggagaagaggaaggcagaggaggccgaaaagaagcgccaggccgaggcgcagaaggagaggcgcactgcgccctggaagaagaggacgtga

SEQ ID NO: 2603 - protein, 494 aa, Homo sapiens
MVLLAGTGPEGGGARCMTPPPPSPPRGAQVEEDPADYEEFEDFSSLPDTRSIASDDSFYPFEDEEEHGVESAESVPEGVPESVPETATLLRAACANNVGLLRTLVRRGVSVEEAQETDRNGRTGLIVACYHGFVDTVVALAECPHVDVNWQDSEGNTALITAAQAGHAIITNYLLNYFPGLDLERRNAFGFTALMKAAMQGRTDCIRALMLAGADVHARDPRRGMSPQEWATYTGRVDAVRLMQRLLERPCPEQFWEKYRPELPPPPEAARKPAGSKNCLQRLTDCVLSVLTPRSVRGPEDGGVLDHMVRMTTSLYSPAVAIVCQTVCPESPPSVGKRRLAVQEILAARAARGPQAQEEDEVGGAGQRGRTGQEDADSREGSPRAGLPPALGSRGPAAPAPRKASLLPLQRLRRRSVRPGVVVPRVRVSKAPAPTFQPERPARKGSTKDSGHLQIPKWRYKEAKEEKRKAEEAEKKRQAEAQKERRTAPWKKRT

SEQ ID NO: 2604 - DNA, 669 bp, Homo sapiens
gggagttgactgccgttgagcgggtaggaaagtgccttccaggtacaggcagcaggagtggtgattgtcttggtagaggatgggtgaactgcaaatagagttgaaggagctgggctgagtagttgggatttcactccccgggtgattggtgggacccagcagggccaaatcctccagtggggcctgatgggcagaggagagacttggacacccttaagagacgaaatgaatcttcagaggttcagccattgcttgcaatgtcatcttctgggctcatccctgcactccaaccctggacattttctctggtcttttctagtggccaccatctggatgattacgactctggaaatctctgtccatcatccatttttttgcctcctctgtgaacgagcaggtgtgatggcctgaaaacagagagggagaaggctgagtgtaccagggcaggggaagcgcttcctggaattacgtgtcccaggacaaaagtgaaactgccttcgctgactcataggaaagtttgaaaatatcatgtttcgcctatgcctgggggatctttgtttttggcataagccgaacagattgttccaggccagaaaaaaactaagccaaaccaaaacaacagaatgacttaattatgtaccagcaccctttaaaattaattatgcttgc

SEQ ID NO: 2605 - protein, 74 aa, Homo sapiens
MGRGETWTPLRDEMNLQRFSHCLQCHLLGSSLHSNPGHFLWSFLVATIWMITTLEISVHHPFFCLLCERAGVMA

SEQ ID NO: 2606 - DNA, 488 bp, Homo sapiens
cagtttcatcccctgtggtgggagtggtctgggcaccctacttttcaatcaagacgaatagagtgggggaactcttcaaacttagaaagggccaggggctgtgctaacatgtgttcacctcctcaggtttcgaagcgtgaggcatcacttccatggagggttccaggctttgaaaacctagcaagagtgtgaaagggcttttgctgaagttatcccaaacccagccagttggtaaccctgaagatggctccagtgtccttttgtcatatttctgtcagttttgagtattttcttgatttatggcacaccaaagtgttccacattctccctggactttcccagtccctgtctgtaaccagctgtatcttcaaggaatgatagttctttttttagtgaggaatggtatttagaaaccaaaatctggactctagctgtgctcattcacactaaatgttattgcttctaggcatttcagtgagcagagttag

SEQ ID NO: 2607 - protein, 44 aa, Homo sapiens
MAPVSFCHISVSFEYFLDLWHTKVFHILPGLSQSLSVTSCIFKE

SEQ ID NO: 2608 - DNA, 392 bp, Homo sapiens
atgggatacagcacgtgaagcttgttttgggtataaggaacctctgatgtgtgcttgcaacttgttatttcttgcatttaattgtaaaattctgaggctacgtgctgagagccagcctggcaggatgccctgcctgccctgcaaagagcagggatgctgccctcccctactaaccctgcccctccatctgcatggtaaatgccttatgctaagaattcctggagtctgttcatgccgcgtggctggtatgatgtcatatttccaaagccgacagctccctctactggcctggtctggagaactgcagtttgagtgccttgagtcagtcaatcttagacaacccaattctgtaacattttccaatttttagagcagtttgtgtttattgcctg

SEQ ID NO: 2609 - protein, 107 aa, Homo sapiens
MCACNLLFLAFNCKILRLRAESQPGRMPCLPCKEQGCCPPLLTLPLHLHGKCLMLRIPGVCSCRVAGMMSYFQSRQLPLLAWSGELQFECLESVNLRQPNSVTFSNF

SEQ ID NO: 2610 - DNA, 4239 bp, Homo sapiens
cgcctaatcttcacccgctgctaggctcgtttaatgagtcttctgagagctaaggagtcctcggattcattcaaagcattctacaatgaacgctaggggggaaaaagaacaaacaaaatacatttcaaatataggattcaattacttttcactactcaatgatgtgtcaaaggcacgctgtgttttgttttgagggcggggagatgacaggagggaatcctgggcccccattggctcgccgctcgccgctgcagttgagctccagccgctccgagagcattattgatctgaagggtaaatgtggagggagccacagagaggggtccaggcttttctgagaagagaggcagcctcttccaggaagaaagtggtgtctactggctgcccggcctggagaaccttctttgaatgaaaacggacaaaatgcaaagcagtgtgttggcacagtgatttggaaaggggaaacagaagagaagggtctcaccttccgcgcaaggctgagctgttggcaccctgctgcggccgtcggtgctgctgctcctgcagctgccttttctgccatcagctttgttacctaacagcttggctcttttgggaaatatagacaagctggaacccaggagcagttgggagttttaaagaatgccagcctttttaaagctttgatgtccagtgctatagaatcaagttactgtggaggtcaaaacaatttgagatacataagctggccttagaaaataaattgcctctaacttacagtgaggagctcaacataacagggaaaaggagcacaggatgcagctacttggagggtgttgattgaaaacttcgatctccccaccccattcacggttgatttgacggatttctcacctcgttcacagagaaaatttcaattaaggcccctttagatggaatataatacagcagaagccttttcatcaaaaggattaatgcctgcatcatcatttctgcaataaaacaagaagctaagtggtggaggccacagacacctcaaacctggattccacaattctacgttaagtgttggagtttttattactctgctgtaggaaagcctttgccaatgcttacaaggaactgtttatccctgcttctctgggttctgtttgatggaggtctcctaacaccactacaaccacagccacagcagactttagccacagagccaagagaaaatgttatccatctgccaggacaacggtcacatttccaacgtgttaaacgtggctgggtatggaatcaattttttgtgctggaagaatacgtgggctccgagcctcagtatgtgggaaagctccattccgacttagacaagggagagggcactgtgaaatacaccctctcaggagatggcgctggcaccgtttttaccattgatgaaaccacaggggacattcatgcaataaggagcctagatagagaagagaaacctttctacactcttcgtgctcaggctgtggacatagaaaccagaaagcccctggagcctgaatcagaattcatcatcaaagtgcaggatattaatgataatgagccaaagtttttggatggaccttatgttgctactgttccagaaatgtctcctgtgggtgcatatgtactccaggtcaaggccacagatgcagatgacccgacctatggaaacagtgccagagtcgtttacagcattcttcagggacaaccttatttctctattgatcccaagacaggtgttattagaacagctttgccaaacatggacagagaagtcaaagaacaatatcaagtactcatccaagccaaggatatgggaggacagcttggaggattagccggaacaacaatagtcaacatcactctcaccgatgtcaatgacaatccacctcgattccccaaaagcatcttccacttgaaagttcctgagtcttcccctattggttcagctattggaagaataagagctgtggatcctgattttggacaaaatgcagaaattgaatacaatattgttccaggagatgggggaaatttgtttgacatcgtcacagatgaggatacacaagagggagtcatcaaattgaaaaagcctttagattttgaaacaaagaaggcatacactttcaaagttgaggcttccaaccttcaccttgaccaccggtttcactcggcgggccctttcaaagacacagctacggtgaagatcagcgtgctggacgtagatgagccaccggttttcagcaagccgctctacaccatggaggtttatgaagacactccggtagggaccatcattggcgctgtcactgctcaagacctggatgtaggcagcagtgctgttaggtacttcatagattggaagagtgatggggacagctactttacaatagatggaaatgaaggaaccatcgccactaatgaattactagacagagaaagcactgcgcagtataatttctccataattgcgagtaaagttagtaaccctttattgaccagcaaagtcaatatactgattaatgtcttagatgtaaatgaatttcctccagaaatatctgtgccatatgagacagccgtgtgtgaaaatgccaagccaggacagataattcagatagtcagtgctgcagaccgagatctttcacctgctgggcaacaattctcctttagattatcacctgaggctgctatcaaaccaaattttacagttcgtgacttcagaaacaacacagcggggattgaaacccgaagaaatggatacagccgcaggcagcaagagttgtatttcctccctgttgtaatagaagacagcagctaccctgtccagagcagcacaaacacaatgactattcgagtctgtagatgtgactctgatggcaccatcctgtcttgtaatgtggaagcaatttttctacctgtaggacttagcactggggcgttgattgcaattctactatgcattgttatactcttagccatagttgtactgtatgtagcactgcgaaggcagaagaaaaaagacaccctgatgacctctaaagaagacatcagagacaacgtcatccattacgatgatgaaggaggtggggaggaagatacccaggctttcgacatcggggctctgagaaacccaaaagtgattgaggagaacaaaattcgcagggatataaaaccagactctctctgtttacctcgtcagagaccacccatggaagataacacagacataagggatttcattcatcaaaggctacaggaaaatgatgtggatccaactgccccaccatacgattcactggccacatatgcctacgaagggagtgggtccgtggcagagtccctcagctctatagactctctcaccacagaagccgaccaggactatgactatctgacagactggggaccccgctttaaagtcttggcagacatgtttggcgaagaagagagttataaccctgataaagtcacttaagggagtcgtggaggctaaaatacaaccgagaggggagatttttaaaaaagaaaaagaaacacaaatattaatagaaatctctctcacacacacacacacacacaaacacacacacacacacacacactctgggacaagattcctttgattacctggtttctagtaagttactaaattaatcatattgtcagttttggtttattctgccaacaagagatacatcctataatgtgtacttgctttgttttgttgttttgttttttcacaatcacactgagacaagctcaggcctattcaatacaatttactgacatgacaacctagaacgaagatagctatgtggcatcacggtggaagagtgttagatttttcttaattccactaaagtgcctattgaaactcttatcatttaaagtggtgtacagtacactctgctgtgatggtattgcgggattcagagataaagacataaaacaaagacaccgtctttatgtcaagaagcaatagcgacactctgactctcctcattccttttgagaacaaaagaagaacactttctgatctccaccttcttctaattcaaaaggttttctttttcttttttaaactgtatgctaaaacgtatttgtttatcctatcctttcagaaaattgaaataaatatgaaaatatcaagttcaatatgtaagtcccaaattctagaaacaatgtttgatcttaacattagttcacattaaagctgttcattaaaatgttactttcttttcc

SEQ ID NO: 2611 - protein, 794 aa, Homo sapiens; identical to SEQ ID NO: 254

SEQ ID NO: 2612 - DNA, 539 bp, Homo sapiens
actgcaagctccgcctcccgggttcacgccattctcctgcctcagcctccagagtagctgggactacaggcgcccgccatcacgcccggctaatttttttgtatttttaatagagacggggtttcaccttgttagccaggatggtctcaatctcctgacctcgtgatatgcctacctcggcctcccgaagtgctgggattacattctccaggcattcttacctgacgaccactcctgacagagaaagtgctcacagcctgtccttgtgtaactcctgagcatacctctaccatcaagctttgttacctaacagcttggctcttttgggaaatatagacaagctggaacccaggagcagttgggagttttaaagaatgccagcctttttaaagctttgatgtccagtgctatagaatcaagttactgtggaggtcaaaacaatttgagatacataagctggccttagaaaataaattgcctctaacttgtataagtcgaatgtccctgtttccagaatatggtgttcagtctgccacatg

SEQ ID NO: 2613 - protein, 36 aa, Homo sapiens
MPTSASRSAGITFSRHSYLTTTPDRESAHSLSLCNS

SEQ ID NO: 2614 - DNA, 487 bp, Homo sapiens
agaagctgttttcagagattcagaggcaggcagatgaccacagcaagaagaacagacagaaatccgtaaggataattcgtctaagctaattatagttaaagcattactgacttataaaaactcaggattatgctctcaaaggcaatcacatttatattatttttatttaaaatatatattacatgtaatataaactatacacacaatatattgaactatatggaaattgaaactgtgaaatcccgtactgggctgcacctcttttattgactactattttcttaccacatttggtgacacagcatacgtgctcccaatcacattcaatgattcttaatcagttctcctaccactctcctccacacactgacatatgcatcaattattcatggctattatcctttattggcaaaacctgattcagacaagaagcagcacatagtttcttctatgtggaaaaaataaactatttttttaatatcaataa

SEQ ID NO: 2615 - protein, 46 aa, Homo sapiens [sequence omitted]

SEQ ID NO: 2616 - DNA, 275 bp, Homo sapiens
aggcaaatttcttgaagtggataatgctgggtcaaatattgacattccatggaagattgtcccatgtacataccaaaaagaaaaataaaaaacctggactgctgtgtctcctatgacaactcttgctgctgaaagatgtctcaagttatccactgctatgtttcctttcctgttttgtgtccttccaagtgaagccagcaccaagtacagcctacttaagtcccattttgtctttttttatcactccctattgaaataaagtccacccaaatgag

SEQ ID NO: 2617 - protein, 48 aa, Homo sapiens [sequence omitted]

SEQ ID NO: 2618 - DNA, 1604 bp, Homo sapiens
ctgggaatcaatgtgtgaggtggtgctatgtagcaggaacccctcttgctttgcaaatagttttttgtttgttttcctttttgcccaatagagccctgctctactgacccttcaatgtgcccgtgtgcctaaatattcctggtcgtgtgaaaagaacccaggtattagctgaactaaggagcacaattctgcaacattttggcacccaaacacggggcttgagaaatgaatgcaattggagaaactggttgttttaccaggcgttgattggaaatgtgtgcttccctttaagcagtcaagctcaacttgcagaactgatgggaaccccttgggaaaactggcctcaaatgtttgtctacacagtccacatacagggttcttaacctgcggaaacactttctgaaaatgtcagaactcttgaaaacatggatgaggaaaagcataagtactgctttatgcttttcttatgaattttaaaagatgtaatttaaaggtactttaaagtgatatttgtgcccttgtaactgattcaaagtagactgctaaggacaataagtaataagagtctacaaatatcagtaaattatgagaaaaaacggtctaatggtacttaaaattgcattgtgatttattaaataacattgaacagctccacctgtaacattaagattccatttgagcatatagaaaatatatttatcgcaacctgaagtgatttggaaagtatgctgggaagaaaatatatttacaaattagtctcagagggtaggtatcctgtagccagatggaataagaagagagggaagggagattttgttcaaagggggagcataagctaaggaataaagccacaaacaatgattaaattaggtaaagtgcaattagctgaatattgcataagcatacatatgggaagaagtggaaaaaggagtgacaatatgaagctaaagggtttgaagtgttcaagataatactaggcttcctagcctattccgagacatcttgttttagagtgcaatagataagaactctaaggatgaaagtaggagacatgcattctagtctacgttttggttaatggactgaaagtgaaagatggactgaaattgggggatggaataaaaatgtgatagaatagaaaatagaaaaagcaattagcctaatgtcattgatacttagagaaaatatggaaaatagtaaattagtgatatatatcttttctaattcaccagggtgagtgaacaaaggaaatcggatttaaaagtattcatgacatagatgcaataaggtttctcagtcagacatagcaaattgagggaagggaagatttagaggattggaaaatgtcttgcttgtagactaataggatatcaataagccatatgagcaataatttgaaatagtttttgtaaagtatcatgaaggtaaaccctgtttagaacaaattagatttgaagtacttgtgacaaatgcaattgacaatgcctttatgcagctggaaaattgttgcttagcagaaaagcttgtgctggacaaatagatgtccaaattgaatagatgttttcttaagctgaactaattgagacaaatatccttattaaatc

SEQ ID NO: 2619 - protein, 57 aa, Homo sapiens
MQLEKLVVLPGVDWKCVLPFKQSSSTCRTDGNPLGKLASNVCLHSPHTGFLTCGNTF

SEQ ID NO: 2620 - DNA, 1104 bp, Homo sapiens
ctgggaatcaatgtgtgaggtggtgctatgtagcaggaacccctcttgctttgcaaatagttttttgtttgttttcctttttgcccaatagagccctgctctactgacccttcaatgtgcccgtgtgcctaaatattcctggtcgtgtgaaaagaacccaggtattagctgaactaaggagcacaattctgcaacattttggcacccaaacacggggcttgagaaatgaatgcaattggagaaactggttgttttaccaggcgttgattggaaatgtgtgcttccctttaagcagtcaagctcaacttgcagaactgatgggaaccccttgggaaaactggcctcaaatgtttgtctacacagtccacatacagggttcttaacctgcgatgagggaaacttcccagggcttgtctgggtatgcccacagtggactggagcccaaaatgcacactggaggaagtggatggagccacgtggatgtcatgccttatgcaggggaggagcctgctctcttcagctcctgtggtaatgtgggaatcgatctgtgagcatatttaactatccggctattttggagattgaaaaaagaagacctgatttatcatgtgcaatatctcacacatctgtcatttctattctaccgcaattcgatggagtcttgttctgtggtccaggctagagggcagtggcatgatctcggctcactacaagctctgcctcccgggttcacgccattctcctgcctcagcctcctgagtagctgggactacaggcgcccgccaccacgcctggctaattttttgtatatttactagagatggctagtgttagccaagatggtctcgatctcctgacctcgtgatctgcccacctcagcctgccaaagtgctgggattactggcgtgagccaccgtgcctggccagcatcctctaattattattcatagtttgtgaatttaggcctacgtgaataataatataatatttactatgatgttactatctaccaaccttatttttcttttctataaaataggagccaaaataatatttatgtcataccttatgaagttaaaataaaatataacgaatgaggggctt

SEQ ID NO: 2621 - protein, 100 aa, Homo sapiens
MQLEKLVVLPGVDWKCVLPFKQSSSTCRTDGNPLGKLASNVCLHSPHTGFLTCDEGNFPGLVWVCPQWTGAQNAHWRKWMEPRGCHALCRGGACSLQLLW

SEQ ID NO: 2622 - DNA, 667 bp, Homo sapiens
tgaggtggtgctatgtagcaggaacccctcttgctttgcaaatagttttttgtttgttttcctttttgcccaatagagccctgctctactgacccttcaatgtgcccgtgtgcctaaatattcctggtcgtgtgaaaagaacccaggtattagctgaactaaggagcacaattctgcaacattttggcacccaaacacggggcttgagaaatgaatgcaattggagaaactggttgttttaccaggcgttgattggaaatgtgtgcttccctttaagcagtcaagctcaacttgcagaactgatgggaaccccttgggaaaactggcctcaaatgtttgtctacacagtccacatacagggttcttaacctgcggaaacactttctgaaaatgtcagaactcttgaaaacatggatgaggaaaagcataagtactgctttatgcttttcttatgaattttaaaagatgtaatttaaagattgaaactcccacaactttggcagaccaactcctcagaaaacattattctttgacatcaatatgttttgcacaaaattgaatggcaagtgaaaggcatcaaatgcatatttaactatccggctattttggagattgaaaaaagaagacctgatttatcatgtgcaatatctcacacatctgtcatttc

SEQ ID NO: 2623 - protein, 57 aa, Homo sapiens; identical to SEQ ID NO: 2619

SEQ ID NO: 2624 - DNA, 946 bp, Homo sapiens
tgaggtggtgctatgtagcaggaacccctcttgctttgcaaatagttttttgtttgttttcctttttgcccaatagagccctgctctactgacccttcaatgtgcccgtgtgcctaaatattcctggtcgtgtgaaaagaacccaggtattagctgaactaaggagcacaattctgcaacattttggcacccaaacacggggcttgagaaatgaatgcaattggagaaactggttgttttaccaggcgttgattggaaatgtgtgcttccctttaagcagtcaagctcaacttgcagaactgatgggaaccccttgggaaaactggcctcaaatgtttgtctacacagtccacatacagggttcttaacctgcgatgagggaaacttcccagggcttgtctgggtatgcccacagtggactggagcccaaaatgcacactggaggaagtggatggagccacgtggatgtcatgccttatgcaggggaggagcctgctctcttcagctcctgtggtaatgtgggaatcgatctgtgaggaaacactttctgaaaatgtcagaactcttgaaaacatggatgaggaaaagcataagtactgctttatgcttttcttatgaattttaaaagatgtaatttaaagattgaaactcccacaactttggcagaccaactcctcagaaaacattattctttgacatcaatatgttttgcacaaaattgaatggcaagtgaaaggcatcaaatggagctgtcatttaaatgtgcttgccaactagcttgtttatcaaaacattccagaccctttcaaattctcatttacattgtttcttgtttaccacacccataaatttgtattaccagcatatttaactatccggctattttggagattgaaaaaagaagacctgatttatcatgtgcaatatctcacacatctgtcatttc

SEQ ID NO: 2625 - protein, 100 aa, Homo sapiens; identical to SEQ ID NO: 2621

SEQ ID NO: 2626 - DNA, 1086 bp, Homo sapiens
cacagtccacatacagggttcttaacctgcgtttttacctacattttagactgaccctgcttgtgcctgtgaaccaaccaacaatctctggctgcagctcagaaaggacaaaagagaatggatgagggaaacttcccagggcttgtctgggtatgcccacagtggactggagcccaaaatgcacactggaggaagtggatggagccacgtggatgtcatgccttatgcaggggaggagcctgctctcttcagctcctgtggtaatgtgggaatcgatctgtgaggaaacactttctgaaaatgtcagaactcttgaaaacatggatgaggaaaagcataagtactgctttatgcttttcttatgaattttaaaagatgtaatttaaaggtactttaaagtgatatttgtgcccttgtaactgattcaaagtagactgctaaggacaataagtaataagagtctacaaatatcagtaaattatgagaaaaaacggtctaatggtacttaaaattgcattgtgatttattaaataacattgaacagctccacctgtaacattaagattccatttgagcatatagaaaatatatttatcgcaacctgaagtgatttggaaagtatgctgggaagaaaatatatttacaaattagtctcagagggtaggtatcctgtagccagatggaataagaagagagggaagggagattttgttcaaagggggagcataagctaaggaataaagccacaaacaatgattaaattaggtaaagtgcaattagctgaatattgcataagcatacatatgggaagaagtggaaaaaggagtgacaatatgaagctaaagggtttgaagtgttcaagataatactaggcttcctagcctattccgagacatcttgttttagagtgcaatagataagaactctaaggatgaaagtaggagacatgcattctagtctacgttttggttaatggactgaaagtgaaagatggactgaaattgggggatggaataaaaatgtgatagaatagaaaatagaaaaagcaattagcctaatgtcattgatacttagagaaaatatgga

SEQ ID NO: 2627 - protein, 70 aa, Homo sapiens
MPTVDWSPKCTLEEVDGATWMSCLMQGRSLLSSAPVVMWESICEETLSENVRTLENMDEEKHKYCFMLFL

SEQ ID NO: 2628 - DNA, 1194 bp, Homo sapiens
tctggaaacaggactcttctaaaaagcatgtaagggaacttgaagcagcatctcaatttgtgcaatatgataaagaaaaaaaactgtgggatccagaaaacaatacacaattacttttatttatggctaccagaacttcaggaaaccgactaatgtttgtgcacataatgtttttattatggatctatctggggcatattgaacatacagtgccctcaaaaatggtcagttttactcatgcccaatcccatatattttttagggtaatttttctggtccagttaagttagaccaggacattttcacttgacaaatctgagtaaacttctctggaaaaaattgtttttgaccattcgcctagaatgaatctctgggtaaggaagatgcatatagtcgtataatttactgtagttattttgacaccttttcttaacgacacaccacagatttattgctggatatttttttccttcctaagccacttgccatatagttctactcttctctagctctagggaggcttcctcatacagactaggtcaacagattccattccactggctcgtggatgggtttggctaccgagaagcagttaagagaagatcagaattatagggagcagggagtaggaaaaggtgaagaatttattttcctgcttccctgctgatcccctcccaggctcctacatgttggtcacatttctctaccaaatggtagttcctgtggggttcttgtaaattcaccttcctctttccatagagacaaaagctccctgctttcattcaccttcgatagctgggactacaggcgtccgccaccatgcccgactaattttttgtatttttagtagagacggggtttcatcgtgttagccagaatggtctcgatctcctgacctcgtgattcgccagcctcggcctcccaaagtgctgggattacaggcgtgagccaccacgcccagccgggtactgcaaacatttaaacattttaaacgttcctcgaagacaatttttccttccaggacaatgactgatacaccttcttaagcttacaactgcaaataagtctctgcctaacatagcatctctgctatacagccgggaatgtactcctactcaatgggatggctacacaatgaaatcaatgagtgactgcacttaaaaaatgcccattacaatatgagctatgtcttcc

SEQ ID NO: 2629 - protein, 55 aa, Homo sapiens
MATRTSGNRLMFVHIMFLLWIYLGHIEHTVPSKMVSFTHAQSHIFFRVIFLVQLS

SEQ ID NO: 2630 - DNA, 11705 bp, Homo sapiens
gcgggagcctcggccaagccgcgagcaggtgtgaatgagcccagggaaggacacacggccactgctggagggatcctccattcctgtgtcatttgcatgggtcctgctgtgaaatgaacctggcagggacttgttagacacttccttccttccctcattgagcactccagtgccattgttccacagttgttctaattgggtcctagcttcctcctgccaaggcaaacagcatagtctcgagtaggtgtccctaggctcatctgccagcctgaacatgaacacaggcaaagctgatgatggccagggaccccaggggacgtggggccctgtggggtctggcccccaggagcaagacctctgatgatgctggtgtctgggagtgagcaccatgcccatcacccaggacaatgccgtgctgcacctgcccctcctctaccagtggctgcagaacagcctgcaggaaggtggggatgggccggagcagcggctctgccaggcggccatccagaagctgcaggagtacatccagctgaactttgctgtggatgagagtacggtcccacctgatcacagcccccccgaaatggagatctgtactgtgtacctcaccaaggagctgggggacacagagactgtgggcctgagttttgggaacatccctgttttcggggactatggtgaaaagcgcagggggggcaagaagaggaaaacccaccagggtcctgtgctggatgtgggctgcatctgggtgacagagctgaggaagaacagcccagcagggaagagtgggaaggtccgactgcgggatgagatcctctcactgaatgggcagctgatggttggagttgatgtcagtggggccagttacctggctgagcagtgctggaatggcggctttatctacctgatcatgctgcgtcgctttaagcacaaagcccactccacttataatggcaacagtagcaacagctctgaaccaggagaaacacctaccttggagctgggtgaccgaactgcgaaaaaggggaaacgaaccagaaagtttggggtcatctccaggcctcctgccaacaaggcccctgaagaatccaagggcagcgctggctgtgaggtgtccagtgaccccagcactgagctggagaacggccctgaccctgaacttggaaacggccatgtctttcagctagaaaatggcccagattctctcaaggaggtggctggaccccatctagagaggtcagaagtggacagagggacagagcatagaattccaaagacagatgctcctctgaccacaagcaatgacaaacgccgcttctcaaaaggtgggaagacggacttccaatcgagtgactgcctggcacgggaggaagttggccgaatatggaagatggagctgctcaaagaatcggatgggctgggaattcaggttagtggaggccgaggatcaaagcgctcacctcacgctatcgttgtcactcaagtgaaggaaggaggtgccgctcacagggatggcaggctgtccttaggagatgagctgctggtaatcaatggtcatttactggtcgggctctcccacgaggaagcagtggccattcttcgctccgccacgggaatggtgcagcttgtggtggccagcaaggaaaactccgcagaggacctcctcaggttaacatctaagagcttgccagatctgaccagctcggtagaagatgtgtcctcctggactgataacgaagaccaggaggcagacggggaagaggacgaaggaaccagctcttctgtccagagagcaatgcctgggacagatgaaccccaagatgtgtgcggtgctgaggaatccaaggggaacttggaaagtcccaaacagggcagcaataaaatcaagctcaagagtcgcctttcagggggtgtacaccgccttgagtcagttgaagaatataacgagctgatggtgcggaatggggacccccggatccggatgttggaggtctcccgagatggccggaaacactccctcccgcagctgctggactcttccagtgcctcacaggaataccacattgtgaagaagtctacccgctccttaagcacgactcaggtggaatctccttggaggctcattcggccatccgtcatctcgatcattgggttgtacaaagaaaaaggcaagggccttggctttagtattgctggaggtcgagactgcattcgtggacagatggggatttttgtcaagaccatcttcccaaatggatcagctgcagaggacggaagacttaaagaaggggatgaaatcctagatgtaaatggaataccaataaagggcttgacatttcaagaagccattcatacctttaagcaaatccggagtggattatttgttttaacggtacgcacaaagttggtgagccccagcctcacaccctgctcgacacccacacacatgagcagatccgcctccccgaacttcaataccagtgggggagcctcagcgggaggttccgatgaaggcagttcttcatccctgggtcggaagacccctgggcccaaggacaggatcgtcatggaagtaacactcaacaaagagccaagagttggattaggcattggtgcctgctgcttggctctggaaaacagtcctcctggcatctacattcacagccttgctccaggatcagtggccaagatggagagcaacctgagccgcggggatcaaatcctggaagtgaactccgtcaacgtccgccatgctgctttaagcaaagtccacgccatcttgagtaaatgccctccaggacccgttcgccttgtcatcggccggcaccctaatccaaaggtttccgagcaggaaatggatgaagtcatagcacgcagcacttatcaggagagcaaagaggccaattcctctcctggcttaggtacccccttgaagagtccctctcttgcaaaaaaggactcccttatttctgaatctgaactctcccagtactttgcccacgatgtccctggccccttgtcagacttcatggtggccggttctgaggacgaggatcacccgggaagtggctgcagcacgtcggaggagggcagcctgcctcccagcacctccactcacaaggagcctggaaaacccagagccaacagcctcgtgactcttgggagccatcgggcttctgggctcttccacaagcaggtgacagttgccagacaagccagtctccccggaagcccacaggccctccgaaaccctctcctccgccagaggaaggtaggctgctacgatgccaacgatgccagtgatgaggaagagtttgacagagaaggggactgcatttcactcccaggggccctcccgggtcccatcaggcctctgtcagaggatgacccgaggcgtgtctcaatttcctcttccaagggcatggacgtccacaaccaagaggaacgaccccggaaaacactggtgagcaaggccatctcggcacctcttcttggtagctcagtggacttagaggagagtatcccagagggcatggtggatgctgcgtcctatgcagccaacctcacggactctgcagaggcccccaaggggagccctggaagctggtggaagaaggaactgtcaggatcaagtagcgcacccaaattggaatacacagtccgtacagacacccagagtccgacgaacactgggagccccagttccccccagcagaaaagtgaaggcctgggctccaggcacagaccagtggccagggtaagcccccactgcaagagatccgaggctgaggccaagcccagtggctcacagacagtgaacctgactggcagagccaatgatccatgcgatctggactcgagagtccaggccacttctgtcaaagtgactgtcgctggctttcagccaggtggagctgtggagaaggaatctctgggaaagctgaccactggagatgcttgtgtctctaccagctgtgaactagccagtgctctgtcccatctggatgccagccacctcacagagaacctgcccaaagctgcatcagagctggggcaacaacccatgactgaactggacagctcctcagacctcatctcttccccagggaagaagggggccgctcatcctgaccccagcaagacctctgtagacacagggcaagtcagtcggccagagaatcccagccagcctgcatcgcccagggtcaccaagtgcaaggccaggtctccagtcaggctcccccatgagggcagcccctccccgggggagaaagcagcggctccccctgactacagcaagactcgatcagcatcggaaaccagcacaccccacaataccaggagggtggctgccctcaggggagcgggacctggagcagagggaatgacaccagctggtgctgtcctgccaggagaccccctcacatcccaggagcagagacagggagctccaggtaaccacagtaaggctctggaaatgacaggaatccatgcacctgaaagctcccaggagccttccctgctggagggagcagattctgtgtcctcaagggcaccgcaggccagcctctccatgctgccatccactgacaacaccaaagaagcatgtggccatgtctcggggcactgctgcccaggggggagtagagagagccctgtgacggacattgacagcttcatcaaggagctggatgcttctgcagcaaggtctccgtcttcccagacgggggacagtggctctcaggagggcagtgctcagggccacccaccagccggggctggaggtgggagctcctgccgtgccgaaccagtcccggggggccagacctcctccccgaggagggcctgggctgctggtgcccccgcctacccacaatgggcctcccagccttcggttttagattcaattaatcccgacaaacattttactgtgaacaaaaactttctgagcaactactctagaaattttagcagttttcatgaagacagcacctccctatcaggcctgggtgacagcacggagccgtctctgtcatccatgtatggcgatgctgaggattcttcttctgaccctgagtcactcactgaagccccacgagcttctgccagggacggctggtcccctcctcgttcccgtgtgtctttgcacaaggaagatccttcggagtcagaagaggaacagattgagatttgttccacacgtggctgccccaatccaccctcgagtcctgctcatcttcccacccaggctgccatctgtcctgcctcagccaaagttctgtcattaaaatacagcactccgagagagtcggtggccagtccccgtgagaaggccgcctgcttgccaggctcatacacttcaggcccagactcttcccagccatcatcactcttggagatgagctctcaggagcatgaaactcatgcggacataagcacttcacagaaccacaggccctcgtgtgcagaagaaaccacagaagtcaccagcgctagctcagccatggaaaacagtccgctgtctaaagtagccaggcattttcacagtccgcccatcattctcagctcccccaacatggtaaatggcttggaacatgacctgctagatgacgaaaccctgaatcaatacgaaacaagcattaatgcagctgccagtctgtcctccttcagtgtggatgtccctaagaatggagaatctgttttggaaaacctccacatctctgaaagtcaagacctggatgacttgctacagaaaccaaaaatgatcgctaggaggcccatcatggcctggtttaaagaaataaataaacataaccaaggcacacatttgaggagcaaaaccgagaaggaacaacctctaatgcctgccagaagtcccgactccaagattcagatggtgagttcaagccaaaaaaagggcgttactgtgcctcatagccctcctcagccgaaaacaaacctggaaaataaggacctgtctaagaagagtccggcagaaatgcttctgactaatggtcagaaggcaaagtgtggtccgaagctgaagaggctcagcctcaagggcaaggccaaagtcaactctgaggcccctgctgcgaatgctgtgaaggctggggggacggaccacaggaaacccttgatctcaccccagacctcccacaaaacactttctaaggcagtgtcacagcggctccatgtagccgaccacgaggaccctgacagaaacaccacagctgcccccaggtccccccagtgtgtgctggaaagcaagccacctcttgccacctctgggccactgaaaccctcagtgtctgacacgagcatcaggacatttgtctcgcccctgacctctcccaagcctgttcctgagcaaggcatgtggagcaggttccacatggctgtcctctctgaacccgacagaggttgcccaaccacccctaaatctcctaagtgtagagcagagggcagggcgccccgtgctgactccgggccggtgagtccggcagcgtctaggaacggcatgtccgtggcagggaacagacagagtgagccgcgcctggccagccatgtggcagcagacacagcccaacccaggccgactggcgaaaaaggaggcaacataatggccagcgatcgcctcgaaagaacaaaccagctgaaaatcgtggagatttctgctgaagcagtgtcagagactgtatgtggtaacaagccagctgaaagcgacagacggggagggtgcttggcccagggcaactgtcaggagaagagtgaaatcaggctctatcgccaggtcgcagaatcatccacaagtcatccatcctcactcccatctcatgcctcccaggcagagcaggaaatgtcacgatcattcagcatggcaaaactggcgtcctcctcctcctcccttcaaacagccattagaaaggcagaatactcccagggaaaatcaagcctgatgtcagactcccgaggggtgcccagaaacagcattccagggggcccctcgggggaggaccatctctacttcaccccaaggccagcgaccaggacctactccatgccagcccagttctcaagccattttggacgggagggtcaccccccacacagcctgggtcgctctcgggacagccaggtccctgtgacaagcagtgttgtccccgaggcaaaggcatccagaggtggtcttcccagcctggctaatggacagggcatatatagtgtaaagccgctgctggacacatcgaggaatcttccagccacagatgaaggggatatcatttcagtccaggagacgagctgcctagtcacagacaaaatcaaagtcaccagacgacactactgctatgagcagaactggccccatgaatctacctcatttttctctgtgaagcagcggatcaagtcttttgagaacctggccaatgctgaccggcctgtagccaagtccggggcttccccatttttgtcggtgagctccaagcctcccattgggaggcggtcttccggcagcattgtttccgggagcctgggccacccaggtgacgcagcagcaaggttgttgagacgcagcttgagttcctgcagcgaaaaccaaagcgaagccggcaccctcctgccccagatggccaagtctccctcaatcatgacactgaccatctctcggcagaacccaccagagaccagtagcaagggctctgattcggaactaaagaaatcacttggtcctttgggaattcccaccccaacgatgaccctggcttctcctgttaagaggaacaagtcctcggtacgccacacgcagccctcgcccgtgtcccgctccaagctccaggagctgagagccttgagcatgcctgaccttgacaagctctgcagcgaggattactcagcagggccgagcgccgtgctcttcaaaactgagctggagatcacccccaggaggtcacctggccctcctgctggaggcgtttcgtgtcccgagaagggcgggaacagggcctgtccaggaggaagtggccctaaaaccagtgctgctgagacacccagttcagccagtgatacgggtgaagctgcccaggatctgccttttagaagaagctggtcagttaatttggatcaacttctagtctcagcgggggaccagcaaagattacagtctgttttatcgtcagtgggatcgaaatctaccatcctaactctcattcaggaagcgaaagcacaatcagagaatgaagaagatgtttgcttcatagtcttgaatagaaaagaaggctcaggtctgggattcagtgtggcaggagggacagatgtggagccaaaatcaatcacggtccacagggtgttttctcagggggcggcttctcaggaagggactatgaaccgaggggatttccttctgtcagtcaacggcgcctcactggctggcttagcccacgggaatgtcctgaaggttctgcaccaggcacagctgcacaaagatgccctcgtggtcatcaagaaagggatggatcagcccaggccctctgcccggcaggagcctcccacagccaatgggaagggtttgctgtccagaaagaccatccccctggagcctggcattgggagaagtgtggctgtacacgatgctctgtgtgttgaagtgctgaagacctcggctgggctgggactgagtctggatgggggaaaatcatcggtgacgggagatgggcccttggtcattaaaagagtgtacaaaggtggtgcggctgaacaagctggaataatagaagctggagatgaaattcttgctattaatgggaaacctctggttgggctcatgcactttgatgcctggaatattatgaagtctgtcccagaaggacctgtgcagttattaattagaaagcataggaattcttcatgaattttaacaagaatcattttctcagttctcttctttctttagcaaatcagagtgacttctttaaaccacaggttgttgaaatggccaacactggtacagacacggactataaaaatctccaagcttgtgcttacacatgaagcctgacttaactgtatgtgcaacagcaatgaaattaactccagaagccttccacctgcgtcacccaggccgggagggttccttcgttccagtgcctgtcccctacctttatgttatgtttactgatggggatacaagatgtgacacacccttctttatttgaaacaaacaaacatttagctagacctttgcttccttcttgccagctctcccaacatacccaatcctggtgatcagggaactaaaagtctgagggggacacaaatgtcacacctaagaggacaatcaatcattttgtatgattttgtaagtaaatgacagaatgcttttaggcacattcaatggaaggaggagatgtaggtctgtatatgttaccctgaaaagagaataagacttacttaaaaaaatgaattatgacctgttaggctgagctcaggaattgtccaaaaaggaaaaagcaaaataattaattgagagtattttttagtgagtgtaatgtataatgtacgtatgcaaagttcaactcaataggttattgatcaccatgaagtattgatcattttctatctcaaaagtgtaagccataaggctgttttacagaatagcacttctgataagctgtattaaatagccatgagcttcactgcttagagggagcagaaaggtcaacatctaaaagcaccttacaactagtttttgaacctgtcttgataagtgcttgaattcaagactggtcagtccaagagcagacaaaaatatcacaagtcagtcagtcactgggtttccatttctgaattttatgcactccaaccatgaatttaaactaaatttttagaaatcaagtatctttctaagtgtccttggatttatagacaatgtatgtacaatccaaatagaggagcttaatggaatccttttaggagactggttggtttttttccctctttcccaacatgtttaagaaatgtaacattctaagtattggatctcttttcttgacctagtataatgacaactgcagtgacttaagtttttgctgttttcgttttcccgctttgcaatttcctccttttgccaaaaatgttttcctacagaagactgtcgtgactcacgctacttgggaaactcactctggccactcctcctctggtggcatgagctgcttcccagtagctattccgattggatattccgttcgtcgtcacatagctggcttttctctcctcatgatgtaccttattttcttaggtaaataattccaaactctcatcgggtcataaagaggaggagaaacagggtgagtcaaggtaaaggagcagaaatgtagttacaagccaggtcgtcttcagtggcacaaaccaacccgttgagccctgacaacatgagtggagagtgcatttgccatacctgtgtgcatgacactaagattttatgttggagatacttctttaaataacctacagcttgggtctatggctgtgacccccagattcatggaggggctttagccatcagctttgtacatcatcatttttctgaatgaccaatcccactaaacatctttgaagtcggcctagagaggtccttcagatgagagagaaatagctggcttgtctgagtccagatttctcatcaactggcaatacaaaggaaaatatggtacaggagttagttagaaaggtcttattgattttacttctacttttcactacagttacaggtagaatactgtaggaagtcagtgcaaggtgcatgcttgattgatagatattgattgattgtttttcagtctctggggtcagttttgtggtttctgctttcttgcctaaatcaaagactatttcaagtcaacaacactgaaaactgcttttcgcctccactcttacagctgtgcctaataataattaattaataaacgcacagccctatgtgaacagacaggaatttcttgtgcaatgtggagcaaatggaatggtctccttccgcaagtctttttaatcctcatatctggagtacaagggtagacctctggcttaccacatacactatgctaaagtcatcagccactgctactacatcttgccagaaggtttccctcgccaacaaacagttgaaatttaagggaagaagcaaaagctaaactgtctttgaccctaagatagatagaaagctatttatttgtcttcagtgttcaaggcatgactagtatttctaattagcctaataaattcccacactttctgaagtgaacactaatggtattgtcctactaaaactgtcattgtttctttttttttaactggtcagtcattcacaataagctatgagggtaaataaatatgtgttataacaagtaaaccgtagttgcaagaatataccatgaagattaaagtaggctgggtttcatttccatcttcccacacatctcattgaatttgatggttgacttaattggcaccataactttgtatgatattatacattaacctttatttatgtaaagtaaaatgccttatatattaaagagtaagtgcaataatatgaaatagcctgtacattttaaaaatgttgtcaccaagttatataaatccacatctctgtaaacaaccttttttaagtaattttaaaaaaaataaacactctgcttactacttga

SEQ ID NO: 2631 - protein, 2839 aa, Homo sapiens; identical to SEQ ID NO: 256

SEQ ID NO: 2632 - DNA, 11765 bp, Homo sapiens
aatcggcgtctttcccagaccaccatgagggccggcgttcctgctcagctgtgaatgctgctgttgttatggctgctgcttggcttaggtgtgaatgagcccagggaaggacacacggccactgctggagggatcctccattcctgtgtcatttgcatgggtcctgctgtgaaatgaacctggcagggacttgttagacacttccttccttccctcattgagcactccagtgccattgttccacagttgttctaattgggtcctagcttcctcctgccaaggcaaacagcatagtctcgagtaggtgtccctaggctcatctgccagcctgaacatgaacacaggcaaagctgatgatggccagggaccccaggggacgtggggccctgtggggtctggcccccaggagcaagacctctgatgatgctggtgtctgggagtgagcaccatgcccatcacccaggacaatgccgtgctgcacctgcccctcctctaccagtggctgcagaacagcctgcaggaaggtggggatgggccggagcagcggctctgccaggcggccatccagaagctgcaggagtacatccagctgaactttgctgtggatgagagtacggtcccacctgatcacagcccccccgaaatggagatctgtactgtgtacctcaccaaggagctgggggacacagagactgtgggcctgagttttgggaacatccctgttttcggggactatggtgaaaagcgcagggggggcaagaagaggaaaacccaccagggtcctgtgctggatgtgggctgcatctgggtgacagagctgaggaagaacagcccagcagggaagagtgggaaggtccgactgcgggatgagatcctctcactgaatgggcagctgatggttggagttgatgtcagtggggccagttacctggctgagcagtgctggaatggcggctttatctacctgatcatgctgcgtcgctttaagcacaaagcccactccacttataatggcaacagtagcaacagctctgaaccaggagaaacacctaccttggagctgggtgaccgaactgcgaaaaaggggaaacgaaccagaaagtttggggtcatctccaggcctcctgccaacaaggcccctgaagaatccaagggcagcgctggctgtgaggtgtccagtgaccccagcactgagctggagaacggccctgaccctgaacttggaaacggccatgtctttcagctagaaaatggcccagattctctcaaggaggtggctggaccccatctagagaggtcagaagtggacagagggacagagcatagaattccaaagacagatgctcctctgaccacaagcaatgacaaacgccgcttctcaaaaggtgggaagacggacttccaatcgagtgactgcctggcacgggaggaagttggccgaatatggaagatggagctgctcaaagaatcggatgggctgggaattcaggttagtggaggccgaggatcaaagcgctcacctcacgctatcgttgtcactcaagtgaaggaaggaggtgccgctcacagggatggcaggctgtccttaggagatgagctgctggtaatcaatggtcatttactggtcgggctctcccacgaggaagcagtggccattcttcgctccgccacgggaatggtgcagcttgtggtggccagcaaggaaaactccgcagaggacctcctcaggttaacatctaagagcttgccagatctgaccagctcggtagaagatgtgtcctcctggactgataacgaagaccaggaggcagacggggaagaggacgaaggaaccagctcttctgtccagagagcaatgcctgggacagatgaaccccaagatgtgtgcggtgctgaggaatccaaggggaacttggaaagtcccaaacagggcagcaataaaatcaagctcaagagtcgcctttcagggggtgtacaccgccttgagtcagttgaagaatataacgagctgatggtgcggaatggggacccccggatccggatgttggaggtctcccgagatggccggaaacactccctcccgcagctgctggactcttccagtgcctcacaggaataccacattgtgaagaagtctacccgctccttaagcacgactcaggtggaatctccttggaggctcattcggccatccgtcatctcgatcattgggttgtacaaagaaaaaggcaagggccttggctttagtattgctggaggtcgagactgcattcgtggacagatggggatttttgtcaagaccatcttcccaaatggatcagctgcagaggacggaagacttaaagaaggggatgaaatcctagatgtaaatggaataccaataaagggcttgacatttcaagaagccattcatacctttaagcaaatccggagtggattatttgttttaacggtacgcacaaagttggtgagccccagcctcacaccctgctcgacacccacacacatgagcagatccgcctccccgaacttcaataccagtgggggagcctcagcgggaggttccgatgaaggcagttcttcatccctgggtcggaagacccctgggcccaaggacaggatcgtcatggaagtaacactcaacaaagagccaagagttggattaggcattggtgcctgctgcttggctctggaaaacagtcctcctggcatctacattcacagccttgctccaggatcagtggccaagatggagagcaacctgagccgcggggatcaaatcctggaagtgaactccgtcaacgtccgccatgctgctttaagcaaagtccacgccatcttgagtaaatgccctccaggacccgttcgccttgtcatcggccggcaccctaatccaaaggtttccgagcaggaaatggatgaagtcatagcacgcagcacttatcaggagagcaaagaggccaattcctctcctggcttaggtacccccttgaagagtccctctcttgcaaaaaaggactcccttatttctgaatctgaactctcccagtactttgcccacgatgtccctggccccttgtcagacttcatggtggccggttctgaggacgaggatcacccgggaagtggctgcagcacgtcggaggagggcagcctgcctcccagcacctccactcacaaggagcctggaaaacccagagccaacagcctcgtgactcttgggagccatcgggcttctgggctcttccacaagcaggtgacagttgccagacaagccagtctccccggaagcccacaggccctccgaaaccctctcctccgccagaggaaggtaggctgctacgatgccaacgatgccagtgatgaggaagagtttgacagagaaggggactgcatttcactcccaggggccctcccgggtcccatcaggcctctgtcagaggatgacccgaggcgtgtctcaatttcctcttccaagggcatggacgtccacaaccaagaggaacgaccccggaaaacactggtgagcaaggccatctcggcacctcttcttggtagctcagtggacttagaggagagtatcccagagggcatggtggatgctgcgtcctatgcagccaacctcacggactctgcagaggcccccaaggggagccctggaagctggtggaagaaggaactgtcaggatcaagtagcgcacccaaattggaatacacagtccgtacagacacccagagtccgacgaacactgggagccccagttccccccagcagaaaagtgaaggcctgggctccaggcacagaccagtggccagggtaagcccccactgcaagagatccgaggctgaggccaagcccagtggctcacagacagtgaacctgactggcagagccaatgatccatgcgatctggactcgagagtccaggccacttctgtcaaagtgactgtcgctggctttcagccaggtggagctgtggagaaggaatctctgggaaagctgaccactggagatgcttgtgtctctaccagctgtgaactagccagtgctctgtcccatctggatgccagccacctcacagagaacctgcccaaagctgcatcagagctggggcaacaacccatgactgaactggacagctcctcagacctcatctcttccccagggaagaagggggccgctcatcctgaccccagcaagacctctgtagacacagggcaagtcagtcggccagagaatcccagccagcctgcatcgcccagggtcaccaagtgcaaggccaggtctccagtcaggctcccccatgagggcagcccctccccgggggagaaagcagcggctccccctgactacagcaagactcgatcagcatcggaaaccagcacaccccacaataccaggagggtggctgccctcaggggagcgggacctggagcagagggaatgacaccagctggtgctgtcctgccaggagaccccctcacatcccaggagcagagacagggagctccaggtaaccacagtaaggctctggaaatgacaggaatccatgcacctgaaagctcccaggagccttccctgctggagggagcagattctgtgtcctcaagggcaccgcaggccagcctctccatgctgccatccactgacaacaccaaagaagcatgtggccatgtctcggggcactgctgcccaggggggagtagagagagccctgtgacggacattgacagcttcatcaaggagctggatgcttctgcagcaaggtctccgtcttcccagacgggggacagtggctctcaggagggcagtgctcagggccacccaccagccggggctggaggtgggagctcctgccgtgccgaaccagtcccggggggccagacctcctccccgaggagggcctgggctgctggtgcccccgcctacccacaatgggcctcccagccttcggttttagattcaattaatcccgacaaacattttactgtgaacaaaaactttctgagcaactactctagaaattttagcagttttcatgaagacagcacctccctatcaggcctgggtgacagcacggagccgtctctgtcatccatgtatggcgatgctgaggattcttcttctgaccctgagtcactcactgaagccccacgagcttctgccagggacggctggtcccctcctcgttcccgtgtgtctttgcacaaggaagatccttcggagtcagaagaggaacagattgagatttgttccacacgtggctgccccaatccaccctcgagtcctgctcatcttcccacccaggctgccatctgtcctgcctcagccaaagttctgtcattaaaatacagcactccgagagagtcggtggccagtccccgtgagaaggccgcctgcttgccaggctcatacacttcaggcccagactcttcccagccatcatcactcttggagatgagctctcaggagcatgaaactcatgcggacataagcacttcacagaaccacaggccctcgtgtgcagaagaaaccacagaagtcaccagcgctagctcagccatggaaaacagtccgctgtctaaagtagccaggcattttcacagtccgcccatcattctcagctcccccaacatggtaaatggcttggaacatgacctgctagatgacgaaaccctgaatcaatacgaaacaagcattaatgcagctgccagtctgtcctccttcagtgtggatgtccctaagaatggagaatctgttttggaaaacctccacatctctgaaagtcaagacctggatgacttgctacagaaaccaaaaatgatcgctaggaggcccatcatggcctggtttaaagaaataaataaacataaccaaggcacacatttgaggagcaaaaccgagaaggaacaacctctaatgcctgccagaagtcccgactccaagattcagatggtgagttcaagccaaaaaaagggcgttactgtgcctcatagccctcctcagccgaaaacaaacctggaaaataaggacctgtctaagaagagtccggcagaaatgcttctgactaatggtcagaaggcaaagtgtggtccgaagctgaagaggctcagcctcaagggcaaggccaaagtcaactctgaggcccctgctgcgaatgctgtgaaggctggggggacggaccacaggaaacccttgatctcaccccagacctcccacaaaacactttctaaggcagtgtcacagcggctccatgtagccgaccacgaggaccctgacagaaacaccacagctgcccccaggtccccccagtgtgtgctggaaagcaagccacctcttgccacctctgggccactgaaaccctcagtgtctgacacgagcatcaggacatttgtctcgcccctgacctctcccaagcctgttcctgagcaaggcatgtggagcaggttccacatggctgtcctctctgaacccgacagaggttgcccaaccacccctaaatctcctaagtgtagagcagagggcagggcgccccgtgctgactccgggccggtgagtccggcagcgtctaggaacggcatgtccgtggcagggaacagacagagtgagccgcgcctggccagccatgtggcagcagacacagcccaacccaggccgactggcgaaaaaggaggcaacataatggccagcgatcgcctcgaaagaacaaaccagctgaaaatcgtggagatttctgctgaagcagtgtcagagactgtatgtggtaacaagccagctgaaagcgacagacggggagggtgcttggcccagggcaactgtcaggagaagagtgaaatcaggctctatcgccaggtcgcagaatcatccacaagtcatccatcctcactcccatctcatgcctcccaggcagagcaggaaatgtcacgatcattcagcatggcaaaactggcgtcctcctcctcctcccttcaaacagccattagaaaggcagaatactcccagggaaaatcaagcctgatgtcagactcccgaggggtgcccagaaacagcattccagggggcccctcgggggaggaccatctctacttcaccccaaggccagcgaccaggacctactccatgccagcccagttctcaagccattttggacgggagggtcaccccccacacagcctgggtcgctctcgggacagccaggtccctgtgacaagcagtgttgtccccgaggcaaaggcatccagaggtggtcttcccagcctggctaatggacagggcatatatagtgtaaagccgctgctggacacatcgaggaatcttccagccacagatgaaggggatatcatttcagtccaggagacgagctgcctagtcacagacaaaatcaaagtcaccagacgacactactgctatgagcagaactggccccatgaatctacctcatttttctctgtgaagcagcggatcaagtcttttgagaacctggccaatgctgaccggcctgtagccaagtccggggcttccccatttttgtcggtgagctccaagcctcccattgggaggcggtcttccggcagcattgtttccgggagcctgggccacccaggtgacgcagcagcaaggttgttgagacgcagcttgagttcctgcagcgaaaaccaaagcgaagccggcaccctcctgccccagatggccaagtctccctcaatcatgacactgaccatctctcggcagaacccaccagagaccagtagcaagggctctgattcggaactaaagaaatcacttggtcctttgggaattcccaccccaacgatgaccctggcttctcctgttaagaggaacaagtcctcggtacgccacacgcagccctcgcccgtgtcccgctccaagctccaggagctgagagccttgagcatgcctgaccttgacaagctctgcagcgaggattactcagcagggccgagcgccgtgctcttcaaaactgagctggagatcacccccaggaggtcacctggccctcctgctggaggcgtttcgtgtcccgagaagggcgggaacagggcctgtccaggaggaagtggccctaaaaccagtgctgctgagacacccagttcagccagtgatacgggtgaagctgcccaggatctgccttttagaagaagctggtcagttaatttggatcaacttctagtctcagcgggggaccagcaaagattacagtctgttttatcgtcagtgggatcgaaatctaccatcctaactctcattcaggaagcgaaagcacaatcagagaatgaagaagatgtttgcttcatagtcttgaatagaaaagaaggctcaggtctgggattcagtgtggcaggagggacagatgtggagccaaaatcaatcacggtccacagggtgttttctcagggggcggcttctcaggaagggactatgaaccgaggggatttccttctgtcagtcaacggcgcctcactggctggcttagcccacgggaatgtcctgaaggttctgcaccaggcacagctgcacaaagatgccctcgtggtcatcaagaaagggatggatcagcccaggccctctgcccggcaggagcctcccacagccaatgggaagggtttgctgtccagaaagaccatccccctggagcctggcattgggagaagtgtggctgtacacgatgctctgtgtgttgaagtgctgaagacctcggctgggctgggactgagtctggatgggggaaaatcatcggtgacgggagatgggcccttggtcattaaaagagtgtacaaaggtggtgcggctgaacaagctggaataatagaagctggagatgaaattcttgctattaatgggaaacctctggttgggctcatgcactttgatgcctggaatattatgaagtctgtcccagaaggacctgtgcagttattaattagaaagcataggaattcttcatgaattttaacaagaatcattttctcagttctcttctttctttagcaaatcagagtgacttctttaaaccacaggttgttgaaatggccaacactggtacagacacggactataaaaatctccaagcttgtgcttacacatgaagcctgacttaactgtatgtgcaacagcaatgaaattaactccagaagccttccacctgcgtcacccaggccgggagggttccttcgttccagtgcctgtcccctacctttatgttatgtttactgatggggatacaagatgtgacacacccttctttatttgaaacaaacaaacatttagctagacctttgcttccttcttgccagctctcccaacatacccaatcctggtgatcagggaactaaaagtctgagggggacacaaatgtcacacctaagaggacaatcaatcattttgtatgattttgtaagtaaatgacagaatgcttttaggcacattcaatggaaggaggagatgtaggtctgtatatgttaccctgaaaagagaataagacttacttaaaaaaatgaattatgacctgttaggctgagctcaggaattgtccaaaaaggaaaaagcaaaataattaattgagagtattttttagtgagtgtaatgtataatgtacgtatgcaaagttcaactcaataggttattgatcaccatgaagtattgatcattttctatctcaaaagtgtaagccataaggctgttttacagaatagcacttctgataagctgtattaaatagccatgagcttcactgcttagagggagcagaaaggtcaacatctaaaagcaccttacaactagtttttgaacctgtcttgataagtgcttgaattcaagactggtcagtccaagagcagacaaaaatatcacaagtcagtcagtcactgggtttccatttctgaattttatgcactccaaccatgaatttaaactaaatttttagaaatcaagtatctttctaagtgtccttggatttatagacaatgtatgtacaatccaaatagaggagcttaatggaatccttttaggagactggttggtttttttccctctttcccaacatgtttaagaaatgtaacattctaagtattggatctcttttcttgacctagtataatgacaactgcagtgacttaagtttttgctgttttcgttttcccgctttgcaatttcctccttttgccaaaaatgttttcctacagaagactgtcgtgactcacgctacttgggaaactcactctggccactcctcctctggtggcatgagctgcttcccagtagctattccgattggatattccgttcgtcgtcacatagctggcttttctctcctcatgatgtaccttattttcttaggtaaataattccaaactctcatcgggtcataaagaggaggagaaacagggtgagtcaaggtaaaggagcagaaatgtagttacaagccaggtcgtcttcagtggcacaaaccaacccgttgagccctgacaacatgagtggagagtgcatttgccatacctgtgtgcatgacactaagattttatgttggagatacttctttaaataacctacagcttgggtctatggctgtgacccccagattcatggaggggctttagccatcagctttgtacatcatcatttttctgaatgaccaatcccactaaacatctttgaagtcggcctagagaggtccttcagatgagagagaaatagctggcttgtctgagtccagatttctcatcaactggcaatacaaaggaaaatatggtacaggagttagttagaaaggtcttattgattttacttctacttttcactacagttacaggtagaatactgtaggaagtcagtgcaaggtgcatgcttgattgatagatattgattgattgtttttcagtctctggggtcagttttgtggtttctgctttcttgcctaaatcaaagactatttcaagtcaacaacactgaaaactgcttttcgcctccactcttacagctgtgcctaataataattaattaataaacgcacagccctatgtgaacagacaggaatttcttgtgcaatgtggagcaaatggaatggtctccttccgcaagtctttttaatcctcatatctggagtacaagggtagacctctggcttaccacatacactatgctaaagtcatcagccactgctactacatcttgccagaaggtttccctcgccaacaaacagttgaaatttaagggaagaagcaaaagctaaactgtctttgaccctaagatagatagaaagctatttatttgtcttcagtgttcaaggcatgactagtatttctaattagcctaataaattcccacactttctgaagtgaacactaatggtattgtcctactaaaactgtcattgtttctttttttttaactggtcagtcattcacaataagctatgagggtaaataaatatgtgttataacaagtaaaccgtagttgcaagaatataccatgaagattaaagtaggctgggtttcatttccatcttcccacacatctcattgaatttgatggttgacttaattggcaccataactttgtatgatattatacattaacctttatttatgtaaagtaaaatgccttatatattaaagagtaagtgcaataatatgaaatagcctgtacattttaaaaatgttgtcaccaagttatataaatccacatctctgtaaacaaccttttttaagtaattttaaaaaaaataaacactctgcttactacttga

SEQ ID NO: 2633 - protein, 2839 aa, Homo sapiens; identical to SEQ ID NO: 256

SEQ ID NO: 2634 - DNA, 11812 bp, Homo sapiens
agaagtgtggcgtcttggtccaggatgcaggtccctgattcgggttggacgtggtcatcaaacccagaaattgaaggatcttgggcctgccttgatgttcatttctctcatctataaaattgaaggctggaggaggtgtgaatgagcccagggaaggacacacggccactgctggagggatcctccattcctgtgtcatttgcatgggtcctgctgtgaaatgaacctggcagggacttgttagacacttccttccttccctcattgagcactccagtgccattgttccacagttgttctaattgggtcctagcttcctcctgccaaggcaaacagcatagtctcgagtaggtgtccctaggctcatctgccagcctgaacatgaacacaggcaaagctgatgatggccagggaccccaggggacgtggggccctgtggggtctggcccccaggagcaagacctctgatgatgctggtgtctgggagtgagcaccatgcccatcacccaggacaatgccgtgctgcacctgcccctcctctaccagtggctgcagaacagcctgcaggaaggtggggatgggccggagcagcggctctgccaggcggccatccagaagctgcaggagtacatccagctgaactttgctgtggatgagagtacggtcccacctgatcacagcccccccgaaatggagatctgtactgtgtacctcaccaaggagctgggggacacagagactgtgggcctgagttttgggaacatccctgttttcggggactatggtgaaaagcgcagggggggcaagaagaggaaaacccaccagggtcctgtgctggatgtgggctgcatctgggtgacagagctgaggaagaacagcccagcagggaagagtgggaaggtccgactgcgggatgagatcctctcactgaatgggcagctgatggttggagttgatgtcagtggggccagttacctggctgagcagtgctggaatggcggctttatctacctgatcatgctgcgtcgctttaagcacaaagcccactccacttataatggcaacagtagcaacagctctgaaccaggagaaacacctaccttggagctgggtgaccgaactgcgaaaaaggggaaacgaaccagaaagtttggggtcatctccaggcctcctgccaacaaggcccctgaagaatccaagggcagcgctggctgtgaggtgtccagtgaccccagcactgagctggagaacggccctgaccctgaacttggaaacggccatgtctttcagctagaaaatggcccagattctctcaaggaggtggctggaccccatctagagaggtcagaagtggacagagggacagagcatagaattccaaagacagatgctcctctgaccacaagcaatgacaaacgccgcttctcaaaaggtgggaagacggacttccaatcgagtgactgcctggcacgggaggaagttggccgaatatggaagatggagctgctcaaagaatcggatgggctgggaattcaggttagtggaggccgaggatcaaagcgctcacctcacgctatcgttgtcactcaagtgaaggaaggaggtgccgctcacagggatggcaggctgtccttaggagatgagctgctggtaatcaatggtcatttactggtcgggctctcccacgaggaagcagtggccattcttcgctccgccacgggaatggtgcagcttgtggtggccagcaaggaaaactccgcagaggacctcctcaggttaacatctaagagcttgccagatctgaccagctcggtagaagatgtgtcctcctggactgataacgaagaccaggaggcagacggggaagaggacgaaggaaccagctcttctgtccagagagcaatgcctgggacagatgaaccccaagatgtgtgcggtgctgaggaatccaaggggaacttggaaagtcccaaacagggcagcaataaaatcaagctcaagagtcgcctttcagggggtgtacaccgccttgagtcagttgaagaatataacgagctgatggtgcggaatggggacccccggatccggatgttggaggtctcccgagatggccggaaacactccctcccgcagctgctggactcttccagtgcctcacaggaataccacattgtgaagaagtctacccgctccttaagcacgactcaggtggaatctccttggaggctcattcggccatccgtcatctcgatcattgggttgtacaaagaaaaaggcaagggccttggctttagtattgctggaggtcgagactgcattcgtggacagatggggatttttgtcaagaccatcttcccaaatggatcagctgcagaggacggaagacttaaagaaggggatgaaatcctagatgtaaatggaataccaataaagggcttgacatttcaagaagccattcatacctttaagcaaatccggagtggattatttgttttaacggtacgcacaaagttggtgagccccagcctcacaccctgctcgacacccacacacatgagcagatccgcctccccgaacttcaataccagtgggggagcctcagcgggaggttccgatgaaggcagttcttcatccctgggtcggaagacccctgggcccaaggacaggatcgtcatggaagtaacactcaacaaagagccaagagttggattaggcattggtgcctgctgcttggctctggaaaacagtcctcctggcatctacattcacagccttgctccaggatcagtggccaagatggagagcaacctgagccgcggggatcaaatcctggaagtgaactccgtcaacgtccgccatgctgctttaagcaaagtccacgccatcttgagtaaatgccctccaggacccgttcgccttgtcatcggccggcaccctaatccaaaggtttccgagcaggaaatggatgaagtcatagcacgcagcacttatcaggagagcaaagaggccaattcctctcctggcttaggtacccccttgaagagtccctctcttgcaaaaaaggactcccttatttctgaatctgaactctcccagtactttgcccacgatgtccctggccccttgtcagacttcatggtggccggttctgaggacgaggatcacccgggaagtggctgcagcacgtcggaggagggcagcctgcctcccagcacctccactcacaaggagcctggaaaacccagagccaacagcctcgtgactcttgggagccatcgggcttctgggctcttccacaagcaggtgacagttgccagacaagccagtctccccggaagcccacaggccctccgaaaccctctcctccgccagaggaaggtaggctgctacgatgccaacgatgccagtgatgaggaagagtttgacagagaaggggactgcatttcactcccaggggccctcccgggtcccatcaggcctctgtcagaggatgacccgaggcgtgtctcaatttcctcttccaagggcatggacgtccacaaccaagaggaacgaccccggaaaacactggtgagcaaggccatctcggcacctcttcttggtagctcagtggacttagaggagagtatcccagagggcatggtggatgctgcgtcctatgcagccaacctcacggactctgcagaggcccccaaggggagccctggaagctggtggaagaaggaactgtcaggatcaagtagcgcacccaaattggaatacacagtccgtacagacacccagagtccgacgaacactgggagccccagttccccccagcagaaaagtgaaggcctgggctccaggcacagaccagtggccagggtaagcccccactgcaagagatccgaggctgaggccaagcccagtggctcacagacagtgaacctgactggcagagccaatgatccatgcgatctggactcgagagtccaggccacttctgtcaaagtgactgtcgctggctttcagccaggtggagctgtggagaaggaatctctgggaaagctgaccactggagatgcttgtgtctctaccagctgtgaactagccagtgctctgtcccatctggatgccagccacctcacagagaacctgcccaaagctgcatcagagctggggcaacaacccatgactgaactggacagctcctcagacctcatctcttccccagggaagaagggggccgctcatcctgaccccagcaagacctctgtagacacagggcaagtcagtcggccagagaatcccagccagcctgcatcgcccagggtcaccaagtgcaaggccaggtctccagtcaggctcccccatgagggcagcccctccccgggggagaaagcagcggctccccctgactacagcaagactcgatcagcatcggaaaccagcacaccccacaataccaggagggtggctgccctcaggggagcgggacctggagcagagggaatgacaccagctggtgctgtcctgccaggagaccccctcacatcccaggagcagagacagggagctccaggtaaccacagtaaggctctggaaatgacaggaatccatgcacctgaaagctcccaggagccttccctgctggagggagcagattctgtgtcctcaagggcaccgcaggccagcctctccatgctgccatccactgacaacaccaaagaagcatgtggccatgtctcggggcactgctgcccaggggggagtagagagagccctgtgacggacattgacagcttcatcaaggagctggatgcttctgcagcaaggtctccgtcttcccagacgggggacagtggctctcaggagggcagtgctcagggccacccaccagccggggctggaggtgggagctcctgccgtgccgaaccagtcccggggggccagacctcctccccgaggagggcctgggctgctggtgcccccgcctacccacaatgggcctcccagccttcggttttagattcaattaatcccgacaaacattttactgtgaacaaaaactttctgagcaactactctagaaattttagcagttttcatgaagacagcacctccctatcaggcctgggtgacagcacggagccgtctctgtcatccatgtatggcgatgctgaggattcttcttctgaccctgagtcactcactgaagccccacgagcttctgccagggacggctggtcccctcctcgttcccgtgtgtctttgcacaaggaagatccttcggagtcagaagaggaacagattgagatttgttccacacgtggctgccccaatccaccctcgagtcctgctcatcttcccacccaggctgccatctgtcctgcctcagccaaagttctgtcattaaaatacagcactccgagagagtcggtggccagtccccgtgagaaggccgcctgcttgccaggctcatacacttcaggcccagactcttcccagccatcatcactcttggagatgagctctcaggagcatgaaactcatgcggacataagcacttcacagaaccacaggccctcgtgtgcagaagaaaccacagaagtcaccagcgctagctcagccatggaaaacagtccgctgtctaaagtagccaggcattttcacagtccgcccatcattctcagctcccccaacatggtaaatggcttggaacatgacctgctagatgacgaaaccctgaatcaatacgaaacaagcattaatgcagctgccagtctgtcctccttcagtgtggatgtccctaagaatggagaatctgttttggaaaacctccacatctctgaaagtcaagacctggatgacttgctacagaaaccaaaaatgatcgctaggaggcccatcatggcctggtttaaagaaataaataaacataaccaaggcacacatttgaggagcaaaaccgagaaggaacaacctctaatgcctgccagaagtcccgactccaagattcagatggtgagttcaagccaaaaaaagggcgttactgtgcctcatagccctcctcagccgaaaacaaacctggaaaataaggacctgtctaagaagagtccggcagaaatgcttctgactaatggtcagaaggcaaagtgtggtccgaagctgaagaggctcagcctcaagggcaaggccaaagtcaactctgaggcccctgctgcgaatgctgtgaaggctggggggacggaccacaggaaacccttgatctcaccccagacctcccacaaaacactttctaaggcagtgtcacagcggctccatgtagccgaccacgaggaccctgacagaaacaccacagctgcccccaggtccccccagtgtgtgctggaaagcaagccacctcttgccacctctgggccactgaaaccctcagtgtctgacacgagcatcaggacatttgtctcgcccctgacctctcccaagcctgttcctgagcaaggcatgtggagcaggttccacatggctgtcctctctgaacccgacagaggttgcccaaccacccctaaatctcctaagtgtagagcagagggcagggcgccccgtgctgactccgggccggtgagtccggcagcgtctaggaacggcatgtccgtggcagggaacagacagagtgagccgcgcctggccagccatgtggcagcagacacagcccaacccaggccgactggcgaaaaaggaggcaacataatggccagcgatcgcctcgaaagaacaaaccagctgaaaatcgtggagatttctgctgaagcagtgtcagagactgtatgtggtaacaagccagctgaaagcgacagacggggagggtgcttggcccagggcaactgtcaggagaagagtgaaatcaggctctatcgccaggtcgcagaatcatccacaagtcatccatcctcactcccatctcatgcctcccaggcagagcaggaaatgtcacgatcattcagcatggcaaaactggcgtcctcctcctcctcccttcaaacagccattagaaaggcagaatactcccagggaaaatcaagcctgatgtcagactcccgaggggtgcccagaaacagcattccagggggcccctcgggggaggaccatctctacttcaccccaaggccagcgaccaggacctactccatgccagcccagttctcaagccattttggacgggagggtcaccccccacacagcctgggtcgctctcgggacagccaggtccctgtgacaagcagtgttgtccccgaggcaaaggcatccagaggtggtcttcccagcctggctaatggacagggcatatatagtgtaaagccgctgctggacacatcgaggaatcttccagccacagatgaaggggatatcatttcagtccaggagacgagctgcctagtcacagacaaaatcaaagtcaccagacgacactactgctatgagcagaactggccccatgaatctacctcatttttctctgtgaagcagcggatcaagtcttttgagaacctggccaatgctgaccggcctgtagccaagtccggggcttccccatttttgtcggtgagctccaagcctcccattgggaggcggtcttccggcagcattgtttccgggagcctgggccacccaggtgacgcagcagcaaggttgttgagacgcagcttgagttcctgcagcgaaaaccaaagcgaagccggcaccctcctgccccagatggccaagtctccctcaatcatgacactgaccatctctcggcagaacccaccagagaccagtagcaagggctctgattcggaactaaagaaatcacttggtcctttgggaattcccaccccaacgatgaccctggcttctcctgttaagaggaacaagtcctcggtacgccacacgcagccctcgcccgtgtcccgctccaagctccaggagctgagagccttgagcatgcctgaccttgacaagctctgcagcgaggattactcagcagggccgagcgccgtgctcttcaaaactgagctggagatcacccccaggaggtcacctggccctcctgctggaggcgtttcgtgtcccgagaagggcgggaacagggcctgtccaggaggaagtggccctaaaaccagtgctgctgagacacccagttcagccagtgatacgggtgaagctgcccaggatctgccttttagaagaagctggtcagttaatttggatcaacttctagtctcagcgggggaccagcaaagattacagtctgttttatcgtcagtgggatcgaaatctaccatcctaactctcattcaggaagcgaaagcacaatcagagaatgaagaagatgtttgcttcatagtcttgaatagaaaagaaggctcaggtctgggattcagtgtggcaggagggacagatgtggagccaaaatcaatcacggtccacagggtgttttctcagggggcggcttctcaggaagggactatgaaccgaggggatttccttctgtcagtcaacggcgcctcactggctggcttagcccacgggaatgtcctgaaggttctgcaccaggcacagctgcacaaagatgccctcgtggtcatcaagaaagggatggatcagcccaggccctctgcccggcaggagcctcccacagccaatgggaagggtttgctgtccagaaagaccatccccctggagcctggcattgggagaagtgtggctgtacacgatgctctgtgtgttgaagtgctgaagacctcggctgggctgggactgagtctggatgggggaaaatcatcggtgacgggagatgggcccttggtcattaaaagagtgtacaaaggtggtgcggctgaacaagctggaataatagaagctggagatgaaattcttgctattaatgggaaacctctggttgggctcatgcactttgatgcctggaatattatgaagtctgtcccagaaggacctgtgcagttattaattagaaagcataggaattcttcatgaattttaacaagaatcattttctcagttctcttctttctttagcaaatcagagtgacttctttaaaccacaggttgttgaaatggccaacactggtacagacacggactataaaaatctccaagcttgtgcttacacatgaagcctgacttaactgtatgtgcaacagcaatgaaattaactccagaagccttccacctgcgtcacccaggccgggagggttccttcgttccagtgcctgtcccctacctttatgttatgtttactgatggggatacaagatgtgacacacccttctttatttgaaacaaacaaacatttagctagacctttgcttccttcttgccagctctcccaacatacccaatcctggtgatcagggaactaaaagtctgagggggacacaaatgtcacacctaagaggacaatcaatcattttgtatgattttgtaagtaaatgacagaatgcttttaggcacattcaatggaaggaggagatgtaggtctgtatatgttaccctgaaaagagaataagacttacttaaaaaaatgaattatgacctgttaggctgagctcaggaattgtccaaaaaggaaaaagcaaaataattaattgagagtattttttagtgagtgtaatgtataatgtacgtatgcaaagttcaactcaataggttattgatcaccatgaagtattgatcattttctatctcaaaagtgtaagccataaggctgttttacagaatagcacttctgataagctgtattaaatagccatgagcttcactgcttagagggagcagaaaggtcaacatctaaaagcaccttacaactagtttttgaacctgtcttgataagtgcttgaattcaagactggtcagtccaagagcagacaaaaatatcacaagtcagtcagtcactgggtttccatttctgaattttatgcactccaaccatgaatttaaactaaatttttagaaatcaagtatctttctaagtgtccttggatttatagacaatgtatgtacaatccaaatagaggagcttaatggaatccttttaggagactggttggtttttttccctctttcccaacatgtttaagaaatgtaacattctaagtattggatctcttttcttgacctagtataatgacaactgcagtgacttaagtttttgctgttttcgttttcccgctttgcaatttcctccttttgccaaaaatgttttcctacagaagactgtcgtgactcacgctacttgggaaactcactctggccactcctcctctggtggcatgagctgcttcccagtagctattccgattggatattccgttcgtcgtcacatagctggcttttctctcctcatgatgtaccttattttcttaggtaaataattccaaactctcatcgggtcataaagaggaggagaaacagggtgagtcaaggtaaaggagcagaaatgtagttacaagccaggtcgtcttcagtggcacaaaccaacccgttgagccctgacaacatgagtggagagtgcatttgccatacctgtgtgcatgacactaagattttatgttggagatacttctttaaataacctacagcttgggtctatggctgtgacccccagattcatggaggggctttagccatcagctttgtacatcatcatttttctgaatgaccaatcccactaaacatctttgaagtcggcctagagaggtccttcagatgagagagaaatagctggcttgtctgagtccagatttctcatcaactggcaatacaaaggaaaatatggtacaggagttagttagaaaggtcttattgattttacttctacttttcactacagttacaggtagaatactgtaggaagtcagtgcaaggtgcatgcttgattgatagatattgattgattgtttttcagtctctggggtcagttttgtggtttctgctttcttgcctaaatcaaagactatttcaagtcaacaacactgaaaactgcttttcgcctccactcttacagctgtgcctaataataattaattaataaacgcacagccctatgtgaacagacaggaatttcttgtgcaatgtggagcaaatggaatggtctccttccgcaagtctttttaatcctcatatctggagtacaagggtagacctctggcttaccacatacactatgctaaagtcatcagccactgctactacatcttgccagaaggtttccctcgccaacaaacagttgaaatttaagggaagaagcaaaagctaaactgtctttgaccctaagatagatagaaagctatttatttgtcttcagtgttcaaggcatgactagtatttctaattagcctaataaattcccacactttctgaagtgaacactaatggtattgtcctactaaaactgtcattgtttctttttttttaactggtcagtcattcacaataagctatgagggtaaataaatatgtgttataacaagtaaaccgtagttgcaagaatataccatgaagattaaagtaggctgggtttcatttccatcttcccacacatctcattgaatttgatggttgacttaattggcaccataactttgtatgatattatacattaacctttatttatgtaaagtaaaatgccttatatattaaagagtaagtgcaataatatgaaatagcctgtacattttaaaaatgttgtcaccaagttatataaatccacatctctgtaaacaaccttttttaagtaattttaaaaaaaataaacactctgcttactacttga

SEQ ID NO: 2635 - protein, 2839 aa, Homo sapiens; identical to SEQ ID NO: 256

SEQ ID NO: 2636 - DNA, 4304 bp, Homo sapiens
tttggacgggagggtcaccccccacacagcctgggtcgctctcgggacagccaggtccctgtgacaagcagtgttgtccccgaggcaaaggcatccagaggtggtcttcccagcctggctaatggacagggcatatatagtgtaaagccgctgctggacacatcgaggaatcttccagccacagatgaaggggatatcatttcagtccaggagacgagctgcctagtcacagacaaaatcaaagtcaccagacgacactactgctatgagcagaactggccccatgaatctacctcatttttctctgtgaagcagcggatcaagtcttttgagaacctggccaatgctgaccggcctgtagccaagtccggggcttccccatttttgtcggtgagctccaagcctcccattgggaggcggtcttccggcagcattgtttccgggagcctgggccacccaggtgacgcagcagcaaggttgttgagacgcagcttgagttcctgcagcgaaaaccaaagcgaagccggcaccctcctgccccagatggccaagtctccctcaatcatgacactgaccatctctcggcagaacccaccagagaccagtagcaagggctctgattcggaactaaagaaatcacttggtcctttgggaattcccaccccaacgatgaccctggcttctcctgttaagaggaacaagtcctcggtacgccacacgcagccctcgcccgtgtcccgctccaagctccaggagctgagagccttgagcatgcctgaccttgacaagctctgcagcgaggattactcagcagggccgagcgccgtgctcttcaaaactgagctggagatcacccccaggaggtcacctggccctcctgctggaggcgtttcgtgtcccgagaagggcgggaacagggcctgtccaggaggaagtggccctaaaaccagtgctgctgagacacccagttcagccagtgatacgggtgaagctgcccaggatctgccttttagaagaagctggtcagttaatttggatcaacttctagtctcagcgggggaccagcaaagattacagtctgttttatcgtcagtgggatcgaaatctaccatcctaactctcattcaggaagcgaaagcacaatcagagaatgaagaagatgtttgcttcatagtcttgaatagaaaagaaggctcaggtctgggattcagttgtggctgtacacgatgctctgtgtgttgaagtgctgaagacctcggctgggctgggactgagtctggatgggggaaaatcatcggtgacgggagatgggcccttggtcattaaaagagtgtacaaaggtggtgcggctgaacaagctggaataatagaagctggagatgaaattcttgctattaatgggaaacctctggttgggctcatgcactttgatgcctggaatattatgaagtctgtcccagaaggacctgtgcagttattaattagaaagcataggaattcttcatgaattttaacaagaatcattttctcagttctcttctttctttagcaaatcagagtgacttctttaaaccacaggttgttgaaatggccaacactggtacagacacggactataaaaatctccaagcttgtgcttacacatgaagcctgacttaactgtatgtgcaacagcaatgaaattaactccagaagccttccacctgcgtcacccaggccgggagggttccttcgttccagtgcctgtcccctacctttatgttatgtttactgatggggatacaagatgtgacacacccttctttatttgaaacaaacaaacatttagctagacctttgcttccttcttgccagctctcccaacatacccaatcctggtgatcagggaactaaaagtctgagggggacacaaatgtcacacctaagaggacaatcaatcattttgtatgattttgtaagtaaatgacagaatgcttttaggcacattcaatggaaggaggagatgtaggtctgtatatgttaccctgaaaagagaataagacttacttaaaaaaatgaattatgacctgttaggctgagctcaggaattgtccaaaaaggaaaaagcaaaataattaattgagagtattttttagtgagtgtaatgtataatgtacgtatgcaaagttcaactcaataggttattgatcaccatgaagtattgatcattttctatctcaaaagtgtaagccataaggctgttttacagaatagcacttctgataagctgtattaaatagccatgagcttcactgcttagagggagcagaaaggtcaacatctaaaagcaccttacaactagtttttgaacctgtcttgataagtgcttgaattcaagactggtcagtccaagagcagacaaaaatatcacaagtcagtcagtcactgggtttccatttctgaattttatgcactccaaccatgaatttaaactaaatttttagaaatcaagtatctttctaagtgtccttggatttatagacaatgtatgtacaatccaaatagaggagcttaatggaatccttttaggagactggttggtttttttccctctttcccaacatgtttaagaaatgtaacattctaagtattggatctcttttcttgacctagtataatgacaactgcagtgacttaagtttttgctgttttcgttttcccgctttgcaatttcctccttttgccaaaaatgttttcctacagaagactgtcgtgactcacgctacttgggaaactcactctggccactcctcctctggtggcatgagctgcttcccagtagctattccgattggatattccgttcgtcgtcacatagctggcttttctctcctcatgatgtaccttattttcttaggtaaataattccaaactctcatcgggtcataaagaggaggagaaacagggtgagtcaaggtaaaggagcagaaatgtagttacaagccaggtcgtcttcagtggcacaaaccaacccgttgagccctgacaacatgagtggagagtgcatttgccatacctgtgtgcatgacactaagattttatgttggagatacttctttaaataacctacagcttgggtctatggctgtgacccccagattcatggaggggctttagccatcagctttgtacatcatcatttttctgaatgaccaatcccactaaacatctttgaagtcggcctagagaggtccttcagatgagagagaaatagctggcttgtctgagtccagatttctcatcaactggcaatacaaaggaaaatatggtacaggagttagttagaaaggtcttattgattttacttctacttttcactacagttacaggtagaatactgtaggaagtcagtgcaaggtgcatgcttgattgatagatattgattgattgtttttcagtctctggggtcagttttgtggtttctgctttcttgcctaaatcaaagactatttcaagtcaacaacactgaaaactgcttttcgcctccactcttacagctgtgcctaataataattaattaataaacgcacagccctatgtgaacagacaggaatttcttgtgcaatgtggagcaaatggaatggtctccttccgcaagtctttttaatcctcatatctggagtacaagggtagacctctggcttaccacatacactatgctaaagtcatcagccactgctactacatcttgccagaaggtttccctcgccaacaaacagttgaaatttaagggaagaagcaaaagctaaactgtctttgaccctaagatagatagaaagctatttatttgtcttcagtgttcaaggcatgactagtatttctaattagcctaataaattcccacactttctgaagtgaacactaatggtattgtcctactaaaactgtcattgtttctttttttttaactggtcagtcattcacaataagctatgagggtaaataaatatgtgttataacaagtaaaccgtagttgcaagaatataccatgaagattaaagtaggctgggtttcatttccatcttcccacacatctcattgaatttgatggttgacttaattggcaccataactttgtatgatattatacattaacctttatttatgtaaagtaaaatgccttatatattaaagagtaagtgcaataatatgaaatagcctgtacattttaaaaatgttgtcaccaagttatataaatccacatctctgtaaacaaccttttttaagtaattttaaaaaaaataaacactctgcttactacttga

SEQ ID NO: 2637 - protein, 232 aa, Homo sapiens
MAKSPSIMTLTISRQNPPETSSKGSDSELKKSLGPLGIPTPTMTLASPVKRNKSSVRHTQPSPVSRSKLQELRALSMPDLDKLCSEDYSAGPSAVLFKTELEITPRRSPGPPAGGVSCPEKGGNRACPGGSGPKTSAAETPSSASDTGEAAQDLPFRRSWSVNLDQLLVSAGDQQRLQSVLSSVGSKSTILTLIQEAKAQSENEEDVCFIVLNRKEGSGLGFSCGCTRCSVC

SEQ ID NO: 2638 - DNA, 851 bp, Homo sapiens
acctgggaacgtgaaacggtgtctggcccccactgcggcatttctgatttaattaagctgggaatttcctgggcatcaggaatttaaaagcgtcccagcatctctactgtgcagaaccttcaggacattcccgtgggctaagccagccagtgaggcgccgttgactgacagaaggaaatcccctcggttcatagtcccttcctgagaagccgccccctgagaaaacaccctgtggacctgggatgaggaaaggaaaagggaacaaaaaccagatccacttacgatttccgtgtctgacatgggcctggcatccaggaggcaatgggaatacgaagatgaatgaggcctgggctcgtgcagtgaaggtgaccctctggatggtcctgaaggcttttgaatgatgtaaaattttgagtgactttttgagacgggagtaattgtataaacacaagtttggccagttgattctaatgttttctactgcttaaaatatggaggtaaattataaggctatagcgaattgtgtttatagggattggaaatggcctatacatgtcagctctgtgttaaaaatgcttgtcttttgtcaacgaaaaccttacgtactacttctcccacttctccctttttatgttggtagctgggaatgaaatccagcaatctctgaacccgctgattggaatttgtgccctgatcacattctgaggctgcttgaggggggattttcctgagagcctaatgactctgtcacttaccgtgattgattttggctccacatctgtccctcctgccacactgaatcccagacctgagccttcttttctattcaagactatgaagcaaacatcttc

SEQ ID NO: 2639 - protein, 52 aa, Homo sapiens
MRKGKGNKNQIHLRFPCLTWAWHPGGNGNTKMNEAWARAVKVTLWMVLKAFE

SEQ ID NO: 2640 - DNA, 4889 bp, Homo sapiens
atattcagagcctcagaaccacgtgcagcgtctgtttctgcagtgcgagctgtttaatgccctgttaagtactgcagatgtctggagtgccgtgcatcttggcattcaggggtgacgtctttttttattcgagagggcaaagcagagggtatgggttaggcagtgccttctgggaggggccttttgttccttctccacatctctccctgataagggtagctggattcctttctacaacttggcttccttgtggcctgagctgtttgtagtccttgctgaaaatggctccgattccatttaacaaatgagaaacacttcttgtccagatgcctccatggtccccagtcttccttctgtgtcatttcactttccctcttccagagggctgaggccctcctcaatacagggaaacaccttggtcatcagatcttgtcatgcttgcctttgccccaaaactgtctcgaccacttggtggactttcagtgggatccttgtaaactgtcaaaggaaaccacttcatcctcacagctgccagtttttaagcctcgtgaactcagatctggatggtccttctgtcatttataatcaatcactcagtattcctgcagcaacttcagggcctctggtcttgaagcagaccctgcagagcaatcaatcaaacgctgagcgcctggagggcttaacctcgctcagtttcctgttcttcagtctccctaacccaggtctacccggtcctatgcagttatattccttaccatacactgacagcgtccagctgggggcccggtgcagtaagctgcacagtagagatgctgggacgcttttaaattcctgatgcccaggaaattcccagcttaattaaatcagaaatgccgcagtgggggccagacaccgtttcacgttcccaggtgactccagtatgcagccagactcgagccactgcaatagacccattttcctgttgaaaaatcatgctccccccagtgttagtaaatgtccttcagaccctgtggagtggccttctttaaaccacgacaatggactggcctttatgtccaaaggagacaatgctagcttggcttcagccctagtgaacagtgaacagaggaagcaggcagtttaatccatccgtggtccttcctctgcctcccaattaactaagtgtgcctttgcagtcaactctgacgtccttggctggtaggcaggcaagggagggaagtacaaggcaagtttacaatcctgattcaaaccagcccactatcccgaaaccagcacacagagccggcatcaccatggaaacacatttcctcacagtggagcaagatgccagtagaggcagcgagtgtgtttgtgaagacagccatagccaggggcagggtttccctttgcaggagcaggagtggcaggagcggggaggcaggaagctctctgggttcctgggggctttggagtccattctaacagtctcacatgagactgggcattttggtgctgccaagtcttggtaccagaggatgatctgctgctgccattagcagccagggttggcagaaaatcaaatttggagtccccaagtgtgacttcagtcctcactgagaagtgcacagccggtgtggggggcttaacaagagcactttgctttctggggatttctgcttgggcataaaagcatttgccaatgcttgcagaaaacacagaacaaaggatgcaagtacagcagcaacacagccaggagggcagccccagaattgggaggccaacagtgctactgggctcaagtgctgttataaggagaagtgtggctgtacacgatgctctgtgtgttgaagtgctgaagacctcggctgggctgggactgagtctggatgggggaaaatcatcggtgacgggagatgggcccttggtcattaaaagagtgtacaaaggtggtgcggctgaacaagctggaataatagaagctggagatgaaattcttgctattaatgggaaacctctggttgggctcatgcactttgatgcctggaatattatgaagtctgtcccagaaggacctgtgcagttattaattagaaagcataggaattcttcatgaattttaacaagaatcattttctcagttctcttctttctttagcaaatcagagtgacttctttaaaccacaggttgttgaaatggccaacactggtacagacacggactataaaaatctccaagcttgtgcttacacatgaagcctgacttaactgtatgtgcaacagcaatgaaattaactccagaagccttccacctgcgtcacccaggccgggagggttccttcgttccagtgcctgtcccctacctttatgttatgtttactgatggggatacaagatgtgacacacccttctttatttgaaacaaacaaacatttagctagacctttgcttccttcttgccagctctcccaacatacccaatcctggtgatcagggaactaaaagtctgagggggacacaaatgtcacacctaagaggacaatcaatcattttgtatgattttgtaagtaaatgacagaatgcttttaggcacattcaatggaaggaggagatgtaggtctgtatatgttaccctgaaaagagaataagacttacttaaaaaaatgaattatgacctgttaggctgagctcaggaattgtccaaaaaggaaaaagcaaaataattaattgagagtattttttagtgagtgtaatgtataatgtacgtatgcaaagttcaactcaataggttattgatcaccatgaagtattgatcattttctatctcaaaagtgtaagccataaggctgttttacagaatagcacttctgataagctgtattaaatagccatgagcttcactgcttagagggagcagaaaggtcaacatctaaaagcaccttacaactagtttttgaacctgtcttgataagtgcttgaattcaagactggtcagtccaagagcagacaaaaatatcacaagtcagtcagtcactgggtttccatttctgaattttatgcactccaaccatgaatttaaactaaatttttagaaatcaagtatctttctaagtgtccttggatttatagacaatgtatgtacaatccaaatagaggagcttaatggaatccttttaggagactggttggtttttttccctctttcccaacatgtttaagaaatgtaacattctaagtattggatctcttttcttgacctagtataatgacaactgcagtgacttaagtttttgctgttttcgttttcccgctttgcaatttcctccttttgccaaaaatgttttcctacagaagactgtcgtgactcacgctacttgggaaactcactctggccactcctcctctggtggcatgagctgcttcccagtagctattccgattggatattccgttcgtcgtcacatagctggcttttctctcctcatgatgtaccttattttcttaggtaaataattccaaactctcatcgggtcataaagaggaggagaaacagggtgagtcaaggtaaaggagcagaaatgtagttacaagccaggtcgtcttcagtggcacaaaccaacccgttgagccctgacaacatgagtggagagtgcatttgccatacctgtgtgcatgacactaagattttatgttggagatacttctttaaataacctacagcttgggtctatggctgtgacccccagattcatggaggggctttagccatcagctttgtacatcatcatttttctgaatgaccaatcccactaaacatctttgaagtcggcctagagaggtccttcagatgagagagaaatagctggcttgtctgagtccagatttctcatcaactggcaatacaaaggaaaatatggtacaggagttagttagaaaggtcttattgattttacttctacttttcactacagttacaggtagaatactgtaggaagtcagtgcaaggtgcatgcttgattgatagatattgattgattgtttttcagtctctggggtcagttttgtggtttctgctttcttgcctaaatcaaagactatttcaagtcaacaacactgaaaactgcttttcgcctccactcttacagctgtgcctaataataattaattaataaacgcacagccctatgtgaacagacaggaatttcttgtgcaatgtggagcaaatggaatggtctccttccgcaagtctttttaatcctcatatctggagtacaagggtagacctctggcttaccacatacactatgctaaagtcatcagccactgctactacatcttgccagaaggtttccctcgccaacaaacagttgaaatttaagggaagaagcaaaagctaaactgtctttgaccctaagatagatagaaagctatttatttgtcttcagtgttcaaggcatgactagtatttctaattagcctaataaattcccacactttctgaagtgaacactaatggtattgtcctactaaaactgtcattgtttctttttttttaactggtcagtcattcacaataagctatgagggtaaataaatatgtgttataacaagtaaaccgtagttgcaagaatataccatgaagattaaagtaggctgggtttcatttccatcttcccacacatctcattgaatttgatggttgacttaattggcaccataactttgtatgatattatacattaacctttatttatgtaaagtaaaatgccttatatattaaagagtaagtgcaataatatgaaatagcctgtacattttaaaaatgttgtcaccaagttatataaatccacatctctgtaaacaaccttttttaagtaattttaaaaaaaataaacactctgcttactacttga

SEQ ID NO: 2641 - protein, 137 aa, Homo sapiens [sequence omitted]

SEQ ID NO: 2642 - DNA, 3061 bp, Homo sapiens
acagaacaaaggatgcaagtacagcagcaacacagccaggagggcagccccagaattgggaggccaacagtgctactgggctcaagtgctgttataagtggtgcggctgaacaagctggaataatagaagctggagatgaaattcttgctattaatgggaaacctctggttgggctcatgcactttgatgcctggaatattatgaagtctgtcccagaaggacctgtgcagttattaattagaaagcataggaattcttcatgaattttaacaagaatcattttctcagttctcttctttctttagcaaatcagagtgacttctttaaaccacaggttgttgaaatggccaacactggtacagacacggactataaaaatctccaagcttgtgcttacacatgaagcctgacttaactgtatgtgcaacagcaatgaaattaactccagaagccttccacctgcgtcacccaggccgggagggttccttcgttccagtgcctgtcccctacctttatgttatgtttactgatggggatacaagatgtgacacacccttctttatttgaaacaaacaaacatttagctagacctttgcttccttcttgccagctctcccaacatacccaatcctggtgatcagggaactaaaagtctgagggggacacaaatgtcacacctaagaggacaatcaatcattttgtatgattttgtaagtaaatgacagaatgcttttaggcacattcaatggaaggaggagatgtaggtctgtatatgttaccctgaaaagagaataagacttacttaaaaaaatgaattatgacctgttaggctgagctcaggaattgtccaaaaaggaaaaagcaaaataattaattgagagtattttttagtgagtgtaatgtataatgtacgtatgcaaagttcaactcaataggttattgatcaccatgaagtattgatcattttctatctcaaaagtgtaagccataaggctgttttacagaatagcacttctgataagctgtattaaatagccatgagcttcactgcttagagggagcagaaaggtcaacatctaaaagcaccttacaactagtttttgaacctgtcttgataagtgcttgaattcaagactggtcagtccaagagcagacaaaaatatcacaagtcagtcagtcactgggtttccatttctgaattttatgcactccaaccatgaatttaaactaaatttttagaaatcaagtatctttctaagtgtccttggatttatagacaatgtatgtacaatccaaatagaggagcttaatggaatccttttaggagactggttggtttttttccctctttcccaacatgtttaagaaatgtaacattctaagtattggatctcttttcttgacctagtataatgacaactgcagtgacttaagtttttgctgttttcgttttcccgctttgcaatttcctccttttgccaaaaatgttttcctacagaagactgtcgtgactcacgctacttgggaaactcactctggccactcctcctctggtggcatgagctgcttcccagtagctattccgattggatattccgttcgtcgtcacatagctggcttttctctcctcatgatgtaccttattttcttaggtaaataattccaaactctcatcgggtcataaagaggaggagaaacagggtgagtcaaggtaaaggagcagaaatgtagttacaagccaggtcgtcttcagtggcacaaaccaacccgttgagccctgacaacatgagtggagagtgcatttgccatacctgtgtgcatgacactaagattttatgttggagatacttctttaaataacctacagcttgggtctatggctgtgacccccagattcatggaggggctttagccatcagctttgtacatcatcatttttctgaatgaccaatcccactaaacatctttgaagtcggcctagagaggtccttcagatgagagagaaatagctggcttgtctgagtccagatttctcatcaactggcaatacaaaggaaaatatggtacaggagttagttagaaaggtcttattgattttacttctacttttcactacagttacaggtagaatactgtaggaagtcagtgcaaggtgcatgcttgattgatagatattgattgattgtttttcagtctctggggtcagttttgtggtttctgctttcttgcctaaatcaaagactatttcaagtcaacaacactgaaaactgcttttcgcctccactcttacagctgtgcctaataataattaattaataaacgcacagccctatgtgaacagacaggaatttcttgtgcaatgtggagcaaatggaatggtctccttccgcaagtctttttaatcctcatatctggagtacaagggtagacctctggcttaccacatacactatgctaaagtcatcagccactgctactacatcttgccagaaggtttccctcgccaacaaacagttgaaatttaagggaagaagcaaaagctaaactgtctttgaccctaagatagatagaaagctatttatttgtcttcagtgttcaaggcatgactagtatttctaattagcctaataaattcccacactttctgaagtgaacactaatggtattgtcctactaaaactgtcattgtttctttttttttaactggtcagtcattcacaataagctatgagggtaaataaatatgtgttataacaagtaaaccgtagttgcaagaatataccatgaagattaaagtaggctgggtttcatttccatcttcccacacatctcattgaatttgatggttgacttaattggcaccataactttgtatgatattatacattaacctttatttatgtaaagtaaaatgccttatatattaaagagtaagtgcaataatatgaaatagcctgtacattttaaaaatgttgtcaccaagttatataaatccacatctctgtaaacaaccttttttaagtaattttaaaaaaaataaacactctgcttactacttga

SEQ ID NO: 2643 - protein, 83 aa, Homo sapiens
MQVQQQHSQEGSPRIGRPTVLLGSSAVISGAAEQAGIIEAGDEILAINGKPLVGLMHFDAWNIMKSVPEGPVQLLIRKHRNSS

SEQ ID NO: 2644 - DNA, 1049 bp, Homo sapiens
gcattgatctttttatgtactgattcacgaggacttaagcctatgatgcagttgttttcccagtcttgggagctggcagatgccattacccaggtcaggagatagaaccttgccagctataccctgaagctgttcaagtctttctcccaattacagtcttcataagagttgttagaaggactgaatgagatgaagtagaggaaagtcttctaggacaggggtcctcaacccttgggccacagactggtggcaggagggctgcacagcagatgggatgcctggttgcaagaaaacaagctcagggctcccacagattctacgtgatgcagttttcacagatttgtggccagatgctagagacaaaggctgagaagttgtccaggacgtcatattcttgctttgctggaggcagatctgaaggatgtcatctctcctgtggcttcttctagtgtggggtcccgaagcctggcttccccagccgatgtgctgctttagtcagcgtctgccctggtccttcggttcgcaggctcacacgcttttttgggttgtgtccctttggactgcagaggctacgtgtcctgtgaccaaccacgaaggcggccactcccgctcccctcaggagtgtcttaaaatacctccattttagctaccctattgaatgacaggttagctgggtgctgggttttcaggtgatggacattttccctcagtcctctgaaggtgttgctggcttcaggcattgatgccgccactctgattgttgtatgcagtgagcaaactagaattttctcttggctttctagattttcttctttatattctgaaactttattatatcaaggtttgaattttattttttttggagacagggtcctactctgtcatccaggctggagtgcaatggtgcagtcctgctcactgcagcctccaagtccagggctgaagcgatccttctgcctcagcctcctaagtagctgggatcacaggtgtgcaccactctgcctaacaaggcttgttttttgtttgtttgtttgttttaaataaataca

SEQ ID NO: 2645 - protein, 59 aa, Homo sapiens
MGCLVARKQAQGSHRFYVMQFSQICGQMLETKAEKLSRTSYSCFAGGRSEGCHLSCGFF

SEQ ID NO: 2646 - DNA, 632 bp, Homo sapiens
atatatcagccagaatctgttaacaattagaagctgacagcctgggcaacatggcaagaccccatctctaccaaaaatataaaaaaaaaagctgtgcatggtggtgtatgcctgtggtagcagctactctgaaggctgaggtggtgcggctgaacaagctggaataatagaagctggagatgaaattcttgctattaatgggaaacctctggttgggctcatgcactttgatgcctggaatattatgaagtctgtcccagaaggacctgtgcagttattaattagaaagcataggaattcttcatgaattttaacaagaatcattttctcagttctcttctttctttagcaaatcagagtgacttctttaaaccacaggttgttgaaatggccaacactggtacagacacggactataaaaatctccaagcttgtgcttacacatgaagcctgacttaactgtatgtgcaacagcaatgaaattaactccagaagccttccacctgcgtcacccaggccgggagggttccttcgttccagtgcctgtcccctacctttatgttatgtttactgatggggatacaagatgtgacacacccttctttatttgaaacaaacaaacatttagctag

SEQ ID NO: 2647 - protein, 38 aa, Homo sapiens
MARPHLYQKYKKKSCAWWCMPVVAATLKAEVVRLNKLE

SEQ ID NO: 2648 - DNA, 3104 bp, Homo sapiens
atatatcagccagaatctgttaacaattagaagctgacagcctgggcaacatggcaagaccccatctctaccaaaaatataaaaaaaaaagctgtgcatggtggtgtatgcctgtggtagcagctactctgaaggctgaggtggtgcggctgaacaagctggaataatagaagctggagatgaaattcttgctattaatgggaaacctctggttgggctcatgcactttgatgcctggaatattatgaagtctgtcccagaaggacctgtgcagttattaattagaaagcataggaattcttcatgaattttaacaagaatcattttctcagttctcttctttctttagcaaatcagagtgacttctttaaaccacaggttgttgaaatggccaacactggtacagacacggactataaaaatctccaagcttgtgcttacacatgaagcctgacttaactgtatgtgcaacagcaatgaaattaactccagaagccttccacctgcgtcacccaggccgggagggttccttcgttccagtgcctgtcccctacctttatgttatgtttactgatggggatacaagatgtgacacacccttctttatttgaaacaaacaaacatttagctagacctttgcttccttcttgccagctctcccaacatacccaatcctggtgatcagggaactaaaagtctgagggggacacaaatgtcacacctaagaggacaatcaatcattttgtatgattttgtaagtaaatgacagaatgcttttaggcacattcaatggaaggaggagatgtaggtctgtatatgttaccctgaaaagagaataagacttacttaaaaaaatgaattatgacctgttaggctgagctcaggaattgtccaaaaaggaaaaagcaaaataattaattgagagtattttttagtgagtgtaatgtataatgtacgtatgcaaagttcaactcaataggttattgatcaccatgaagtattgatcattttctatctcaaaagtgtaagccataaggctgttttacagaatagcacttctgataagctgtattaaatagccatgagcttcactgcttagagggagcagaaaggtcaacatctaaaagcaccttacaactagtttttgaacctgtcttgataagtgcttgaattcaagactggtcagtccaagagcagacaaaaatatcacaagtcagtcagtcactgggtttccatttctgaattttatgcactccaaccatgaatttaaactaaatttttagaaatcaagtatctttctaagtgtccttggatttatagacaatgtatgtacaatccaaatagaggagcttaatggaatccttttaggagactggttggtttttttccctctttcccaacatgtttaagaaatgtaacattctaagtattggatctcttttcttgacctagtataatgacaactgcagtgacttaagtttttgctgttttcgttttcccgctttgcaatttcctccttttgccaaaaatgttttcctacagaagactgtcgtgactcacgctacttgggaaactcactctggccactcctcctctggtggcatgagctgcttcccagtagctattccgattggatattccgttcgtcgtcacatagctggcttttctctcctcatgatgtaccttattttcttaggtaaataattccaaactctcatcgggtcataaagaggaggagaaacagggtgagtcaaggtaaaggagcagaaatgtagttacaagccaggtcgtcttcagtggcacaaaccaacccgttgagccctgacaacatgagtggagagtgcatttgccatacctgtgtgcatgacactaagattttatgttggagatacttctttaaataacctacagcttgggtctatggctgtgacccccagattcatggaggggctttagccatcagctttgtacatcatcatttttctgaatgaccaatcccactaaacatctttgaagtcggcctagagaggtccttcagatgagagagaaatagctggcttgtctgagtccagatttctcatcaactggcaatacaaaggaaaatatggtacaggagttagttagaaaggtcttattgattttacttctacttttcactacagttacaggtagaatactgtaggaagtcagtgcaaggtgcatgcttgattgatagatattgattgattgtttttcagtctctggggtcagttttgtggtttctgctttcttgcctaaatcaaagactatttcaagtcaacaacactgaaaactgcttttcgcctccactcttacagctgtgcctaataataattaattaataaacgcacagccctatgtgaacagacaggaatttcttgtgcaatgtggagcaaatggaatggtctccttccgcaagtctttttaatcctcatatctggagtacaagggtagacctctggcttaccacatacactatgctaaagtcatcagccactgctactacatcttgccagaaggtttccctcgccaacaaacagttgaaatttaagggaagaagcaaaagctaaactgtctttgaccctaagatagatagaaagctatttatttgtcttcagtgttcaaggcatgactagtatttctaattagcctaataaattcccacactttctgaagtgaacactaatggtattgtcctactaaaactgtcattgtttctttttttttaactggtcagtcattcacaataagctatgagggtaaataaatatgtgttataacaagtaaaccgtagttgcaagaatataccatgaagattaaagtaggctgggtttcatttccatcttcccacacatctcattgaatttgatggttgacttaattggcaccataactttgtatgatattatacattaacctttatttatgtaaagtaaaatgccttatatattaaagagtaagtgcaataatatgaaatagcctgtacattttaaaaatgttgtcaccaagttatataaatccacatctctgtaaacaaccttttttaagtaattttaaaaaaaataaacactctgcttactacttga

SEQ ID NO: 2649 - protein, 38 aa, Homo sapiens; identical to SEQ ID NO: 2647

SEQ ID NO: 2650 - DNA, 2759 bp, Homo sapiens
aaaaaaaaaaaacaaaaaaaaccgtaatgttaaattttatgacatttaaatagctaacattataaaataatacaatacaatggatttaattttgatattatggaattttaactagaaacttatagcttagccaacaacgtgaatgaaggctatagggttctaatacttgtctacagcggtgtaacattttccctcccatctctccctctggatttttccacttttaaaatggattctatatctcaatgtagcccaagaaacctttcttacctctataatttgttagcaagttttaatgacatttgtttaaaaatttgtttcttcactgatgtgaaataccacctttataatatatactgaattcttaaatataatttagtcttatttctgggactaataataatgcttaaatgaatttctggatcacatagtccaaggttcggtgatgagtcagtgagtataaactgtcctagtatgttgctttactaattattgcacagaattttcattcattattatatctaatctggttaggttaaatattggatttccttaacataaaagtaatttaaaatctgaactttgatactacatgaaagcttgaggctttaagcataatgaattatttatataattgtttgtttttcatttaatgagatcaactcagaaaaggcattcgtggatcctttcattctttttgctttctttttaggtaatctgtaagtcagatgctccaacaggggatgttcttcttgatgaagctctgaagcatgttaaggaaactcagcctccagaaacggtccagaactggattgaattacttagtggtgagacatggaatccattaaaattgcattatcagttaagaaatgtacgggaacgattagctaaaaacctggtggaaaagggtgtattgacaacagagaaacagaacttcctactttttgacatgacaacacatcccctcaccaataacaacattaagcagcgcctcatcaagaaagtacaggaagccgttcttgacaaatgggtgaatgaccctcaccgcatggacaggcgcttgctggccctcatttacctggctcatgcctcggacgtcctggagaatgcttttgctcctcttctggacgagcagtatgatttggctaccaagagagtgcggcagcttctcgacttagaccctgaagtggaatgtctgaaggccaacaccaatgaggttctgtgggcggtggtggcggcgttcaccaagtaactctgctcggggtgaaccattctcctttctctcaagtaaaccagtagtttttcttctgttgacttctggttttctgtaatttgtactttcccacactataattggcttctgttttacaaaatggtgggtggctttttcttttttgtacgtgtacaggattctgctggtacgagaggccttcctctttctgtttttaaaaaaagttttactgccatattggcattccattccctgttgccatcctcactgttacctgttttgggtttctggtctactttgactttcaaagtacctccagcctcctcatacgcacagcttttggatgacctcagcttgagtttctccatatgtgcatgtacatctagcattctgcctacagttcagacagaagtcacaaaaaggccttcaactcaccaaaggtaaatatctgtatctattaggacattttttacatagacttcagttgagatgtatacttagcaaaattatttttaaattgaaacagcacagtaaatacttaatataaaatgtcccttggattttgcttcccatgtaaatctattgtattattacacttgttataattttaactataaaggtccaattgtttcacagagccagtttgggatgggctgcattccatttatgctgtatatagtttgaattatatataaattaccccttcttctggccacccctgctcccatcttagtattttgcaagatctaatcagttgtacacctggtgcccctcgcttgcttcaatcatggttatttgatggcaaaatcgacctcttgtcgctgaaggagagagaaaagatgtgtgtctgattggtcctgggattttttgagctgtgccatttatggtactctttgcctatgcatccccttgttagattttttttaaattttatcttactgtttttataatttctattgggaagaggcttgtgaccagtaccaatcttgagtttctttttctgtccacaagtaaattaatatctgctctgaaatgtcatttatctactcacacattcttggggaaaaaaatcaaatgtcagtcctagcagatgttgcatgtaaattggtagcaagtaatgattacaacccagaggattaagaattttgtaacagaaagctctatgttttaattttttatatacaattaggataattagcattgtcagactataaacctttgctttttaaagtttatttttactatttctttatcactttattgtatcatcaccattggtttcataatgtaaatactatatgttgaacaaattaaatgtcaaaattttttattaccatagtccatgttaatagtggggctttcaggtgtttagagattttttttgttgttgttaacattcattgcaaaagtactagatggtgtataactctagagttgaattttaagggattccctaatatgtatactatctttttatctgaagtaataaataaacaatgatcttgaaagtgcctgaatcagagcaagc

SEQ ID NO: 2651 - protein, 43 aa, Homo sapiens [sequence omitted]

SEQ ID NO: 2652 - DNA, 3189 bp, Homo sapiens
agcagagagcaaagtccttcctgccgatcctgcagaccccggagtccaaatgggaccccgtccacacgaccgcggagtcgcctccgaagacggcggtgtctggggcgtggagggcacggctggaggctgagtggggtccaccttcgcgtggcccaggctcttccattcacggggggccccgccaggttcaggctccagccctgggtagtgaaggggaaacggggaacggaaggagggagggcacgtcacgggagcaggactgcaggaccgcgggtcagggggcgcaggaacgccaaagaaaagacaagcaccgagggccgggaagggtgtaggctgcagtggcagcggatccccggccgccgcttccggcgcctcccggcccagctctcccgcgccgactctgccacatcctccggtgacgtcagccggggccgccatattggaaaggcgccgccgccgcctccgccttggagctcggggtgtttcggggactgcggccacaggcaggaaggcgctcctctcctgccccgccgacgcccggccagcccgcttcgccctgacctgtttcctcatgactgcccccggccctgctgccgacggacgtcgccccggcgtccggatttaacacggaaacccggatcggaggccgcgcggggaggaggagggcgacccggtcggtcctgcgaccctctcggcccggctcggcgcctcggcgggagccatgacctcgctgacccagcgcagctccggcctggtgcagcggcgcaccgaggcctcccgcaacgccgccgacaaggagcgggcggcgggcggcggcgccggcagcagcgaggacgacgcgcagagccgccgcgacgagcaggacgacgacgacaagggcgactccaaggaaacgcggctgaccctgatggaggaagtgctcctgctgggcctcaaggaccgcgaggtgcgggcgcggcgggctgggcggggggcggcggcgcggggcccgggcgccaggtgagctccagggttacacatcattttggaatgactgtatatcatctggattacgtggctgtatgttaattgaattagcattgagaggaaggttacaactagaggcttgtggaatgagacgtaaaagtctattaacaagaaaggtaatctgtaagtcagatgctccaacaggggatgttcttcttgatgaagctctgaagcatgttaaggaaactcagcctccagaaacggtccagaactggattgaattacttagtggtgagacatggaatccattaaaattgcattatcagttaagaaatgtacgggaacgattagctaaaaacctggtggaaaagggtgtattgacaacagagaaacagaacttcctactttttgacatgacaacacatcccctcaccaataacaacattaagcagcgcctcatcaagaaagtacaggaagccgttcttgacaaatgggtgaatgaccctcaccgcatggacaggcgcttgctggccctcatttacctggctcatgcctcggacgtcctggagaatgcttttgctcctcttctggacgagcagtatgatttggctaccaagagagtgcggcagcttctcgacttagaccctgaagtggaatgtctgaaggccaacaccaatgaggttctgtgggcggtggtggcggcgttcaccaagtaactctgctcggggtgaaccattctcctttctctcaagtaaaccagtagtttttcttctgttgacttctggttttctgtaatttgtactttcccacactataattggcttctgttttacaaaatggtgggtggctttttcttttttgtacgtgtacaggattctgctggtacgagaggccttcctctttctgtttttaaaaaaagttttactgccatattggcattccattccctgttgccatcctcactgttacctgttttgggtttctggtctactttgactttcaaagtacctccagcctcctcatacgcacagcttttggatgacctcagcttgagtttctccatatgtgcatgtacatctagcattctgcctacagttcagacagaagtcacaaaaaggccttcaactcaccaaaggtaaatatctgtatctattaggacattttttacatagacttcagttgagatgtatacttagcaaaattatttttaaattgaaacagcacagtaaatacttaatataaaatgtcccttggattttgcttcccatgtaaatctattgtattattacacttgttataattttaactataaaggtccaattgtttcacagagccagtttgggatgggctgcattccatttatgctgtatatagtttgaattatatataaattaccccttcttctggccacccctgctcccatcttagtattttgcaagatctaatcagttgtacacctggtgcccctcgcttgcttcaatcatggttatttgatggcaaaatcgacctcttgtcgctgaaggagagagaaaagatgtgtgtctgattggtcctgggattttttgagctgtgccatttatggtactctttgcctatgcatccccttgttagattttttttaaattttatcttactgtttttataatttctattgggaagaggcttgtgaccagtaccaatcttgagtttctttttctgtccacaagtaaattaatatctgctctgaaatgtcatttatctactcacacattcttggggaaaaaaatcaaatgtcagtcctagcagatgttgcatgtaaattggtagcaagtaatgattacaacccagaggattaagaattttgtaacagaaagctctatgttttaattttttatatacaattaggataattagcattgtcagactataaacctttgctttttaaagtttatttttactatttctttatcactttattgtatcatcaccattggtttcataatgtaaatactatatgttgaacaaattaaatgtcaaaattttttattaccatagtccatgttaatagtggggctttcaggtgtttagagattttttttgttgttgttaacattcattgcaaaagtactagatggtgtataactctagagttgaattttaagggattccctaatatgtatactatctttttatctgaagtaataaataaacaatgatcttgaaagtgcctgaatcagagcaagc

SEQ ID NO: 2653 - protein, 206 aa, Homo sapiens
MLIELALRGRLQLEACGMRRKSLLTRKVICKSDAPTGDVLLDEALKHVKETQPPETVQNWIELLSGETWNPLKLHYQLRNVRERLAKNLVEKGVLTTEKQNFLLFDMTTHPLTNNNIKQRLIKKVQEAVLDKWVNDPHRMDRRLLALIYLAHASDVLENAFAPLLDEQYDLATKRVRQLLDLDPEVECLKANTNEVLWAVVAAFTK

SEQ ID NO: 2654 - DNA, 2993 bp, Homo sapiens
agcagagagcaaagtccttcctgccgatcctgcagaccccggagtccaaatgggaccccgtccacacgaccgcggagtcgcctccgaagacggcggtgtctggggcgtggagggcacggctggaggctgagtggggtccaccttcgcgtggcccaggctcttccattcacggggggccccgccaggttcaggctccagccctgggtagtgaaggggaaacggggaacggaaggagggagggcacgtcacgggagcaggactgcaggaccgcgggtcagggggcgcaggaacgccaaagaaaagacaagcaccgagggccgggaagggtgtaggctgcagtggcagcggatccccggccgccgcttccggcgcctcccggcccagctctcccgcgccgactctgccacatcctccggtgacgtcagccggggccgccatattggaaaggcgccgccgccgcctccgccttggagctcggggtgtttcggggactgcggccacaggcaggaaggcgctcctctcctgccccgccgacgcccggccagcccgcttcgccctgacctgtttcctcatgactgcccccggccctgctgccgacggacgtcgccccggcgtccggatttaacacggaaacccggatcggaggccgcgcggggaggaggagggcgacccggtcggtcctgcgaccctctcggcccggctcggcgcctcggcgggagccatgacctcgctgacccagcgcagctccggcctggtgcagcggcgcaccgaggcctcccgcaacgccgccgacaaggagcgggcggcgggcggcggcgccggcagcagcgaggacgacgcgcagagccgccgcgacgagcaggacgacgacgacaagggcgactccaaggaaacgcggctgaccctgatggaggaagtgctcctgctgggcctcaaggaccgcgaggtaatctgtaagtcagatgctccaacaggggatgttcttcttgatgaagctctgaagcatgttaaggaaactcagcctccagaaacggtccagaactggattgaattacttagtggtgagacatggaatccattaaaattgcattatcagttaagaaatgtacgggaacgattagctaaaaacctggtggaaaagggtgtattgacaacagagaaacagaacttcctactttttgacatgacaacacatcccctcaccaataacaacattaagcagcgcctcatcaagaaagtacaggaagccgttcttgacaaatgggtgaatgaccctcaccgcatggacaggcgcttgctggccctcatttacctggctcatgcctcggacgtcctggagaatgcttttgctcctcttctggacgagcagtatgatttggctaccaagagagtgcggcagcttctcgacttagaccctgaagtggaatgtctgaaggccaacaccaatgaggttctgtgggcggtggtggcggcgttcaccaagtaactctgctcggggtgaaccattctcctttctctcaagtaaaccagtagtttttcttctgttgacttctggttttctgtaatttgtactttcccacactataattggcttctgttttacaaaatggtgggtggctttttcttttttgtacgtgtacaggattctgctggtacgagaggccttcctctttctgtttttaaaaaaagttttactgccatattggcattccattccctgttgccatcctcactgttacctgttttgggtttctggtctactttgactttcaaagtacctccagcctcctcatacgcacagcttttggatgacctcagcttgagtttctccatatgtgcatgtacatctagcattctgcctacagttcagacagaagtcacaaaaaggccttcaactcaccaaaggtaaatatctgtatctattaggacattttttacatagacttcagttgagatgtatacttagcaaaattatttttaaattgaaacagcacagtaaatacttaatataaaatgtcccttggattttgcttcccatgtaaatctattgtattattacacttgttataattttaactataaaggtccaattgtttcacagagccagtttgggatgggctgcattccatttatgctgtatatagtttgaattatatataaattaccccttcttctggccacccctgctcccatcttagtattttgcaagatctaatcagttgtacacctggtgcccctcgcttgcttcaatcatggttatttgatggcaaaatcgacctcttgtcgctgaaggagagagaaaagatgtgtgtctgattggtcctgggattttttgagctgtgccatttatggtactctttgcctatgcatccccttgttagattttttttaaattttatcttactgtttttataatttctattgggaagaggcttgtgaccagtaccaatcttgagtttctttttctgtccacaagtaaattaatatctgctctgaaatgtcatttatctactcacacattcttggggaaaaaaatcaaatgtcagtcctagcagatgttgcatgtaaattggtagcaagtaatgattacaacccagaggattaagaattttgtaacagaaagctctatgttttaattttttatatacaattaggataattagcattgtcagactataaacctttgctttttaaagtttatttttactatttctttatcactttattgtatcatcaccattggtttcataatgtaaatactatatgttgaacaaattaaatgtcaaaattttttattaccatagtccatgttaatagtggggctttcaggtgtttagagattttttttgttgttgttaacattcattgcaaaagtactagatggtgtataactctagagttgaattttaagggattccctaatatgtatactatctttttatctgaagtaataaataaacaatgatcttgaaagtgcctgaatcagagcaagc

SEQ ID NO: 2655 - protein, 254 aa, Homo sapiens
MTSLTQRSSGLVQRRTEASRNAADKERAAGGGAGSSEDDAQSRRDEQDDDDKGDSKETRLTLMEEVLLLGLKDREVICKSDAPTGDVLLDEALKHVKETQPPETVQNWIELLSGETWNPLKLHYQLRNVRERLAKNLVEKGVLTTEKQNFLLFDMTTHPLTNNNIKQRLIKKVQEAVLDKWVNDPHRMDRRLLALIYLAHASDVLENAFAPLLDEQYDLATKRVRQLLDLDPEVECLKANTNEVLWAVVAAFTK

SEQ ID NO: 2656 - DNA, 3027 bp, Homo sapiens
agcagagagcaaagtccttcctgccgatcctgcagaccccggagtccaaatgggaccccgtccacacgaccgcggagtcgcctccgaagacggcggtgtctggggcgtggagggcacggctggaggctgagtggggtccaccttcgcgtggcccaggctcttccattcacggggggccccgccaggttcaggctccagccctgggtagtgaaggggaaacggggaacggaaggagggagggcacgtcacgggagcaggactgcaggaccgcgggtcagggggcgcaggaacgccaaagaaaagacaagcaccgagggccgggaagggtgtaggctgcagtggcagcggatccccggccgccgcttccggcgcctcccggcccagctctcccgcgccgactctgccacatcctccggtgacgtcagccggggccgccatattggaaaggcgccgccgccgcctccgccttggagctcggggtgtttcggggactgcggccacaggcaggaaggcgctcctctcctgccccgccgacgcccggccagcccgcttcgccctgacctgtttcctcatgactgcccccggccctgctgccgacggacgtcgccccggcgtccggatttaacacggaaacccggatcggaggccgcgcggggaggaggagggcgacccggtcggtcctgcgaccctctcggcccggctcggcgcctcggcgggagccatgacctcgctgacccagcgcagagagccgccgcgacgagcaggacgacgacgacaagggcgactccaaggaaacgcggctgaccctgatggaggaagtgctcctgctgggcctcaaggaccgcgagggttacacatcattttggaatgactgtatatcatctggattacgtggctgtatgttaattgaattagcattgagaggaaggttacaactagaggcttgtggaatgagacgtaaaagtctattaacaagaaaggtaatctgtaagtcagatgctccaacaggggatgttcttcttgatgaagctctgaagcatgttaaggaaactcagcctccagaaacggtccagaactggattgaattacttagtggtgagacatggaatccattaaaattgcattatcagttaagaaatgtacgggaacgattagctaaaaacctggtggaaaagggtgtattgacaacagagaaacagaacttcctactttttgacatgacaacacatcccctcaccaataacaacattaagcagcgcctcatcaagaaagtacaggaagccgttcttgacaaatgggtgaatgaccctcaccgcatggacaggcgcttgctggccctcatttacctggctcatgcctcggacgtcctggagaatgcttttgctcctcttctggacgagcagtatgatttggctaccaagagagtgcggcagcttctcgacttagaccctgaagtggaatgtctgaaggccaacaccaatgaggttctgtgggcggtggtggcggcgttcaccaagtaactctgctcggggtgaaccattctcctttctctcaagtaaaccagtagtttttcttctgttgacttctggttttctgtaatttgtactttcccacactataattggcttctgttttacaaaatggtgggtggctttttcttttttgtacgtgtacaggattctgctggtacgagaggccttcctctttctgtttttaaaaaaagttttactgccatattggcattccattccctgttgccatcctcactgttacctgttttgggtttctggtctactttgactttcaaagtacctccagcctcctcatacgcacagcttttggatgacctcagcttgagtttctccatatgtgcatgtacatctagcattctgcctacagttcagacagaagtcacaaaaaggccttcaactcaccaaaggtaaatatctgtatctattaggacattttttacatagacttcagttgagatgtatacttagcaaaattatttttaaattgaaacagcacagtaaatacttaatataaaatgtcccttggattttgcttcccatgtaaatctattgtattattacacttgttataattttaactataaaggtccaattgtttcacagagccagtttgggatgggctgcattccatttatgctgtatatagtttgaattatatataaattaccccttcttctggccacccctgctcccatcttagtattttgcaagatctaatcagttgtacacctggtgcccctcgcttgcttcaatcatggttatttgatggcaaaatcgacctcttgtcgctgaaggagagagaaaagatgtgtgtctgattggtcctgggattttttgagctgtgccatttatggtactctttgcctatgcatccccttgttagattttttttaaattttatcttactgtttttataatttctattgggaagaggcttgtgaccagtaccaatcttgagtttctttttctgtccacaagtaaattaatatctgctctgaaatgtcatttatctactcacacattcttggggaaaaaaatcaaatgtcagtcctagcagatgttgcatgtaaattggtagcaagtaatgattacaacccagaggattaagaattttgtaacagaaagctctatgttttaattttttatatacaattaggataattagcattgtcagactataaacctttgctttttaaagtttatttttactatttctttatcactttattgtatcatcaccattggtttcataatgtaaatactatatgttgaacaaattaaatgtcaaaattttttattaccatagtccatgttaatagtggggctttcaggtgtttagagattttttttgttgttgttaacattcattgcaaaagtactagatggtgtataactctagagttgaattttaagggattccctaatatgtatactatctttttatctgaagtaataaataaacaatgatcttgaaagtgcctgaatcagagcaagc

SEQ ID NO: 2657 - protein, 236 aa, Homo sapiens
MEEVLLLGLKDREGYTSFWNDCISSGLRGCMLIELALRGRLQLEACGMRRKSLLTRKVICKSDAPTGDVLLDEALKHVKETQPPETVQNWIELLSGETWNPLKLHYQLRNVRERLAKNLVEKGVLTTEKQNFLLFDMTTHPLTNNNIKQRLIKKVQEAVLDKWVNDPHRMDRRLLALIYLAHASDVLENAFAPLLDEQYDLATKRVRQLLDLDPEVECLKANTNEVLWAVVAAFTK

SEQ ID NO: 2658 - DNA, 2731 bp, Homo sapiens
agcagagagcaaagtccttcctgccgatcctgcagaccccggagtccaaatgggaccccgtccacacgaccgcggagtcgcctccgaagacggcggtgtctggggcgtggagggcacggctggaggctgagtggggtccaccttcgcgtggcccaggctcttccattcacggggggccccgccaggttcaggctccagccctgggtagtgaaggggaaacggggaacggaaggagggagggcacgtcacgggagcaggactgcaggaccgcgggtcagggggcgcaggaacgccaaagaaaagacaagcaccgagggccgggaagggtgtaggctgcagtggcagcggatccccggccgccgcttccggcgcctcccggcccagctctcccgcgccgactctgccacatcctccggtgacgtcagccggggccgccatattggaaaggcgccgccgccgcctccgccttggagctcggggtgtttcggggactgcggccacaggcaggaaggcgctcctctcctgccccgccgacgcccggccagcccgcttcgccctgacctgtttcctcatgactgtatatcatctggattacgtggctgtatgttaattgaattagcattgagaggaaggttacaactagaggcttgtggaatgagacgtaaaagtctattaacaagaaaggtaatctgtaagtcagatgctccaacaggggatgttcttcttgatgaagctctgaagcatgttaaggaaactcagcctccagaaacggtccagaactggattgaattacttagtggtgagacatggaatccattaaaattgcattatcagttaagaaatgtacgggaacgattagctaaaaacctggtggaaaagggtgtattgacaacagagaaacagaacttcctactttttgacatgacaacacatcccctcaccaataacaacattaagcagcgcctcatcaagaaagtacaggaagccgttcttgacaaatgggtgaatgaccctcaccgcatggacaggcgcttgctggccctcatttacctggctcatgcctcggacgtcctggagaatgcttttgctcctcttctggacgagcagtatgatttggctaccaagagagtgcggcagcttctcgacttagaccctgaagtggaatgtctgaaggccaacaccaatgaggttctgtgggcggtggtggcggcgttcaccaagtaactctgctcggggtgaaccattctcctttctctcaagtaaaccagtagtttttcttctgttgacttctggttttctgtaatttgtactttcccacactataattggcttctgttttacaaaatggtgggtggctttttcttttttgtacgtgtacaggattctgctggtacgagaggccttcctctttctgtttttaaaaaaagttttactgccatattggcattccattccctgttgccatcctcactgttacctgttttgggtttctggtctactttgactttcaaagtacctccagcctcctcatacgcacagcttttggatgacctcagcttgagtttctccatatgtgcatgtacatctagcattctgcctacagttcagacagaagtcacaaaaaggccttcaactcaccaaaggtaaatatctgtatctattaggacattttttacatagacttcagttgagatgtatacttagcaaaattatttttaaattgaaacagcacagtaaatacttaatataaaatgtcccttggattttgcttcccatgtaaatctattgtattattacacttgttataattttaactataaaggtccaattgtttcacagagccagtttgggatgggctgcattccatttatgctgtatatagtttgaattatatataaattaccccttcttctggccacccctgctcccatcttagtattttgcaagatctaatcagttgtacacctggtgcccctcgcttgcttcaatcatggttatttgatggcaaaatcgacctcttgtcgctgaaggagagagaaaagatgtgtgtctgattggtcctgggattttttgagctgtgccatttatggtactctttgcctatgcatccccttgttagattttttttaaattttatcttactgtttttataatttctattgggaagaggcttgtgaccagtaccaatcttgagtttctttttctgtccacaagtaaattaatatctgctctgaaatgtcatttatctactcacacattcttggggaaaaaaatcaaatgtcagtcctagcagatgttgcatgtaaattggtagcaagtaatgattacaacccagaggattaagaattttgtaacagaaagctctatgttttaattttttatatacaattaggataattagcattgtcagactataaacctttgctttttaaagtttatttttactatttctttatcactttattgtatcatcaccattggtttcataatgtaaatactatatgttgaacaaattaaatgtcaaaattttttattaccatagtccatgttaatagtggggctttcaggtgtttagagattttttttgttgttgttaacattcattgcaaaagtactagatggtgtataactctagagttgaattttaagggattccctaatatgtatactatctttttatctgaagtaataaataaacaatgatcttgaaagtgcctgaatcagagcaagc

SEQ ID NO: 2659 - protein, 206 aa, Homo sapiens; identical to SEQ ID NO: 2653

SEQ ID NO: 2660 - DNA, 3125 bp, Homo sapiens
agcagagagcaaagtccttcctgccgatcctgcagaccccggagtccaaatgggaccccgtccacacgaccgcggagtcgcctccgaagacggcggtgtctggggcgtggagggcacggctggaggctgagtggggtccaccttcgcgtggcccaggctcttccattcacggggggccccgccaggttcaggctccagccctgggtagtgaaggggaaacggggaacggaaggagggagggcacgtcacgggagcaggactgcaggaccgcgggtcagggggcgcaggaacgccaaagaaaagacaagcaccgagggccgggaagggtgtaggctgcagtggcagcggatccccggccgccgcttccggcgcctcccggcccagctctcccgcgccgactctgccacatcctccggtgacgtcagccggggccgccatattggaaaggcgccgccgccgcctccgccttggagctcggggtgtttcggggactgcggccacaggcaggaaggcgctcctctcctgccccgccgacgcccggccagcccgcttcgccctgacctgtttcctcatgactgcccccggccctgctgccgacggacgtcgccccggcgtccggatttaacacggaaacccggatcggaggccgcgcggggaggaggagggcgacccggtcggtcctgcgaccctctcggcccggctcggcgcctcggcgggagccatgacctcgctgacccagcgcagctccggcctggtgcagcggcgcaccgaggcctcccgcaacgccgccgacaaggagcgggcggcgggcggcggcgccggcagcagcgaggacgacgcgcagagccgccgcgacgagcaggacgacgacgacaagggcgactccaaggaaacgcggctgaccctgatggaggaagtgctcctgctgggcctcaaggaccgcgagggttacacatcattttggaatgactgtatatcatctggattacgtggctgtatgttaattgaattagcattgagaggaaggttacaactagaggcttgtggaatgagacgtaaaagtctattaacaagaaaggtaatctgtaagtcagatgctccaacaggggatgttcttcttgatgaagctctgaagcatgttaaggaaactcagcctccagaaacggtccagaactggattgaattacttagtggtgagacatggaatccattaaaattgcattatcagttaagaaatgtacgggaacgattagctaaaaacctggtggaaaagggtgtattgacaacagagaaacagaacttcctactttttgacatgacaacacatcccctcaccaataacaacattaagcagcgcctcatcaagaaagtacaggaagccgttcttgacaaatgggtgaatgaccctcaccgcatggacaggcgcttgctggccctcatttacctggctcatgcctcggacgtcctggagaatgcttttgctcctcttctggacgagcagtatgatttggctaccaagagagtgcggcagcttctcgacttagaccctgaagtggaatgtctgaaggccaacaccaatgaggttctgtgggcggtggtggcggcgttcaccaagtaactctgctcggggtgaaccattctcctttctctcaagtaaaccagtagtttttcttctgttgacttctggttttctgtaatttgtactttcccacactataattggcttctgttttacaaaatggtgggtggctttttcttttttgtacgtgtacaggattctgctggtacgagaggccttcctctttctgtttttaaaaaaagttttactgccatattggcattccattccctgttgccatcctcactgttacctgttttgggtttctggtctactttgactttcaaagtacctccagcctcctcatacgcacagcttttggatgacctcagcttgagtttctccatatgtgcatgtacatctagcattctgcctacagttcagacagaagtcacaaaaaggccttcaactcaccaaaggtaaatatctgtatctattaggacattttttacatagacttcagttgagatgtatacttagcaaaattatttttaaattgaaacagcacagtaaatacttaatataaaatgtcccttggattttgcttcccatgtaaatctattgtattattacacttgttataattttaactataaaggtccaattgtttcacagagccagtttgggatgggctgcattccatttatgctgtatatagtttgaattatatataaattaccccttcttctggccacccctgctcccatcttagtattttgcaagatctaatcagttgtacacctggtgcccctcgcttgcttcaatcatggttatttgatggcaaaatcgacctcttgtcgctgaaggagagagaaaagatgtgtgtctgattggtcctgggattttttgagctgtgccatttatggtactctttgcctatgcatccccttgttagattttttttaaattttatcttactgtttttataatttctattgggaagaggcttgtgaccagtaccaatcttgagtttctttttctgtccacaagtaaattaatatctgctctgaaatgtcatttatctactcacacattcttggggaaaaaaatcaaatgtcagtcctagcagatgttgcatgtaaattggtagcaagtaatgattacaacccagaggattaagaattttgtaacagaaagctctatgttttaattttttatatacaattaggataattagcattgtcagactataaacctttgctttttaaagtttatttttactatttctttatcactttattgtatcatcaccattggtttcataatgtaaatactatatgttgaacaaattaaatgtcaaaattttttattaccatagtccatgttaatagtggggctttcaggtgtttagagattttttttgttgttgttaacattcattgcaaaagtactagatggtgtataactctagagttgaattttaagggattccctaatatgtatactatctttttatctgaagtaataaataaacaatgatcttgaaagtgcctgaatcagagcaagc

SEQ ID NO: 2661 - protein, 298 aa, Homo sapiens; identical to SEQ ID NO: 258

SEQ ID NO: 2662 - DNA, 1292 bp, Homo sapiens
gaacgattagctaaaaacctggtggaaaagggtgtattgacaacagagaaacagaacttcctactttttgacatgacaacacatcccctcaccaataacaacattaagcagcgcctcatcaagaaagtacaggaagccgttcttgacaaatgggtgaatgaccctcaccgcatggacaggcgcttgctggccctcatttacctggctcatgcctcggacgtcctggagaatgcttttgctcctcttctggacgagcagtatgatttggctaccaagagagtgcggcagcttctcgacttagaccctgaagtggaatgtctgaaggccaacaccaatgaggttctgtgggcggtggtggcggcgttcaccaagtaactctgctcggggtgaaccattctcctttctctcaagtaaaccagtagtttttcttctgttgacttctggttttctgtaatttgtactttcccacactataattggcttctgttttacaaaatggtgggtggctttttcttttttgtacgtgtacaggattctgctggtacgagaggccttcctctttctgtttttaaaaaaagttttactgccatattggcattccattccctgttgccatcctcactgttacctgttttgggtttctggtctactttgactttcaaagtacctccagcctcctcatacgcacagcttttggatgacctcagcttgagtttctccatatgtgcatgtacatctagcattctgcctacagttcagacagaagtcacaaaaaggccttcaactcaccaaaggtaaatatctgtatctattaggacattttttacatagacttcagttgagatgtatacttagcaaaattatttttaaattgaaacagcacagtaaatacttaatataaaatgtcccttggattttgcttcccatgtaaatctattgtattattacacttgttataattttaactataaaggtccaattgtttcacagagccagtttgggatgggctgcattccatttatgctgtatatagtttgaattatatataaattaccccttcttctggccacccctgctcccatcttagtattttgcaagatctaatcagttgtacacctggtgcccctcgcttgtggggctttcaggtgtttagagattttttttgttgttgttaacattcattgcaaaagtactagatggtgtataactctagagttgaattttaagggattccctaatatgtatactatctttttatctgaagtaataaataaacaatgatcttgaaagtg

SEQ ID NO: 2663 - protein, 100 aa, Homo sapiens
MVGGFFFFVRVQDSAGTRGLPLSVFKKSFTAILAFHSLLPSSLLPVLGFWSTLTFKVPPASSYAQLLDDLSLSFSICACTSSILPTVQTEVTKRPSTHQR

SEQ ID NO: 2664 - DNA, 487 bp, Homo sapiens
aaaaaaaaaaaacaaaaaaaaccgtaatgttaaattttatgacatttaaatagctaacattataaaataatacaatacaatggatttaattttgatattatggaattttaactagaaacttatagcttagccaacaacgtgaatgaaggctatagggttctaatacttgtctacagcggtgtaacattttccctcccatctctccctctggatttttccacttttaaaatggattctatatctcaatgtagctttctgtttggaaacagatttttgctcttgtcgcccaggctggagtgcaaaggtgcgatctcagctcactgcagcctccacctcctgggttcaagcaattctcctgcctcagcctcccaagtagctgggtttacaggcatgcgccaccacacctggctaatttttgtattattagtagagaccgggtttcaccatcctgaccaacatggagaaaccccatctttactaaaaatac

SEQ ID NO: 2665 - protein, 85 aa, Homo sapiens
MDSISQCSFLFGNRFLLLSPRLECKGAISAHCSLHLLGSSNSPASASQVAGFTGMRHHTWLIFVLLVETGFHHPDQHGETPSLLK

SEQ ID NO: 2666 - DNA, 624 bp, Homo sapiens
ggttctcatcttgctaaatgacatttagaagcagcataactgcttctaatctaggattaccacacatctaggattctaacagttttcatccattcatcaaatgtttactgagcacatgctctgtgagaggccctttactaagtacaaattcactgaagaacatgtctgtcttcaagttcattcattttagttctgtgtgtcaaagctcatatagtaaactacaaaactaaattatgttgctgttctagaattttttttttttctcttctgagacagagtcttgctctgttacccaggctggagtgcagtggtgcaatctatgctcacttcaacctctgcctcctgggttcaagcgattctcctgcctcaaccttctgagtagctgggattacaggcactcaccaccacacaggggtactttttgtatttttagtagagacaaggtttcgccatgttggccaggctggtctcaaactcatgacctcatgtgatccacccaccactttgggaggctgaggcaaggggattacctgaggcagggagttagcgaccagcctggccaacatggtgaaactccatctctactaaaaatacaaaaattagccaggcagggtggtatgcacc

SEQ ID NO: 2667 - protein, 73 aa, Homo sapiens
RTCLSSSSFILVLCVKAHIVNYKTKLCCCSRIFFFSLLRQSLALLPRLECSGAIYAHFNLCLLGSSDSPASTF

SEQ ID NO: 2668 - DNA, 5004 bp, Homo sapiens
ggagccggatgcgggcggcatcgcggcggtcgcggccttggggatgggcggagccccagccgctagtgctggtggccgccgctgctgccccagctggagcccgagccgccgcctctgcgtccgcgcgtcgctgcttcccagggcggcggtatgctggggaaaggagtagtcggcggtggcggcggcaccaaggcccccaagccctccttcgtgtcgtacgtacgccctgaggaaattcacacaaacgaaaaggaagtaacagagaaggaagtaactcttcacttgttgccaggtgaacagctgctttgtgaagccagcacagtactgaagtatgtccaggaagattcctgtcagcatggggtctatgggaggcttgtctgcacagacttcaagattgccttcttgggtgatgatgaatctgcattggataatgatgaaactcaatttaagaataaggttataggagaaaatgacattacactccactgtgttgatcagatttatggagtgtttgatgagaaaaagaaaactctctttggacaactgaagaaataccctgagaagctcatcatccactgcaaagaccttcgagtgttccagttttgtctgaggtacacaaaggaagaggaagtcaaaaggattgtcagtggcataattcatcatacccaggctcctaaactgcttaaacgattatttctgttttcctatgcgactgctgcacaaaacaatacagtcactgatcccaagaaccataccgtaatgtttgacacacttaaggactggtgttgggaactggaacggaccaaaggcaacatgaagtacaaagcagtgagtgtcaacgaaggctataaagtctgtgagagattgccagcatactttgttgtccccacccctcttcctgaagagaatgtgcagcgctttcagggtcatggcataccaatatggtgttggtcctgccacaatggaagtgcccttttgaaaatgtcagcactgcccaaagaacaggatgacggcattttacaaatccaaaagagcttcttagatggaatttacaagaccatccacaggccaccctatgaaattgttaaaacggaagacctgtcaagcaacttcctgtccctgcaggaaatccagactgcatactctaaatttaaacagctatttctgatagataacagtactgaattttgggacacagatataaaatggttttctctgttggaaagtagcagctggcttgacataatcagacgttgcctgaaaaaagcaatagagattacagaatgtatggaagcacaaaacatgaatgttcttcttttagaggagaatgcatccgacctctgctgtctcatttcctctctggtgcaactgatgatggacccccactgcagaaccagaattggtttccagagcctcatccaaaaggagtgggtcatgggtggccactgtttcttggatcgctgcaaccatctccgccagaacgacaaagaggaggttcctgtgttcctgcttttcctagattgtgtctggcagctggtgcaccagcatcccccggcatttgaattcacagagacttacctgactgttttgtcagatagcctgtatatacctatttttagcaccttcttcttcaattcacctcatcaaaaagatactaacatgcatcaacgacaactttctttgccacttacacaatctaagtcatctcccaaaagaggatttttcagggaagaaacagatcatttaattaaaaaccttctgggcaagagaattagcaaacttattaattcttctgatgagctccaagacaactttcgagagttctatgacagctggcatagcaagtccactgactaccatggtttgttgttaccgcatatcgaggggcccgaaatcaaagtctgggcccagcgctacctacgttggattccagaagcccaaatcctaggtggtggccaagtggccactctgagcaaactcttggaaatgatggaggaagtccagagtttacaagagaagatcgacgagagacaccacagccagcaggccccccaggctgaggccccctgcctgctgaggaactctgcccgcctctcgtctttgtttcctttcgctctgctccagcgacattcctctaagcccgtcttacccaccagtggctggaaagctttgggagatgaagacgatttggccaaacgagaagatgagttcgtggacctaggggatgtgtgacctgtttgttgagtgattgtgaaagaggaatgtgggagattgggacagctgatccctggatttgtgtcacgctacagctcatgctggctgggtccttagcccggcactccgttagaataaacctgggccttcgggaaaagaggtggctctcattatttttcatgattctaaaagactatgcaattaaaaccgcatctgtagtattactaattggaaggaattattacttgacccgtaatagggttgtggccgttttctgatgcctaagtattatacagagcccacaatggccagtttactaccagaaagggcttcagtaagatattcttggacttgatactttcttcagatcctctttgtgccaagataatttatccagtcattgggaatagtaagtttctgtgtaacccatctcaattatagaagcaagttcagctttatgtatttgtatggggagttgaagattcagatagaggtattaagatgtgtggcatttacttaaaccatcacatttttttctttctacgcccccttgcctgtaaaacacctgggaagttccactggtgtcatccatcctgatgcttcagaccaccctcccttcttcacagaccgtgtcactttgcctgtgggtgggggctagccagccaccaccctcttttctgtgctgccagccccaggtcttcctccgcctgctccacaccactcgccgctgtccctctgcactccctgccttggtgcgtgtagtcccagtgtctcactgccaaacctcttggttacgctgcggggatctgtttctttgcctgagatccttcctgaggagcgtccattcctctggagtctctccttgtttggaacaaatcgcttcgcctttttctacttgcctgctgaagctttggagcacttgtgattgcagttttctgccgcaacccctgagccgagttcctcacattcttttacctttatggactgatgggattgggtcacttttgaatgtggctttcataggaaagcagcttaaacataaatatcagaagtgatgattatcatatgatacctcagtgattttaaaagccatagaagaaacttgactatgcctggtcaccttcttggatctgctgtctaaatgatatatatatgatatatatgtgatatatatatatcatatatatgatatatatatatatatcacatatatatgatatatatatgatatatatatatcacatatatatgatatatatatcatatatatgatatatattttttttaatgcaggaaagtatactttgtaaggagcagatttttttgttctcagtggaaccctgtcaaatcgcataaaagaggaaaaaaacaaaactcattagaatgttttaaattgaatgttcgccttttacatatatttgctcttcagtatggatcccaatttgaatgttacatgttcggaaaaactttcagttgctcaagggcaataagaaaatttgaggccgggtgtggtggctcacgcctgtaatcccagcactttgggaggctcaggtgggcgaattgcttgagcccaggagttcgagaccagccggggcaacatggcaaaaccctgtctctactaaaaatacaaaaattagctgggtgtggtggtgcatgcctgtagtcccagctactcgggaggctgaggtgggaggatcccgtgagcctgggaggtggagtttgcagtgagctaagatcgtgccactgcactccggcctgggtgatggagcaagacctcgtctcagaaaattggaaactattgactaagagaagtttctaggtttgcactgaattgtcttttgtacatacagtgaattgttttgctgttctccccactccatattaatgcaggagccaggttggtctgttaggatgaacaaaggttgaggggagggcaggattcgtgcatctgggggccaaacacatgttccgtcttgattgccttaagagttactagcgaggtcagtgttaggcttgcaatagggattttaaaatacactaactagttccttagctaccttcacatacattctataggccttcttaaattagcactaacctccacttccttctctgccccattgcctcccaaatatgctatggagctatttttgttaccacgttataacgtgaatatttatacagtagcctcttcaggctttgtaattttcattccaaaaatgcccggtgtgatgctttacactctacaaagtatggtttaaaggcacaaggtcatggcctttgtcatagcagttgaatgtgcattgacatatttttctatgattttttaaaattacaatagaaaaataagctgttgtaacgtgtaaggtcatgacaatttttgtatttatatttgaaatcagatttctataactcgtatttgtgtacagaattctcaatggatttatatattgtgaaatttttatctgagattgggatgtggattatgcttaacagtgagagctgaaatgagaccatttactttgtttaaaatgctgtactgtgcaagtttggaaatgtaaattaatttactgtatataatatcttgagtttgtttatacctccaagtttttacactgaagataaactagctttaattcaaaactttttttttctttataagggaataagctgttgagctaaacctgtatacttgtgctttttattttctggatgcacaatgaaagtttatacttgtatctcactgcatcatatctgattgcagaaattaaagcacaatttacaagcaat

SEQ ID NO: 2669 - protein, 693 aa, Homo sapiens
MLGKGVVGGGGGTKAPKPSFVSYVRPEEIHTNEKEVTEKEVTLHLLPGEQLLCEASTVLKYVQEDSCQHGVYGRLVCTDFKIAFLGDDESALDNDETQFKNKVIGENDITLHCVDQIYGVFDEKKKTLFGQLKKYPEKLIIHCKDLRVFQFCLRYTKEEEVKRIVSGIIHHTQAPKLLKRLFLFSYATAAQNNTVTDPKNHTVMFDTLKDWCWELERTKGNMKYKAVSVNEGYKVCERLPAYFVVPTPLPEENVQRFQGHGIPIWCWSCHNGSALLKMSALPKEQDDGILQIQKSFLDGIYKTIHRPPYEIVKTEDLSSNFLSLQEIQTAYSKFKQLFLIDNSTEFWDTDIKWFSLLESSSWLDIIRRCLKKAIEITECMEAQNMNVLLLEENASDLCCLISSLVQLMMDPHCRTRIGFQSLIQKEWVMGGHCFLDRCNHLRQNDKEEVPVFLLFLDCVWQLVHQHPPAFEFTETYLTVLSDSLYIPIFSTFFFNSPHQKDTNMHQRQLSLPLTQSKSSPKRGFFREETDHLIKNLLGKRISKLINSSDELQDNFREFYDSWHSKSTDYHGLLLPHIEGPEIKVWAQRYLRWIPEAQILGGGQVATLSKLLEMMEEVQSLQEKIDERHHSQQAPQAEAPCLLRNSARLSSLFPFALLQRHSSKPVLPTSGWKALGDEDDLAKREDEFVDLGDV

SEQ ID NO: 2670 - DNA, 4740 bp, Homo sapiens
ggagccggatgcgggcggcatcgcggcggtcgcggccttggggatgggcggagccccagccgctagtgctggtggccgccgctgctgccccagctggagcccgagccgccgcctctgcgtccgcgcgtcgctgcttcccagggcggcggtatgctggggaaaggagtagtcggcggtggcggcggcaccaaggcccccaagccctccttcgtgtcgtacgtacgccctgaggaaattcacacaaacgaaaaggaagtaacagagaaggaagtaactcttcacttgttgccaggtgaacagctgctttgtgaagccagcacagtactgaagtatgtccaggaagattcctgtcagcatggggtctatgggaggcttgtctgcacagacttcaagattgccttcttgggtgatgatgaatctgcattggataatgatgaaactcaatttaagaataaggttataggagaaaatgacattacactccactgtgttgatcagatttatggagtgtttgatgagaaaaagaaaactctctttggacaactgaagaaataccctgagaagctcatcatccactgcaaagaccttcgagtgttccagttttgtctgaggtacacaaaggaagaggaagtcaaaaggattgtcagtggcataattcatcatacccaggctcctaaactgcttaaacgattatttctgttttcctatgcgactgctgcacaaaacaatacagtcactgatcccaagaaccataccgtaatgtttgacacacttaaggactggtgttgggaactggaacggaccaaaggcaacatgaagtacaaagcagtgagtgtcaacgaaggctataaagtctgtgagagattgccagcatactttgttgtccccacccctcttcctgaagagaatgtgcagcgctttcagggtcatggcataccaatatggtgttggtcctgccacaatggaagtgcccttttgaaaatgtcagcactgcccaaagaacaggatgacggcattttacaaatccaaaagagcttcttagatggaatttacaagaccatccacaggccaccctatgaaattgttaaaacggaagacctgtcaagcaacttcctgtccctgcaggaaatccagactgcatactctaaatttaaacagctatttctgatagataacagtactgaattttgggacacagatataaaatggttttctctgttggaaagtagcagctggcttgacataatcagacgttgcctgaaaaaagcaatagagattacagaatgtatggaagcacaaaacatgaatgttcttcttttagaggagaatgcatccgacctctgctgtctcatttcctctctggtgcaactgatgatggacccccactgcagaaccagaattggtttccagagcctcatccaaaaggagtgggtcatgggtggccactgtttcttggatcgctgcaaccatctccgccagaacgacaaagaggaggttcctgtgttcctgcttttcctagattgtgtctggcagctggtgcaccagcatcccccggcatttgaattcacagagacttacctgactgttttgtcagatagcctgtatatacctatttttagcaccttcttcttcaattcacctcatcaaaaagatactaacatgggtagagaaggccaggatacacaaagcaagcctttgaatctgctcaccgtgtgggattggtcggtgcagtttgaacccaaagcccagacattgctcaaaaaccctctttatgtggaaaagccaaaactggacaaaggccaacggaaaggaatgcgcttcaaacatcaacgacaactttctttgccacttacacaatctaagtcatctcccaaaagaggatttttcagggaagaaacagatcatttaattaaaaaccttctgggcaagagaattagcaaacttattaattcttctgatgagctccaagacaactttcgagagttctatgacagctggcatagcaagtccactgactaccatggtttgttgttaccgcatatcgaggggcccgaaatcaaagtctgggcccagcgctacctacgttggattccagaagcccaaatcctaggtggtggccaagtggccactctgagcaaactcttggaaatgatggaggaagtccagagtttacaagagaagatcgacgagagacaccacagccagcaggccccccaggctgaggccccctgcctgctgaggaactctgcccgcctctcgtctttgtttcctttcgctctgctccagcgacattcctctaagcccgtcttacccaccagtggctggaaagctttgggagatgaagacgatttggccaaacgagaagatgagttcgtggacctaggggatgtgtgacctgtttgttgagtgattgtgaaagaggaatgtgggagattgggacagctgatccctggatttgtgtcacgctacagctcatgctggctgggtccttagcccggcactccgttagaataaacctgggccttcgggaaaagaggtggctctcattatttttcatgattctaaaagactatgcaattaaaaccgcatctgtagtattactaattggaaggaattattacttgacccgtaatagggttgtggccgttttctgatgcctaagtattatacagagcccacaatggccagtttactaccagaaagggcttcagtaagatattcttggacttgatactttcttcagatcctctttgtgccaagataatttatccagtcattgggaatagtaagtttctgtgtaacccatctcaattatagaagcaagttcagctttatgtatttgtatggggagttgaagattcagatagaggtattaagatgtgtggcatttacttaaaccatcacatttttttctttctacgcccccttgcctgtaaaacacctgggaagttccactggtgtcatccatcctgatgcttcagaccaccctcccttcttcacagaccgtgtcactttgcctgtgggtgggggctagccagccaccaccctcttttctgtgctgccagccccaggtcttcctccgcctgctccacaccactcgccgctgtccctctgcactccctgccttggtgcgtgtagtcccagtgtctcactgccaaacctcttggttacgctgcggggatctgtttctttgcctgagatccttcctgaggagcgtccattcctctggagtctctccttgtttggaacaaatcgcttcgcctttttctacttgcctgctgaagctttggagcacttgtgattgcagttttctgccgcaacccctgagccgagttcctcacattcttttacctttatggactgatgggattgggtcacttttgaatgtggctttcataggaaagcagcttaaacataaatatcagaagtgatgattatcatatgatacctcagtgattttaaaagccatagaagaaacttgactatgcctggtcaccttcttggatctgctgtctaatttttttaatgcaggaaagtatactttgtaaggagcagatttttttgttctcagtggaaccctgtcaaatcgcataaaagaggaaaaaaacaaaactcattagaatgttttaaattgaatgttcgccttttacatatatttgctcttcagtatggatcccaatttgaatgttacatgttcggaaaaactttcagttgctcaagggcaataagaaaatttgattggaaactattgactaagagaagtttctaggtttgcactgaattgtcttttgtacatacagtgaattgttttgctgttctccccactccatattaatgcaggagccaggttggtctgttaggatgaacaaaggttgaggggagggcaggattcgtgcatctgggggccaaacacatgttccgtcttgattgccttaagagttactagcgaggtcagtgttaggcttgcaatagggattttaaaatacactaactagttccttagctaccttcacatacattctataggccttcttaaattagcactaacctccacttccttctctgccccattgcctcccaaatatgctatggagctatttttgttaccacgttataacgtgaatatttatacagtagcctcttcaggctttgtaattttcattccaaaaatgcccggtgtgatgctttacactctacaaagtatggtttaaaggcacaaggtcatggcctttgtcatagcagttgaatgtgcattgacatatttttctatgattttttaaaattacaatagaaaaataagctgttgtaacgtgtaaggtcatgacaatttttgtatttatatttgaaatcagatttctataactcgtatttgtgtacagaattctcaatggatttatatattgtgaaatttttatctgagattgggatgtggattatgcttaacagtgagagctgaaatgagaccatttactttgtttaaaatgctgtactgtgcaagtttggaaatgtaaattaatttactgtatataatatcttgagtttgtttatacctccaagtttttacactgaagataaactagctttaattcaaaactttttttttctttataagggaataagctgttgagctaaacctgtatacttgtgctttttattttctggatgcacaatgaaagtttatacttgtatctcactgcatcatatctgattgcagaaattaaagcacaatttacaagcaat

SEQ ID NO: 2671 - protein, 747 aa, Homo sapiens; identical to SEQ ID NO: 261

SEQ ID NO: 2672 - DNA, 2199 bp, Homo sapiens
ggagccggatgcgggcggcatcgcggcggtcgcggccttggggatgggcggagccccagccgctagtgctggtggccgccgctgctgccccagctggagcccgagccgccgcctctgcgtccgcgcgtcgctgcttcccagggcggcggtatgctggggaaaggagtagtcggcggtggcggcggcaccaaggcccccaagccctccttcgtgtcgtacgtacgccctgaggaaattcacacaaacgaaaaggaagtaacagagaaggaagtaactcttcacttgttgccaggtgaacagctgctttgtgaagccagcacagtactgaagtatgtccaggaagattcctgtcagcatggggtctatgggaggcttgtctgcacagacttcaagattgccttcttgggtgatgatgaatctgcattggataatgatgaaactcaatttaagaataaggttataggagaaaatgacattacactccactgtgttgatcagatttatggagtgtttgatgagaaaaagaaaactctctttggacaactgaagaaataccctgagaagctcatcatccactgcaaagaccttcgagtgttccagttttgtctgaggtacacaaaggaagaggaagtcaaaaggattgtcagtggcataattcatcatacccaggctcctaaactgcttaaacgattatttctgttttcctatgcgactgctgcacaaaacaatacagtcactgatcccaagaaccataccgtaatgtttgacacacttaaggactggtgttgggaactggaacggaccaaaggcaacatgaagtacaaagcagtgagtgtcaacgaaggctataaagtctgtgagagattgccagcatactttgttgtccccacccctcttcctgaagagaatgtgcagcgctttcagggtcatggcataccaatatggtgttggtcctgccacaatggaagtgcccttttgaaaatgtcagcactgcccaaagaacaggatgacggcattttacaaatccaaaagagcttcttagatggaatttacaagaccatccacaggccaccctatgaaattgttaaaacggaagacctgtcaagcaacttcctgtccctgcaggaaatccagactgcatactctaaatttaaacagctatttctgatagataacagtactgaattttgggacacagatataaaatggttttctctgttggaaagtagcagctggcttgacataatcagacgttgcctgaaaaaagcaatagagattacagaatgtatggaagcacaaaacatgaatgttcttcttttagaggagaatgcatccgacctctgctgtctcatttcctctctggtgcaactgatgatggacccccactgcagaaccagaattggtttccagagcctcatccaaaaggagtgggtcatgggtggccactgtttcttggatcgctgcaaccatctccgccagaacgacaaagaggagcatcaacgacaactttctttgccacttacacaatctaagtcatctcccaaaagaggatttttcagggaagaaacagatcatttaattaaaaaccttctgggcaagagaattagcaaacttattaattcttctgatgagctccaagacaactttcgagagttctatgacagctggcatagcaagtccactgactaccatggtttgttgttaccgcatatcgaggggcccgaaatcaaagtctgggcccagcgctacctacgttggattccagaagcccaaatcctaggtggtggccaagtggccactctgagcaaactcttggaaatgatggaggaagtccagagtttacaagagaagatcgacgagagacaccacagccagcaggccccccaggctgaggccccctgcctgctgaggaactctgcccgcctctcgtctttgtttcctttcgctctgctccagcgacattcctctaagcccgtcttacccaccagtggctggaaagctttgggagatgaagacgatttggccaaacgagaagatgagttcgtggacctaggggatgtgtgacctgtttgttgagtgattgtgaaagaggaatgtgggagattgggacagctgatccctggatttgtgtcacgctacagctcatgctggctgggtccttagcccggcactccgttagaataaacctgggccttcggg

SEQ ID NO: 2673 - protein, 637 aa, Homo sapiens
MLGKGVVGGGGGTKAPKPSFVSYVRPEEIHTNEKEVTEKEVTLHLLPGEQLLCEASTVLKYVQEDSCQHGVYGRLVCTDFKIAFLGDDESALDNDETQFKNKVIGENDITLHCVDQIYGVFDEKKKTLFGQLKKYPEKLIIHCKDLRVFQFCLRYTKEEEVKRIVSGIIHHTQAPKLLKRLFLFSYATAAQNNTVTDPKNHTVMFDTLKDWCWELERTKGNMKYKAVSVNEGYKVCERLPAYFVVPTPLPEENVQRFQGHGIPIWCWSCHNGSALLKMSALPKEQDDGILQIQKSFLDGIYKTIHRPPYEIVKTEDLSSNFLSLQEIQTAYSKFKQLFLIDNSTEFWDTDIKWFSLLESSSWLDIIRRCLKKAIEITECMEAQNMNVLLLEENASDLCCLISSLVQLMMDPHCRTRIGFQSLIQKEWVMGGHCFLDRCNHLRQNDKEEHQRQLSLPLTQSKSSPKRGFFREETDHLIKNLLGKRISKLINSSDELQDNFREFYDSWHSKSTDYHGLLLPHIEGPEIKVWAQRYLRWIPEAQILGGGQVATLSKLLEMMEEVQSLQEKIDERHHSQQAPQAEAPCLLRNSARLSSLFPFALLQRHSSKPVLPTSGWKALGDEDDLAKREDEFVDLGDV

SEQ ID NO: 2674 - DNA, 2943 bp, Homo sapiens
gcgctatttctttaaattctcatctcttaaaatgtaaagagattctgagaaatggccttggagtgaataggttgacgcagtttttacttctgataaataagtccatgagcttttttagtgtatagccaaaagtatggattctcactaatgtcttttcagctttcattatcatcttaaggatttcatagtggttccaaactagtttctttgaattgctgttggtagtctcatttaaacttttaagtaaaagctacaacatggataagccttaaatattatgctaagtgagagaagtcaaacacagagccacgtattacatgattccatttgtataaaacgtccatagtaggcaaatctgtagaaactggaagtgatttaggggttgccaagggctaaaagaaagggagaatggagaatgactactagtggctatgtggtttcttttggagatcatgaaaatgttctggaattaggtaatggtgattattgaacaactttgtgaatatactaaaaactactgaattgtacagtttaaaagggtgaatcttacatgtgaattatatctcaatttttaaaaatctaaatacaaatttttatcatgagacccttcaaaacaccactccctgcattgggtttttgttttgttttttttgtttttttgtttgtgaagaaagatggtctcactccatcactcagggtgctagagtgcaatggcgcaatctcagcttactgcagccagtaaacgatcccaggctcaagcgatcctcccgcctcagtcccccaagtagctggggccaccagcatgtgccaccacatccagctaatttttggttttttggggttttttttgtagagacggggttttgccatcttgcccaggctggtctttaacccctgaactcaggcaatctgcctcccaaagtgtttggattacagacgtgagccactgtgcccggcctattccttaattttgaatgtttttatattatatgtaatatttattttctgtttttgtgacttgttctatgtagctttttcagtctttaaaattttttcagtctttaaaattttagtttgaaaatgagtaattcctttggtaagctgttaaacacatttttatgttgtatttttaggctatggagttactagtagagaaagcaatcagcagtgcttctagccctcagagccctggggatgcactgagaagagtttttgaatgcatttcttcagggattattcttaaaggtagtcctggacttctggatccttgtgaaaaggatccctttgataccttggcaacaatgactgaccagcagcgtgaagacatcacatccagtgcacagtttgcattgagactccttgcattccgccagatacacaaagttctaggcatggatccattaccgcaaatgagccaacgttttaacatccacaacaacaggaaacgaagaagagatagtgatggagttgatggatttgaagctgaggggaaaaaagacaaaaaagattatgataacttttaaaaagtgtctgtaaatcttcagtgttaaaaaaacagatgcccatttgttggctgtttttcattcataataatgtctacattgaaaaatttatcaagaatttaaaggatttcatggaagaaccaagtttttctatgatattaaaaaatgtacagtgttaggtattatttgaatggaaagacacccaaaaaaaaaaatgtgctccgactagggggaaaacagtagttccgattttttcccattatttttattttattttctggttgccctagcttccccccctatttttgtgtcttttattaactagtgcattgtcttattaaatcttcactgtatttaatgcaggatgtgtgcttcagttgctctgtgtattttgatattttaatttagaggttttgtttgctttttgacactagttgtaagttactttgttatagatggtatcctttaccccttcttaatattttacagcagtacgtttttttgtaacgtgagactgcagagtttgtttttctatatgtgaaggattacaacacaaaaagttatcctgccattcgagtgctcagaactgaatgtttctgcagatcttgtggcatttgtctctagtgtgatatataaaggtgtaattaagacagagttctgttaatctaatcaagtttgctgttagttgtgcattagcagtataaaagctaatatatactatatggtcttgcaacagttttaaagcctctgcataattgataataaaaatgcatgacattcttgtttttaatagacttttaaaatcataattttaggtttaacacgtagatctttgtacagttgactttttgacatagcaaggccaaaaataactttctgaatatttttttcttgtgtataagtggaaagggcatttttcacatataagtgggctaaccaatattttcaaaagaacttcatcattgtacaactaacaacagtaactagcccttaattatggtgacagttccttattggtgtgtgtgagattactctagcaactattacagtataacacagatgatcttctccacacaccccatcacccagataatttacagttctgttaacagtgaggttgataaagtattactgataaaaaattatctaaggaaaaaaacagaaaattatttggtgtggccatcttacctgcttatgtctcctacacaaagctaaatattctagcagtgatgtaatgaaaaattacatcttactgttgatatatgtatgctctggtacacagatgtcattttgttgtcacagcactacagtgaaatacacaaaaaatgaaattcatataatgacttaaatgtattatatgttagaattgacaacataaactacttttgctttgaaatgatgtatgcttcagtaaaatcatattcaaatttattgagtactg

SEQ ID NO: 2675 - protein, 128 aa, Homo sapiens
MELLVEKAISSASSPQSPGDALRRVFECISSGIILKGSPGLLDPCEKDPFDTLATMTDQQREDITSSAQFALRLLAFRQIHKVLGMDPLPQMSQRFNIHNNRKRRRDSDGVDGFEAEGKKDKKDYDNF

SEQ ID NO: 2676 - DNA, 3120 bp, Homo sapiens
ttcggatttcgttttggtgggtagggtttatatttccagaaattgtttattatattactaaattaataagttaaccttttgttcctcatattggattatgtaaatttattgaaaataactccgtggatatattaaagtgccaacaagctctcaaatggctcatgtgacactgatgctaccttaaggaagtgtcttgctcacctggtcaaacacccattcctcactgcattttgccaattcaatccattttagatgtaacctcgggtatggtgaaagacccaccggacgtcttggacaggcaaaaatgccttgacgctctggctgctctacgccacgctaagtggttccaggttcggaacatcattttacttttttcttgtagccttatgagagaagtagttcagtacaacatgtttaactgtgcttaaacatttcaaaagactgcccaagcaatactattttaaattaaatatcagaaaatatgttaacatagaaagctgggtatgatgatctgcatattgcagttattattaatttgacaatgaacttaggtttggggagtgttttgtagttggggtttttttattttttatttttagtggctatatttaaagttgacttgtttaggaacatcacatgtttgtgtatatatattatattccataaggctgcagattaactttgctttaaataatggaatatgtgtttaaagctttgtgtatagttttaagatttttttccccctctttctctaagttaataagtgtagggagtgaaaggtgaggaagcagctgtttggtttagtgactttgcagtcatgcaaaggcacagaagggaaaccaaacagatttccttaacctttcagtccctagacaaactttttagctctttactttttcttttatttctaatgtaggcagactttttttttttaagtttactgttttaaatgaacacaggtcaaggttcacaggggatcaagaaatattattcttgtataatctgtttactttgacctaaataccagcttttaaatactaaccctggcataaaatactgctgtaaatggcagctcattgaatccaattttaagtgtgattgtttttgtttttatctgagcttccattgaacggtggtattttaactttttttcatcaagggatatattcagtatttctaagattaattcaattggtttttatgttgctctcaaggctagagctaatggtctgcagtcctgtgtgattatcatacgcattcttcgagacctctgtcagcgagttccaacttggtctgattttccaagctgggctatggagttactagtagagaaagcaatcagcagtgcttctagccctcagagccctggggatgcactgagaagagtttttgaatgcatttcttcagggattattcttaaaggtagtcctggacttctggatccttgtgaaaaggatccctttgataccttggcaacaatgactgaccagcagcgtgaagacatcacatccagtgcacagtttgcattgagactccttgcattccgccagatacacaaagttctaggcatggatccattaccgcaaatgagccaacgttttaacatccacaacaacaggaaacgaagaagagatagtgatggagttgatggatttgaagctgaggggaaaaaagacaaaaaagattatgataacttttaaaaagtgtctgtaaatcttcagtgttaaaaaaacagatgcccatttgttggctgtttttcattcataataatgtctacattgaaaaatttatcaagaatttaaaggatttcatggaagaaccaagtttttctatgatattaaaaaatgtacagtgttaggtattatttgaatggaaagacacccaaaaaaaaaaatgtgctccgactagggggaaaacagtagttccgattttttcccattatttttattttattttctggttgccctagcttccccccctatttttgtgtcttttattaactagtgcattgtcttattaaatcttcactgtatttaatgcaggatgtgtgcttcagttgctctgtgtattttgatattttaatttagaggttttgtttgctttttgacactagttgtaagttactttgttatagatggtatcctttaccccttcttaatattttacagcagtacgtttttttgtaacgtgagactgcagagtttgtttttctatatgtgaaggattacaacacaaaaagttatcctgccattcgagtgctcagaactgaatgtttctgcagatcttgtggcatttgtctctagtgtgatatataaaggtgtaattaagacagagttctgttaatctaatcaagtttgctgttagttgtgcattagcagtataaaagctaatatatactatatggtcttgcaacagttttaaagcctctgcataattgataataaaaatgcatgacattcttgtttttaatagacttttaaaatcataattttaggtttaacacgtagatctttgtacagttgactttttgacatagcaaggccaaaaataactttctgaatatttttttcttgtgtataagtggaaagggcatttttcacatataagtgggctaaccaatattttcaaaagaacttcatcattgtacaactaacaacagtaactagcccttaattatggtgacagttccttattggtgtgtgtgagattactctagcaactattacagtataacacagatgatcttctccacacaccccatcacccagataatttacagttctgttaacagtgaggttgataaagtattactgataaaaaattatctaaggaaaaaaacagaaaattatttggtgtggccatcttacctgcttatgtctcctacacaaagctaaatattctagcagtgatgtaatgaaaaattacatcttactgttgatatatgtatgctctggtacacagatgtcattttgttgtcacagcactacagtgaaatacacaaaaaatgaaattcatataatgacttaaatgtattatatgttagaattgacaacataaactacttttgctttgaaatgatgtatgcttcagtaaaatcatattcaaatttattgagtactg

SEQ ID NO: 2677 - protein, 128 aa, Homo sapiens; identical to SEQ ID NO: 2675

SEQ ID NO: 2678 - DNA, 4705 bp, Homo sapiens
gttctccgctgaggaggagcggggcagaggagggaggcagcgggtgagagttcagagttcagcagcagcagcccgagcccatgattcccatatgccctgtagtttctttcacctatgtgcccagccggctgggggaagatgccaaaatggcgaccggcaactactttggattcacccacagcggctccacaatgtagccagcagccagcttcgggtgtagcctattctcatccaactacagttgctagctacactgtccatcaggctccagtagctgctcacacagttactgctgcctatgcaccagcagccgccacagttgcagttgccaggcctgctccagtagctgttgcagctgctgcaacagctgctgcttatggaggctaccccactgcacacacagcaactgactatggttatactcagaggcaacaagaagcaccaccaccaccacccccagctactacacaaaactaccaggattcatactcatatgtaaggtccacagctcctgctgtagcttatgatagtaagcaatactaccaacaaccaacagcaactgctgctgctgtagctgccgctgcccaacctcagccttctgttgctgaaacttactatcagacagcccccaaagcaggttacagccaaggtgcaactcagtatactcaagcccagcaaactcgacaagtgacagccataaaaccagccacaccaagtccagctaccactactttctccatctatcctgtatcctccaccgtacagccagtagcagctgcggctactgtggtgccatcctatactcagagtgctacttacagtaccacagcagttacatattctggtacgtcttattcaggttatgaagcagcagtgtattcagctgcatcttcctactatcaacagcagcagcagcaacagaagcaggcagcagcagcagctgctgctgctgctgcaacagctgcctggacagggaccacctttactaaaaaagcaccattccaaaataaacaactgaaaccaaaacagcctcccaaaccaccacagattcactattgtgatgtttgtaagatcagctgtgctggaccacagacttataaagaacatttagaaggacagaaacataaaaaaaaagaagctgcattgaaagcctcacaaaataccagcagcagcaacagttctactcgtgggactcaaaatcagctacgttgtgagctctgcgatgtgtcttgtacaggagcagatgcgtatgctgcccacattcgtggtgctaagcatcagaaagtggttaagttacacacaaaacttggtaaacccattccatcaacagaaccaaatgttgttagccaagctacttcttcaacagctgtatctgcttcaaagccgactgcctctccttcaagcattgcagcaaacaattgtactgtgaatacgtcatcagttgcaacgtcttcaatgaagggtcttacgactacaggaaactcgtctcttaatagcacatctaacactaaagtatcagcagtgcctacaaatatggctgccaagaaaacatctacccccaaaataaattttgttggtggtaataagctgcagtcaacaggaaataaagcagaagacataaaaggaaccgaatgtgttaaaagtactcctgtcacttctgctgtgcagattcctgaagtaaagcaagacacagtgtcagaaccagtcacacctgcatctcttgctgctttacagagtgatgtgcagccagtgggccatgattatgtggaagaggtacgaaatgatgaaggaaaagtaattcggttccattgtaaattatgcgagtgcagctttaatgatcccaatgctaaggagatgcacttaaaagggcgaagacacagacttcaatataaaaaaaaagtaaatccagatttgcaagtagaagtaaagcctagtattcgagcaagaaagattcaagaagagaaaatgaggaagcaaatgcagaaggaggagtactggcgaagacgagaagaagaggagcgttggagaatggaaatgagacgttatgaagaggacatgtactggaggagaatggaggaagaacaacatcattgggatgatcgccgccgaatgccagatggaggttatcctcatggtcctccaggcccattaggccttctgggagtccgaccaggcatgcctcctcagcctcaggggcctgcacccttacgtcgtcctgactcatctgatgaccgttatgtaatgacaaaacatgccaccatttatccaactgaagaggagttacaggcagttcagaaaattgtttctattactgaacgtgctttaaaactcgtttcagacagtttgtctgaacatgagaagaacaagaacaaagagggagatgataagaaagagggaggtaaagacagagctttgaaaggagttttgcgagtgggagtattggcaaaaggattacttctccgaggagatagaaatgtcaaccttgttttgctgtgctcagagaaaccttcaaagacattattaagccgtattgcagaaaacctacccaaacagcttgctgttataagccctgagaagtatgacataaaatgtgctgtatctgaagcggcaataattttgaattcatgtgtggaacccaaaatgcaagtcactatcacactgacatctccaattattcgagaagagaacatgagggaaggagatgtaacctcgggtatggtgaaagacccaccggacgtcttggacaggcaaaaatgccttgacgctctggctgctctacgccacgctaagtggttccaggctagagctaatggtctgcagtcctgtgtgattatcatacgcattcttcgagacctctgtcagcgagttccaacttggtctgattttccaagctgggctatggagttactagtagagaaagcaatcagcagtgcttctagccctcagagccctggggatgcactgagaagagtttttgaatgcatttcttcagggattattcttaaaggtagtcctggacttctggatccttgtgaaaaggatccctttgataccttggcaacaatgactgaccagcagcgtgaagacatcacatccagtgcacagtttgcattgagactccttgcattccgccagatacacaaagttctaggcatggatccattaccgcaaatgagccaacgttttaacatccacaacaacaggaaacgaagaagagatagtgatggagttgatggatttgaagctgaggggaaaaaagacaaaaaagattatgataacttttaaaaagtgtctgtaaatcttcagtgttaaaaaaacagatgcccatttgttggctgtttttcattcataataatgtctacattgaaaaatttatcaagaatttaaaggatttcatggaagaaccaagtttttctatgatattaaaaaatgtacagtgttaggtattatttgaatggaaagacacccaaaaaaaaaaatgtgctccgactagggggaaaacagtagttccgattttttcccattatttttattttattttctggttgccctagcttccccccctatttttgtgtcttttattaactagtgcattgtcttattaaatcttcactgtatttaatgcaggatgtgtgcttcagttgctctgtgtattttgatattttaatttagaggttttgtttgctttttgacactagttgtaagttactttgttatagatggtatcctttaccccttcttaatattttacagcagtacgtttttttgtaacgtgagactgcagagtttgtttttctatatgtgaaggattacaacacaaaaagttatcctgccattcgagtgctcagaactgaatgtttctgcagatcttgtggcatttgtctctagtgtgatatataaaggtgtaattaagacagagttctgttaatctaatcaagtttgctgttagttgtgcattagcagtataaaagctaatatatactatatggtcttgcaacagttttaaagcctctgcataattgataataaaaatgcatgacattcttgtttttaatagacttttaaaatcataattttaggtttaacacgtagatctttgtacagttgactttttgacatagcaaggccaaaaataactttctgaatatttttttcttgtgtataagtggaaagggcatttttcacatataagtgggctaaccaatattttcaaaagaacttcatcattgtacaactaacaacagtaactagcccttaattatggtgacagttccttattggtgtgtgtgagattactctagcaactattacagtataacacagatgatcttctccacacaccccatcacccagataatttacagttctgttaacagtgaggttgataaagtattactgataaaaaattatctaaggaaaaaaacagaaaattatttggtgtggccatcttacctgcttatgtctcctacacaaagctaaatattctagcagtgatgtaatgaaaaattacatcttactgttgatatatgtatgctctggtacacagatgtcattttgttgtcacagcactacagtgaaatacacaaaaaatgaaattcatataatgacttaaatgtattatatgttagaattgacaacataaactacttttgctttgaaatgatgtatgcttcagtaaaatcatattcaaatttattgagtactg

SEQ ID NO: 2679 - protein, 1056 aa, Homo sapiens
MCPAGWGKMPKWRPATTLDSPTAAPQCSQQPASGVAYSHPTTVASYTVHQAPVAAHTVTAAYAPAAATVAVARPAPVAVAAAATAAAYGGYPTAHTATDYGYTQRQQEAPPPPPPATTQNYQDSYSYVRSTAPAVAYDSKQYYQQPTATAAAVAAAAQPQPSVAETYYQTAPKAGYSQGATQYTQAQQTRQVTAIKPATPSPATTTFSIYPVSSTVQPVAAAATVVPSYTQSATYSTTAVTYSGTSYSGYEAAVYSAASSYYQQQQQQQKQAAAAAAAAAATAAWTGTTFTKKAPFQNKQLKPKQPPKPPQIHYCDVCKISCAGPQTYKEHLEGQKHKKKEAALKASQNTSSSNSSTRGTQNQLRCELCDVSCTGADAYAAHIRGAKHQKVVKLHTKLGKPIPSTEPNVVSQATSSTAVSASKPTASPSSIAANNCTVNTSSVATSSMKGLTTTGNSSLNSTSNTKVSAVPTNMAAKKTSTPKINFVGGNKLQSTGNKAEDIKGTECVKSTPVTSAVQIPEVKQDTVSEPVTPASLAALQSDVQPVGHDYVEEVRNDEGKVIRFHCKLCECSFNDPNAKEMHLKGRRHRLQYKKKVNPDLQVEVKPSIRARKIQEEKMRKQMQKEEYWRRREEEERWRMEMRRYEEDMYWRRMEEEQHHWDDRRRMPDGGYPHGPPGPLGLLGVRPGMPPQPQGPAPLRRPDSSDDRYVMTKHATIYPTEEELQAVQKIVSITERALKLVSDSLSEHEKNKNKEGDDKKEGGKDRALKGVLRVGVLAKGLLLRGDRNVNLVLLCSEKPSKTLLSRIAENLPKQLAVISPEKYDIKCAVSEAAIILNSCVEPKMQVTITLTSPIIREENMREGDVTSGMVKDPPDVLDRQKCLDALAALRHAKWFQARANGLQSCVIIIRILRDLCQRVPTWSDFPSWAMELLVEKAISSASSPQSPGDALRRVFECISSGIILKGSPGLLDPCEKDPFDTLATMTDQQREDITSSAQFALRLLAFRQIHKVLGMDPLPQMSQRFNIHNNRKRRRDSDGVDGFEAEGKKDKKDYDNF

SEQ ID NO: 2680 - DNA, 4377 bp, Homo sapiens
gcgggtgagagttcagagttcagcagcagcagcccgagcccatgattcccatatgccctgtagtttctttcacctatgtgcccagccggctgggggaagatgccaaaatggcgaccggcaactactttggattcacccacagcggctccacaatgtagccagcagccagcttcgggtgtagcctattctcatccaactacagttgctagctacactgtccatcaggctccagtagctgctcacacagttactgctgcctatgcaccagcagccgccacagttgcagttgccaggcctgctccagtagctgttgcagctgctgcaacagctgctgcttatggaggctaccccactgcacacacagcaactgactatggttatactcagaggcaacaagaagcaccaccaccaccacccccagctactacacaaaactaccaggattcatactcatatgtaaggtccacagctcctgctgtagcttatgatagtaagcaatactaccaacaaccaacagcaactgctgctgctgtagctgccgctgcccaacctcagccttctgttgctgaaacttactatcagacagcccccaaagcaggttacagccaaggtgcaactcagtatactcaagcccagcaaactcgacaagtgacagccataaaaccagccacaccaagtccagctaccactactttctccatctatcctgtatcctccaccgtacagccagtagcagctgcggctactgtggtgccatcctatactcagagtgctacttacagtaccacagcagttacatattctggtacgtcttattcaggttatgaagcagcagtgtattcagctgcatcttcctactatcaacagcagcagcagcaacagaagcaggcagcagcagcagctgctgctgctgctgcaacagctgcctggacagggaccacctttactaaaaaagcaccattccaaaataaacaactgaaaccaaaacagcctcccaaaccaccacagattcactattgtgatgtttgtaagatcagctgtgctggaccacagacttataaagaacatttagaaggacagaaacataaaaaaaaagaagctgcattgaaagcctcacaaaataccagcagcagcaacagttctactcgtgggactcaaaatcagctacgttgtgagctctgcgatgtgtcttgtacaggagcagatgcgtatgctgcccacattcgtggtgctaagcatcagaaagtggttaagttacacacaaaacttggtaaacccattccatcaacagaaccaaatgttgttagccaagctacttcttcaacagctgtatctgcttcaaagccgactgcctctccttcaagcattgcagcaaacaattgtactgtgaatacgtcatcagttgcaacgtcttcaatgaagggtcttacgactacaggaaactcgtctcttaatagcacatctaacactaaagtatcagcagtgcctacaaatatggctgccaagaaaacatctacccccaaaataaattttgttggtggtaataagctgcagtcaacaggaaataaagcagaagacataaaaggaaccgaatgtgttaaaagtactcctgtcacttctgctgtgcagattcctgaagtaaagcaagacacagtgtcagaaccagtcacacctgcatctcttgctgctttacagagtgatgtgcagccagtgggccatgattatgtggaagaggtacgaaatgatgaaggaaaagtaattcggttccattgtaaattatgcgagtgcagctttaatgatcccaatgctaaggagatgcacttaaaagggcgaagacacagacttcaatataaaaaaaaagtaaatccagatttgcaagtagaagtaaagcctagtattcgagcaagaaagattcaagaagagaaaatgaggaagcaaatgcagaaggaggagtactggcgaagacgagaagaagaggagcgttggagaatggaaatgagacgttatgaagaggacatgtactggaggagaatggaggaagaacaacatcattgggatgatcgccgccgaatgccagatggaggttatcctcatggtcctccaggcccattaggccttctgggagtccgaccaggcatgcctcctcagcctcaggggcctgcacccttacgtcgtcctgactcatctgatgaccgttatgtaatgacaaaacatgccaccatttatccaactgaagaggagttacaggcagttcagaaaattgtttctattactgaacgtgctttaaaactcgtttcagacagtttgtctgaacatgagaagaacaagaacaaagagggagatgataagaaagagggaggtaaagacagagctttgaaaggagttttgcgagtgggagtattggcaaaaggattacttctccgaggagatagaaatgtcaaccttgttttgctgtgctcagagaaaccttcaaagacattattaagccgtattgcagaaaacctacccaaacagcttgctgttataagccctgagaagtatgacataaaatgtgctgtatctgaagcggcaataattttgaattcatgtgtggaacccaaaatgcaagtcactatcacactgacatctccaattattcgagaagagaacatgagggaaggagatgtaacctcgggtatggtgaaagacccaccggacgtcttggacaggcaaaaatgccttgacgctctggctgctctacgccacgctaagtggttccaggctagagctaatggtctgcagtcctgtgtgattatcatacgcattcttcgagacctctgtcagcgagttccaacttggtctgattttccaagctgggctatggagttactagtagagaaagcaatcagcagtgcttctagccctcagagccctggggatgcactgagaagagtttttgaatgcatttcttcagggattattcttaaaggtagtcctggacttctggatccttgtgaaaaggatccctttgataccttggcaacaatgactgaccagcagcgtgaagacatcacatccagtgcacagtttgcattgagactccttgcattccgccagatacacaaagttctaggcatggatccattaccgcaaatgagccaacgttttaacatccacaacaacaggaaacgaagaagagatagtgatggagttgatggatttgaagctgaggggaaaaaagacaaaaaagattatgataacttttaaaaagtgtctgtaaatcttcagtgttaaaaaaacagatgcccatttgttggctgtttttcattcataataatgtctacattgaaaaatttatcaagaatttaaaggatttcatggaagaaccaagtttttctatgatattaaaaaatgtacagtgttaggtattatttgaatggaaagacacccaaaaaaaaaaatgtgctccgactagggggaaaacagtagttccgattttttcccattatttttattttattttctggttgccctagcttccccccctatttttgtgtcttttattaactagtgcattgtcttattaaatcttcactgtatttaatgcaggatgtgtgcttcagttgctctgtgtattttgatattttaatttagaggttttgtttgctttttgacactagttgtaagttactttgttatagatggtatcctttaccccttcttaatattttacagcagtacgtttttttgtaacgtgagactgcagagtttgtttttctatatgtgaaggattacaacacaaaaagttatcctgccattcgagtgctcagaactgaatgtttctgcagatcttgtggcatttgtctctagtgtgatatataaaggtgtaattaagacagagttctgttaatctaatcaagtttgctgttagttgtgcattagcagtataaaagctaatatatactatatggtcttgcaacagttttaaagcctctgcataattgataataaaaatgcatgacattcttgtttttaatagacttttaaaatcataattttaggtttaacacgtagatctttgtacagttgactttttgacatagcaaggccaaaaataactttctgaatatttttttcttgtgtataagtggaaagggcatttttcacatataagtgggctaaccaatattttcaaaagaacttcatcattgtacaactaacaacagtaactagcccttaattatggtgacagttccttattggtgtgtgtgagattactctagcaactattacagtataacacagatgatcttctccacacaccccatcacccagataatttacagttctgttaacagtgaggttgataaagtattactgataaaaaattatctaagg

SEQ ID NO: 2681 - protein, 1056 aa, Homo sapiens; identical to SEQ ID NO: 2679

SEQ ID NO: 2682 - DNA, 793 bp, Homo sapiens
aagtgtgattgtttttgtttttatctgagcttccattgaacggtggtattttaactttttttcatcaagggatatattcagtatttctaagattaattcaattggtttttatgttgctctcaaggctagagctaatggtctgcagtcctgtgtgattatcatacgcattcttcgagacctctgtcagcgagttccaacttggtctgattttccaagctgggctatggagttactagtagagaaagcaatcagcagtgcttctagccctcagagccctggggatgcactgagaagagtttttgaatgcatttcttcagggattattcttaaaggtagtcctggacttctggatccttgtgaaaaggatccctttgataccttggcaacaatgactgaccagcagcgtgaagacatcacatccagtgcacagtttgcattgagactccttgcattccgccagatacacaaagttctaggcatggatccattaccgcaaatgagccaacgttttaacatccacaacaacaggaaacgaagaagagatagtgatggagttgatggatttgaagctgaggggaaaaaagacaaaaaagattatgataacttttaaaaagtgtctgtaaatcttcagtgttaaaaaaacagatgcccatttgttggctgtttttcattcataataatgtctacattgaaaaatttatcaagaatttaaaggatttcatggaagaaccaagtttttctatgatattaaaaaatgtacagtgttaggtattatttgaatggaaagacaccc

SEQ ID NO: 2683 - protein, 128 aa, Homo sapiens; identical to SEQ ID NO: 2675

SEQ ID NO: 2684 - DNA, 3429 bp, Homo sapiens
gcgggtgagagttcagagttcagcagcagcagcccgagcccatgattcccatatgccctgtagtttctttcacctatgtgcccagccggctgggggaagatgccaaaatggcgaccggcaactactttggattcacccacagcggctccacaatgtagccagcagccagcttcgggtgtagcctattctcatccaactacagttgctagctacactgtccatcaggctccagtagctgctcacacagttactgctgcctatgcaccagcagccgccacagttgcagttgccaggcctgctccagtagctgttgcagctgctgcaacagctgctgcttatggaggctaccccactgcacacacagcaactgactatggttatactcagaggcaacaagaagcaccaccaccaccacccccagctactacacaaaactaccaggattcatactcatatgtaaggtccacagctcctgctgtagcttatgatagtaagcaatactaccaacaaccaacagcaactgctgctgctgtagctgccgctgcccaacctcagccttctgttgctgaaacttactatcagacagcccccaaagcaggttacagccaaggtgcaactcagtatactcaagcccagcaaactcgacaagtgacagccataaaaccagccacaccaagtccagctaccactactttctccatctatcctgtatcctccaccgtacagccagtagcagctgcggctactgtggtgccatcctatactcagagtgctacttacagtaccacagcagttacatattctggtacgtcttattcaggttatgaagcagcagtgtattcagctgcatcttcctactatcaacagcagcagcagcaacagaagcaggcagcagcagcagctgctgctgctgctgcaacagctgcctggacagggaccacctttactaaaaaagcaccattccaaaataaacaactgaaaccaaaacagcctcccaaaccaccacagattcactattgtgatgtttgtaagatcagctgtgctggaccacagacttataaagaacatttagaaggacagaaacataaaaaaaaagaagctgcattgaaagcctcacaaaataccagcagcagcaacagttctactcgtgggactcaaaatcagctacgttgtgagctctgcgatgtgtcttgtacaggagcagatgcgtatgctgcccacattcgtggtgctaagcatcagaaagtggttaagttacacacaaaacttggtaaacccattccatcaacagaaccaaatgttgttagccaagctacttcttcaacagctgtatctgcttcaaagccgactgcctctccttcaagcattgcagcaaacaattgtactgtgaatacgtcatcagttgcaacgtcttcaatgaagggtcttacgactacaggaaactcgtctcttaatagcacatctaacactaaagtatcagcagtgcctacaaatatggctgccaagaaaacatctacccccaaaataaattttgttggtggtaataagctgcagtcaacaggaaataaagcagaagacataaaaggaaccgaatgtgttaaaagtactcctgtcacttctgctgtgcagattcctgaagtaaagcaagacacagtgtcagaaccagtcacacctgcatctcttgctgctttacagagtgatgtgcagccagtgggccatgattatgtggaagaggtacgaaatgatgaaggaaaagtaattcggttccattgtaaattatgcgagtgcagctttaatgatcccaatgctaaggagatgcacttaaaagggcgaagacacagacttcaatataaaaaaaaagtaaatccagatttgcaagtagaagtaaagcctagtattcgagcaagaaagattcaagaagagaaaatgaggaagcaaatgcagaaggaggagtactggcgaagacgagaagaagaggagcgttggagaatggaaatgagacgttatgaagaggacatgtactggaggagaatggaggaagaacaacatcattgggatgatcgccgccgaatgccagatggaggttatcctcatggtcctccaggcccattaggccttctgggagtccgaccaggcatgcctcctcagcctcaggggcctgcacccttacgtcgtcctgactcatctgatgaccgttatgtaatgacaaaacatgccaccatttatccaactgaagaggagttacaggcagttcagaaaattgtttctattactgaacgtgctttaaaactcgtttcagacagtttgtctgaacatgagaagaacaagaacaaagagggagatgataagaaagagggaggtaaagacagagctttgaaaggagttttgcgagtgggagtattggcaaaaggattacttctccgaggagatagaaatgtcaaccttgttttgctgtgctcagagaaaccttcaaagacattattaagccgtattgcagaaaacctacccaaacagcttgctgttataagccctgagaagtatgacataaaatgtgctgtatctgaagcggcaataattttgaattcatgtgtggaacccaaaatgcaagtcactatcacactgacatctccaattattcgagaagagaacatgagggaaggagatgtaacctcgggtatggtgaaagacccaccggacgtcttggacaggcaaaaatgccttgacgctctggctgctctacgccacgctaagtggttccaggctagagctaatggtctgcagtcctgtgtgattatcatacgcattcttcgagacctctgtcagcgagttccaacttggtctgattttccaagctgggctatggagttactagtagagaaagcaatcagcagtgcttctagccctcagagccctggggatgcactgagaagagtttttgaatgcatttcttcagggattattcttaaaggtagtcctggacttctggatccttgtgaaaaggatccctttgataccttggcaacaatgactgaccagcagcgtgaagacatcacatccagtgcacagtttgcattgagactccttgcattccgccagatacacaaagttctaggcatggatccattaccgcaaatgagccaacgttttaacatccacaacaacaggaaacgaagaagagatagtgatggagttgatggatttgaagctgaggggaaaaaagacaaaaaagattatgataacttttaaaaagtgtctgtaaatcttcagtgttaaaaaaacagatgcccatttgttggctgtttttcattcataataatgtctacattgaaaaatttatcaagaatttaaaggatttcatggaagaaccaagtttttctatgatattaaaaaatgtacagtgttaggtattatttgaatggaaagacaccc

SEQ ID NO: 2685 - protein, 1056 aa, Homo sapiens; identical to SEQ ID NO: 2679

SEQ ID NO: 2686 - DNA, 571 bp, Homo sapiens
agtgagggagtgcgaggcgggagggggaggcggcgcggccgcggcctgggccccgccagggctgctctcacggcgcctctctctttctctccctgccctccctcggcgtctcggctcctctgtgtctcttgtcccgccatgggacccgactcttcgtgcccgccgcagtgcccagccggctgggggaagatgccaaaatggcgaccggcaactactttggattcacccacagcggggcggcggcggcggcggctgcggcccaatatagccagcagccagcttcgggtgtagcctattctcatccaactacagttgctagctacactgtccatcaggctccagtagctgctcacacagttactgctgcctatgcaccagcagccgccacagttgcagttgccaggcctgctccagtagctgttgcagctgctgcaacagctgctgcttatggaggctaccccactgcacacacagcaactgactatggttatactcagaggcaacaagaagcaccaccaccaccacccccagctactacacaaaactaccaggattacttctccgaggagat

SEQ ID NO: 2687 - protein, 123 aa, Homo sapiens
MATGNYFGFTHSGAAAAAAAAQYSQQPASGVAYSHPTTVASYTVHQAPVAAHTVTAAYAPAAATVAVARPAPVAVAAAATAAAYGGYPTAHTATDYGYTQRQQEAPPPPPPATTQNYQDYFSE

SEQ ID NO: 2688 - DNA, 666 bp, Homo sapiens
gaggagcggggcagaggagggaggcagcgggtgagagttcagagttcagcagcagcagcccgagcccatgattcccatatgccctgtagtttctttcacctatgtgcccagccggctgggggaagatgccaaaatggcgaccggcaactactttggattcacccacagcggctccacaatgtagccagcagccagcttcgggtgtagcctattctcatccaactacagttgctagctacactgtccatcaggctccagtagctgctcacacagttactgctgcctatgcaccagcagccgccacagttgcagttgccaggcctgctccagtagctgttgcagctgctgcaacagctgctgcttatggaggctaccccactgcacacacagcaactgactatggttatactcagaggcaacaagaagcaccaccaccaccacccccagctactacacaaaactaccaggattcatactcatatgtaaggtccacagctcctgctgtagcttatgatagtaagcaatactaccaacaaccaacagcaactgctgctgctgtagctgccgctgcccaacctcagccttctgttgctgaaaccttacgtcgtcctgactcatctgatgaccgttatgtaatgacaaaacatgccaccatttatccaactg

SEQ ID NO: 2689 - protein, 187 aa, Homo sapiens
MCPAGWGKMPKWRPATTLDSPTAAPQCSQQPASGVAYSHPTTVASYTVHQAPVAAHTVTAAYAPAAATVAVARPAPVAVAAAATAAAYGGYPTAHTATDYGYTQRQQEAPPPPPPATTQNYQDSYSYVRSTAPAVAYDSKQYYQQPTATAAAVAAAAQPQPSVAETLRRPDSSDDRYVMTKHATIYP

SEQ ID NO: 2690 - DNA, 1910 bp, Homo sapiens
gttctccgctgaggaggagcggggcagaggagggaggcagcgggtgagagttcagagttcagcagcagcagcccgagcccatgattcccatatgccctgtagtttctttcacctatgtgcccagccggctgggggaagatgccaaaatggcgaccggcaactactttggattcacccacagcggggcggcggcggcggcggctgcggcccaatatagccagcagccagcttcgggtgtagcctattctcatccaactacagttgctagctacactgtccatcaggctccagtagctgctcacacagttactgctgcctatgcaccagcagccgccacagttgcagttgccaggcctgctccagtagctgttgcagctgctgcaacagctgctgcttatggaggctaccccactgcacacacagcaactgactatggttatactcagaggcaacaagaagcaccaccaccaccacccccagctactacacaaaactaccaggattcatactcatatgtaaggtccacagctcctgctgtagcttatgatagtaagcaatactaccaacaaccaacagcaactgctgctgctgtagctgccgctgcccaacctcagccttctgttgctgaaacttactatcagacagcccccaaagcaggttacagccaaggtgcaactcagtatactcaagcccagcaaactcgacaagtgacagccataaaaccagccacaccaagtccagctaccactactttctccatctatcctgtatcctccaccgtacagccagtagcagctgcggctactgtggtgccatcctatactcagagtgctacttacagtaccacagcagttacatattctggtacgtcttattcaggttatgaagcagcagtgtattcagctgcatcttcctactatcaacagcagcagcagcaacagaagcaggcagcagcagcagctgctgctgctgctgcaacagctgcctggacagggaccacctttactaaaaaagcaccattccaaaataaacaactgaaaccaaaacagcctcccaaaccaccacagattcactattgtgatgtttgtaagatcagctgtgctggaccacagacttataaagaacatttagaaggacagaaacataaaaaaaaagaagctgcattgaaagcctcacaaaataccagcagcagcaacagttctactcgtgggactcaaaatcagctacgttgtgagctctgcgatgtgtcttgtacaggagcagatgcgtatgctgcccacattcgtggtgctaagcatcagaaagtggttaagttacacacaaaacttggtaaacccattccatcaacagaaccaaatgttgttagccaagctacttcttcaacagctgtatctgcttcaaagccgactgcctctccttcaagcattgcagcaaacaattgtactgtgaatacgtcatcagttgcaacgtcttcaatgaagggtcttacgactacaggaaactcgtctcttaatagcacatctaacactaaagtatcagcagtgcctacaaatatggctgccaagaaaacatctacccccaaaataaattttgttggtggtaataagctgcagtcaacaggaaataaagcagaagacataaaaggaaccgaatgtgttaaaagtactcctgtcacttctgctgtgcagattcctgaagtaaagcaagacacagtgtcagaaccagtcacacctgcatctcttgctgctttacagagtgatgtgcagccagtgggccatgattatgtggaagaggtacgaaatgatgaaggaaaagtaattcggttccattgtaaattatgcgagtgcagctttaatgatcccaatgctaaggagatgcacttaaaagggcgaagacacagacttcaatat

SEQ ID NO: 2691 - protein, 609 aa, Homo sapiens
MIPICPVVSFTYVPSRLGEDAKMATGNYFGFTHSGAAAAAAAAQYSQQPASGVAYSHPTTVASYTVHQAPVAAHTVTAAYAPAAATVAVARPAPVAVAAAATAAAYGGYPTAHTATDYGYTQRQQEAPPPPPPATTQNYQDSYSYVRSTAPAVAYDSKQYYQQPTATAAAVAAAAQPQPSVAETYYQTAPKAGYSQGATQYTQAQQTRQVTAIKPATPSPATTTFSIYPVSSTVQPVAAAATVVPSYTQSATYSTTAVTYSGTSYSGYEAAVYSAASSYYQQQQQQQKQAAAAAAAAAATAAWTGTTFTKKAPFQNKQLKPKQPPKPPQIHYCDVCKISCAGPQTYKEHLEGQKHKKKEAALKASQNTSSSNSSTRGTQNQLRCELCDVSCTGADAYAAHIRGAKHQKVVKLHTKLGKPIPSTEPNVVSQATSSTAVSASKPTASPSSIAANNCTVNTSSVATSSMKGLTTTGNSSLNSTSNTKVSAVPTNMAAKKTSTPKINFVGGNKLQSTGNKAEDIKGTECVKSTPVTSAVQIPEVKQDTVSEPVTPASLAALQSDVQPVGHDYVEEVRNDEGKVIRFHCKLCECSFNDPNAKEMHLKGRRHRLQ

SEQ ID NO: 2692 - DNA, 1354 bp, Homo sapiens
gttctccgctgaggaggagcggggcagaggagggaggcagcgggtgagagttcagagttcagcagcagcagcccgagcccatgattcccatatgccctgtagtttctttcacctatgtgcccagccggctgggggaagatgccaaaatggcgaccggcaactactttggattcacccacagcggggcggcggcggcggcggctgcggcccaatatagccagcagccagcttcgggtgtagcctattctcatccaactacagttgctagctacactgtccatcaggctccagtagctgctcacacagttactgctgcctatgcaccagcagccgccacagttgcagttgccaggcctgctccagtagctgttgcagctgctgcaacagctgctgcttatggaggctaccccactgcacacacagcaactgactatggttatactcagaggcaacaagaagcaccaccaccaccacccccagctactacacaaaactaccaggattcatactcatatgtaaggtccacagctcctgctgtagcttatgatagtaagcaatactaccaacaaccaacagcaactgctgctgctgtagctgccgctgcccaacctcagccttctgttgctgaaacttactatcagacagcccccaaagcaggttacagccaaggtgcaactcagtatactcaagcccagcaaactcgacaagtgacagccataaaaccagccacaccaagtccagctaccactactttctccatctatcctgtatcctccaccgtacagccagtagcagctgcggctactgtggtgccatcctatactcagagtgctacttacagtaccacagcagttacatattctggtacgtcttattcaggttatgaagcagcagtgtattcagctgcatcttcctactatcaacagcagcagcagcaacagaagcaggcagcagcagcagctgctgctgctgctgcaacagctgcctggacagggaccacctttactaaaaaagcaccattccaaaataaacaactgaaaccaaaacagcctcccaaaccaccacagattcactattgtgatgtttgtaagatcagctgtgctggaccacagacttataaagaacatttagaaggacagaaacataaaaaaaaagaagctgcattgaaagcctcacaaaataccagcagcagcaacagttctactcgtgggactcaaaatcagctacgttgtgagctctgcgatgtgtcttgtacaggagcagatgcgtatgctgcccacattcgtggtgctaagcatcagaaagtggttaagttacacacaaaacttggtaaacccattccatcaacagaacc

SEQ ID NO: 2693 - protein, 423 aa, Homo sapiens
MIPICPVVSFTYVPSRLGEDAKMATGNYFGFTHSGAAAAAAAAQYSQQPASGVAYSHPTTVASYTVHQAPVAAHTVTAAYAPAAATVAVARPAPVAVAAAATAAAYGGYPTAHTATDYGYTQRQQEAPPPPPPATTQNYQDSYSYVRSTAPAVAYDSKQYYQQPTATAAAVAAAAQPQPSVAETYYQTAPKAGYSQGATQYTQAQQTRQVTAIKPATPSPATTTFSIYPVSSTVQPVAAAATVVPSYTQSATYSTTAVTYSGTSYSGYEAAVYSAASSYYQQQQQQQKQAAAAAAAAAATAAWTGTTFTKKAPFQNKQLKPKQPPKPPQIHYCDVCKISCAGPQTYKEHLEGQKHKKKEAALKASQNTSSSNSSTRGTQNQLRCELCDVSCTGADAYAAHIRGAKHQKVVKLHTKLGKPIPST

SEQ ID NO: 2694 - DNA, 644 bp, Homo sapiens
agtgcggtcggaggcggcggtctgttctccgctgaggaggagcggggcagaggagggaggcagcgggtgagagttcagagttcagcagcagcagcccgagcccatgattcccatatgccctgtagtttctttcacctatgtgcccagccggctgggggaagatgccaaaatggcgaccggcaactactttggattcacccacagcggggcggcggcggcggcggctgcggcccaatatagccagcagccagcttcgggtgtagcctattctcatccaactacagttgctagctacactgtccatcaggctccagtagctgctcacacagttactgctgcctatgcaccagcagccgccacagttgcagttgccaggcctgctccagtagctgttgcagctgctgcaacagctgctgcttatggaggctaccccactgcacacacagcaactgactatggttatactcagaggcaacaagaagcaccaccaccaccacccccagctactacacaaaactaccaggattcatactcatatgtaaggtccacagctcctgctgtagcttatgatagtaagcaatactaccaacaaccaacagcaactgctgctgctgtagctgccgctgcccaacctcagccttctg

SEQ ID NO: 2695 - protein, 179 aa, Homo sapiens
MIPICPVVSFTYVPSRLGEDAKMATGNYFGFTHSGAAAAAAAAQYSQQPASGVAYSHPTTVASYTVHQAPVAAHTVTAAYAPAAATVAVARPAPVAVAAAATAAAYGGYPTAHTATDYGYTQRQQEAPPPPPPATTQNYQDSYSYVRSTAPAVAYDSKQYYQQPTATAAAVAAAAQPQP

SEQ ID NO: 2696 - DNA, 566 bp, Homo sapiens
gttctccgctgaggaggagcggggcagaggagggaggcagcgggtgagagttcagagttcagcagcagcagcccgagcccatgattcccatatgccctgtagtttctttcacctatgtgcccagccggctgggggaagatgccaaaatggcgaccggcaactactttggattcacccacagcggctccacaatgtagccagcagccagcttcgggtgtagcctattctcatccaactacagttgctagctacactgtccatcaggctccagtagctgctcacacagttactgctgcctatgcaccagcagccgccacagttgcagttgccaggcctgctccagtagctgttgcagctgctgcaacagctgctgcttatggaggctaccccactgcacacacagcaactgactatggttatactcagaggcaacaagaagcaccaccaccaccacccccagctactacacaaaactaccaggattcatactcatatgtaaggtccacagctcctgctgtagcttatgatagtaagcaatactaccaacaaccaacagcaactgctgc

SEQ ID NO: 2697 - protein, 149 aa, Homo sapiens
MCPAGWGKMPKWRPATTLDSPTAAPQCSQQPASGVAYSHPTTVASYTVHQAPVAAHTVTAAYAPAAATVAVARPAPVAVAAAATAAAYGGYPTAHTATDYGYTQRQQEAPPPPPPATTQNYQDSYSYVRSTAPAVAYDSKQYYQQPTAT

SEQ ID NO: 2698 - DNA, 464 bp, Homo sapiens
ccctggcgtgaaggtggcactgtgactagctcttgccgatggaatgggaggagtcagttagaaattttcatatggtcaaaatacccatggaatatatgagtggcagcagtaaacaatccttgaagttcttgcttgtttaacttgactgttggtgatgcccaatgaggccctgtctgctccaagcaaattacataaaaaagatgtgaataaaaactcatcaaatactaacagagactgtgtctaagatgccaattgaagactggaacagccatatgagtgtggggtattcctggaaacctgttctagtaggcactggagaagacacaggaacctctcaatacagaatagacacactttgcactcagtaataatgcactaattgacgaatatattgacggagtgttggtttgcttcacaatctgctggtaaacatattcatttttgggtgaatttcaggccttata

SEQ ID NO: 2699 - protein, 33 aa, Homo sapiens
MEWEESVRNFHMVKIPMEYMSGSSKQSLKFLLV

SEQ ID NO: 2700 - DNA, 1173 bp, Homo sapiens
agggcctgtccctctcacttccactcgattgtaatttcatccccgggccggtcgagcctccctccctcccgcggccagcccttccctcccagtcggcctccttcgtcgcccccgcccccgcgaaaagccctgcagcttgcagccggcttcactcgcgcacgccgacctcccggctgcagtcctacctcttggaactacccgtgtttccgggcccagccctcgcagccccccacctcctcgccccggcccggggatccgttggggccgcgtcccccacgcgcccccggagacgccctttccgtgtgcgcccgggacttggtgaaactttgcaggcgccggctgcgaaatggatttaatccgaggcgtcttgctccggctcctgctcctggcttccagcctcggacccggcgcggtgtcgctccgagcggccatccgaaaaccaggcaaggtagggcctcctcttgacatcaagctgggcgcattgaactgtacggctttcagcatccagtggaaaatgccaaggcatcctggaagtcccatccttgggtacactgtcttttactctgaggttggcgcagataaatccctgcaggagcagttgcacagcgtgcctctcagccgggacatcccgaccacggaggaagtgattggagatttgaaaccaggcactgaatatcgtgtgagcatagcagcttacagccaggctggcaaagggcggctgagctctcctcggcatgtcaccactttgtcccaagattcctgcctgcctcctgcagctccccagcagccacatgtcattgtggtttcggattctgaggtggccctgtcttggaaacctggagcgagtgaaggaagcgcccctattcagtactattctgtggaattcatcaggtaagtctgtatgtcacattcaaaagccaaatgtgtgctgggcgcggtggctcacacctgtaatcccagcactttggcaggctgaggcgggcagatcacaaggtcaggagttcgagaccagcctgaccaacatggtgaaaccccgtctctactaaaaatacaaaaattagctgggcgtgatggcacgtgcctgtagtctcagctactcaggaggctgaggcaggagaaatgcttgaacccaggaggtggaggttgcagtgagccgagatcatgccattgcac

SEQ ID NO: 2701 - protein, 182 aa, Homo sapiens
MDLIRGVLLRLLLLASSLGPGAVSLRAAIRKPGKVGPPLDIKLGALNCTAFSIQWKMPRHPGSPILGYTVFYSEVGADKSLQEQLHSVPLSRDIPTTEEVIGDLKPGTEYRVSIAAYSQAGKGRLSSPRHVTTLSQDSCLPPAAPQQPHVIVVSDSEVALSWKPGASEGSAPIQYYSVEFIR

SEQ ID NO: 2702 - DNA, 3960 bp, Homo sapiens
agggcctgtccctctcacttccactcgattgtaatttcatccccgggccggtcgagcctccctccctcccgcggccagcccttccctcccagtcggcctccttcgtcgcccccgcccccgcgaaaagccctgcagcttgcagccggcttcactcgcgcacgccgacctcccggctgcagtcctacctcttggaactacccgtgtttccgggcccagccctcgcagccccccacctcctcgccccggcccggggatccgttggggccgcgtcccccacgcgcccccggagacgccctttccgtgtgcgcccgggacttggtgaaactttgcaggcgccggctgcgaaatggatttaatccgaggcgtcttgctccggctcctgctcctggcttccagcctcggacccggcgcggtgtcgctccgagcggccatccgaaaaccaggcaaggtagggcctcctcttgacatcaagctgggcgcattgaactgtacggctttcagcatccagtggaaaatgccaaggcatcctggaagtcccatccttgggtacactgtcttttactctgaggttggcgcagataaatccctgcaggagcagttgcacagcgtgcctctcagccgggacatcccgaccacggaggaagtgattggagatttgaaaccaggcactgaatatcgtgtgagcatagcagcttacagccaggctggcaaagggcggctgagctctcctcggcatgtcaccactttgtcccaagattcctgcctgcctcctgcagctccccagcagccacatgtcattgtggtttcggattctgaggtggccctgtcttggaaacctggagcgagtgaaggaagcgcccctattcagtactattctgtggaattcatcaggccagatttcgacaagaagtggacctcaatccatgagcggatccagatggactccatggttatcaagggcctcgatccagataccaactaccagtttgccgtgagggcaatgaattcccatggccccagcccccgcagctggcccagtgacatcatccggaccctctgccctgaggaggcgggaagtggccgctatggaccccgttatatcaccgacatgggagctggtgaggatgatgaaggatttgaagacgacttagatttggatatttcctttgaggaggttaaaccacttcctgctaccaaaggagggaataagaaatttttggtggaaagcaagaagatgtctatatctaacccaaagaccatttctaggctcatcccccctacctcagcatctctccctgtgaccacggtggctccccagcccattcccatacagagaaaggggaagaatggtgtggccataatgtcaaggctctttgacatgccttgtgatgaaactctctgctctgctgacagcttctgtgtcaatgactacacctgggggggctcgcgatgccagtgcaccctgggcaaaggtggtgagagctgctcagaagatattgttatccagtatcctcagttctttggccactcctatgtaacgtttgaacctctgaagaattcttatcaggcatttcaaattactcttgaatttagggcggaggcagaggatggcttactgctctactgtggggagaacgaacacgggaggggggatttcatgtccctggctatcatccgacgctccctgcagttcaggtttaattgtggaactggggttgccatcatcgtaagtgagaccaaaatcaaactagggggttggcacacggttatgctctacagagatgggctgaacgggctgctgcagctgaacaatggcaccccagtgacaggccagtctcagggccaatacagtaaaattactttccggacacctctctatcttggtggcgctcccagcgcttactggttggttagagcaacagggacaaaccgaggctttcaaggctgtgtgcagtcgctcgctgtgaatgggaggagaattgacatgaggccctggcccctgggaaaagcactcagtggggctgatgtgggggaatgcagcagtggaatctgtgatgaggcctcgtgcatccatggtggcacctgcacagcaatcaaagccgactcctacatttgcctctgtccccttgggtttaaaggtcgacactgtgaagatgctttcaccttgaccattcctcagttcagagagtctctgagatcttacgctgcaactccctggccactggagccccagcattacctttccttcatggaatttgagatcacatttcggccagactcaggagatggtgtcctcctgtacagctatgacacaggcagcaaagacttcctgtccatcaacttggcagggggccacgtggagttccgctttgactgtggctctgggaccggtgtcctcaggagtgaagatcccctcaccctgggcaactggcacgagcttcgtgtatctcgcacagcaaagaatggaatcttacaggtggataagcagaagatagtggagggaatggcagagggaggcttcacacagattaagtgcaacacagacattttcattggcggagtccccaattatgatgatgtgaagaagaactcgggtgtcctgaagcctttcagcgggagcatccagaagatcatcctgaatgaccgaaccatccatgtgaagcatgacttcacctccggagtgaatgtggagaatgcggcccacccctgtgtgagagccccttgtgcccatgggggcagctgccggcccaggaaggagggctatgactgtgactgccccttgggctttgaggggcttcactgccagaaagagtgtgggaactactgcctcaatacgatcatagaagccattgagatcccgcagtttatcggccgcagttacctgacgtatgacaacccagatatcttgaagagggtgtcaggatcaagatcaaatgtgttcatgaggtttaaaacaactgccaaggatggccttttgctgtggaggggagacagccccatgagacccaacagcgacttcatttccttgggccttcgggatggagccctcgtgttcagctataacctgggcagtggtgtggcatccatcatggtgaatggctccttcaacgatggtcggtggcaccgagttaaggccgttagggatggccagtcaggaaagataaccgtggatgactatggagccagaacaggcaaatccccaggcatgatgcggcagcttaacatcaatggagctctgtatgtgggtggaatgaaggaaattgctctgcacactaacaggcaatatatgagagggctcgtgggctgtatctctcacttcaccctgtccaccgattaccacatttccctcgtggaagatgccgtggatgggaaaaacatcaacacttgtggagccaagtaacaccagctggccttgtccaagggacagagccttctattctgagaatcccaggggccctcagaccctgcctgatgctatatgcagaggcccagggaccaggtgtgtttcctctcaccaagaagaaagtacacactgatgagaaactgagaaccaagacaggcatccctgggtggcctttcctgctgacactccacgagctgacccagcagaattctctgtgtaggaagcatcggactttgtccattgaatatgtagcggctgccagagatcacacatcaatgcaaattccagagcctgtctgctatagctcagtgactgtgttgtgattcatagtacattaaaaagagagagagagagaaagaatcccacagggcactattaaaatacttctctccttccctgactcatgacactcttcctgacagcagaatgactgtgtgaccttgaacttcacatttcccacattggcccttggattgttcggattaaccccttccactcctcactggctggttcactgtgttctgactagtccataaaaataaagatggaaggagatc

SEQ ID NO: 2703 - protein, 1017 aa, Homo sapiens
MDLIRGVLLRLLLLASSLGPGAVSLRAAIRKPGKVGPPLDIKLGALNCTAFSIQWKMPRHPGSPILGYTVFYSEVGADKSLQEQLHSVPLSRDIPTTEEVIGDLKPGTEYRVSIAAYSQAGKGRLSSPRHVTTLSQDSCLPPAAPQQPHVIVVSDSEVALSWKPGASEGSAPIQYYSVEFIRPDFDKKWTSIHERIQMDSMVIKGLDPDTNYQFAVRAMNSHGPSPRSWPSDIIRTLCPEEAGSGRYGPRYITDMGAGEDDEGFEDDLDLDISFEEVKPLPATKGGNKKFLVESKKMSISNPKTISRLIPPTSASLPVTTVAPQPIPIQRKGKNGVAIMSRLFDMPCDETLCSADSFCVNDYTWGGSRCQCTLGKGGESCSEDIVIQYPQFFGHSYVTFEPLKNSYQAFQITLEFRAEAEDGLLLYCGENEHGRGDFMSLAIIRRSLQFRFNCGTGVAIIVSETKIKLGGWHTVMLYRDGLNGLLQLNNGTPVTGQSQGQYSKITFRTPLYLGGAPSAYWLVRATGTNRGFQGCVQSLAVNGRRIDMRPWPLGKALSGADVGECSSGICDEASCIHGGTCTAIKADSYICLCPLGFKGRHCEDAFTLTIPQFRESLRSYAATPWPLEPQHYLSFMEFEITFRPDSGDGVLLYSYDTGSKDFLSINLAGGHVEFRFDCGSGTGVLRSEDPLTLGNWHELRVSRTAKNGILQVDKQKIVEGMAEGGFTQIKCNTDIFIGGVPNYDDVKKNSGVLKPFSGSIQKIILNDRTIHVKHDFTSGVNVENAAHPCVRAPCAHGGSCRPRKEGYDCDCPLGFEGLHCQKECGNYCLNTIIEAIEIPQFIGRSYLTYDNPDILKRVSGSRSNVFMRFKTTAKDGLLLWRGDSPMRPNSDFISLGLRDGALVFSYNLGSGVASIMVNGSFNDGRWHRVKAVRDGQSGKITVDDYGARTGKSPGMMRQLNINGALYVGGMKEIALHTNRQYMRGLVGCISHFTLSTDYHISLVEDAVDGKNINTCGAK

SEQ ID NO: 2704 - DNA, 3936 bp, Homo sapiens
agggcctgtccctctcacttccactcgattgtaatttcatccccgggccggtcgagcctccctccctcccgcggccagcccttccctcccagtcggcctccttcgtcgcccccgcccccgcgaaaagccctgcagcttgcagccggcttcactcgcgcacgccgacctcccggctgcagtcctacctcttggaactacccgtgtttccgggcccagccctcgcagccccccacctcctcgccccggcccggggatccgttggggccgcgtcccccacgcgcccccggagacgccctttccgtgtgcgcccgggacttggtgaaactttgcaggcgccggctgcgaaatggatttaatccgaggcgtcttgctccggctcctgctcctggcttccagcctcggacccggcgcggtgtcgctccgagcggccatccgaaaaccaggcaaggtagggcctcctcttgacatcaagctgggcgcattgaactgtacggctttcagcatccagtggaaaatgccaaggcatcctggaagtcccatccttgggtacactgtcttttactctgaggttggcgcagataaatccctgcaggagcagttgcacagcgtgcctctcagccgggacatcccgaccacggaggaagtgattggagatttgaaaccaggcactgaatatcgtgtgagcatagcagcttacagccaggctggcaaagggcggctgagctctcctcggcatgtcaccactttgtcccaagattcctgcctgcctcctgcagctccccagcagccacatgtcattgtggtttcggattctgaggtggccctgtcttggaaacctggagcgagtgaaggaagcgcccctattcagtactattctgtggaattcatcaggccagatttcgacaagaagtggacctcaatccatgagcggatccagatggactccatggttatcaagggcctcgatccagataccaactaccagtttgccgtgagggcaatgaattcccatggccccagcccccgcagctggcccagtgacatcatccggaccctctgccctgaggaggcgggaagtggccgctatggaccccgttatatcaccgacatgggagctggtgaggatgatgaaggatttgaagacgacttagatttggatatttcctttgaggaggttaaaccacttcctgctaccaaaggagggaataagaaatttttggtggaaagcaagaagatgtctatatctaacccaaagaccatttctaggctcatcccccctacctcagcatctctccctgtgaccacggtggctccccagcccattcccatacagagaaaggggaagaatggtgtggccataatgtcaaggctctttgacatgccttgtgatgaaactctctgctctgctgacagcttctgtgtcaatgactacacctgggggggctcgcgatgccagtgcaccctgggcaaaggtggtgagagctgctcagaagatattgttatccagtatcctcagttctttggccactcctatgtaacgtttgaacctctgaagaattcttatcaggcatttcaaattactcttgaatttagggcggaggcagaggatggcttactgctctactgtggggagaacgaacacgggaggggggatttcatgtccctggctatcatccgacgctccctgcagttcaggtttaattgtggaactggggttgccatcatcgtaagtgagaccaaaatcaaactagggggttggcacacggttatgctctacagagatgggctgaacgggctgctgcagctgaacaatggcaccccagtgacaggccagtctcagggccaatacagtaaaattactttccggacacctctctatcttggtggcgctcccagcgcttactggttggttagagcaacagggacaaaccgaggctttcaaggctgtgtgcagtcgctcgctgtgaatgggaggagaattgacatgaggccctggcccctgggaaaagcactcagtggggctgatgtgggggaatgcagcagtggaatctgtgatgaggcctcgtgcatccatggtggcacctgcacagcaatcaaagccgactcctacatttgcctctgtccccttgggtttaaaggtcgacactgtgaagatgctttcaccttgaccattcctcagttcagagagtctctgagatcttacgctgcaactccctggccactggagccccagcattacctttccttcatggaatttgagatcacatttcggccagactcaggagatggtgtcctcctgtacagctatgacacaggcagcaaagacttcctgtccatcaacttggcagggggccacgtggagttccgctttgactgtggctctgggaccggtgtcctcaggagtgaagatcccctcaccctgggcaactggcacgagcttcgtgtatctcgcacagcaaagaatggaatcttacaggtggataagcagaagatagtggagggaatggcagagggaggcttcacacagattaagtgcaacacagacattttcattggcggagtccccaattatgatgatgtgaagaagaactcgggtgtcctgaagcctttcagcgggagcatccagaagatcatcctgaatgaccgaaccatccatgtgaagcatgacttcacctccggagtgaatgtggagaatgcggcccacccctgtgtgagagccccttgtgcccatgggggcagctgccggcccaggaaggagggctatgactgtgactgccccttgggctttgaggggcttcactgccagaaagcgatcatagaagccattgagatcccgcagtttatcggccgcagttacctgacgtatgacaacccagatatcttgaagagggtgtcaggatcaagatcaaatgtgttcatgaggtttaaaacaactgccaaggatggccttttgctgtggaggggagacagccccatgagacccaacagcgacttcatttccttgggccttcgggatggagccctcgtgttcagctataacctgggcagtggtgtggcatccatcatggtgaatggctccttcaacgatggtcggtggcaccgagttaaggccgttagggatggccagtcaggaaagataaccgtggatgactatggagccagaacaggcaaatccccaggcatgatgcggcagcttaacatcaatggagctctgtatgtgggtggaatgaaggaaattgctctgcacactaacaggcaatatatgagagggctcgtgggctgtatctctcacttcaccctgtccaccgattaccacatttccctcgtggaagatgccgtggatgggaaaaacatcaacacttgtggagccaagtaacaccagctggccttgtccaagggacagagccttctattctgagaatcccaggggccctcagaccctgcctgatgctatatgcagaggcccagggaccaggtgtgtttcctctcaccaagaagaaagtacacactgatgagaaactgagaaccaagacaggcatccctgggtggcctttcctgctgacactccacgagctgacccagcagaattctctgtgtaggaagcatcggactttgtccattgaatatgtagcggctgccagagatcacacatcaatgcaaattccagagcctgtctgctatagctcagtgactgtgttgtgattcatagtacattaaaaagagagagagagagaaagaatcccacagggcactattaaaatacttctctccttccctgactcatgacactcttcctgacagcagaatgactgtgtgaccttgaacttcacatttcccacattggcccttggattgttcggattaaccccttccactcctcactggctggttcactgtgttctgactagtccataaaaataaagatggaaggagatc

SEQ ID NO: 2705 - protein, 1009 aa, Homo sapiens; identical to SEQ ID NO: 265

SEQ ID NO: 2706 - DNA, 2849 bp, Homo sapiens
agggcctgtccctctcacttccactcgattgtaatttcatccccgggccggtcgagcctccctccctcccgcggccagcccttccctcccagtcggcctccttcgtcgcccccgcccccgcgaaaagccctgcagcttgcagccggcttcactcgcgcacgccgacctcccggctgcagtcctacctcttggaactacccgtgtttccgggcccagccctcgcagccccccacctcctcgccccggcccggggatccgttggggccgcgtcccccacgcgcccccggagacgccctttccgtgtgcgcccgggacttggtgaaactttgcaggcgccggctgcgaaatggatttaatccgaggcgtcttgctccggctcctgctcctggcttccagcctcggacccggcgcggtgtcgctccgagcggccatccgaaaaccaggcaaggtagggcctcctcttgacatcaagctgggcgcattgaactgtacggctttcagcatccagtggaaaatgccaaggcatcctggaagtcccatccttgggtacactgtcttttactctgaggttggcgcagataaatccctgcaggagcagttgcacagcgtgcctctcagccgggacatcccgaccacggaggaagtgattggagatttgaaaccaggcactgaatatcgtgtgagcatagcagcttacagccaggctggcaaagggcggctgagctctcctcggcatgtcaccactttgtcccaagattcctgcctgcctcctgcagctccccagcagccacatgtcattgtggtttcggattctgaggtggccctgtcttggaaacctggagcgagtgaaggaagcgcccctattcagtactattctgtggaattcatcaggccagatttcgacaagaagtggacctcaatccatgagcggatccagatggactccatggttatcaagggcctcgatccagataccaactaccagtttgccgtgagggcaatgaattcccatggccccagcccccgcagctggcccagtgacatcatccggaccctctgccctgaggaggcgggaagtggccgctatggaccccgttatatcaccgacatgggagctggtgaggatgatgaaggatttgaagacgacttagatttggatatttcctttgaggaggttaaaccacttcctgctaccaaaggagggaataagaaatttttggtggaaagcaagaagatgtctatatctaacccaaagaccatttctaggctcatcccccctacctcagcatctctccctgtgaccacggtggctccccagcccattcccatacagagaaaggggaagaatggtgtggccataatgtcaaggctctttgacatgccttgtgatgaaactctctgctctgctgacagcttctgtgtcaatgactacacctgggggggctcgcgatgccagtgcaccctgggcaaaggtggtgagagctgctcagaagatattgttatccagtatcctcattccttgggccttcgggatggagccctcgtgttcagctataacctgggcagtggtgtggcatccatcatggtgaatggctccttcaacgatggtcggtggcaccgagttaaggccgttagggatggccagtcaggaaagataaccgtggatgactatggagccagaacaggcaaatccccaggcatgatgcggcagcttaacatcaatggagctctgtatgtgggtggaatgaaggaaattgctctgcacactaacaggcaatatatgagagggctcgtgggctgtatctctcacttcaccctgtccaccgattaccacatttccctcgtggaagatgccgtggatgggaaaaacatcaacacttgtggagccaagtaacaccagctggccttgtccaagggacagagccttctattctgagaatcccaggggccctcagaccctgcctgatgctatatgcagaggcccagggaccaggtgtgtttcctctcaccaagaagaaagtacacactgatgagaaactgagaaccaagacaggcatccctgggtggcctttcctgctgacactccacgagctgacccagcagaattctctgtgtaggaagcatcggactttgtccattgaatatgtagcggctgccagagatcacacatcaatgcaaattccagagcctgtctgctatagctcagtgactgtgttgtgattcatagtacattaaaaagagagagagagagaaagaatcccacagggcactattaaaatacttctctccttccctgactcatgacactcttcctgacagcagaatgactgtgtgaccttgaacttcacatttcccacattggcccttggattgttcggattaaccccttccactcctcactggctggttcactgtgttctgactagtccataaaaataaagatggaaggagatcaaacacagaatcataatcataatgcggcccccttccccagagcttacctcgaatgtgaaatccctacttcttataatgcagagttaaggagctgagcccccatgattttgtagctgtacttttgtatgtgtatatttttatagctgcagattgtccacacagtatacttttggaagtttgggtggatgactctgaattcttgcacacctttcctaaaaatttctcccaagagagacttgtttgggccttttgtggtgtcagtggaatggataggtaacttgggtgggcaacttggggagctgaccattctcttttggtaaatgttgacggctcaagaggatgaatatgaagctttccaagataagcagattaaaaggaacatgtgttaccgaggt

SEQ ID NO: 2707 - protein, 515 aa, Homo sapiens [sequence omitted]

SEQ ID NO: 2708 - DNA, 2928 bp, Homo sapiens
agggcctgtccctctcacttccactcgattgtaatttcatccccgggccggtcgagcctccctccctcccgcggccagcccttccctcccagtcggcctccttcgtcgcccccgcccccgcgaaaagccctgcagcttgcagccggcttcactcgcgcacgccgacctcccggctgcagtcctacctcttggaactacccgtgtttccgggcccagccctcgcagccccccacctcctcgccccggcccggggatccgttggggccgcgtcccccacgcgcccccggagacgccctttccgtgtgcgcccgggacttggtgaaactttgcaggcgccggctgcgaaatggatttaatccgaggcgtcttgctccggctcctgctcctggcttccagcctcggacccggcgcggtgtcgctccgagcggccatccgaaaaccaggcaaggtagggcctcctcttgacatcaagctgggcgcattgaactgtacggctttcagcatccagtggaaaatgccaaggcatcctggaagtcccatccttgggtacactgtcttttactctgaggttggcgcagataaatccctgcaggagcagttgcacagcgtgcctctcagccgggacatcccgaccacggaggaagtgattggagatttgaaaccaggcactgaatatcgtgtgagcatagcagcttacagccaggctggcaaagggcggctgagctctcctcggcatgtcaccactttgtcccaagattcctgcctgcctcctgcagctccccagcagccacatgtcattgtggtttcggattctgaggtggccctgtcttggaaacctggagcgagtgaaggaagcgcccctattcagtactattctgtggaattcatcaggccagatttcgacaagaagtggacctcaatccatgagcggatccagatggactccatggttatcaagggcctcgatccagataccaactaccagtttgccgtgagggcaatgaattcccatggccccagcccccgcagctggcccagtgacatcatccggaccctctgccctgaggaggcgggaagtggccgctatggaccccgttatatcaccgacatgggagctggtgaggatgatgaaggatttgaagacgacttagatttggatatttcctttgaggaggttaaaccacttcctgctaccaaaggagggaataagaaatttttggtggaaagcaagaagatgtctatatctaacccaaagaccatttctaggctcatcccccctacctcagcatctctccctgtgaccacggtggctccccagcccattcccatacagagaaaggggaagaatggtgtggccataatgtcaaggctctttgacatgccttgtgatgaaactctctgctctgctgacagcttctgtgtcaatgactacacctgggggggctcgcgatgccagtgcaccctgggcaaaggtggtgagagctgctcagaagatattgttatccagtatcctcattccttgggccttcgggatggagccctcgtgttcagctataacctgggcagtggtgtggcatccatcatggtgaatggctccttcaacgatggtcggtggcaccgagttaaggccgttagggatggccagtcaggaaagataaccgtggatgactatggagccagaacaggcaaatccccaggcatgatgcggcagcttaacatcaatggagctctgtatgtgggtggaatgaaggaaattgctctgcacactaacaggcaatatatgagagggctcgtgggctgtatctctcacttcaccctgtccaccgattaccacatttccctcgtggaagatgccgtggatgggaaaaacatcaacacttgtggagccaagtaacaccagctggccttgtccaagggacagagccttctattctgagaatcccaggggccctcagaccctgcctgatgctatatgcagaggcccagggaccaggtgtgtttcctctcaccaagaagaaagtacacactgatgagaaactgagaaccaagacaggcatccctgggtggcctttcctgctgacactccacgagctgacccagcagaattctctgtgtaggaagcatcggactttgtccattgaatatgtagcggctgccagagatcacacatcaatgcaaattccagagcctgtctgctatagctcagtgactgtgttgtgattcatagtacattaaaaagagagagagagagaaagaatcccacagggcactattaaaatacttctctccttccctgactcatgacactcttcctgacagcagaatgactgtgtgaccttgaacttcacatttcccacattggcccttggattgttcggattaaccccttccactcctcactggctggttcactgtgttctgactagtccataaaaataaagatggaaggagatcaaacacagaatcataatcataatgcggcccccttccccagagcttacctcgaatgtgaaatccctacttcttataatgcagagttaaggagctgagcccccatgattttgtagctgtacttttgtatgtgtatatttttatagctgcagattgtccacacagtatacttttggaagtttgggtggatgactctgaattcttgcacacctttcctaaaaatttctcccaagagagacttgtttgggccttttgtggtgtcagtggaatggataggtaacttgggtgggcaacttggggagctgaccattctcttttggtaaatgttgacggctcaagaggatgaatatgaagctttccaagataagcagattaaaaggaacatgtgttaccgaggtaggtcactgtcatttttgttttaagagttggggggagtatctatagtaaacttgaataaaggggacaaagctagaactt

SEQ ID NO: 2709 - protein, 515 aa, Homo sapiens [sequence omitted]

SEQ ID NO: 2710 - DNA, 3387 bp, Homo sapiens
agggcctgtccctctcacttccactcgattgtaatttcatccccgggccggtcgagcctccctccctcccgcggccagcccttccctcccagtcggcctccttcgtcgcccccgcccccgcgaaaagccctgcagcttgcagccggcttcactcgcgcacgccgacctcccggctgcagtcctacctcttggaactacccgtgtttccgggcccagccctcgcagccccccacctcctcgccccggcccggggatccgttggggccgcgtcccccacgcgcccccggagacgccctttccgtgtgcgcccgggacttggtgaaactttgcaggcgccggctgcgaaatggatttaatccgaggcgtcttgctccggctcctgctcctggcttccagcctcggacccggcgcggtgtcgctccgagcggccatccgaaaaccaggcaaggtagggcctcctcttgacatcaagctgggcgcattgaactgtacggctttcagcatccagtggaaaatgccaaggcatcctggaagtcccatccttgggtacactgtcttttactctgaggttggcgcagataaatccctgcaggagcagttgcacagcgtgcctctcagccgggacatcccgaccacggaggaagtgattggagatttgaaaccaggcactgaatatcgtgtgagcatagcagcttacagccaggctggcaaagggcggctgagctctcctcggcatgtcaccactttgtcccaagattcctgcctgcctcctgcagctccccagcagccacatgtcattgtggtttcggattctgaggtggccctgtcttggaaacctggagcgagtgaaggaagcgcccctattcagtactattctgtggaattcatcaggccagatttcgacaagaagtggacctcaatccatgagcggatccagatggactccatggttatcaagggcctcgatccagataccaactaccagtttgccgtgagggcaatgaattcccatggccccagcccccgcagctggcccagtgacatcatccggaccctctgccctgaggaggcgggaagtggccgctatggaccccgttatatcaccgacatgggagctggtgaggatgatgaaggatttgaagacgacttagatttggatatttcctttgaggaggttaaaccacttcctgctaccaaaggagggaataagaaatttttggtggaaagcaagaagatgtctatatctaacccaaagaccatttctaggctcatcccccctacctcagcatctctccctgtgaccacggtggctccccagcccattcccatacagagaaaggggaagaatggtgtggccataatgtcaaggctctttgacatgccttgtgatgaaactctctgctctgctgacagcttctgtgtcaatgactacacctgggggggctcgcgatgccagtgcaccctgggcaaaggtggtgagagctgctcagaagatattgttatccagtatcctcattccttgggccttcgggatggagccctcgtgttcagctataacctgggcagtggtgtggcatccatcatggtgaatggctccttcaacgatggtcggtggcaccgagttaaggccgttagggatggccagtcaggaaagataaccgtggatgactatggagccagaacaggcaaatccccaggcatgatgcggcagcttaacatcaatggagctctgtatgtgggtggaatgaaggaaattgctctgcacactaacaggcaatatatgagagggctcgtgggctgtatctctcacttcaccctgtccaccgattaccacatttccctcgtggaagatgccgtggatgggaaaaacatcaacacttgtggagccaagtaacaccagctggccttgtccaagggacagagccttctattctgagaatcccaggggccctcagaccctgcctgatgctatatgcagaggcccagggaccaggtgtgtttcctctcaccaagaagaaagtacacactgatgagaaactgagaaccaagacaggcatccctgggtggcctttcctgctgacactccacgagctgacccagcagaattctctgtgtaggaagcatcggactttgtccattgaatatgtagcggctgccagagatcacacatcaatgcaaattccagagcctgtctgctatagctcagtgactgtgttgtgattcatagtacattaaaaagagagagagagagaaagaatcccacagggcactattaaaatacttctctccttccctgactcatgacactcttcctgacagcagaatgactgtgtgaccttgaacttcacatttcccacattggcccttggattgttcggattaaccccttccactcctcactggctggttcactgtgttctgactagtccataaaaataaagatggaaggagatcaaacacagaatcataatcataatgcggcccccttccccagagcttacctcgaatgtgaaatccctacttcttataatgcagagttaaggagctgagcccccatgattttgtagctgtacttttgtatgtgtatatttttatagctgcagattgtccacacagtatacttttggaagtttgggtggatgactctgaattcttgcacacctttcctaaaaatttctcccaagagagacttgtttgggccttttgtggtgtcagtggaatggataggtaacttgggtgggcaacttggggagctgaccattctcttttggtaaatgttgacggctcaagaggatgaatatgaagctttccaagataagcagattaaaaggaacatgtgttaccgaggtaggtcactgtcatttttgttttaagagttggggggagtatctatagtaaacttgaataaaggggacaaagctagaacttattcattcattcattcacttatggagttgttactgattttgcggaggtcaggttcataccaatggacactaatacaatcagtgttcccaaggctgtgcaggggtggggggacatgctgtcaggatggtctgagcatctgggtgagaaccagagaaacaggacttcttccttctgtaccatgagctgtgtccctttactatgcaagcacatgaccccagagacagctggttcactggcagatccccatgatggacttactaagggaaaggtgagatgaacactgcccccaaggagggggtgaaatatgatctaacttatgcaagagcctataattagtcccagtctcgactctacatttgtttgtgcagcattcattcagcaaagacttttggggtttgtgcaaggcacagttttaagcacataatgtaattctaaaagatgaataaactagagaggttc

SEQ ID NO: 2711 - protein, 515 aa, Homo sapiens [sequence omitted]

SEQ ID NO: 2712 - DNA, 5205 bp, Homo sapiens
ctcccgaaggtccagcccttacccgccttcctaccaccttaggggatttggcccggagaacgagatcaccctctcaatgaaaggcagatgtccctttaaggtttgcttctacagcccgtggactttagcctaaacacggacccgcgaagctggctttatttgtccatgtctcggacagagcctgggaagctgccagtgagatttcagagaccaagagcgcgaaggggcgggcgatgtggcaatccgtctgggatgtgaaaagcgtggagcgcatttagaggaattcgacgaaaacacaggaaatcactcctctcccgctcctgggcgccgctgccactggggcagaggactgggaaccgcggcagcgggataagtggcccagccagagagcgcagctcccgcgcccggtcctgccctgcgaaccagcgcggccccctggcgctgaggctgctccggccatggcccctcggccccgcgcccgcccaggggtcgctgtcgcctgctgctggctcctcactgttgttctacgctgctgcgtatcattcaatgttgatgtgaaaaattcaatgactttcagcggcccggtggaagacatgtttggatatactgttcaacaatatgaaaatgaagaaggaaaatgggtgcttattggttctccgttagttggccaacccaaaaacagaactggagatgtctataagtgtccagttgggagaggtgaatcattaccttgtgtaaagttggatctaccagttaatacatcaattcccaatgtcacagaagtaaaggagaacatgacatttggatcaactttagtcaccaacccaaatggaggatttctggcttgtgggcccttatatgcctatagatgtggacatttgcattacacaactggaatctgttctgacgtcagccccacatttcaagtcgtgaattccattgcccctgtacaagaatgcagcactcaactggacatagtcatagtgctggatggttccaacagtatttacccatgggacagtgttacagcttttttaaatgaccttcttgaaagaatggatattggtcctaaacagacacaggttggaattgtacagtatggagaaaacgtgacccatgagttcaacctcaataagtattcttccaccgaagaggtacttgttgcagcaaagaaaatagtccagagaggtggccgccagactatgacagctcttggaatagacacagcaagaaaggaggcattcacggaagcccggggtgcccgaagaggagttaaaaaagtcatggttattgtgacagatggagagtctcatgacaatcatcgactgaagaaggtcatccaagactgtgaagatgaaaacattcaacggttttccatagctattcttggcagctataaccgaggaaatttaagcactgaaaaatttgtggaggaaataaaatcaattgcaagtgaacccactgaaaagcatttcttcaatgtctctgatgaattggctctagtcaccattgttaaaactctgggagaaagaatatttgccctggaagccacagctgaccagtcagcagcttcatttgaaatggaaatgtctcagactggcttcagtgctcattattcacaggactgggtcatgcttggagcagtaggagcctatgattggaatggaacagttgtcatgcagaaggctagtcaaatcataatccctcgaaacacaacctttaatgttgagtctaccaaaaagaatgaaccgcttgcttcttatttaggttacactgtaaactctgctactgcttcttctggagatgtgctctatattgctggacagcctcggtacaatcatacaggccaggtcattatctacaggatggaagatggaaacatcaaaattctccagacgctcagtggagaacagattggttcctactttggcagtattttaacaacaactgacattgacaaggattctaatactgacattcttctagtcggagcccctatgtacatgggaacagagaaggaggagcaaggaaaagtgtatgtgtatgctctcaatcagacaaggtttgaatatcaaatgagcctggaacctattaagcagacgtgctgttcatctcggcagcacaattcatgcacaacagaaaacaaaaatgagccatgcggggctcgttttggaactgcaattgctgctgtaaaagacctcaatcttgatggatttaatgacatcgtgataggagctccgctggaagatgatcacgggggagctgtgtacatttatcatggaagtggcaagactataaggaaagagtatgcacaacgtattccatcaggtggggatggtaagacactgaaattttttggccagtctatccacggagaaatggatttaaatggtgacggtctgacagatgtgactattgggggccttggtggtgctgccctcttctggtcccgagatgtggccgtagttaaagtgaccatgaattttgagccaaataaagtgaatattcaaaagaaaaactgccatatggagggaaaggaaacagtatgcataaatgctacagtgtgttttgatgtgaaattaaagtctaaagaagacacgatttatgaagctgatttgcagtaccgtgtcaccctagattcactaagacaaatatcacgaagttttttctctggaactcaagagagaaaggttcaaaggaacatcacagttcgaaaatcagaatgcactaagcactccttctacatgttggcaagacaagcatgactttcaggactctgtgagaataacgttggactttaatcttaccgatccagaaaatgggcctgttcttgatgattctctaccaaactcagtacatgaatatattccctttgccaaagattgtggaaataaggaaaaatgtatctcagacctcagcctgcatgtcgccaccactgaaaaggacctgctgattgtccgatcccagaatgataagttcaacgttagcctcacagtcaaaaatacaaaggacagtgcctataacaccaggacaatagtgcattattctccaaatctagttttttcaggaattgaggctatccaaaaagacagttgtgaatctaatcataatatcacatgtaaagttggatatcccttcctgagaagaggagagatggtaactttcaaaatattgtttcagtttaacacatcctatctcatggaaaatgtgaccatttatttaagtgcaacaagtgacagcgaagaacctcctgaaaccctttctgataatgtagtaaacatttctatcccggtaaaatatgaagttggactacagttttacagctctgcaagtgaataccacatttcaattgctgccaatgagacagtccctgaagttattaattctactgaggacattggaaatgaaattaatatcttctacttgattagaaaaagtggatcttttccaatgccagagcttaagctgtcaatttcattccccaatatgacatcaaatggttaccctgtgctgtacccaactggattgtcatcttctgagaatgcaaactgcagaccccatatctttgaggatcctttcagtatcaactctggaaagaaaatgactacatcaactgaccatctcaaacgaggcacaattctggactgcaatacatgtaaatttgctaccatcacatgtaatctcacttcttctgacatcagccaagtcaatgtttcgcttatcttgtggaaaccaacttttataaaatcatatttttccagcttaaatcttactataaggggagaacttcggagtgaaaatgcatctctggttttaagtagcagcaatcaaaaaagagagcttgctattcaaatatccaaagatgggctaccgggcagagtgccattatgggtcatcctgctgagtgcttttgccggattgttgctgttaatgctgctcattttagcactgtggaagattggattcttcaaaagaccactgaaaaagaaaatggagaaatgaaatattttatgaaagaaaataataacaattattcaataatctatcctcaggtttgcctcaaatatgtgacaagaaatgtataattcatgacatagtcatgtaactatgtaatccatcagggattcattacttggaaaatgacaggtcatgcattatccaaaaacaataccaaaaagacatattttataaaatgacaaaaaatattttacataattactcatttttgttgagtaagcaaaattacaaagtgtttttaaaaaaacctgtacaaatatgtttatgtattaaatcaccatccaaaatatttaaggaatatataaaaagatttttatgatcatagaaacatctattttcaaaacaatataaattaagcttttccccttgattcctgttggatatccatgttcagcatgacagtcagcactcgtaaatgccaagaaaagaattacctgaaaaagatcatttctccctattcaaatgagaatattttcccttggtagaatccatatacaatatggattgaaaattaagtcaccaagaatacatttagcatctttgtgttgggttctatacctaaaaattttccctccctgcccaaggtgattggaaagtactgcaattgagctaaaattttatctaggatggaaaatcaggatagactcgtttaaaaacaagtatattaaatgggttaaattaagcttttacagaacatgcttaattttgatattgagctctaaatgcaaaactcttttatactgaaaaaacacttaaagtagttttgtgtggcatcacagtgatttgtcatgaaaagccatatatgggggacatgctaaaatggcttctgaatgaaatacgacagcagagaaagatgccactgaaatgctgaaattatctttgctgagcagcttttgaatgctaagggttccagtatgtgacccaaagaaagagttgtctcaactccttggtacagggttcattcaaacccccaagctgtgagagtgtgtttatttttaattttttaaaaggtatttaatttccaaccacacttcttatttttttgaaaagacaattttccatttcagtattacattttaccaagaagtcactgctttttaggtgtgttgcatcaatatttaaataaaatcccagaaatgtattttaaagaatttcaggtttgaaaactcaaaccaacaggaagatatc

SEQ ID NO: 2713 - protein, 768 aa, Homo sapiens
MAPRPRARPGVAVACCWLLTVVLRCCVSFNVDVKNSMTFSGPVEDMFGYTVQQYENEEGKWVLIGSPLVGQPKNRTGDVYKCPVGRGESLPCVKLDLPVNTSIPNVTEVKENMTFGSTLVTNPNGGFLACGPLYAYRCGHLHYTTGICSDVSPTFQVVNSIAPVQECSTQLDIVIVLDGSNSIYPWDSVTAFLNDLLERMDIGPKQTQVGIVQYGENVTHEFNLNKYSSTEEVLVAAKKIVQRGGRQTMTALGIDTARKEAFTEARGARRGVKKVMVIVTDGESHDNHRLKKVIQDCEDENIQRFSIAILGSYNRGNLSTEKFVEEIKSIASEPTEKHFFNVSDELALVTIVKTLGERIFALEATADQSAASFEMEMSQTGFSAHYSQDWVMLGAVGAYDWNGTVVMQKASQIIIPRNTTFNVESTKKNEPLASYLGYTVNSATASSGDVLYIAGQPRYNHTGQVIIYRMEDGNIKILQTLSGEQIGSYFGSILTTTDIDKDSNTDILLVGAPMYMGTEKEEQGKVYVYALNQTRFEYQMSLEPIKQTCCSSRQHNSCTTENKNEPCGARFGTAIAAVKDLNLDGFNDIVIGAPLEDDHGGAVYIYHGSGKTIRKEYAQRIPSGGDGKTLKFFGQSIHGEMDLNGDGLTDVTIGGLGGAALFWSRDVAVVKVTMNFEPNKVNIQKKNCHMEGKETVCINATVCFDVKLKSKEDTIYEADLQYRVTLDSLRQISRSFFSGTQERKVQRNITVRKSECTKHSFYMLARQA

SEQ ID NO: 2714 - DNA, 8044 bp, Homo sapiens
ctcccgaaggtccagcccttacccgccttcctaccaccttaggggatttggcccggagaacgagatcaccctctcaatgaaaggcagatgtccctttaaggtttgcttctacagcccgtggactttagcctaaacacggacccgcgaagctggctttatttgtccatgtctcggacagagcctgggaagctgccagtgagatttcagagaccaagagcgcgaaggggcgggcgatgtggcaatccgtctgggatgtgaaaagcgtggagcgcatttagaggaattcgacgaaaacacaggaaatcactcctctcccgctcctgggcgccgctgccactggggcagaggactgggaaccgcggcagcgggataagtggcccagccagagagcgcagctcccgcgcccggtcctgccctgcgaaccagcgcggccccctggcgctgaggctgctccggccatggcccctcggccccgcgcccgcccaggggtcgctgtcgcctgctgctggctcctcactgttgttctacgctgctgcgtatcattcaatgttgatgtgaaaaattcaatgactttcagcggcccggtggaagacatgtttggatatactgttcaacaatatgaaaatgaagaaggaaaatgggtgcttattggttctccgttagttggccaacccaaaaacagaactggagatgtctataagtgtccagttgggagaggtgaatcattaccttgtgtaaagttggatctaccagttaatacatcaattcccaatgtcacagaagtaaaggagaacatgacatttggatcaactttagtcaccaacccaaatggaggatttctggcttgtgggcccttatatgcctatagatgtggacatttgcattacacaactggaatctgttctgacgtcagccccacatttcaagtcgtgaattccattgcccctgtacaagaatgcagcactcaactggacatagtcatagtgctggatggttccaacagtatttacccatgggacagtgttacagcttttttaaatgaccttcttgaaagaatggatattggtcctaaacagacacaggttggaattgtacagtatggagaaaacgtgacccatgagttcaacctcaataagtattcttccaccgaagaggtacttgttgcagcaaagaaaatagtccagagaggtggccgccagactatgacagctcttggaatagacacagcaagaaaggaggcattcacggaagcccggggtgcccgaagaggagttaaaaaagtcatggttattgtgacagatggagagtctcatgacaatcatcgactgaagaaggtcatccaagactgtgaagatgaaaacattcaacggttttccatagctattcttggcagctataaccgaggaaatttaagcactgaaaaatttgtggaggaaataaaatcaattgcaagtgaacccactgaaaagcatttcttcaatgtctctgatgaattggctctagtcaccattgttaaaactctgggagaaagaatatttgccctggaagccacagctgaccagtcagcagcttcatttgaaatggaaatgtctcagactggcttcagtgctcattattcacaggactgggtcatgcttggagcagtaggagcctatgattggaatggaacagttgtcatgcagaaggctagtcaaatcataatccctcgaaacacaacctttaatgttgagtctaccaaaaagaatgaaccgcttgcttcttatttaggttacactgtaaactctgctactgcttcttctggagatgtgctctatattgctggacagcctcggtacaatcatacaggccaggtcattatctacaggatggaagatggaaacatcaaaattctccagacgctcagtggagaacagattggttcctactttggcagtattttaacaacaactgacattgacaaggattctaatactgacattcttctagtcggagcccctatgtacatgggaacagagaaggaggagcaaggaaaagtgtatgtgtatgctctcaatcagacaaggtttgaatatcaaatgagcctggaacctattaagcagacgtgctgttcatctcggcagcacaattcatgcacaacagaaaacaaaaatgagccatgcggggctcgttttggaactgcaattgctgctgtaaaagacctcaatcttgatggatttaatgacatcgtgataggagctccgctggaagatgatcacgggggagctgtgtacatttatcatggaagtggcaagactataaggaaagagtatgcacaacgtattccatcaggtggggatggtaagacactgaaattttttggccagtctatccacggagaaatggatttaaatggtgacggtctgacagatgtgactattgggggccttggtggtgctgccctcttctggtcccgagatgtggccgtagttaaagtgaccatgaattttgagccaaataaagtgaatattcaaaagaaaaactgccatatggagggaaaggaaacagtatgcataaatgctacagtgtgttttgatgtgaaattaaagtctaaagaagacacgatttatgaagctgatttgcagtaccgtgtcaccctagattcactaagacaaatatcacgaagttttttctctggaactcaagagagaaaggttcaaaggaacatcacagttcgaaaatcagaatgcactaagcactccttctacatgttggcaagacaagcatgactttcaggactctgtgagaataacgttggactttaatcttaccgatccagaaaatgggcctgttcttgatgattctctaccaaactcagtacatgaatatattccctttgccaaagattgtggaaataaggaaaaatgtatctcagacctcagcctgcatgtcgccaccactgaaaaggacctgctgattgtccgatcccagaatgataagttcaacgttagcctcacagtcaaaaatacaaaggacagtgcctataacaccaggacaatagtgcattattctccaaatctagttttttcaggaattgaggctatccaaaaagacagttgtgaatctaatcataatatcacatgtaaagttggatatcccttcctgagaagaggagagatggtaactttcaaaatattgtttcagtttaacacatcctatctcatggaaaatgtgaccatttatttaagtgcaacaagtgacagcgaagaacctcctgaaaccctttctgataatgtagtaaacatttctatcccggtaaaatatgaagttggactacagttttacagctctgcaagtgaataccacatttcaattgctgccaatgagacagtccctgaagttattaattctactgaggacattggaaatgaaattaatatcttctacttgattagaaaaagtggatcttttccaatgccagagcttaagctgtcaatttcattccccaatatgacatcaaatggttaccctgtgctgtacccaactggattgtcatcttctgagaatgcaaactgcagaccccatatctttgaggatcctttcagtatcaactctggaaagaaaatgactacatcaactgaccatctcaaacgaggcacaattctggactgcaatacatgtaaatttgctaccatcacatgtaatctcacttcttctgacatcagccaagtcaatgtttcgcttatcttgtggaaaccaacttttataaaatcatatttttccagcttaaatcttactataaggggagaacttcggagtgaaaatgcatctctggttttaagtagcagcaatcaaaaaagagagcttgctattcaaatatccaaagatgggctaccgggcagagtgccattatgggtcatcctgctgagtgcttttgccggattgttgctgttaatgctgctcattttagcactgtggaagattggattcttcaaaagaccactgaaaaagaaaatggagaaatgaaatattttatgaaagaaaataataacaattattcaataatctatcctcaggtttgcctcaaatatgtgacaagaaatgtataattcatgacatagtcatgtaactatgtaatccatcagggattcattacttggaaaatgacaggtcatgcattatccaaaaacaataccaaaaagacatattttataaaatgacaaaaaatattttacataattactcatttttgttgagtaagcaaaattacaaagtgtttttaaaaaaacctgtacaaatatgtttatgtattaaatcaccatccaaaatatttaaggaatatataaaaagatttttatgatcatagaaacatctattttcaaaacaatataaattaagcttttccccttgattcctgttggatatccatgttcagcatgacagtcagcactcgtaaatgccaagaaaagaattacctgaaaaagatcatttctccctattcaaatgagaatattttcccttggtagaatccatatacaatatggattgaaaattaagtcaccaagaatacatttagcatctttgtgttgggttctatacctaaaaattttccctccctgcccaaggtgattggaaagtactgcaattgagctaaaattttatctaggatggaaaatcaggatagactcgtttaaaaacaagtatattaaatgggttaaattaagcttttacagaacatgcttaattttgatattgagctctaaatgcaaaactcttttatactgaaaaaacacttaaagtagttttgtgtggcatcacagtgatttgtcatgaaaagccatatatgggggacatgctaaaatggcttctgaatgaaatacgacagcagagaaagatgccactgaaatgctgaaattatctttgctgagcagcttttgaatgctaagggttccagtatgtgacccaaagaaagagttgtctcaactccttggtacagggttcattcaaacccccaagctgtgagagtgtgtttatttttaattttttaaaaggtatttaatttccaaccacacttcttatttttttgaaaagacaattttccatttcagtattacattttaccaagaagtcactgctttttaggtgtgttgcatcaatatttaaataaaatcccagaaatgtattttaaagaatttcaggtttgaaaactcaaaccaacaggaagatatcacacctttgtatgtgcttctttgttcttgaagtagtcattatggttcattggaatctactgtagcataagctcctaggttgctccatttcttaggaaaatagcaatgaatgaatgtatagtagctgcatgtgtgaactactgctgtaaagtttgctgacatttctgcaacaacatttctccatctgatttaccagaacctgtaacaagaccagaacatgtattcatccagaaactcctgggctctgctttgttcaaagaggagcaaatccacatagaaattaaatgttataaatttatttttttaaactaatttccaaagaatttagctgaagactcagagtcagcctacctcttgactctccacatccgcatctaagatcctgaaggccaaaggaatgcgcctgtgggatgccaaagccatcagtagctggaagaaagaatacctctttctagaggtttggtgtcctcttgctggcctgtcattatttggaaatacgcgcttttggaatttccttcattttcgctatttccaggttcagaaatcatacctaccacttgttctttctttgcccagtaaaactcagggtttctcttattcagagttaccatgttgcacacccccagtgctcagcctgcccagaagcccttctctgatctcagcaagatcttagtagtaaagctaacggatccattgaaattcatactcagcatctgtgactactagacaaagcccatttactgaaccataagtgtgcacttttaaactaaattgttaactgaaagggaaaaaatagaaatgagggcattttgaagtttttagaaaagagaggaagagctgttggccagatcaaagagatacttataagcccggcacaatttttaacataagtcattcctggctattaagtaaaatatttcatgaaccagaagtcctgtttctctaatattataatttgttgaggtttgtgtgtgtgtgtgtgtgcatgtgcagacacatgtacacatataaattgaatacaaaaatagctctataacaccaaaaaacagagtttacagaaaataaacacaaaagctatatctgcaagacaagtttgattcatctagtttcatatagtttcatatagtttcatttttattaatatttaggtttaacttatagttctgcaattatttaaaaaacaagtacagagcgtttgattaaaaaaagtcaacaaatgtttcaaaacagctttgtacaaatgttataaaacatatttaatgattaagaaatgtactagactctatcatttacttttaaaacatttaattagaaaaacaggtgatatttaagactatttataaacttattggccaaattgccaaaaagtttctttttctctaactttggtattctaaataattgattattgctcccattgtaaactgaaccatgtatgcactctcttttctgaccaaactacaatggtatattggtaaattatttaacaacacactgtccaggagggaaaaaaaaaacagtctctgatttgtatcatttgccaatttccatggtccaaatattctctctccattttcaaactaccaaagtgaccctaatcagcttacaaaattcctggaaatgtatctgccacctcttaccaaccagtgtgagctgacttcagcacaccactgagacagattacacgatagacagatagatagatagatagatagatagatagatagatagatagatagatattgatagagaacatgttgtgtctatatacatatccaatgacacacagtataatcatgttttaaattatgccaaaagtactgattatatcaagcccagtaaacataatgctacacagcacccattctttaattttgatttctaaaattataaccttcctttgatattaataaaatgttatgaacttgcaggagaaggaaggagttgaaagaaggaaaatataaagggtgatccacagtgaaaatcagacctacacaagccacaaaaaaattgtctcattttcccaaggaattcaaagtcctgtgatacacattacaaaagatgacactttgtaaatattttgaacttctatgatccaatttcaacttcattggtccaatttgtcaaactattttcctctgagcactagattcatgggcaatttaatctctgaatattttctgtgtcataagtgtgcttgaaaagaggcttgtagtaaacagatatttttacaaaatttgatgcttctgcaaccataataattttatctataaatgcgtatatacatatatatatatatatatatacacatacactcacatgcagatatttacatatatagatattctcttttccttttataaaatcaaagtctaggctcaattggaaaatggaaatatttgcaccaaaagaaaaaagtgccattgttgtgatcaatggagtaaagctggggtatagtagaggctggggaatccctgcccatgttctctccaaggccacagcttgcacaccgtgaatggtggccccactggctccatggagtgtgccttcacgcgggggaatgtccttgtccaacacgctgtaatctactccatgggaactgactgtcctgcttttcacaacattgagaaacaggcccagagcctgtctcatgtgccaggtgcagtcacattattgttaaaataaagtggcttctgacaaatcagtttttcaaaatagcatcctatgtacttttcatttcttccaacaaccctcaggcccccttttgccagttttctcccccaggggagattttcaagactactggagaaaaatctgttaataaaacatttgctctgagt

SEQ ID NO: 2715 - protein, 768 aa, Homo sapiens; identical to SEQ ID NO: 2713

SEQ ID NO: 2716 - DNA, 8538 bp, Homo sapiens
ctcccgaaggtccagcccttacccgccttcctaccaccttaggggatttggcccggagaacgagatcaccctctcaatgaaaggcagatgtccctttaaggtttgcttctacagcccgtggactttagcctaaacacggacccgcgaagctggctttatttgtccatgtctcggacagagcctgggaagctgccagtgagatttcagagaccaagagcgcgaaggggcgggcgatgtggcaatccgtctgggatgtgaaaagcgtggagcgcatttagaggaattcgacgaaaacacaggaaatcactcctctcccgctcctgggcgccgctgccactggggcagaggactgggaaccgcggcagcgggataagtggcccagccagagagcgcagctcccgcgcccggtcctgccctgcgaaccagcgcggccccctggcgctgaggctgctccggccatggcccctcggccccgcgcccgcccaggggtcgctgtcgcctgctgctggctcctcactgttgttctacgctgctgcgtatcattcaatgttgatgtgaaaaattcaatgactttcagcggcccggtggaagacatgtttggatatactgttcaacaatatgaaaatgaagaaggaaaatgggtgcttattggttctccgttagttggccaacccaaaaacagaactggagatgtctataagtgtccagttgggagaggtgaatcattaccttgtgtaaagttggatctaccagttaatacatcaattcccaatgtcacagaagtaaaggagaacatgacatttggatcaactttagtcaccaacccaaatggaggatttctggcttgtgggcccttatatgcctatagatgtggacatttgcattacacaactggaatctgttctgacgtcagccccacatttcaagtcgtgaattccattgcccctgtacaagaatgcagcactcaactggacatagtcatagtgctggatggttccaacagtatttacccatgggacagtgttacagcttttttaaatgaccttcttgaaagaatggatattggtcctaaacagacacaggttggaattgtacagtatggagaaaacgtgacccatgagttcaacctcaataagtattcttccaccgaagaggtacttgttgcagcaaagaaaatagtccagagaggtggccgccagactatgacagctcttggaatagacacagcaagaaaggaggcattcacggaagcccggggtgcccgaagaggagttaaaaaagtcatggttattgtgacagatggagagtctcatgacaatcatcgactgaagaaggtcatccaagactgtgaagatgaaaacattcaacggttttccatagctattcttggcagctataaccgaggaaatttaagcactgaaaaatttgtggaggaaataaaatcaattgcaagtgaacccactgaaaagcatttcttcaatgtctctgatgaattggctctagtcaccattgttaaaactctgggagaaagaatatttgccctggaagccacagctgaccagtcagcagcttcatttgaaatggaaatgtctcagactggcttcagtgctcattattcacaggactgggtcatgcttggagcagtaggagcctatgattggaatggaacagttgtcatgcagaaggctagtcaaatcataatccctcgaaacacaacctttaatgttgagtctaccaaaaagaatgaaccgcttgcttcttatttaggttacactgtaaactctgctactgcttcttctggagatgtgctctatattgctggacagcctcggtacaatcatacaggccaggtcattatctacaggatggaagatggaaacatcaaaattctccagacgctcagtggagaacagattggttcctactttggcagtattttaacaacaactgacattgacaaggattctaatactgacattcttctagtcggagcccctatgtacatgggaacagagaaggaggagcaaggaaaagtgtatgtgtatgctctcaatcagacaaggtttgaatatcaaatgagcctggaacctattaagcagacgtgctgttcatctcggcagcacaattcatgcacaacagaaaacaaaaatgagccatgcggggctcgttttggaactgcaattgctgctgtaaaagacctcaatcttgatggatttaatgacatcgtgataggagctccgctggaagatgatcacgggggagctgtgtacatttatcatggaagtggcaagactataaggaaagagtatgcacaacgtattccatcaggtggggatggtaagacactgaaattttttggccagtctatccacggagaaatggatttaaatggtgacggtctgacagatgtgactattgggggccttggtggtgctgccctcttctggtcccgagatgtggccgtagttaaagtgaccatgaattttgagccaaataaagtgaatattcaaaagaaaaactgccatatggagggaaaggaaacagtatgcataaatgctacagtgtgttttgatgtgaaattaaagtctaaagaagacacgatttatgaagctgatttgcagtaccgtgtcaccctagattcactaagacaaatatcacgaagttttttctctggaactcaagagagaaaggttcaaaggaacatcacagttcgaaaatcagaatgcactaagcactccttctacatgttggcaagacaagcatgactttcaggactctgtgagaataacgttggactttaatcttaccgatccagaaaatgggcctgttcttgatgattctctaccaaactcagtacatgaatatattccctttgccaaagattgtggaaataaggaaaaatgtatctcagacctcagcctgcatgtcgccaccactgaaaaggacctgctgattgtccgatcccagaatgataagttcaacgttagcctcacagtcaaaaatacaaaggacagtgcctataacaccaggacaatagtgcattattctccaaatctagttttttcaggaattgaggctatccaaaaagacagttgtgaatctaatcataatatcacatgtaaagttggatatcccttcctgagaagaggagagatggtaactttcaaaatattgtttcagtttaacacatcctatctcatggaaaatgtgaccatttatttaagtgcaacaagtgacagcgaagaacctcctgaaaccctttctgataatgtagtaaacatttctatcccggtaaaatatgaagttggactacagttttacagctctgcaagtgaataccacatttcaattgctgccaatgagacagtccctgaagttattaattctactgaggacattggaaatgaaattaatatcttctacttgattagaaaaagtggatcttttccaatgccagagcttaagctgtcaatttcattccccaatatgacatcaaatggttaccctgtgctgtacccaactggattgtcatcttctgagaatgcaaactgcagaccccatatctttgaggatcctttcagtatcaactctggaaagaaaatgactacatcaactgaccatctcaaacgaggcacaattctggactgcaatacatgtaaatttgctaccatcacatgtaatctcacttcttctgacatcagccaagtcaatgtttcgcttatcttgtggaaaccaacttttataaaatcatatttttccagcttaaatcttactataaggggagaacttcggagtgaaaatgcatctctggttttaagtagcagcaatcaaaaaagagagcttgctattcaaatatccaaagatgggctaccgggcagagtgccattatgggtcatcctgctgagtgcttttgccggattgttgctgttaatgctgctcattttagcactgtggaagattggattcttcaaaagaccactgaaaaagaaaatggagaaatgaaatattttatgaaagaaaataataacaattattcaataatctatcctcaggtttgcctcaaatatgtgacaagaaatgtataattcatgacatagtcatgtaactatgtaatccatcagggattcattacttggaaaatgacaggtcatgcattatccaaaaacaataccaaaaagacatattttataaaatgacaaaaaatattttacataattactcatttttgttgagtaagcaaaattacaaagtgtttttaaaaaaacctgtacaaatatgtttatgtattaaatcaccatccaaaatatttaaggaatatataaaaagatttttatgatcatagaaacatctattttcaaaacaatataaattaagcttttccccttgattcctgttggatatccatgttcagcatgacagtcagcactcgtaaatgccaagaaaagaattacctgaaaaagatcatttctccctattcaaatgagaatattttcccttggtagaatccatatacaatatggattgaaaattaagtcaccaagaatacatttagcatctttgtgttgggttctatacctaaaaattttccctccctgcccaaggtgattggaaagtactgcaattgagctaaaattttatctaggatggaaaatcaggatagactcgtttaaaaacaagtatattaaatgggttaaattaagcttttacagaacatgcttaattttgatattgagctctaaatgcaaaactcttttatactgaaaaaacacttaaagtagttttgtgtggcatcacagtgatttgtcatgaaaagccatatatgggggacatgctaaaatggcttctgaatgaaatacgacagcagagaaagatgccactgaaatgctgaaattatctttgctgagcagcttttgaatgctaagggttccagtatgtgacccaaagaaagagttgtctcaactccttggtacagggttcattcaaacccccaagctgtgagagtgtgtttatttttaattttttaaaaggtatttaatttccaaccacacttcttatttttttgaaaagacaattttccatttcagtattacattttaccaagaagtcactgctttttaggtgtgttgcatcaatatttaaataaaatcccagaaatgtattttaaagaatttcaggtttgaaaactcaaaccaacaggaagatatcacacctttgtatgtgcttctttgttcttgaagtagtcattatggttcattggaatctactgtagcataagctcctaggttgctccatttcttaggaaaatagcaatgaatgaatgtatagtagctgcatgtgtgaactactgctgtaaagtttgctgacatttctgcaacaacatttctccatctgatttaccagaacctgtaacaagaccagaacatgtattcatccagaaactcctgggctctgctttgttcaaagaggagcaaatccacatagaaattaaatgttataaatttatttttttaaactaatttccaaagaatttagctgaagactcagagtcagcctacctcttgactctccacatccgcatctaagatcctgaaggccaaaggaatgcgcctgtgggatgccaaagccatcagtagctggaagaaagaatacctctttctagaggtttggtgtcctcttgctggcctgtcattatttggaaatacgcgcttttggaatttccttcattttcgctatttccaggttcagaaatcatacctaccacttgttctttctttgcccagtaaaactcagggtttctcttattcagagttaccatgttgcacacccccagtgctcagcctgcccagaagcccttctctgatctcagcaagatcttagtagtaaagctaacggatccattgaaattcatactcagcatctgtgactactagacaaagcccatttactgaaccataagtgtgcacttttaaactaaattgttaactgaaagggaaaaaatagaaatgagggcattttgaagtttttagaaaagagaggaagagctgttggccagatcaaagagatacttataagcccggcacaatttttaacataagtcattcctggctattaagtaaaatatttcatgaaccagaagtcctgtttctctaatattataatttgttgaggtttgtgtgtgtgtgtgtgtgcatgtgcagacacatgtacacatataaattgaatacaaaaatagctctataacaccaaaaaacagagtttacagaaaataaacacaaaagctatatctgcaagacaagtttgattcatctagtttcatatagtttcatatagtttcatttttattaatatttaggtttaacttatagttctgcaattatttaaaaaacaagtacagagcgtttgattaaaaaaagtcaacaaatgtttcaaaacagctttgtacaaatgttataaaacatatttaatgattaagaaatgtactagactctatcatttacttttaaaacatttaattagaaaaacaggtgatatttaagactatttataaacttattggccaaattgccaaaaagtttctttttctctaactttggtattctaaataattgattattgctcccattgtaaactgaaccatgtatgcactctcttttctgaccaaactacaatggtatattggtaaattatttaacaacacactgtccaggagggaaaaaaaaaacagtctctgatttgtatcatttgccaatttccatggtccaaatattctctctccattttcaaactaccaaagtgaccctaatcagcttacaaaattcctggaaatgtatctgccacctcttaccaaccagtgtgagctgacttcagcacaccactgagacagattacacgatagacagatagatagatagatagatagatagatagatagatagatagatagatattgatagagaacatgttgtgtctatatacatatccaatgacacacagtataatcatgttttaaattatgccaaaagtactgattatatcaagcccagtaaacataatgctacacagcacccattctttaattttgatttctaaaattataaccttcctttgatattaataaaatgttatgaacttgcaggagaaggaaggagttgaaagaaggaaaatataaagggtgatccacagtgaaaatcagacctacacaagccacaaaaaaattgtctcattttcccaaggaattcaaagtcctgtgatacacattacaaaagatgacactttgtaaatattttgaacttctatgatccaatttcaacttcattggtccaatttgtcaaactattttcctctgagcactagattcatgggcaatttaatctctgaatattttctgtgtcataagtgtgcttgaaaagaggcttgtagtaaacagatatttttacaaaatttgatgcttctgcaaccataataattttatctataaatgcgtatatacatatatatatatatatatatacacatacactcacatgcagatatttacatatatagatattctcttttccttttataaaatcaaagtctaggctcaattggaaaatggaaatatttgcaccaaaagaaaaaagtgccattgttgtgatcaatggagtaaagctggggtatagtagaggctggggaatccctgcccatgttctctccaaggccacagcttgcacaccgtgaatggtggccccactggctccatggagtgtgccttcacgcgggggaatgtccttgtccaacacgctgtaatctactccatgggaactgactgtcctgcttttcacaacattgagaaacaggcccagagcctgtctcatgtgccaggtgcagtcacattattgttaaaataaagtggcttctgacaaatcagtttttcaaaatagcatcctatgtacttttcatttcttccaacaaccctcaggcccccttttgccagttttctcccccaggggagattttcaagactactggagaaaaatctgttaataaaacatttgctctgagtaccagcttcagtgactcaatcatttatacaggatttcagtgttttgttctgcagcggtgttctaaagggttcacatagtataatggaggagggacaaagcagaatatacttccaagctggaacatctttaagacatttacaaactgttatgggacactatcagcaactacgcctggggaagctagcaggatttagctcttcaatggccctccaaatgcacccaacaatcgccaacctcacccatggaaatcatctaaaaaatgaaaagaagggccttaaagtcctcacatggatgctgtatttataactaaaatgtacagtttaattctaaatagcaggcttttaaatgcaaacagcttccaggtgagtcctctggctgccaatcagactgctgattctaaaccattctcacacagaatttctgaaaccaacaccaggtattaattgttaactgcagtgaaaggaaaccaaggcacattacaaaaggctaaatg

SEQ ID NO: 2717 - protein, 768 aa, Homo sapiens; identical to SEQ ID NO: 2713

SEQ ID NO: 2718 - DNA, 389 bp, Homo sapiens
ggtaggctctctgcttagtttacataacattaaattactaatagcatgattattatctgattatgagtgttattgtcaattatcttaaaatcagtcataaaacaactcatataaactgtttctcaatgttcaaaaatgtttactgatttatttaacttccagggtgcttattggttctccgttagttggccaacccaaaaacagaactggagatgtctataagtgtccagttgggagaggtgaatcattaccttgtgtaaagttggatctaccaggtatgtaaaattaaaaaaatctggttttaggccagactgcagtgaatggtaattgcgccactgcactccagcctgggaacaagagcaaaactccatctcaaaaaaaaaaaaaaa

SEQ ID NO: 2719 - protein, 32 aa, Homo sapiens
KNLVLGQTAVNGNCATALQPGNKSKTPSQKKK

SEQ ID NO: 2720 - DNA, 556 bp, Homo sapiens
aaatccacatacagtcttaacatgaaaacaacctctggaacaaacattaatacatcaattcccaatgtcacagaagtaaaggagaacatgacatttggatcaactttagtcaccaacccaaatggaggatttctggcttgtgggcccttatatgcctatagatgtggacatttgcattacacaactggaatctgttctgacgtcagccccacatttcaagtcgtgaattccattgcccctgtacaagaatgcagcactcaactggacatagtcatagtgctggatggttccaacagtatttacccatgggacagtgttacagcttttttaaatgaccttcttgaaagaatggatattggtcctaaacagacacaggactttactttgggagaagtttctgaggcactgaaaaagcagactgactgcgttaatgtttgccacacctacattaaatttggaacataatatgtgcacatatatatacatacatgtgtcttcatgtgtctgtgtatatttatgtctctcttaatattttgatatctatgtatatataatt

SEQ ID NO: 2721 - protein, 147 aa, Homo sapiens
MKTTSGTNINTSIPNVTEVKENMTFGSTLVTNPNGGFLACGPLYAYRCGHLHYTTGICSDVSPTFQVVNSIAPVQECSTQLDIVIVLDGSNSIYPWDSVTAFLNDLLERMDIGPKQTQDFTLGEVSEALKKQTDCVNVCHTYIKFGT

SEQ ID NO: 2722 - DNA, 6369 bp, Homo sapiens
gtcattcccaaaaacctttggttaaacgttgcttaaagcagatgtggagaattcaacttaaagatgccactgcaagtaagaaaatattaagaatcttatttctgagcacagtatttataatatatgacttctctctgtccaaaaaggaaatttttgggtatgttttctacagtgtgctgagattttcttttctgtttcagaaattatttcattagcttactcacaagtgagggtatatgacattttgccaacataaagtctaatacatgtaagatttctttcaaaatagaaaagcattcagaaaaggcaggacaaataccttgtgttttttttcacccaaaataatattctaaatctgaaatgaagttttcaaaatgtttctttgtgggggtcacaaattgagaagagactgagtgtattttttcataaactgtgtggattgcaagttgtaaggctatgaaaaatcttatgaaggaagcagaggcagaggctctgttagaaaaatcccatgcttatcaataaggatcaggaaactgtaagaactcaagctgtcaaacatctgtctcaggacatagtcctaccccatctttctattacccaaactgccttatgccaatacaggcattgcaagtgaatttggtggtgaaaatacagctgggattatgttcccctgcctcctccacccacagtttgctgaattctattcctgccatacagcttccaaaggagaaggaaagatgtgaggcaatgtcatggcatcaagacagatcatacctgtttcccattacctcactagatcctggcccttttcccaagaagtgaattatgagagctgacagaattcattcttcataaatccatgcaaagggctatgccatccattttagcctttttttcctcttttttttttctctttatttgagacagagtttctctcttattgcccaggctggagtgcagtggcatgatctctgctcactgcaacctccacctcctgggttcaagtgattctcctgcctcagcctcctgagtaactgggattacaggcgcctgctaccatccccggctaattttttatatttttggtagagaccgggtttcatcatgttggccagactggtctcgaactcctgacctcaggtgatccacctgcctcggattcccaaagtgctgggattacaggcatgcaccaccgcgcccagcccttttcttccatcttattcttttctttttcaggaaacactattaagcttaaatatttataattattttccttcttttaaaattaggctttacttggctctggctctctttttcttttcttctttcttgtctttagacacccaagcctcaattagtaactacgctaactggtagttactgtccctgagattatttcagctaatatttttagttatcaagtataagtcatcaaagagagttaactaaataatctcacaactcctagcctcaaacataatttttaactcatttttaaaggaggccttttatcaagttacattcacagctctgcaaattacacacacacacacacacacacaaacacacacgtactaacactctcattctactcccttctttatatttcttagcagagtggcatgaaataaaacagccttcattttgcacattcttcttttccattttatgtatgtataaacatggcctgaaagattcattttaaaacaatattgtggttagtaatacaaacatgtaacacattacatgttcgaaaaaatattttagattctattatgtataataataaaaaaccctcaaagaaagatgaaggaatgagaatgtgaggaatattcataaaggataatatgcctgaggaatagtgttcctttagcacttgtaagaataaacatactgtataaaaacttttgttcctttttaacatttttgaaagaaagtcaaacctactttacagtaaaatacttggtaagtgagttagaaaaatgatctttttctcagtgagaagtgctattctgtggcattttgaaaaataatcttacttctgctccactgaagaaatctggttattaaaagagttattccttttataaaatcaaaatctgcatgtggcaatttttattcattgatatggctctcttctcaaaacacaaagaacaaatctaacttttcactcaaaaattaatcttaaagacacaatttatgctcttcctgtaagcagcctgagatgatctcttaaaatggtttactattcacttgacccagaacaacccaaaaaatcattcaaatcaagagattgaaatcttcgtgttcactttaagaacatccatgaagctacccaggcaatcaagggttatgtatatctgaaaagccaccaagtatctgaaagatgtgactttacagaagcagtgtgtgccgttccatcattgcaatggtggagctggtagatgtgtccaaagccaaaccgtggagctggacagagggtttatggccccaaaagagtgctgaaagtttgttgcacatgcatacaaatgtaaaaagcagtgctgatcttaaaggtttgtatgtagagtctcttgatcattgtgtacatctaggtgggcgaagcacccaagatacactggctctgtttacagggctcatggtcagattaacccatacgtgacctccacccccactatcgcacccaccgcactgaaatgatgcttactgaaatagaacaaatttttctaagccagaggaggaggttgcatagaagaaaaaggtattccagaagaaaccgaagaaacaaaaataatgacccaggaataatttcaatataaaatatatgcaaataaaatcaaaagtagaaaaaagacaatcaaaattttaaagagcatggaagctcaattaaaatagaggagagaaccgggcacaatggctcacgcctgtaatcccagcacttcgggaggctgaggcgagtgcatcaggaggtcaggagattgagaccatcctggctaacacggtgaaaccccgtcttactaaaaatacaaaaaattagccaggcgtggtggcgggcgcctgtagtcccagctactcgggaggctgaggcaggagaatggcgtgaacccgggaggcggagcttgcagtgagccgagatcgcgccactgcactccaacctggacaacagagcaagactccatctcaaaaaaaaaaaaaaaaggaggaaagatcagatacgtgaaaaatgattcaagctctgtgttgaataaagtcacattaaaatcacagaaaggtactgttgttagacaatgtttaacacctattaaaacatacacaaatttaaataatagtgatgatacacaaagcctgggacagtttcatgaaattgtctttcatatggcggttcatagaacaaagtagtacaaattttctggaaacaattttctagacactataagaaccattaaaaacgtgatccagtgatctattccttgaaatgtactgtcaaaaaatccagaagagggacaaatttaaatgctccaaggtgtctttgaaatctgaagcataataccaaaaatattaaaaccacctgaattctagtgttttatcgggaaatggccatgtaatataaatgcaatgtctttatgctttaaccaagagaaatcatcttcaattatttaaaattacaattttaaaagctagtagcagcacagaaaaggtttacattttctatgattccaattatatgaaaagtgttaatttctgtagtgcagacacatatatccaaatgaaatacaattgatttattacaaattggggtggggatgtgcaattttttatgtgtgtcatcattgttatatcatttgtgattttaaataatgaaaaactcagattgggggaaaataacttctcaggagaaagcagttgtggtagatagagagcatattaaaagcttccaccaaaacaaattcttacgtgcattgaagaaaaaatattattttcaaaatataaccatataaaaatgattatcttggccatttaaaaagagtcttaatttattacatgaagcctttaagggtccaggtggtatacctggaatctttcttttgttaggttacactgtaaactctgctactgcttcttctggagatgtgctctatattgctggacagcctcggtacaatcatacaggccaggtcattatctacaggatggaagatggaaacatcaaaattctccagacgctcagtggagaacagattggttcctactttggcagtattttaacaacaactgacattgacaaggattctaatactgacattcttctagtcggagcccctatgtacatgggaacagagaaggaggagcaaggaaaagtgtatgtgtatgctctcaatcagacaaggtttgaatatcaaatgagcctggaacctattaagcagacgtgctgttcatctcggcagcacaattcatgcacaacagaaaacaaaaatgagccatgcggggctcgttttggaactgcaattgctgctgtaaaagacctcaatcttgatggatttaatgacatcgtgataggagctccgctggaagatgatcacgggggagctgtgtacatttatcatggaagtggcaagactataaggaaagagtatgcacaacgtattccatcaggtggggatggtaagacactgaaattttttggccagtctatccacggagaaatggatttaaatggtgacggtctgacagatgtgactattgggggccttggtggtgctgccctcttctggtcccgagatgtggccgtagttaaagtgaccatgaattttgagccaaataaagtgaatattcaaaagaaaaactgccatatggagggaaaggaaacagtatgcataaatgctacagtgtgttttgatgtgaaattaaagtctaaagaagacacgatttatgaagctgatttgcagtaccgtgtcaccctagattcactaagacaaatatcacgaagttttttctctggaactcaagagagaaaggttcaaaggaacatcacagttcgaaaatcagaatgcactaagcactccttctacatgttggcaagacaagcatgactttcaggactctgtgagaataacgttggactttaatcttaccgatccagaaaatgggcctgttcttgatgattctctaccaaactcagtacatgaatatattccctttgccaaagattgtggaaataaggaaaaatgtatctcagacctcagcctgcatgtcgccaccactgaaaaggacctgctgattgtccgatcccagaatgataagttcaacgttagcctcacagtcaaaaatacaaaggacagtgcctataacaccaggacaatagtgcattattctccaaatctagttttttcaggaattgaggctatccaaaaagacagttgtgaatctaatcataatatcacatgtaaagttggatatcccttcctgagaagaggagagatggtaactttcaaaatattgtttcagtttaacacatcctatctcatggaaaatgtgaccatttatttaagtgcaacaagtgacagcgaagaacctcctgaaaccctttctgataatgtagtaaacatttctatcccggtaaaatatgaagttggactacagttttacagctctgcaagtgaataccacatttcaattgctgccaatgagacagtccctgaagttattaattctactgaggacattggaaatgaaattaatatcttctacttgattagaaaaagtggatcttttccaatgccagagcttaagctgtcaatttcattccccaatatgacatcaaatggttaccctgtgctgtacccaactggattgtcatcttctgagaatgcaaactgcagaccccatatctttgaggatcctttcagtatcaactctggaaagaaaatgactacatcaactgaccatctcaaacgaggcacaattctggactgcaatacatgtaaatttgctaccatcacatgtaatctcacttcttctgacatcagccaagtcaatgtttcgcttatcttgtggaaaccaacttttataaaatcatatttttccagcttaaatcttactataaggggagaacttcggagtgaaaatgcatctctggttttaagtagcagcaatcaaaaaagagagcttgctattcaaatatccaaagatgggctaccgggcagagtgccattatgggtcatcctgctgagtgcttttgccggattgttgctgttaatgctgctcattttagcactgtggaagattggattcttcaaaagaccactgaaaaagaaaatggagaaatgaaatattttatgaaagaaaataataacaattattcaataatct

SEQ ID NO: 2723 - protein, 299 aa, Homo sapiens
MEDGNIKILQTLSGEQIGSYFGSILTTTDIDKDSNTDILLVGAPMYMGTEKEEQGKVYVYALNQTRFEYQMSLEPIKQTCCSSRQHNSCTTENKNEPCGARFGTAIAAVKDLNLDGFNDIVIGAPLEDDHGGAVYIYHGSGKTIRKEYAQRIPSGGDGKTLKFFGQSIHGEMDLNGDGLTDVTIGGLGGAALFWSRDVAVVKVTMNFEPNKVNIQKKNCHMEGKETVCINATVCFDVKLKSKEDTIYEADLQYRVTLDSLRQISRSFFSGTQERKVQRNITVRKSECTKHSFYMLARQA

SEQ ID NO: 2724 - DNA, 572 bp, Homo sapiens
gaaatattcagtctgtttcatcattgtgaaataatagaattattttaacctcccttttgtttgcctattatgggaattaaaccaagatccccatcgatggagaatgctgaccactgtcaggtagacctcaggcaaaaagaaactgaagactgaactcaggctgttttaaatttcttcccaaggagcctggagacagtcacacctgcaggcgaccaatcttgctagactcgtcacactgacccagtctgttgtgacttgctctcatgacttgactctggcatagcaccacttgatgattaatagttttccttatcttaacaaataaatgttaacaccaagccttaacatacctttctgctgaccccaaggttttagacaaaggcttgttcccttagccagttgcaaatcagagaatctctaaatccacctgggacctgttagcccctgcttcaagatatcctccctttgcagaacaagtcaatgtataacctccacgtattgatttatgagtttgcctattacttctgttttcctgaaatgtacccctgtctttaaaaacgcttgtaagccac

SEQ ID NO: 2725 - protein, 37 aa, Homo sapiens
ISSQGAWRQSHLQATNLARLVTLTQSVVTCSHDLTLA

SEQ ID NO: 2726 - DNA, 2387 bp, Homo sapiens
gggaggtccctgaggccgctgaggtcgttcgtgtctgttgaacggctgtgggcgtcttgctgccttgggtagggggttaaaatcgttcttgagaggaacgtctctgtgcgaagagataatgagtttagctctgagaagtgagcttgtagtggacaaaacaaagaggaaaaaaagaagagaactgtctgaggaacagaaacaagaaattaaagatgcttttgaactatttgatacagacaaagatgaagcaatagattatcatgaattaaaggtggcaatgagagccttggggtttgatgtaaaaaaagctgatgtactgaagattcttaaagattatgacagagaagccacagggaaaatcacctttgaagattttaatgaagttgtgacagactggatattggaaagagatccccatgaagaaatactcaaggcatttaaactatttgatgatgatgattcagttcttaagaacatactcttgcttcctatttggtctagatgcctcagtctaaatcgggagttcttcagtgaagtaaaccaagaggagttcattgctattatgactggtgacatttaaagaattacaaggataaacactaagaatgttgcagttaccatcttatattctatttttgtgcctggagccatgtgaaaaaaaccaacttagttcttttatcctaaaggaccaaaaataagcatcttatatatctgtattttactactgttaagtttctttgtatgaactgtgttgttagtactcagatagtttagctttgtatttataatagagcttttatataaagttttaaaaattgaatgtgtgatatgtgttctttgaaggttttttaatttaacatttatagtcactttttagtgcacacattttccagactttcgttaataaaatatttattttattagaattttaaagtttggtaaatttgtttttattcctagtatctgttaaccctcaagagtggatttcttaaatcttccctttataattttactagtttctgaaacaaaaattgaaatacaattagcaatagagtggcacatttttccattacctaacatttcatcaattttgacattctatattttaatacaagctgactcaatataagcctaattccttttttaagagtcctgtctttgagtttagaaggaataagtattgtgcagatagacccatttatccttgtgtattatgtttcttaacttggtatcattgtaagtatgaaagttaattttcttctgaatatttccttaaacaaattgaatgaatacaatttgaattttctaacttcttgactgagagatttaaattttggaattttgatttgttaaggtaattatcactcaattacatgtcacagtgatgaaaatagaaaactgtaagccacagaaataatttaagtctatgttttacctatatgaaggaacagtctgtgattcaccaggaaatagtagagacacagtttccaagtactggtgggctcttctgccttgtagaagtgtatgttagggggaaacaagtggttatggagatcgatcatagaaaaaaatagtacctatatggatccttcactcatatctagtactcggtgttatgggctctcccaggaacggaattgagttgtctatttcagcaatctttctttagaattcttgttttaaatttttaagtttaaagtgtagtatcatttgaggcgctttaaatgttgtgagccttttaagagtattacattaagggttgtccactagaaatttaacacaaaatcagtagggaatactatagcagtagtgacatttcaaacagttatctaggaagcaagtgtatattaagtcattcttgtattgctacgaagaaatacccaagactgcatattttataaagaaaagaagcttaattggcttacggttctgcaggctttacaggaagcatggtgcttctgcttttggggaggcctcaggaagcttacagtcatggtagaaggcaaagggggagcaggcacatcacatggtgaaaaccagagtgaacaagtgagagaagtgccaagtactttgaaaccaccagatctcatgagaactcactattgtgaggacatctaatcacctcccaccagacctcacctccagtactggggattacaattcaacatgatatttgagtggggacagatatacaaactatatcagcaggttaactagagtaaaacttaattttgaatacaaattcaatggtcacagtcattatattcagggcaacagaccttgaaattaaaaaatttttgtcgcacactgatgagttccctctgtcttgatcatgaaatatattgatttccaggaaagtgaaaaataaaacagtaaaagtaaatcta

SEQ ID NO: 2727 - protein, 153 aa, Homo sapiens
MSLALRSELVVDKTKRKKRRELSEEQKQEIKDAFELFDTDKDEAIDYHELKVAMRALGFDVKKADVLKILKDYDREATGKITFEDFNEVVTDWILERDPHEEILKAFKLFDDDDSVLKNILLLPIWSRCLSLNREFFSEVNQEEFIAIMTGDI

SEQ ID NO: 2728 - DNA, 2436 bp, Homo sapiens
atgttgtgggaggtccctgaggccgctgaggtcgttcgtgtctgttgaacggctgtgggcgtcttgctgccttgggtagggggttaaaatcgttcttgagaggaacgtctctgtgcgaagagataatgagtttagctctgagaagtgagcttgtagtggacaaaacaaagaggaaaaaaagaagagaactgtctgaggaacagaaacaagaaattaaagatgcttttgaactatttgatacagacaaagatgaagcaatagattatcatgaattaaaggtggcaatgagagccttggggtttgatgtaaaaaaagctgatgtactgaagattcttaaagattatgacagagaagccacagggaaaatcacctttgaagattttaatgaagttgtgacagactggatattggaaagagatccccatgaagaaatactcaaggcatttaaactatttgatgatgatgattcaggtaaaataagcttgaggaatttgcgacgtgttgctagagaattgggtgaaaacatgagtgatgaagaacttcgagctatgatagaagaatttgacaaagatggtgatggagaaataaaccaagaggagttcattgctattatgactggtgacatttaaagaattacaaggataaacactaagaatgttgcagttaccatcttatattctatttttgtgcctggagccatgtgaaaaaaaccaacttagttcttttatcctaaaggaccaaaaataagcatcttatatatctgtattttactactgttaagtttctttgtatgaactgtgttgttagtactcagatagtttagctttgtatttataatagagcttttatataaagttttaaaaattgaatgtgtgatatgtgttctttgaaggttttttaatttaacatttatagtcactttttagtgcacacattttccagactttcgttaataaaatatttattttattagaattttaaagtttggtaaatttgtttttattcctagtatctgttaaccctcaagagtggatttcttaaatcttccctttataattttactagtttctgaaacaaaaattgaaatacaattagcaatagagtggcacatttttccattacctaacatttcatcaattttgacattctatattttaatacaagctgactcaatataagcctaattccttttttaagagtcctgtctttgagtttagaaggaataagtattgtgcagatagacccatttatccttgtgtattatgtttcttaacttggtatcattgtaagtatgaaagttaattttcttctgaatatttccttaaacaaattgaatgaatacaatttgaattttctaacttcttgactgagagatttaaattttggaattttgatttgttaaggtaattatcactcaattacatgtcacagtgatgaaaatagaaaactgtaagccacagaaataatttaagtctatgttttacctatatgaaggaacagtctgtgattcaccaggaaatagtagagacacagtttccaagtactggtgggctcttctgccttgtagaagtgtatgttagggggaaacaagtggttatggagatcgatcatagaaaaaaatagtacctatatggatccttcactcatatctagtactcggtgttatgggctctcccaggaacggaattgagttgtctatttcagcaatctttctttagaattcttgttttaaatttttaagtttaaagtgtagtatcatttgaggcgctttaaatgttgtgagccttttaagagtattacattaagggttgtccactagaaatttaacacaaaatcagtagggaatactatagcagtagtgacatttcaaacagttatctaggaagcaagtgtatattaagtcattcttgtattgctacgaagaaatacccaagactgcatattttataaagaaaagaagcttaattggcttacggttctgcaggctttacaggaagcatggtgcttctgcttttggggaggcctcaggaagcttacagtcatggtagaaggcaaagggggagcaggcacatcacatggtgaaaaccagagtgaacaagtgagagaagtgccaagtactttgaaaccaccagatctcatgagaactcactattgtgaggacatctaatcacctcccaccagacctcacctccagtactggggattacaattcaacatgatatttgagtggggacagatatacaaactatatcagcaggttaactagagtaaaacttaattttgaatacaaattcaatggtcacagtcattatattcagggcaacagaccttgaaattaaaaaatttttgtcgcacactgatgagttccctctgtcttgatcatgaaatatattgatttccaggaaagtgaaaaataaaacagtaaaagtaaatcta

SEQ ID NO: 2729 - protein, 167 aa, Homo sapiens; identical to SEQ ID NO: 275

SEQ ID NO: 2730 - DNA, 2508 bp, Homo sapiens
atgttgtgggaggtccctgaggccgctgaggtcgttcgtgtctgttgaacggctgtgggcgtcttgctgccttgggtagggggttaaaatcgttcttgagaggaacgtctctgtgcgaagagataatgagtttagctctgagaagtgagcttgtagtggacaaaacaaagaggaaaaaaagaagagaactgtctgaggaacagaaacaagaaattaaagatgcttttgaactatttgatacagacaaagatgaagcaatagattatcatgaattaaaggtggcaatgagagccttggggtttgatgtaaaaaaagctgatgtactgaagattcttaaagattatgacagagaagccacagggaaaatcacctttgaagattttaatgaagttgtgacagactggatattggaaagagatccccatgaagaaatactcaaggcatttaaactatttgatgatgatgattcaggtaaaataagcttgaggaatttgcgacgtgttgctagagaattgggtgaaaacatgagtgatgaagaacttcgagctatgatagaagaatttgacaaagatggtgatggagaaattcttaagaacatactcttgcttcctatttggtctagatgcctcagtctaaatcgggagttcttcagtgaagtaaaccaagaggagttcattgctattatgactggtgacatttaaagaattacaaggataaacactaagaatgttgcagttaccatcttatattctatttttgtgcctggagccatgtgaaaaaaaccaacttagttcttttatcctaaaggaccaaaaataagcatcttatatatctgtattttactactgttaagtttctttgtatgaactgtgttgttagtactcagatagtttagctttgtatttataatagagcttttatataaagttttaaaaattgaatgtgtgatatgtgttctttgaaggttttttaatttaacatttatagtcactttttagtgcacacattttccagactttcgttaataaaatatttattttattagaattttaaagtttggtaaatttgtttttattcctagtatctgttaaccctcaagagtggatttcttaaatcttccctttataattttactagtttctgaaacaaaaattgaaatacaattagcaatagagtggcacatttttccattacctaacatttcatcaattttgacattctatattttaatacaagctgactcaatataagcctaattccttttttaagagtcctgtctttgagtttagaaggaataagtattgtgcagatagacccatttatccttgtgtattatgtttcttaacttggtatcattgtaagtatgaaagttaattttcttctgaatatttccttaaacaaattgaatgaatacaatttgaattttctaacttcttgactgagagatttaaattttggaattttgatttgttaaggtaattatcactcaattacatgtcacagtgatgaaaatagaaaactgtaagccacagaaataatttaagtctatgttttacctatatgaaggaacagtctgtgattcaccaggaaatagtagagacacagtttccaagtactggtgggctcttctgccttgtagaagtgtatgttagggggaaacaagtggttatggagatcgatcatagaaaaaaatagtacctatatggatccttcactcatatctagtactcggtgttatgggctctcccaggaacggaattgagttgtctatttcagcaatctttctttagaattcttgttttaaatttttaagtttaaagtgtagtatcatttgaggcgctttaaatgttgtgagccttttaagagtattacattaagggttgtccactagaaatttaacacaaaatcagtagggaatactatagcagtagtgacatttcaaacagttatctaggaagcaagtgtatattaagtcattcttgtattgctacgaagaaatacccaagactgcatattttataaagaaaagaagcttaattggcttacggttctgcaggctttacaggaagcatggtgcttctgcttttggggaggcctcaggaagcttacagtcatggtagaaggcaaagggggagcaggcacatcacatggtgaaaaccagagtgaacaagtgagagaagtgccaagtactttgaaaccaccagatctcatgagaactcactattgtgaggacatctaatcacctcccaccagacctcacctccagtactggggattacaattcaacatgatatttgagtggggacagatatacaaactatatcagcaggttaactagagtaaaacttaattttgaatacaaattcaatggtcacagtcattatattcagggcaacagaccttgaaattaaaaaatttttgtcgcacactgatgagttccctctgtcttgatcatgaaatatattgatttccaggaaagtgaaaaataaaacagtaaaagtaaatcta

SEQ ID NO: 2731 - protein, 191 aa, Homo sapiens
MSLALRSELVVDKTKRKKRRELSEEQKQEIKDAFELFDTDKDEAIDYHELKVAMRALGFDVKKADVLKILKDYDREATGKITFEDFNEVVTDWILERDPHEEILKAFKLFDDDDSGKISLRNLRRVARELGENMSDEELRAMIEEFDKDGDGEILKNILLLPIWSRCLSLNREFFSEVNQEEFIAIMTGDI

SEQ ID NO: 2732 - DNA, 930 bp, Homo sapiens
gggaggtccctgaggccgctgaggtcgttcgtgtctgttgaacggctgtgggcgtcttgctgccttgggtagggggttaaaatcgttcttgagaggaacgtctctgtgcgaagagataatgagtttagctctgagaagtgagcttgtagtggacaaaacaaagaggaaaaaaagaagagaactgtctgaggaacagaaacaagaaattaaagatgcttttgaactatttgatacagacaaagatgaagcaatagattatcatgaattaaaggtggcaatgagagccttggggtttgatgtaaaaaaagctgatgtactgaagattcttaaagattatgacagagaagccacagggaaaatcacctttgaagattttaatgaagttgtgacagactggatattggaaagagatccccatgaagaaatactcaaggcatttaaactatttgatgatgatgattcagttcttaagaacatactcttgcttcctatttggtctagatgcctcagtctaaatcgggagttcttcagtgaagtaaaccaagaggagttcattgctattatgactggtgacatttaaagaattacaaggataaacactaagaatgttgcagttaccatcttatattctatttttgtgcctggagccatgtgaaaaaaaccaacttagttcttttatcctaaaggaccaaaaataagcatcttatatatctgtattttactactgttaagtttctttgtatgaactgtgttgttagtactcagatagtttagctttgtatttataatagagcttttatataaagttttaaaaattgaatgtgtgatatgtgttctttgaaggttttttaatttaacatttatagtcactttttagtgcacacattttccagactttcgttaataaaatatttattttattagaatttt

SEQ ID NO: 2733 - protein, 153 aa, Homo sapiens; identical to SEQ ID NO: 2727

SEQ ID NO: 2734 - DNA, 979 bp, Homo sapiens
atgttgtgggaggtccctgaggccgctgaggtcgttcgtgtctgttgaacggctgtgggcgtcttgctgccttgggtagggggttaaaatcgttcttgagaggaacgtctctgtgcgaagagataatgagtttagctctgagaagtgagcttgtagtggacaaaacaaagaggaaaaaaagaagagaactgtctgaggaacagaaacaagaaattaaagatgcttttgaactatttgatacagacaaagatgaagcaatagattatcatgaattaaaggtggcaatgagagccttggggtttgatgtaaaaaaagctgatgtactgaagattcttaaagattatgacagagaagccacagggaaaatcacctttgaagattttaatgaagttgtgacagactggatattggaaagagatccccatgaagaaatactcaaggcatttaaactatttgatgatgatgattcaggtaaaataagcttgaggaatttgcgacgtgttgctagagaattgggtgaaaacatgagtgatgaagaacttcgagctatgatagaagaatttgacaaagatggtgatggagaaataaaccaagaggagttcattgctattatgactggtgacatttaaagaattacaaggataaacactaagaatgttgcagttaccatcttatattctatttttgtgcctggagccatgtgaaaaaaaccaacttagttcttttatcctaaaggaccaaaaataagcatcttatatatctgtattttactactgttaagtttctttgtatgaactgtgttgttagtactcagatagtttagctttgtatttataatagagcttttatataaagttttaaaaattgaatgtgtgatatgtgttctttgaaggttttttaatttaacatttatagtcactttttagtgcacacattttccagactttcgttaataaaatatttattttattagaatttt

SEQ ID NO: 2735 - protein, 167 aa, Homo sapiens; identical to SEQ ID NO: 275

SEQ ID NO: 2736 - DNA, 1051 bp, Homo sapiens
atgttgtgggaggtccctgaggccgctgaggtcgttcgtgtctgttgaacggctgtgggcgtcttgctgccttgggtagggggttaaaatcgttcttgagaggaacgtctctgtgcgaagagataatgagtttagctctgagaagtgagcttgtagtggacaaaacaaagaggaaaaaaagaagagaactgtctgaggaacagaaacaagaaattaaagatgcttttgaactatttgatacagacaaagatgaagcaatagattatcatgaattaaaggtggcaatgagagccttggggtttgatgtaaaaaaagctgatgtactgaagattcttaaagattatgacagagaagccacagggaaaatcacctttgaagattttaatgaagttgtgacagactggatattggaaagagatccccatgaagaaatactcaaggcatttaaactatttgatgatgatgattcaggtaaaataagcttgaggaatttgcgacgtgttgctagagaattgggtgaaaacatgagtgatgaagaacttcgagctatgatagaagaatttgacaaagatggtgatggagaaattcttaagaacatactcttgcttcctatttggtctagatgcctcagtctaaatcgggagttcttcagtgaagtaaaccaagaggagttcattgctattatgactggtgacatttaaagaattacaaggataaacactaagaatgttgcagttaccatcttatattctatttttgtgcctggagccatgtgaaaaaaaccaacttagttcttttatcctaaaggaccaaaaataagcatcttatatatctgtattttactactgttaagtttctttgtatgaactgtgttgttagtactcagatagtttagctttgtatttataatagagcttttatataaagttttaaaaattgaatgtgtgatatgtgttctttgaaggttttttaatttaacatttatagtcactttttagtgcacacattttccagactttcgttaataaaatatttattttattagaatttt

SEQ ID NO: 2737 - protein, 191 aa, Homo sapiens; identical to SEQ ID NO: 2731

SEQ ID NO: 2738 - DNA, 875 bp, Homo sapiens
atgttgtgggaggtccctgaggccgctgaggtcgttcgtgtctgttgaacggctgtgggcgtcttgctgccttgggtagggggttaaaatcgttcttgagaggaacgtctctgtgcgaagagataatgagtttagctctgagaagtgagcttgtagtggacaaaacaaagaggaaaaaaagaagagaactgtctgaggaacagaaacaagaaattaaagatgcttttgaactatttgatacagacaaagatgaagcaatagattatcatgaattaaaggtggcaatgagagccttggggtttgatgtaaaaaaagctgatgtactgaagattcttaaagattatgacagagaagccacagggaaaatcacctttgaagattttaatgaagttgtgacagactggatattggaaagagatccccatgaagaaatactcaaggcatttaaactatttgatgatgatgattcaggtaaaataagcttgaggaatttgcgacgtgttgctagagaattgggtgaaaacatgagtgatgaagaacttcgagctatgatagaagaatttgacaaagatggtgatggagaaataaaccaagaggagttcattgctattatgactggtgacatttaaagaattacaaggataaacactaagaatgttgcagttaccatcttatattctatttttgtgcctggagccatgtgaaaaaaaccaacttagttcttttatcctaaaggaccaaaaataagcatcttatatatctgtattttactactgttaagtttctttgtatgaactgtgttgttagtactcagatagtttagctttgtatttataatagagcttttatataaagttttaaaaattgaatgtgtg

SEQ ID NO: 2739 - protein, 167 aa, Homo sapiens; identical to SEQ ID NO: 275

SEQ ID NO: 2740 - DNA, 1528 bp, Homo sapiens
gggaggtccctgaggccgctgaggtcgttcgtgtctgttgaacggctgtgggcgtcttgctgccttgggtagggggttaaaatcgttcttgagaggaacgtctctgtgcgaagagataatgagtttagctctgagaagtgagcttgtagtggacaaaacaaagaggaaaaaaagaagagaactgtctgaggaacagaaacaagaaattaaagatgcttttgaactatttgatacagacaaagatgaagcaatagattatcatgaattaaaggtggcaatgagagccttggggtttgatgtaaaaaaagctgatgtactgaagattcttaaagattatgacagagaagccacagggaaaatcacctttgaagattttaatgaagttgtgacagactggatattggaaagagatccccatgaagaaatactcaaggcatttaaactatttgatgatgatgattcaggtaaaataagcttgaggaatttgcgacgtgttgctagagaattgggtgaaaacatgagtgatgaagaacttcgagctatgatagaagaatttgacaaagatggtgatggagaaagtaagttttaagtgaaacgtattttccaggttttcctgatgctacacatgtaatacatttttctaaaaccaaatgacttgcaagacttttttgtaaacttaactgcttcttgtaatggaccttctgtctaaataattcacatattcaatttagaatgaagcagatctctaaaaccaattatacttcaagaaggtccttcacttttctctgaaggtgaaaccaccaaaatttcagcctttcaatataatttcagtctttaatggcttctccctcaacctacatgctaagttctaagttctattgattttccccttcaaatgttttgaatctgtttttatctttgtccattgtggctgtcctagttcaggccctaatttctagttaggaatgttataatggcctcatttattcttgccttggctgcctactgggtgcagtgtcctgcgtgttgactggtgctacacaatgaaaaaggcagatgtggttcttgctttcactttgcagtctcttgtagtgtcctaattgccctttcggcatataaaagtctctaatctcttcttcagtctcttggtatcattcttttcctaaaatatacatttgataatgccatttctgtgtttagacacttgaaacgattcttcagtgcctacagagtaaagttcaaagccttctatgatctatcccaccttgagtaactgattttactttccagtgtattctttcacttttcttctttaaccctcacctcctgtatgtacacattttgtcaacatatgctatcctgaaaacacatttttatgctattcgtttcatcctgctgtttcttaatcttagaatgctctaattgttaatttctgcctgctaaaatgtgattcattctctcaggtaaatattaaacaccatctttttcccaaaagcttcccataacgctctatgaatcatgagacttc

SEQ ID NO: 2741 - protein, 156 aa, Homo sapiens
MSLALRSELVVDKTKRKKRRELSEEQKQEIKDAFELFDTDKDEAIDYHELKVAMRALGFDVKKADVLKILKDYDREATGKITFEDFNEVVTDWILERDPHEEILKAFKLFDDDDSGKISLRNLRRVARELGENMSDEELRAMIEEFDKDGDGESKF

SEQ ID NO: 2742 - DNA, 794 bp, Homo sapiens
gggaggtccctgaggccgctgaggtcgttcgtgtctgttgaacggctgtgggcgtcttgctgccttgggtagggggttaaaatcgttcttgagaggaacgtctctgtgcgaagagataatgagtttagctctgagaagtgagcttgtagtggacaaaacaaagaggaaaaaaagaagagaactgtctgaggaacagaaacaagaaattaaagatgcttttgaactatttgatacagacaaagatgaagcaatagattatcatgaattaaaggtggcaatgagagccttggggtttgatgtaaaaaaagctgatgtactgaagattcttaaagattatgacagagaagccacagggaaaatcacctttgaagattttaatgaagttggtgtgtattttaatagtctttgtaatcagcagctgttaggaaattgtctgattaatatcactttttaaattttaaattctctaggttatggaattttcttatagaacactggtgtataatgtgactcttactcagttttgttttgttggtttttttttcaaagaaaaaatatggctttgctctgagatttatagttttgtcttttgttttgttgtgaagattctaaccaaggaactattgtgtagctttttatagaaagatgcttttccaagttgtttgtatttatattatgtgataaaacttgaagggtgatcaaaaaattatttttgcttaataaaacagaaaatttgatatcctgctgtttggaaaatgtttcccaagacctttctggtatgtgatttttgttgg

SEQ ID NO: 2743 - protein, 111 aa, Homo sapiens
MSLALRSELVVDKTKRKKRRELSEEQKQEIKDAFELFDTDKDEAIDYHELKVAMRALGFDVKKADVLKILKDYDREATGKITFEDFNEVGVYFNSLCNQQLLGNCLINITF

SEQ ID NO: 2744 - DNA, 441 bp, Homo sapiens
gtggctgtttggcgggtgggcgctgtgttcctctctcgtaaagccgtgcggtctgtgggccgccattcagaaactggatggacagcttcggcggtgggaagggaagggacatgctgcaggccaccctccggctagaaggagggagtacttgaggaacaaggtctgcgaaaattggctgtgctctgttctaaaacttggaatggcctcagtacctggggaatgtgtttaaaatgcagacttaaatgtccgtttctccattctaatttcagtagtgctgtaagctgttaacacacatgagactgtcttcactaccaaaccaagtctcctaaagctcacttgaatgtctgcttattcgtgtctcttactaggttcaatttcttggaggccgtgattatatctatttaacgcttttccttgtacctaataaaatgtctggtgcgt

SEQ ID NO: 2745 - protein, 44 aa, Homo sapiens
VAVWRVGAVFLSRKAVRSVGRHSETGWTASAVGREGTCCRPPSG

SEQ ID NO: 2746 - DNA, 3691 bp, Homo sapiens
agaccgcttcacacagccgcagtgccctgtgtgtggacagcctgtgggagactcgcacgcccacactcaccccgcctggctgcacccctgcccagcatgtgcggcgcgccggccactgcttgccgtggccacccacgtgcacttcgaccactccggcggcctctaccagttcgaccgcgtggcagtgcaccacgccgaggccgaggcgctggctcgcggggacaactttgagaccgtgacctggctttccgatagcgaggtggtgcggacgcccagccccggctggagggccagacagttccgggtacaggcggtgcagcccaccctcatcctgcaggatggggatgtgatcaaccttggtgacagacagctcactgttatgcacatgccaggtcactccaggggcagtatttgcttacatgacaaagaccgaaagattctcttcagtggagacgtcgtgtatgatggatcactgattgactggctcccatacagcaggataagtgactatgttggaacttgtgaacgtctaatagaattagtggacagaggtctggtagagaaggtgcttcctgggcacttcaatacctttggtgctgaaaggctttttcgattggcttctaactatatttcaaaagctgggatatgtcacaaagtttctacttttgccatgcgatctcttgcaagtttagctctacgtgtaacaaattctaggacctcgccctagtatctatactgataatatattttgattaattatatacattaattcattctgtgctatttaactgattaatagtgagcatttcatgaagtgcttttataccactattatatatcagagaaagattgagaatgaataagccaaaaagaaaattgttagtttaaattgttttctttcttccaagaaagaagccacttaaataagcttatactttgccaaagctgtcatcttgtaatatatgctctagaaatgacataaaggtttatggggaagcaaagagagattttgtggcaagagaactgcccttgcctctgtttttcttgttttattcccttgatgacctagggaaaaaaaggcatgtagagtattatgtttatactttaaacttgatatttttagtgtattatttaaagataaaggttcttgggtttaaaatacattagaacttaatgcagacatataaagtaacattgagaatgacaactaaaacattccattgttatggtcctgaattttttatgcttcatttcatgtatttattctttgtataattatagcatacatgttatgtaatataacttatgaaaagtacagtgaattttgctttattgcaaagctttaaatataaatttcagagtgcttcagtaaaaagctactatatattgttgtttgttattgtgtaggtaatattttcaattatgaaagtgaaatgcaaatgtctgttatctaactacaaattgtcagatttcttaaaaggacactgtcaggcaaatttgaaaatatacacattgagaataattttttattattatatcctattttaatattaacagctattatgaacaaaatttttcctgttaaatagcgacttcagtattgtgttatgttttacagcgttaaaacaactatgaagatctgcagctattcttttacttaacatgcatatgtactacagagggatttttaaattaattgcaaaatgtgcattagctattgacttagagtgaattgccttttgtatcctgattcacaacacctattcctgttcagtattctttgtcttgaatagagaagtctatgttcgtaaagtcatataaaaggttataccactatttagtaaaaagttttagtttggtgctgttaataataatttgctaaaaggccttttagaatatttcataaagggttttaaacagttttttcccactgcctttttattattgacatatctaaaaccaaactgaaatcgctttggaaatcagattttttaatgttaggaagatccagcaattttggtttctgaaaaattacaaaacttttctaccctacagatgcccaggttctttagttttttattcattcaactcacacacacataaacatatacatacacaaacacaatcccacatgcaaacacacacagccacatatatacatgtgtagcacagcgctaaacactgtggaggctaaaaaaagtcaaagacaacattataactaaaagtcgaaagcacacaaaatataaataatagtgtatgcaagttaatgtacattatacatgcgtgtaagggacataaatggaggggtgtgaactttggttaggcaaagtttactggaggaggggtttttgagtcaaatttggaaggatgaacttgttagatagtcagagttggaaacaaaacaatccaagaatagggatataagcattgctagtctagaatagtctattccttgtgaaaatataaatttaattttcaggaatccagtatattccaaacatcacatatttagcatgagaaaaattgatttgtgattgtgtatatgagtcattgttaatgggagacaagctgaactgccacatgccaccaaatgaacctttacttcaatcaaaaaggagggtatgattggttcaattatattaacagaatatcatgggcatttctctatgatggtcattcaaggtagtaggtctctttcaactgagtgcaacattgagaataatgatttggttcagggcaactacaaataatcacttactaagccttaaataaagccattatttttatatcaatagcacaaaggaaaaccaaaagtccttaaccactgaccatttttatcatattttaggcctttttttaaaaaatcagggtatagtaggcactaagttttattaggaaatatttaaacctgctgaaggatttatttataaaaagtgcaatttttcaaaacacattattattttttaatttcccaattttttcagtttttcaaattgtaccacaacatagaactgtgatattttgctattacttcaatgtgaataaataaggtaaagtatatcatttattgagtgcccatgctgtacatttaaaatatgcattatttaatttaatcttactcccagcaccaaaaggtaattgaccagcctcaacacaattttggacaaagctagtaactgaacacaggtctgtctgccccacacttctctttctcttgtaactgcacaatagcagaaaattggcaagatgtatttttactttccaagatgccgtgtgtgccaagaataaatgaaatgatgttaaagcataataataacatatctttaaaaagcttttcaaaatatattttcaccctgacagtgacccttgtaacttaaatgatttttggaaatattagtatgtaagtataattcaaagttgtcaaaatgtaagacatttagaagtaatttttattatttatattgttaatacttaatcactggaaattcattttccttactcgatgttttctttcaactgagaagcctaaaacaaacaaaaaccttgtgtgttatcctgatatagttgactaaatgtatttgttcttatatggatagtaatatgaatgtgacatgcaccaattgtcctattataattttcagataagtgtaactaagcacttgtgtaataaatattagtcattttatttcaa

SEQ ID NO: 2747 - protein, 44 aa, Homo sapiens [sequence omitted]

SEQ ID NO: 2748 - DNA, 4283 bp, Homo sapiens
gtacaacccgcgaggccccacactttctgcgccagctgggagtgcgcgccctgcagagccagtgggtgggcggttctagctcttcccaccctcactgcgggcctctgctgtcacacgcccggggtggcgaaacggtcgccacctgagtctccattctgctgcagtggcccctgcgttaaagctctctcgtggtgcggctgccgaggctgcggtagctcctgcgcccccgtgctggtggcgcagcctctgcttgctgccgacctggcggaagggtgcgggagcgcacgctacgggcagcgtcggtctgcgtccttcctcctcctattccgacccccgcatcccacgcccccgcctcgctctacgcctcctccctggctgcaggcagaccgcttcacacagccgcagtgccctgtgtgtggacagcctgtgggagactcgcacgcccacactcaccccgcctggctgcacccctgcccagcatgtcggcgctcgagtggtacgcccacaagtctctaggcgatggtatcttctggattcaagaacgtttctacgagtcgggcaaccgtgccaacatctggctggtgcgcggctccgagcaggacgtggtgatcgatacaggcctggggctgcgcagcctcccggagtacctgtactcctccggcctcttgcaggaccgagaggccaaagaggacgcggcgcgccggccactgcttgccgtggccacccacgtgcacttcgaccactccggcggcctctaccagttcgaccgcgtggcagtgcaccacgccgaggccgaggcgctggctcgcggggacaactttgagaccgtgacctggctttccgatagcgaggtggtgcggacgcccagccccggctggagggccagacagttccgggtacaggcggtgcagcccaccctcatcctgcaggatggggatgtgatcaaccttggtgacagacagctcactgttatgcacatgccaggtcactccaggggcagtatttgcttacatgacaaagaccgaaagattctcttcagtggagacgtcgtgtatgatggatcactgattgactggctcccatacagcaggataagtgactatgttggaacttgtgaacgtctaatagaattagtggacagaggtctggtagagaaggtgcttcctgggcacttcaatacctttggtgctgaaaggctttttcgattggcttctaactatatttcaaaagctgggatatgtcacaaagtttctacttttgccatgcgatctcttgcaagtttagctctacgtgtaacaaattctaggacctcgccctagtatctatactgataatatattttgattaattatatacattaattcattctgtgctatttaactgattaatagtgagcatttcatgaagtgcttttataccactattatatatcagagaaagattgagaatgaataagccaaaaagaaaattgttagtttaaattgttttctttcttccaagaaagaagccacttaaataagcttatactttgccaaagctgtcatcttgtaatatatgctctagaaatgacataaaggtttatggggaagcaaagagagattttgtggcaagagaactgcccttgcctctgtttttcttgttttattcccttgatgacctagggaaaaaaaggcatgtagagtattatgtttatactttaaacttgatatttttagtgtattatttaaagataaaggttcttgggtttaaaatacattagaacttaatgcagacatataaagtaacattgagaatgacaactaaaacattccattgttatggtcctgaattttttatgcttcatttcatgtatttattctttgtataattatagcatacatgttatgtaatataacttatgaaaagtacagtgaattttgctttattgcaaagctttaaatataaatttcagagtgcttcagtaaaaagctactatatattgttgtttgttattgtgtaggtaatattttcaattatgaaagtgaaatgcaaatgtctgttatctaactacaaattgtcagatttcttaaaaggacactgtcaggcaaatttgaaaatatacacattgagaataattttttattattatatcctattttaatattaacagctattatgaacaaaatttttcctgttaaatagcgacttcagtattgtgttatgttttacagcgttaaaacaactatgaagatctgcagctattcttttacttaacatgcatatgtactacagagggatttttaaattaattgcaaaatgtgcattagctattgacttagagtgaattgccttttgtatcctgattcacaacacctattcctgttcagtattctttgtcttgaatagagaagtctatgttcgtaaagtcatataaaaggttataccactatttagtaaaaagttttagtttggtgctgttaataataatttgctaaaaggccttttagaatatttcataaagggttttaaacagttttttcccactgcctttttattattgacatatctaaaaccaaactgaaatcgctttggaaatcagattttttaatgttaggaagatccagcaattttggtttctgaaaaattacaaaacttttctaccctacagatgcccaggttctttagttttttattcattcaactcacacacacataaacatatacatacacaaacacaatcccacatgcaaacacacacagccacatatatacatgtgtagcacagcgctaaacactgtggaggctaaaaaaagtcaaagacaacattataactaaaagtcgaaagcacacaaaatataaataatagtgtatgcaagttaatgtacattatacatgcgtgtaagggacataaatggaggggtgtgaactttggttaggcaaagtttactggaggaggggtttttgagtcaaatttggaaggatgaacttgttagatagtcagagttggaaacaaaacaatccaagaatagggatataagcattgctagtctagaatagtctattccttgtgaaaatataaatttaattttcaggaatccagtatattccaaacatcacatatttagcatgagaaaaattgatttgtgattgtgtatatgagtcattgttaatgggagacaagctgaactgccacatgccaccaaatgaacctttacttcaatcaaaaaggagggtatgattggttcaattatattaacagaatatcatgggcatttctctatgatggtcattcaaggtagtaggtctctttcaactgagtgcaacattgagaataatgatttggttcagggcaactacaaataatcacttactaagccttaaataaagccattatttttatatcaatagcacaaaggaaaaccaaaagtccttaaccactgaccatttttatcatattttaggcctttttttaaaaaatcagggtatagtaggcactaagttttattaggaaatatttaaacctgctgaaggatttatttataaaaagtgcaatttttcaaaacacattattattttttaatttcccaattttttcagtttttcaaattgtaccacaacatagaactgtgatattttgctattacttcaatgtgaataaataaggtaaagtatatcatttattgagtgcccatgctgtacatttaaaatatgcattatttaatttaatcttactcccagcaccaaaaggtaattgaccagcctcaacacaattttggacaaagctagtaactgaacacaggtctgtctgccccacacttctctttctcttgtaactgcacaatagcagaaaattggcaagatgtatttttactttccaagatgccgtgtgtgccaagaataaatgaaatgatgttaaagcataataataacatatctttaaaaagcttttcaaaatatattttcaccctgacagtgacccttgtaacttaaatgatttttggaaatattagtatgtaagtataattcaaagttgtcaaaatgtaagacatttagaagtaatttttattatttatattgttaatacttaatcactggaaattcattttccttactcgatgttttctttcaactgagaagcctaaaacaaacaaaaaccttgtgtgttatcctgatatagttgactaaatgtatttgttcttatatggatagtaatatgaatgtgacatgcaccaattgtcctattataattttcagataagtgtaactaagcacttgtgtaataaatattagtcattttatttcaa

SEQ ID NO: 2749 - protein, 279 aa, Homo sapiens
MSALEWYAHKSLGDGIFWIQERFYESGNRANIWLVRGSEQDVVIDTGLGLRSLPEYLYSSGLLQDREAKEDAARRPLLAVATHVHFDHSGGLYQFDRVAVHHAEAEALARGDNFETVTWLSDSEVVRTPSPGWRARQFRVQAVQPTLILQDGDVINLGDRQLTVMHMPGHSRGSICLHDKDRKILFSGDVVYDGSLIDWLPYSRISDYVGTCERLIELVDRGLVEKVLPGHFNTFGAERLFRLASNYISKAGICHKVSTFAMRSLASLALRVTNSRTSP

SEQ ID NO: 2750 - DNA, 2510 bp, Homo sapiens
gtacaacccgcgaggccccacactttctgcgccagctgggagtgcgcgccctgcagagccagtgggtgggcggttctagctcttcccaccctcactgcgggcctctgctgtcacacgcccggggtggcgaaacggtcgccacctgagtctccattctgctgcagtggcccctgcgttaaagctctctcgtggtgcggctgccgaggctgcggtagctcctgcgcccccgtgctggtggcgcagcctctgcttgctgccgacctggcggaagggtgcgggagcgcacgctacgggcagcgtcggtctgcgtccttcctcctcctattccgacccccgcatcccacgcccccgcctcgctctacgcctcctccctggctgcaggcagaccgcttcacacagccgcagtgccctgtgtgtggacagcctgtgggagactcgcacgcccacactcaccccgcctggctgcacccctgcccagcatgtcggcgctcgagtggtacgcccacaagtctctaggcgatggtatcttctggattcaagaacgtttctacgagtcgggcaaccgtgccaacatctggctggtgcgcggctccgagcaggacgtggtgatcgatacaggcctggggctgcgcagcctcccggagtacctgtactcctccggcctcttgcaggaccgagaggccaaagaggacgcggcgcgccggccactgcttgccgtggccacccacgtgcacttcgaccactccggcggcctctaccagttcgaccgcgtggcagtgcaccacgccgaggccgaggcgctggctcgcggggacaactttgagaccgtgacctggctttccgatagcgaggtggtgcggacgcccagccccggctggagggccagacagttccgggtacaggcggtgcagcccaccctcatcctgcaggatggggatgtgatcaaccttggtgacagacagctcactgttatgcacatgccaggtcactccaggggcagtatttgcttacatgacaaagaccgaaagattctcttcagtggagacgtcgtgtatgatggatcactgattgactggctcccatacagcaggataagtgactatgttggaacttgtgaacgtctaatagaattagtggacagaggtctggtagagaaggtgcttcctgggcacttcaatacctttggtgctgaaaggctttttcgattggcttctaactatatttcaaaagctgggatatgtcacaaagtttctacttttgccatgcgatctcttgcaagtttagctctacgtgtaacaaattctaggacctcgccctagtatctatactgataatatattttgattaattatatacattaattcattctgtgctatttaactgattaatagtgagcatttcatgaagtgcttttataccactattatatatcagagaaagattgagaatgaataagccaaaaagaaaattgttagtttaaattgttttctttcttccaagaaagaagccacttaaataagcttatactttgccaaagctgtcatcttgtaatatatgctctagaaatgacataaaggtttatggggaagcaaagagagattttgtggcaagagaactgcccttgcctctgtttttcttgttttattcccttgatgacctagggaaaaaaaggcatgtagagtattatgtttatactttaaacttgatatttttagtgtattatttaaagataaaggttcttgggtttaaaatacattagaacttaatgcagacatataaagtaacattgagaatgacaactaaaacattccattgttatggtcctgaattttttatgcttcatttcatgtatttattctttgtataattatagcatacatgttatgtaatataacttatgaaaagtacagtgaattttgctttattgcaaagctttaaatataaatttcagagtgcttcagtaaaaagctactatatattgttgtttgttattgtgtaggtaatattttcaattatgaaagtgaaatgcaaatgtctgttatctaactacaaattgtcagatttcttaaaaggacactgtcaggcaaatttgaaaatatacacattgagaataattttttattattatatcctattttaatattaacagctattatgaacaaaatttttcctgttaaatagcgacttcagtattgtgttatgttttacagcgttaaaacaactatgaagatctgcagctattcttttacttaacatgcatatgtactacagagggatttttaaattaattgcaaaatgtgcattagctattgacttagagtgaattgccttttgtatcctgattcacaacacctattcctgttcagtattctttgtcttgaatagagaagtctatgttcgtaaagtcatataaaaggttataccactatttagtaaaaagttttagtttggtgctgttaataataatttgctaaaaggccttttagaatatttcataaagggttttaaac

SEQ ID NO: 2751 - protein, 279 aa, Homo sapiens; identical to SEQ ID NO: 2749

SEQ ID NO: 2752 - DNA, 3607 bp, Homo sapiens
ccatcctgcaggatgagggtgggctgcaccgcctgtacccggaactgtctggccctccagccggggctgggcgtccgcaccacctcgctatcggaaagccaggtcacggtctcaaagttgtccccgcgagccagcgcctcggcctcggcgtggtgcactgccacgcggtcgaactggtagaggccgccggagtggtcgaagtgcacgtgggtggccacggcaagcagtggccggcgcgccgcgtcctctttggcctctcggtcctgcaagaggccggaggagtacaggtactccgggaggctgcgcagccccaggcctgtatcgatcaccacgtcctgctcggagccgcgcaccagccagatgttggcacggttgcccgactcgtagaaacgttcttgaatccagaagataccatcgcctagagacttgtgggcgtaccactcgagcgccgacatgctgggcaggggtgcagccaggcgggtgcctttcagaatttgcccactcatctggtataactggttctgatggctgggaataaaggaagaggacgtgctgcttatacctttaatattgaggctgttggatttagcaaaggtgaaaagttacctgatgtagtgttgaaaccacccccactatttcctgatacagattataaaccagtgccactgaaaacaggagaaggtgaagaatatatgctggctttgaaacaggagttgagagaaacaatgaaaagaatgccttattttattgaaacacctgaagaaagacaagatattgaaaggtatagtaaaagatacatgaaggtatacaaggaagaatggataccagattggagaagacttccaagagagatgatgccaagaaataaatgtaaaaaagcaggcccaaaacccaaaaaggcaaaagacgcaggcaaaggcacaccactcactaatactgaagatgtgttgaaaaaaatggaggaattggaaaaaagaggtgatggtgaaaaatcagatgaggaaaatgaagagaaagaaggaagcaaagagaaaagtaaagaaggtgatgatgacgatgacgatgatgccgcagaacaggaggaatatgatgaagaagagcaagaagaggaaaatgactacattaattcatactttgaagatggagatgattttggcgcagacagtgatgacaacatggatgaggcaacctattaggcatgaaatttttcaaaaaatatttttatgatgcagcttctgaacatttggacagacttgatttgtattttatttctgataaggaataagtacttgtttctgttgttttggacaaatagttgttaccaaaatattcaaaaccactttgagtttacatactagttaccttaaaaattattccctgacactctgacattccttctaaacacctctgccatctctcttatgtactctcatgggtttttttgtatgatttgaatatgaatgtgcctaaagaatttttgctctcttaatctatgtatacatacttgaacaaatcattcttgcttaactgctgatcttttgtaaaactattgctagtcataatggatttctataacctgaaagttgatataatacagcacgtggagcactttaaaaacaaagaaacttgaaaataattttattttttacctttacatggtgtgttctagactactgcattatgactacataaacctacctgagctcttacaagtacagaattgtgagacagaggttttgtgatggaaaacatacacatagggaaaaataccaaactgagcaatataaatttcacagctcacatcttagccagtacaaagaaactttcacatggggtgaatattataatacttgaatttgagacttaatactgtatatgaattaatcatcccactgtaataactgacatcttcaaatagttgggcttatgaaaaatttgactaagacattttattttatactttatgtaaatgtgaaataagttctggtcatataaatatgtagaatgcatgtgtgtgaactctatgaagtgaagtgtggtggccttttatgtttcagagtactcaagtgtacaattgatttatataaaaatgcaaaatgaactcaggtcattttgaaattaatattaatatttttgttgtttaactttaaagctagctcccctaactttatatattttttgggaaaaaatacctaaaaacctcagcctacaaagactctcagaaatgccaaagattttcaaggaaattcatattatatatttcaaaaatgatttatcaatgttatctaccaaaagaaataattttatttttcccctttggggagatattatcctctaatatgagaatcagatccctagattctatttctacctatactattaaactcaaccttgaacctgagcttggttgtttctgtgccttagtttctccactcgtaaacaatttcctataaaaattgtttaaacaccaaccaaaatttaccatatgtattcattctcttgccttaaagatcacttcttaacttacatttggctctcaccctctaaaaatttgtagtttggagagtaactgaaagcacaattttaagaaacatgttttcctcacaaaatatattgtaatctgattttcctatcttgtattcatgcagaaaattggagaaaatgtgtattgtcttgtgccattctgcaatatgaatttctcaggaaaaagatgtttcaatggcaatactttcttaaataattcaagatgggtgtgaggacctatcttattagtttagtgctgtgttaaccatttgtgaattacttcttgtttaaaggaagttgtcaaaaaattttaagattctaaatggaatacacgaataaagtaagccttagaatagaaacctcacaaaaagttgtcatttgcggttgataattaacataggtgttttattctctcaactccttagtaccagagccaaatacaatttagttttcagaaatcttatcaatattgttctatttacctacttataaatctgcagataaccacttgaaccaggcaaatacactgaagataaaggttatttctttttttagctttgaatttgtcatgaccattttagtcttgcagatagcagggcagccccttggggcaaggatttactctgggaggtaccgttaagagccttctttccccctttgaaagatccttttacaatgttaaagtatactagttgcaagaacaagcaggatttgcaggttgctttaccagcatgagtctcatttttctggcttaaaatctgggactgtgaaattattccataggaaagtgaatgttattttgcagaattagcctcttacataaaagtatttgttgaagtgtctttaaaattgctatcatgagcaaaactggttgctgtaatgcttgtttttctgtatttatttacacattaaattcttacaaaacaaaatgtgttcgtttgttttatagtaagatgttttattttgaacttatttaaatgtttatttgttagagaaaactaatttgttaatatagatcttaactagtaactattaagcagggatgtttgttccaaatattcttgaataaacaatcaccacaaac

SEQ ID NO: 2753 - protein, 223 aa, Homo sapiens; identical to SEQ ID NO: 279

SEQ ID NO: 2754 - DNA, 3136 bp, Homo sapiens
actccgcggtcctggtgccgcgtgcaggtcggtgcgcgcttctcccgaggtggaacgggcggcagtcaagcgccggcgttctctgccgtcaccctttccttgccggccggcacttcggctgcagagttttgcccacgcttcgagacttagggagcagtgcctttcagaatttgcccactcatctggtataactggttctgatggctgggaataaaggaagaggacgtgctgcttatacctttaatattgaggctgttggatttagcaaaggtgaaaagttacctgatgtagtgttgaaaccacccccactatttcctgatacagattataaaccagtgccactgaaaacaggagaaggtgaagaatatatgctggctttgaaacaggagttgagagaaacaatgaaaagaatgccttattttattgaaacacctgaagaaagacaagatattgaaaggtatagtaaaagatacatgaaggtatacaaggaagaatggataccagattggagaagacttccaagagagatgatgccaagaaataaatgtaaaaaagcaggcccaaaacccaaaaaggcaaaagacgcaggcaaaggcacaccactcactaatactgaagatgtgttgaaaaaaatggaggaaaatgactacattaattcatactttgaagatggagatgattttggcgcagacagtgatgacaacatggatgaggcaacctattaggcatgaaatttttcaaaaaatatttttatgatgcagcttctgaacatttggacagacttgatttgtattttatttctgataaggaataagtacttgtttctgttgttttggacaaatagttgttaccaaaatattcaaaaccactttgagtttacatactagttaccttaaaaattattccctgacactctgacattccttctaaacacctctgccatctctcttatgtactctcatgggtttttttgtatgatttgaatatgaatgtgcctaaagaatttttgctctcttaatctatgtatacatacttgaacaaatcattcttgcttaactgctgatcttttgtaaaactattgctagtcataatggatttctataacctgaaagttgatataatacagcacgtggagcactttaaaaacaaagaaacttgaaaataattttattttttacctttacatggtgtgttctagactactgcattatgactacataaacctacctgagctcttacaagtacagaattgtgagacagaggttttgtgatggaaaacatacacatagggaaaaataccaaactgagcaatataaatttcacagctcacatcttagccagtacaaagaaactttcacatggggtgaatattataatacttgaatttgagacttaatactgtatatgaattaatcatcccactgtaataactgacatcttcaaatagttgggcttatgaaaaatttgactaagacattttattttatactttatgtaaatgtgaaataagttctggtcatataaatatgtagaatgcatgtgtgtgaactctatgaagtgaagtgtggtggccttttatgtttcagagtactcaagtgtacaattgatttatataaaaatgcaaaatgaactcaggtcattttgaaattaatattaatatttttgttgtttaactttaaagctagctcccctaactttatatattttttgggaaaaaatacctaaaaacctcagcctacaaagactctcagaaatgccaaagattttcaaggaaattcatattatatatttcaaaaatgatttatcaatgttatctaccaaaagaaataattttatttttcccctttggggagatattatcctctaatatgagaatcagatccctagattctatttctacctatactattaaactcaaccttgaacctgagcttggttgtttctgtgccttagtttctccactcgtaaacaatttcctataaaaattgtttaaacaccaaccaaaatttaccatatgtattcattctcttgccttaaagatcacttcttaacttacatttggctctcaccctctaaaaatttgtagtttggagagtaactgaaagcacaattttaagaaacatgttttcctcacaaaatatattgtaatctgattttcctatcttgtattcatgcagaaaattggagaaaatgtgtattgtcttgtgccattctgcaatatgaatttctcaggaaaaagatgtttcaatggcaatactttcttaaataattcaagatgggtgtgaggacctatcttattagtttagtgctgtgttaaccatttgtgaattacttcttgtttaaaggaagttgtcaaaaaattttaagattctaaatggaatacacgaataaagtaagccttagaatagaaacctcacaaaaagttgtcatttgcggttgataattaacataggtgttttattctctcaactccttagtaccagagccaaatacaatttagttttcagaaatcttatcaatattgttctatttacctacttataaatctgcagataaccacttgaaccaggcaaatacactgaagataaaggttatttctttttttagctttgaatttgtcatgaccattttagtcttgcagatagcagggcagccccttggggcaaggatttactctgggaggtaccgttaagagccttctttccccctttgaaagatccttttacaatgttaaagtatactagttgcaagaacaagcaggatttgcaggttgctttaccagcatgagtctcatttttctggcttaaaatctgggactgtgaaattattccataggaaagtgaatgttattttgcagaattagcctcttacataaaagtatttgttgaagtgtctttaaaattgctatcatgagcaaaactggttgctgtaatgcttgtttttctgtatttatttacacattaaattcttacaaaacaaaatgtgttcgtttgttttatagtaagatgttttattttgaacttatttaaatgtttatttgttagagaaaactaatttgttaatatagatcttaactagtaactattaagcagggatgtttgttccaaatattcttgaataaacaatcaccacaaac

SEQ ID NO: 2755 - protein, 174 aa, Homo sapiens
MAGNKGRGRAAYTFNIEAVGFSKGEKLPDVVLKPPPLFPDTDYKPVPLKTGEGEEYMLALKQELRETMKRMPYFIETPEERQDIERYSKRYMKVYKEEWIPDWRRLPREMMPRNKCKKAGPKPKKAKDAGKGTPLTNTEDVLKKMEENDYINSYFEDGDDFGADSDDNMDEATY

SEQ ID NO: 2756 - DNA, 679 bp, Homo sapiens
cgcgcttctcccgaggtggaacgggcggcagtcaagcgccggcgttctctgccgtcaccctttccttgccggccggcacttcggctgcagagttttgcccacgcttcgagacttagggagcagtgcctttcagaatttgcccactcatctggtataactggttctgatggctgggaataaaggaagaggacgtgctgcttatacctttaatattgaggctgttggatttagcaaaggtgaaaagttacctgatgtagtgttgaaaccacccccactatttcctgatacagattataaaccagtgccactgaaaacaggagaaggtgaagaatatatgctggctttgaaacaggagttgagagaaacaatgaaaagaatgccttattttattgaaacacctgaagaaagacaagagacgggagtcttgcttttttgctcacactggtctcacattcctggcttcaagtgatcctcccatctcggccttccaaagtgctgaaattacaggcatgagccaccgcacccagcttacctctgtttcctgatatagtgtttaaaaaacacacgcatgttaaaaataaaggtttttctataaaatatatacatttatatgtgcctatataggtttatataatatgtgtatatatgtgcatacataaatttatataatatccatgct

SEQ ID NO: 2757 - protein, 100 aa, Homo sapiens
MAGNKGRGRAAYTFNIEAVGFSKGEKLPDVVLKPPPLFPDTDYKPVPLKTGEGEEYMLALKQELRETMKRMPYFIETPEERQETGVLLFCSHWSHIPGFK

SEQ ID NO: 2758 - DNA, 6735 bp, Homo sapiens
gtgaatcaaaggagagtcccagaaaacctgtgactgttgaagaaaattcatctgtgaatttttatattcaaggagtcagtatttatattcatcttttaaactgggaagatttatattttactttaaaacttcttgataataatttacaatgaatggacacagtgatgaagaaagtgttagaaacagtagtggagaatcaagccagtcggatgatgattctgggtcagcttcaggctctggatctggttcgagttctggaagcagtagtgatggaagcagtagccagtcaggtagcagtgactctgactccggatctgaatcaggcagtcagtcagagtctgagtcagacacttcccgagaaaacaaagttcaagcaaaaccaccgaaagttgatggagctgagttttggaaatctagtcctagtattctggccgttcagagatctgcaatcctcaagaagcagcaacagcagcagcagcaacaacaacatcaagcctcatctaatagcggatcagaagaggattcctctagcagtgaagattccgatgactcatcaagtgaggtcaaaaggaaaaagcataaagatgaagattggcaaatgtctgggtcaggatctccatctcagtctggttcagattcagaatctgaagaagagagagagaaaagcagttgtgatgaaacagaatctgattatgagccaaaaaacaaagtcaaaagcagaaaacctcaaaatagatctaagtcaaaaaatggaaagaagattcttggacaaaaaaagagacagattgattcatctgaggaggatgatgatgaagaagattatgataatgataaaagaagttctcgtcgccaagcaactgttaatgttagctataaggaggatgaagaaatgaaaacagattctgatgacctactggaagtctgtggagaggatgttcctcaacctgaggaagaggaatttgaaaccatagaaagatttatggattgtcggattgggagaaaaggagctactggtgctactacaaccatctatgcagttgaagcagatggtgacccaaatgcaggctttgaaaaaaacaaagaaccaggagagattcagtatttaattaaatggaaaggatggtcccatatccacaacacttgggagacagaagaaaccctcaagcagcagaatgttagaggaatgaaaaaattggataattataagaaaaaagatcaggaaacaaaaagatggttgaaaaatgcctctccagaagatgtggaatattataattgccagcaagaacttacagatgatctacataaacagtatcaaatagtggaacgtataattgctcattccaatcaaaagtcagcagctggttatcctgattattactgcaaatggcagggccttccatactcagagtgcagctgggaagatggagctctcatttccaaaaagtttcaagcatgcattgatgagtattttagcaggaaccaatcaaaaaccactccttttaaagattgcaaagtattaaaacaaaggccaaggtttgtagccctgaagaagcagccatcctatattggaggacatgagggcttagaattaagagattatcaactgaatggtttaaattggcttgctcattcttggtgcaaaggaaatagttgcatactcgctgatgaaatgggccttggaaaaacaatacagacgatctcatttctgaattatttgtttcatgaacatcaattatatggaccttttttattggtagtaccgctctccactcttacttcctggcaaagggaaattcagacttgggcttctcaaatgaatgctgtggtttatttaggtgacattaacagcagaaacatgataagaactcatgaatggacgcatcatcagaccaaacggttaaaatttaatatattgttaacaacttatgaaattttattaaaagataaggcattccttggaggtctaaattgggcatttataggtgttgatgaagcacaccgattaaagaatgatgactcccttctgtataaaactttaatagattttaaatccaatcatcgtctccttatcactggaactcctctacagaattccctcaaagagctctggtctttgctacatttcattatgccagaaaagttttcttcctgggaagattttgaagaagaacatggcaaagggagagaatatggttatgcaagccttcacaaggagcttgagccatttctgttacgccgagttaagaaagatgtggaaaaatctcttcctgccaaggttgagcagattttaagaatggaaatgagtgctttacagaaacaatattacaaatggattttaactaggaattacaaagccctcagcaaaggttccaagggcagtacctcaggctttttgaacattatgatggagctaaagaaatgttgtaaccattgctacctcattaaaccaccagataataatgaattctataataaacaggaggccttacaacacttaattcgtagtagcggaaaattgattcttcttgacaagctattaattcgcctaagagaacgaggcaatcgagttcttattttttcacaaatggtgcggatgttagatatacttgcagaatatttgaaatatcgtcaattcccctttcaaagattagatggatcaataaaaggagaactgaggaaacaagctctagatcattttaatgctgagggatcagaggatttttgctttttgctgtccacaagagctggaggtctagggattaatttagcctctgctgacactgttgttatatttgattccgattggaatccacagaatgatcttcaggcacaggctagagcccatcgaattgggcaaaagaaacaggtgaatatttatcgtctagttacaaagggatcagttgaagaagatattcttgaaagggcgaaaaagaagatggttttagatcatcttgtaattcaaagaatggacacaactgggaagacagtactacatacaggttctgccccatcaagttctactcctttcaataaagaagagttatcagccattttaaagtttggtgctgaagaactttttaaggaacctgaaggagaagaacaagagccccaggaaatggatatagatgaaatcttgaagagagctgaaactcatgaaaatgaaccaggtcctttaactgtaggagatgaattgctttcccagttcaaggttgccaacttctcaaatatggatgaggatgacattgagttggaacctgaaagaaattcaaagaattgggaggaaattattccagaagatcaaagaagacgattagaagaagaagaaagacaaaaggaacttgaagaaatttatatgctcccaagaatgagaaattgtgcaaaacagattagtttcaatggaagtgaagggaggcgcagtagaagtaggagatactctggatctgatagtgattccatctcagaagggaaaaggccaaagaaacgtggaagaccacggactattcctcgggagaatattaaaggatttagtgatgcagaaattaggcggtttatcaagagctataagaaatttggtggtcctctggaaagattagatgcaattgctcgagatgctgagttagttgataagtcagaaacagaccttagacgactgggagaattggtacataatggttgcattaaagcattaaaggatagttcttcaggaacagaacgaacaggtggtagactcggaaaagtgaagggtccaacattccgaatatcaggagtacaggtgaatgccaaactagtcatctcccatgaagaagaattaatacctttgcacaaatccattccttctgatccagaagaaagaaagcagtatactatcccatgccacacaaaggcagctcattttgatatagactggggcaaagaagatgattccaatttgttaattggcatctatgaatatggatatggaagctgggaaatgattaaaatggatcctgacctcagtctaacacacaagattcttccagatgatcccgataaaaaaccacaagcaaaacagttgcagacccgtgcagactacctcatcaaattacttagtagagatcttgcaaaaaaagaagctctttctggtgcgggaagttcaaagaggagaaaagcaagagctaagaagaataaagcaatgaagtctataaaagtgaaagaggaaataaagagtgattcttctcctctgccttcagagaagtctgatgaagatgatgataaattgagtgaatccaagtctgatggtagggaaagatccaagaaatcttcagtgtcagatgctccagttcatatcacggcaagtggtgaaccagttcccatttctgaagaatctgaagagctggatcagaagacattcagcatttgtaaagaaagaatgaggcctgttaaagcagctttgaaacaacttgataggcctgagaaaggcctttcagaaagagaacaactagagcatactagacaatgtttaataaaaattggagaccatatcacagaatgtctaaaagagtatacaaatcctgaacaaattaagcaatggagaaaaaacctgtggatttttgtatctaagtttactgaatttgatgcaagaaaattacataaattatataagcatgctattaaaaaacggcaggagtctcagcaaaacagtgatcaaaacagcaacttgaatcctcacgtgattagaaatccagatgtggaaagattaaaagagaatacaaatcacgatgatagcagcagggacagttattcctctgatagacacttaactcagtaccatgatcatcataaagaccgacatcagggagattcttacaaaaaaagtgattccaggaaaagaccctattcttcttttagtaatggtaaagaccatcgtgattgggatcactacaagcaagacagcagatattacagtgacagagagaaacacagaaaactggatgatcacaggagtagagatcacaggtcaaatttggaaggaagtttaaaagatagatctcattctgatcatcgttctcactcagatcatcggttacattcagaccaccggtcaagttctgaatatacgcaccataaatcttccagggattataggtatcactcagactggcaaatggaccacagagcttccagcagtggccctaggtcaccactagatcagagatctccttatggctccagatctccatttgaacattcagttgaacacaaaagtacaccggagcatacctggagtagtcggaaaacataacaaaaactgatacttcgtctttctggacttttcttttagccatatatcataaaccaacacagtaattgccttacatgacttgaaagatataaacagatcttctatcagtagcagtattgttacttctttccaggatgcaaggtctattatcccaacagaagagaaaatatttttatatttaaggattatgctgcactgtactacaaaattgtagtacttttttttgttttcttttttaaagaaatggaaaatgtttactattacagggacctcaacactgccctcccatacaggctggataaaactgtttttaagtcagtgattttagactgacctccatttaaattatgtttatatatgaactttactctgacctgtgatcatgtttcaggaaggaatgaaagagagttctttcttaataaagaaaaacactcaaggactttgttcatttccaaagctacttgtttacattgtacactgcgaccaccttgccgcttttcatcacaagcttgaatatttaaattctgtacttatatctgtaaaatagccaggaatttcctgtttgtgatctattatgcctttttacaaaaaaaatggctgtaaattattgtaaatattaaaggaactttccttacttccttccctttctcaggctttttttgactgttcctttccctaccaactcaggccttcttattaaaaaaaaaaaaatcagtgtaataacactttttaatgatttgtcttgatggaatcattgtttagaatgtaaaaatggggaaaggggccacttaattccattagtcctctttttatactgaatattttattagatacatgttattcccttttttttccttttttagtcaatattgtgtttgtagttttaaaaaatggcgagatatgtaaaatctaaactgcatgctctggaaacacttttttcagatgcatctggtttaaaagggtaggtgtataaacacttttcagaatccaaaacggccaaaagttattgtaaatccgtttgttttcccgttttatgtgggcaataatgtcaaatgtgctatgcagccaggttaacattttagataaacttgattgacttttaatataaactgttacaatgcacactgattgtatataaaaacgttatatatgacaaattaaatttaagaaaaaggatatgtgggctcctgtaattttctgctgcattcttactccctcaagcacttaccaccaccaccaccgccccctacccccgtttttaagtaacattttgctgccagaaaaagtattttggtaagcagttgaatatttgtaatgtgtagcattacaactaaatctgttttggagactatgaatattcctatgaagtaaaacttaggtcatagacatttttgttggccccttttggcttcctacagatattattatgggatgctttatatttattcacagat

SEQ ID NO: 2759 - protein, 1710 aa, Homo sapiens; identical to SEQ ID NO: 281

SEQ ID NO: 2760 - DNA, 5930 bp, Homo sapiens
aggtgaatcaaaggagagtcccagaaaacctgtgactgttgaagaaaattcatctgtgaatttttatattcaaggagtcagtatttatattcatcttttaaactgggaagatttatattttactttaaaacttcttgataataatttacaatgaatggacacagtgatgaagaaagtgttagaaacagtagtggagaatcaagccagtcggatgatgattctgggtcagcttcaggctctggatctggttcgagttctggaagcagtagtgatggaagcagtagccagtcaggtagcagtgactctgactccggatctgaatcaggcagtcagtcagagtctgagtcagacacttcccgagaaaacaaagttcaagcaaaaccaccgaaagttgatggagctgagttttggaaatctagtcctagtattctggccgttcagagatctgcaatcctcaagaagcagcaacagcagcagcagcaacaacaacatcaagcctcatctaatagcggatcagaagaggattcctctagcagtgaagattccgatgactcatcaagtgaggtcaaaaggaaaaagcataaagatgaagattggcaaatgtctgggtcaggatctccatctcagtctggttcagattcagaatctgaagaagagagagagaaaagcagttgtgatgaaacagaatctgattatgagccaaaaaacaaagtcaaaagcagaaaacctcaaaatagatctaagtcaaaaaatggaaagaagattcttggacaaaaaaagagacagattgattcatctgaggaggatgatgatgaagaagattatgataatgataaaagaagttctcgtcgccaagcaactgttaatgttagctataaggaggatgaagaaatgaaaacagattctgatgacctactggaagtctgtggagaggatgttcctcaacctgaggaagaggaatttgaaaccatagaaagatttatggattgtcggattgggagaaaaggagctactggtgctactacaaccatctatgcagttgaagcagatggtgacccaaatgcaggctttgaaaaaaacaaagaaccaggagagattcagtatttaattaaatggaaaggatggtcccatatccacaacacttgggagacagaagaaaccctcaagcagcagaatgttagaggaatgaaaaaattggataattataagaaaaaagatcaggaaacaaaaagatggttgaaaaatgcctctccagaagatgtggaatattataattgccagcaagaacttacagatgatctacataaacagtatcaaatagtggaacgtataattgctcattccaatcaaaagtcagcagctggttatcctgattattactgcaaatggcagggccttccatactcagagtgcagctgggaagatggagctctcatttccaaaaagtttcaagcatgcattgatgagtattttagcaggaaccaatcaaaaaccactccttttaaagattgcaaagtattaaaacaaaggccaaggtttgtagccctgaagaagcagccatcctatattggaggacatgagggcttagaattaagagattatcaactgaatggtttaaattggcttgctcattcttggtgcaaaggaaatagttgcatactcgctgatgaaatgggccttggaaaaacaatacagacgatctcatttctgaattatttgtttcatgaacatcaattatatggaccttttttattggtagtaccgctctccactcttacttcctggcaaagggaaattcagacttgggcttctcaaatgaatgctgtggtttatttaggtgacattaacagcagaaacatgataagaactcatgaatggacgcatcatcagaccaaacggttaaaatttaatatattgttaacaacttatgaaattttattaaaagataaggcattccttggaggtctaaattgggcatttataggtgttgatgaagcacaccgattaaagaatgatgactcccttctgtataaaactttaatagattttaaatccaatcatcgtctccttatcactggaactcctctacagaattccctcaaagagctctggtctttgctacatttcattatgccagaaaagttttcttcctgggaagattttgaagaagaacatggcaaagggagagaatatggttatgcaagccttcacaaggagcttgagccatttctgttacgccgagttaagaaagatgtggaaaaatctcttcctgccaaggttgagcagattttaagaatggaaatgagtgctttacagaaacaatattacaaatggattttaactaggaattacaaagccctcagcaaaggttccaagggcagtacctcaggctttttgaacattatgatggagctaaagaaatgttgtaaccattgctacctcattaaaccaccagataataatgaattctataataaacaggaggccttacaacacttaattcgtagtagcggaaaattgattcttcttgacaagctattaattcgcctaagagaacgaggcaatcgagttcttattttttcacaaatggtgcggatgttagatatacttgcagaatatttgaaatatcgtcaattcccctttcaaagattagatggatcaataaaaggagaactgaggaaacaagctctagatcattttaatgctgagggatcagaggatttttgctttttgctgtccacaagagctggaggtctagggattaatttagcctctgctgacactgttgttatatttgattccgattggaatccacagaatgatcttcaggcacaggctagagcccatcgaattgggcaaaagaaacaggtgaatatttatcgtctagttacaaagggatcagttgaagaagatattcttgaaagggcgaaaaagaagatggttttagatcatcttgtaattcaaagaatggacacaactgggaagacagtactacatacaggttctgccccatcaagttctactcctttcaataaagaagagttatcagccattttaaagtttggtgctgaagaactttttaaggaacctgaaggagaagaacaagagccccaggaaatggatatagatgaaatcttgaagagagctgaaactcatgaaaatgaaccaggtcctttaactgtaggagatgaattgctttcccagttcaaggttgccaacttctcaaatatggatgaggatgacattgagttggaacctgaaagaaattcaaagaattgggaggaaattattccagaagatcaaagaagacgattagaagaagaagaaagacaaaaggaacttgaagaaatttatatgctcccaagaatgagaaattgtgcaaaacagattagtttcaatggaagtgaagggaggcgcagtagaagtaggagatactctggatctgatagtgattccatctcagaagggaaaaggccaaagaaacgtggaagaccacggactattcctcgggagaatattaaaggatttagtgatgcagaaattaggcggtttatcaagagctataagaaatttggtggtcctctggaaagattagatgcaattgctcgagatgctgagttagttgataagtcagaaacagaccttagacgactgggagaattggtacataatggttgcattaaagcattaaaggatagttcttcaggaacagaacgaacaggtggtagactcggaaaagtgaagggtccaacattccgaatatcaggagtacaggtgaatgccaaactagtcatctcccatgaagaagaattaatacctttgcacaaatccattccttctgatccagaagaaagaaagcagtatactatcccatgccacacaaaggcagctcattttgatatagactggggcaaagaagatgattccaatttgttaattggcatctatgaatatggatatggaagctgggaaatgattaaaatggatcctgacctcagtctaacacacaagattcttccagatgatcccgataaaaaaccacaagcaaaacagttgcagacccgtgcagactacctcatcaaattacttagtagagatcttgcaaaaaaagaagctctttctggtgcgggaagttcaaagaggagaaaagcaagagctaagaagaataaagcaatgaagtctataaaagtgaaagaggaaataaagagtgattcttctcctctgccttcagagaagtctgatgaagatgatgataaattgagtgaatccaagtctgatggtagggaaagatccaagaaatcttcagtgtcagatgctccagttcatatcacggcaagtggtgaaccagttcccatttctgaagaatctgaagagctggatcagaagacattcagcatttgtaaagaaagaatgaggcctgttaaagcagctttgaaacaacttgataggcctgagaaaggcctttcagaaagagaacaactagagcatactagacaatgtttaataaaaattggagaccatatcacagaatgtctaaaagagtatacaaatcctgaacaaattaagcaatggagaaaaaacctgtggatttttgtatctaagtttactgaatttgatgcaagaaaattacataaattatataagcatgctattaaaaaacggcaggagtctcagcaaaacagtgatcaaaacagcaacttgaatcctcacgtgattagaaatccagatgtggaaagattaaaagagaatacaaatcacgatgatagcagcagggacagttattcctctgatagacacttaactcagtaccatgatcatcataaagaccgacatcagggagattcttacaaaaaaagtgattccaggaaaagaccctattcttcttttagtaatggtaaagaccatcgtgattgggatcactacaagcaagacagcagatattacagtgacagagagaaacacagaaaactggatgatcacaggagtagagatcacaggtcaaatttggaaggaagtttaaaagatagatctcattctgatcatcgttctcactcagatcatcggttacattcagaccaccggtcaagttctgaatatacgcaccataaatcttccagggattataggtatcactcagactggcaaatggaccacagagcttccagcagtggccctaggtcaccactagatcagagatctccttatggctccagatctccatttgaacattcagttgaacacaaaagtacaccggagcatacctggagtagtcggaaaacataacaaaaactgatacttcgtctttctggacttttcttttagccatatatcataaaccaacacagtaattgccttacatgacttgaaagatataaacagatcttctatcagtagcagtattgttacttctttccaggatgcaaggtctattatcccaacagaagagaaaatatttttatatttaaggattatgctgcactgtactacaaaattgtagtacttttttttgttttcttttttaaagaaatggaaaatgtttactattacagggacctcaacactgccctcccatacaggctggataaaactgtttttaagtcagtgattttagactgacctccatttaaattatgtttatatatgaactttactctgacctgtgatcatgtttcaggaaggaatgaaagagagttctttcttaataaagaaaaacactcaaggactttgttcatttccaaagctacttgtttacattgtacactgcgaccaccttgccgcttttcatcacaagcttgaatatttaaattctgtacttatatctgtaaaatagccaggaatttcctgtttgtgatctattatgcctttttacaaaaaaaatggctgtaaattattgtaaatattaaaggaactttccttacttccttcccttt

SEQ ID NO: 2761 - protein, 1710 aa, Homo sapiens; identical to SEQ ID NO: 281

SEQ ID NO: 2762 - DNA, 293 bp, Homo sapiens
gattgcctcaactctaaggattgaactgatattgaagtttcattttaattaattacaaagtgcatcgtaaagtttcaaacagtaaagttttactagaatcaccagagttgaggtttaattaaaagacttttgaatctgagctttgattcaaatctctataggtatgttgactactgactatagttaagtaaatagaagagtcatattgtccacccacaattttttttttcttttcttttcttttgagacagggcctcatccagcctgggaaacaagtgaaactccgtctcaaa

SEQ ID NO: 2763 - protein, 34 aa, Homo sapiens
VNRRVILSTHNFFFLFFSFETGPHPAWETSETPS

SEQ ID NO: 2764 - DNA, 205 bp, Homo sapiens
gagccgactcgggtggacggcctcccccgcgcccaggcccgggatctccgccgcccagtcctagggctccggcgtctcgggagctactatgttatgatatctcaaactaatatttgagactccttggcttgataactatgattccattgaagatgactattgagttgaatggctctgttttccatcaacgatgacagcttttaat

SEQ ID NO: 2765 - protein, 35 aa, Homo sapiens
ADSGGRPPPRPGPGSPPPSPRAPASRELLCYDISN

SEQ ID NO: 2766 - DNA, 2103 bp, Homo sapiens
cccggacccaggtgctgccagggcggcggctggcggccggcttctcgctcgggcagcggcggcggcggcggcggcggcttccggagtcccgctgcgaagatgctcaaagtcacggtgccctcctgctccgcctcgtcctgctcttcggtcaccgccagtgcggccccggggaccgcgagcctcgtcccggattactggatcgacggctccaacagggatgcgctgagcgatttcttcgaggtggagtcggagctgggacggggtgctacatccattgtgtacagatgcaaacagaaggggacccagaagccttatgctctcaaagtgttaaagaaaacagtggacaaaaaaatcgtaagaactgagataggagttcttcttcgcctctcacatccaaacattataaaacttaaagagatatttgaaacccctacagaaatcagtctggtcctagaactcgtcacaggaggagaactgtttgataggattgtggaaaagggatattacagtgagcgagatgctgcagatgccgttaaacaaatcctggaggcagttgcttatctacatgaaaatgggattgtccatcgtgatctcaaaccagagaatcttctttatgcaactccagccccagatgcaccactcaaaatcgctgattttggactctctaaaattgtggaacatcaagtgctcatgaagacagtatgtggaaccccagggtactgcgcacctgaaattcttagaggttgtgcctatggacctgaggtggacatgtggtctgtaggaataatcacctacatcttactttgtggatttgaaccattctatgatgaaagaggcgatcagttcatgttcaggagaattctgaattgtgaatattactttatctccccctggtgggatgaagtatctctaaatgccaaggacttggtcagaaaattaattgttttggatccaaagaaacggctgactacatttcaagctctccagcatccgtgggtcacaggtaaagcagccaattttgtacacatggataccgctcaaaagaagctccaagaattcaatgcccggcgtaagcttaaggcagcggtgaaggctgtggtggcctcttcgcgcctgggaagtgccagcagcagccatggcagcatccaggagagccacaaggctagccgagacccttctccaatccaagatggcaacgaggacatgaaagctattccagaaggagagaaaattcaaggcgatggggcccaagccgcagttaagggggcacaggctgagctgatgaaggtgcaagccttagagaaagttaaaggtgcagatataaatgctgaagaggcccccaaaatggtgcccaaggcagtggaggatgggataaaggtggctgacctggaactagaggagggcctagcagaggagaagctgaagactgtggaggaggcagcagctcccagagaagggcaaggaagctctgctgtgggttttgaagttccacagcaagatgtgatcctgccagagtactaaacagcttccttcagatctggaagccaaacaccggcattttatgtactttgtccttcagcaagaaaggtgtggaagcatgatatgtactatagtgattctgtttttgaggtgcaaaaaacatacatatataccagttggtaattctaacttcaatgcatgtgactgctttatgaaaataatagtgtcttctatggcatgtaatggatacctaataccgatgagttaaatcttgcaagttaacacaacgtaacacttaaaagcatacattttcagcaaccagtggcacatatttgaagtgaatagtagcaaattgtttttgctttgaaaatctagccatcctacatcctttggatttcttcacaaggcagtaattcctttgaactactgcttagctaatactaggtagtgctaaaagacatgttcccataacttttacaacattttactttttatcattgatgtgttcaaactgtttacaaggagatgcttatagatgatagttgtacatatgtgcaaaaaaaaatccacttgcaatggtaagaaattgaagtatccttaaaggccatgaagccatatgtccct

SEQ ID NO: 2767 - protein, 473 aa, Homo sapiens; identical to SEQ ID NO: 283

SEQ ID NO: 2768 - DNA, 6524 bp, Homo sapiens
cccggacccaggtgctgccagggcggcggctggcggccggcttctcgctcgggcagcggcggcggcggcggcggcggcttccggagtcccgctgcgaagatgctcaaagtcacggtgccctcctgctccgcctcgtcctgctcttcggtcaccgccagtgcggccccggggaccgcgagcctcgtcccggattactggatcgacggctccaacagggatgcgctgagcgatttcttcgaggtggagtcggagctgggacggggtgctacatccattgtgtacagatgcaaacagaaggggacccagaagccttatgctctcaaagtgttaaagaaaacagtggacaaaaaaatcgtaagaactgagataggagttcttcttcgcctctcacatccaaacattataaaacttaaagagatatttgaaacccctacagaaatcagtctggtcctagaactcgtcacaggaggagaactgtttgataggattgtggaaaagggatattacagtgagcgagatgctgcagatgccgttaaacaaatcctggaggcagttgcttatctacatgaaaatgggattgtccatcgtgatctcaaaccagagaatcttctttatgcaactccagccccagatgcaccactcaaaatcgctgattttggactctctaaaattgtggaacatcaagtgctcatgaagacagtatgtggaaccccagggtactgcgcacctgaaattcttagaggttgtgcctatggacctgaggtggacatgtggtctgtaggaataatcacctacatcttactttgtggatttgaaccattctatgatgaaagaggcgatcagttcatgttcaggagaattctgaattgtgaatattactttatctccccctggtgggatgaagtatctctaaatgccaaggacttggtcagaaaattaattgttttggatccaaagaaacggctgactacatttcaagctctccagcatccgtgggtcacaggtaaagcagccaattttgtacacatggataccgctcaaaagaagctccaagaattcaatgcccggcgtaagcttaaggcagcggtgaaggctgtggtggcctcttcgcgcctgggaagtgccagcagcagccatggcagcatccaggagagccacaaggctagccgagacccttctccaatccaagatggcaacgaggacatgaaagctattccagaaggagagaaaattcaaggcgatggggcccaagccgcagttaagggggcacaggctgagctgatgaaggtgcaagccttagagaaagttaaaggtgcagatataaatgctgaagaggcccccaaaatggtgcccaaggcagtggaggatgggataaaggtggctgacctggaactagaggagggcctagcagaggagaagctgaagactgtggaggaggcagcagctcccagagaagggcaaggaagctctgctgtgggttttgaagttccacagcaagatgtgatcctgccagagtactaaacagcttccttcagatctggaagccaaacaccggcattttatgtactttgtccttcagcaagaaaggtgtggaagcatgatatgtactatagtgattctgtttttgaggtgcaaaaaacatacatatataccagttggtaattctaacttcaatgcatgtgactgctttatgaaaataatagtgtcttctatggcatgtaatggatacctaataccgatgagttaaatcttgcaagttaacacaacgtaacacttaaaagcatacattttcagcaaccagtggcacatatttgaagtgaatagtagcaaattgtttttgctttgaaaatctagccatcctacatcctttggatttcttcacaaggcagtaattcctttgaactactgcttagctaatactaggtagtgctaaaagacatgttcccataacttttacaacattttactttttatcattgatgtgttcaaactgtttacaaggagatgcttatagatgatagttgtacatatgtgcaaaaaaaaatccacttgcaatggtaagaaattgaagtatccttaaaggccatgaagccatatgtccctaaagcctgtgtggagaatgctttattttattcttatttatatacactatattaataataaccaaaatgttctaagattctgccattttacaaccctggaggaagtaatttacaaactcacgctgagttccattctttccttcacctgctctccaataagatgactttctgatagacaaagcttagggtgtaataaacagggaagaaaagaaggtaagactgtacttaaactgatgaagataagattgattccttttcattttccagataaaattgtatttactcatgaatttatacaactttacagataagaacattttaatggataaactctataattaccaagttgcaaatatttagaaaattctatttcacaggttagtgccaaaatgtcttcatagagtaggaataatattccattttaagattattcattattgactttaatagagtaagaaaacattattgtttatcaaagctctttttttatccaattgatggttatctacacatatcacttataaactaaagttatttatgaaaagctagtatgtctttttctcgtatttggaatgaaagtacccacattttacaatgtagtgttgagaatgtggctgccaataaatttagcacaatgcaatttatttaccttaaaaaacaaacaaaaacaaaaataaagaaaaatactgatttcaaatcagactcttaaaaagctggaacattagacctgatattttattatgatttttcccagaataagtttaatttctctttgactttcatagaaacactttccccttatagaaattgcactatctccaatttatttctagtttgagttgaaatgaatattttatcagattaattatgtgtcacatttttggtgggttttctcaattttaaaaaagaattcattttaaaaaataattattttcagagaccaaataaagacaataaaaatgactatcacataaaaatccttgttaaaaaagagatcttaaattatgttggctctccctcaaaactattaaattagaaaacgaaactaaagctccagtttgtagaggctgttggacctcagtagacattcttcttttcaatcacaaatctctctctactactgttctcatgggaagaaaacaaggtaggacttcttatctttcatagtttaagaatctgacaggtcactgatatggagcccctgaagaagcacatcatctgggctcagaagattattttttgttttgttttatttgtactatctagtagagagcacttttcttattccctctttccttccttcctcatttaattattccctctcagaattcccatgttgtccattataaggggctcgctatttttaacctttaagaatgtcttctttgttaagcattaagatttccatttaagaggatcaatttcctgttgtactttttaccatgagactgaaacacacacacacacacacacacacacacacacacacacacacgtgttggaagagcaaagagagggaagggggtctttttagaaagtggcacttggcgcttagctgaaagatcagaacacatcattcctccctgcccacccccatattgttccaagggcagttgttacattatttcaacactagagtagggcggactgcattgtttggccctgagaactatagaaacaacgttgcaaataccatgcccaatgtgtattttagaatttactcatttaaatgagtgcatattaccattcctccatgtgagtactcgagttgataattccctctatctttttaaacccataaactacatttttaaaaaaatcaatgggagttttaaattttgactcatgttaaagataagattctgataatgactatatagtgactaatttcattgtttcagtaggaaacaaatcaaactttcaaaaatgttggtcatttcagtcaaattattcaaagatttcatatacatacatcctaagttaggataattatgttaacatttttgaaagaacagccaatgtttatattgcttgttaaaatggaatgtattgtctatctcaaagattacttagctaaataatagtagacaaatggagatttaatttcacaaaatacttcataacatcactcctaattggcaatatagtcacaaagcaaaagaattcaaatttcagcaaacaataaattacattttacattttagagctaacacttatcacattacattatgggtttttattttgagataagttcagctacatagcataaactaggtttttttttataaccatgaaggacagtcttgaattatttcccccattaacaaagtctaattggaatccagtattttttctcaaactgtaatttcacttgtcccaggacacataaataggtaaaaattagaataatatcgtggtagaagttaattgtccagaacaagtgcattatataaatataatgcaagcacatgtcatttaagattttctattagtcacattttaagaaaaatagatgaaagtatagtatttttaatccaattcatccaaattattctatcgatatatagtcaatattaaaatttaatgtgatattttgaattctttatttttatactgttttcaaaatcaagagtgtatgttaggcctttgggacatcaagtgctcaatagtcacatgtggctagtggctaccatattagacagcactagtctagagtactttttattttaagcaaagtgacacttgaagttctatgcttagatttaagtggcctcagttttcacattgaggagctggtgggaggccacaaagaaagtgtttcagaaatgttacacactgagtaaaagcttattgaccactcctgcccattcatttacttcagaggagaaatgattcctaacatgacttcaaagaacgggcattactaaattatctactgaccaatccctctgattcctgatgggccctggagtcttgactacagcctagagtctcctgagtactgccatgatgccaatagcattcttgcttaccaaaatctactctcagccaactatgtgtcttcattcaggaagaactgcacatagaatctgattttgaggcctggattaagcttcatgccatccttgtatcacaggcaatatgtctttctggaaatctaatgaaccataccaaatctgcatgatgaagattgtgtaatgatggtgatatcatgccagttatcctcaaagtgggaatatgaccattagctggcattttttaagatttccttagaagggtttaatcaacactgccattacacatggatttaacaaaagacttttgaaaattttttacatactgattttagaataatcctcaaggttctatagtcatttttagtggaagacttaaaaagaaaggaacaatttttactgtgacttcaatttcatagtattttaaacatattttgtaattcagaatgtttagcaatccctatgtcctgtttcacatgcatggtaactgatggtgggttgcctacaggctgaagatttggagagagccattttgtttcataaatcagtttttattgcacagaagcagctggttgtatttcaagttggaaaaagaaaagtaaatgccagaaaaggcaaaggataaacttagtaagccatttattttgttttagaattgtttttgcaaagcaaatttttttaaaaaaaggtcaacaaagtgaatcagcactagcattttcttgatggttgactcaatgtataattaacaaatatacatagcagagtcaattaatcatagtgccattatgtcacttatttgtcattgcaaagtattcagtcatgttgtctagatttactttagatggtgcaaaatttccagatagtaacctatgtaaaaggatttgtaatttccttgtaattcctgcctattagtccatattctgatttccttatgttcatcactgatatgttcctgatcagggtcattgctagtagttgagcatttactggttgaacattgtttaatggttagatgttatgtgtgtctgcatttaaaaaaattgtgtacatgttatttcactattggtattacaatattcataaccacatgataaacagaaatgtacccaataatttcctataaaatttttcaaagtccttttattcccctgacacactcagggtgaatttttgtctccttggcaaataagaaaaaaaaggagagagaccactggagagatatcagcaaaccacccacagtaaccaagttcagtatttcctctttctatattttgaccaatatattaagagcaaattttgtcattattactccttgtggctattacctgagatcagataatataatctcagctcataaagcttggccatgtctatacttatcttggagagcaataacaaacttgattaa

SEQ ID NO: 2769 - protein, 473 aa, Homo sapiens; identical to SEQ ID NO: 283

SEQ ID NO: 2770 - DNA, 2559 bp, Homo sapiens
cacaggcaatttatatatttgtctatatctagggtcacaaaagtggcgagtggcataaccagggcttgaacacacttcctgactcccaatagtctctgcctcatatcaggtcacccctactaagcccaggactgtggattattttatttgctgaccttcctgggaatttattgactgcccatcctcacaagcaggggtaaacctccaagaatgggctgccattgattggattccattctttaggcaaatcatgccctcaagccactgacttcttggattataaaatgatttttaaactctgggcttagtccttcaagtaccctcaaggggttagaaagaactataaaccccaagatagaaacataaggtagtattccataagttctgggatactctcccttttgtttgccatttaatccccacagaaagaatgatgatgcatgaatgattccattctgttaccatagagatgtactttaagttctgaattctaggtgattgtgaagcgcagcccagaattattttgctggttctgccttcaaagaacttccagtccacaggcaagtgaggagctgtttcttgacttctgttggaaagccgtctgccactttgggggtctcaggtggtacatggccctgtcttctcatactccctcagctactgctacctgaagctgtgcctacctacagtggcccctgaggacttaaacaatttttttctcacatatatttagtggtactgctgggaaatggaataagatctggaagtttgtaagctgagggcaagcccaggtcatcctaaaaacctcgctaagtttatggttctttattatttcaggtcagaaaattaattgttttggatccaaagaaacggctgactacatttcaagctctccagcatccgtgggtcacaggtaaagcagccaattttgtacacatggataccgctcaaaagaagctccaagaattcaatgcccggcgtaagcttaaggcagcggtgaaggctgtggtggcctcttcgcgcctgggaagtgccagcagcagccatggcagcatccaggagagccacaaggctagccgagacccttctccaatccaagatggcaacgaggacatgaaagctattccagaaggagagaaaattcaaggcgatggggcccaagccgcagttaagggggcacaggctgagctgatgaaggtgcaagccttagagaaagttaaaggtgcagatataaatgctgaagaggcccccaaaatggtgcccaaggcagtggaggatgggataaaggtggctgacctggaactagaggagggcctagcagaggagaagctgaagactgtggaggaggcagcagctcccagagaagggcaaggaagctctgctgtgggttttgaagttccacagcaagatgtgatcctgccagagtactaaacagcttccttcagatctggaagccaaacaccggcattttatgtactttgtccttcagcaagaaaggtgtggaagcatgatatgtactatagtgattctgtttttgaggtgcaaaaaacatacatatataccagttggtaattctaacttcaatgcatgtgactgctttatgaaaataatagtgtcttctatggcatgtaatggatacctaataccgatgagttaaatcttgcaagttaacacaacgtaacacttaaaagcatacattttcagcaaccagtggcacatatttgaagtgaatagtagcaaattgtttttgctttgaaaatctagccatcctacatcctttggatttcttcacaaggcagtaattcctttgaactactgcttagctaatactaggtagtgctaaaagacatgttcccataacttttacaacattttactttttatcattgatgtgttcaaactgtttacaaggagatgcttatagatgatagttgtacatatgtgcaaaaaaaaatccacttgcaatggtaagaaattgaagtatccttaaaggccatgaagccatatgtccctaaagcctgtgtggagaatgctttattttattcttatttatatacactatattaataataaccaaaatgttctaagattctgccattttacaaccctggaggaagtaatttacaaactcacgctgagttccattctttccttcacctgctctccaataagatgactttctgatagacaaagcttagggtgtaataaacagggaagaaaagaaggtaagactgtacttaaactgatgaagataagattgattccttttcattttccagataaaattgtatttactcatgaatttatacaactttacagataagaacattttaatggataaactctataattaccaagttgcaaatatttagaaaattctatttcacaggttagtgccaaaatgtcttcatagagtaggaataatattccattttaagattattcattattgactttaatagagtaagaaaacattattgtttatcaaagctctttttttatccaattgatggttatctacacatatcacttataaactaaagttatttatgaaaagct

SEQ ID NO: 2771 - protein, 164 aa, Homo sapiens [sequence omitted]

SEQ ID NO: 2772 - DNA, 5652 bp, Homo sapiens
agcgcagcccagaattattttgctggttctgccttcaaagaacttccagtccacaggcaaaaaattaattgttttggatccaaagaaacggctgactacatttcaagctctccagcatccgtgggtcacaggtaaagcagccaattttgtacacatggataccgctcaaaagaagctccaagaattcaatgcccggcgtaagcttaaggcagcggtgaaggctgtggtggcctcttcgcgcctgggaagtgccagcagcagccatggcagcatccaggagagccacaaggctagccgagacccttctccaatccaagatggcaacgaggacatgaaagctattccagaaggagagaaaattcaaggcgatggggcccaagccgcagttaagggggcacaggctgagctgatgaaggtgcaagccttagagaaagttaaaggtgcagatataaatgctgaagaggcccccaaaatggtgcccaaggcagtggaggatgggataaaggtggctgacctggaactagaggagggcctagcagaggagaagctgaagactgtggaggaggcagcagctcccagagaagggcaaggaagctctgctgtgggttttgaagttccacagcaagatgtgatcctgccagagtactaaacagcttccttcagatctggaagccaaacaccggcattttatgtactttgtccttcagcaagaaaggtgtggaagcatgatatgtactatagtgattctgtttttgaggtgcaaaaaacatacatatataccagttggtaattctaacttcaatgcatgtgactgctttatgaaaataatagtgtcttctatggcatgtaatggatacctaataccgatgagttaaatcttgcaagttaacacaacgtaacacttaaaagcatacattttcagcaaccagtggcacatatttgaagtgaatagtagcaaattgtttttgctttgaaaatctagccatcctacatcctttggatttcttcacaaggcagtaattcctttgaactactgcttagctaatactaggtagtgctaaaagacatgttcccataacttttacaacattttactttttatcattgatgtgttcaaactgtttacaaggagatgcttatagatgatagttgtacatatgtgcaaaaaaaaatccacttgcaatggtaagaaattgaagtatccttaaaggccatgaagccatatgtccctaaagcctgtgtggagaatgctttattttattcttatttatatacactatattaataataaccaaaatgttctaagattctgccattttacaaccctggaggaagtaatttacaaactcacgctgagttccattctttccttcacctgctctccaataagatgactttctgatagacaaagcttagggtgtaataaacagggaagaaaagaaggtaagactgtacttaaactgatgaagataagattgattccttttcattttccagataaaattgtatttactcatgaatttatacaactttacagataagaacattttaatggataaactctataattaccaagttgcaaatatttagaaaattctatttcacaggttagtgccaaaatgtcttcatagagtaggaataatattccattttaagattattcattattgactttaatagagtaagaaaacattattgtttatcaaagctctttttttatccaattgatggttatctacacatatcacttataaactaaagttatttatgaaaagctagtatgtctttttctcgtatttggaatgaaagtacccacattttacaatgtagtgttgagaatgtggctgccaataaatttagcacaatgcaatttatttaccttaaaaaacaaacaaaaacaaaaataaagaaaaatactgatttcaaatcagactcttaaaaagctggaacattagacctgatattttattatgatttttcccagaataagtttaatttctctttgactttcatagaaacactttccccttatagaaattgcactatctccaatttatttctagtttgagttgaaatgaatattttatcagattaattatgtgtcacatttttggtgggttttctcaattttaaaaaagaattcattttaaaaaataattattttcagagaccaaataaagacaataaaaatgactatcacataaaaatccttgttaaaaaagagatcttaaattatgttggctctccctcaaaactattaaattagaaaacgaaactaaagctccagtttgtagaggctgttggacctcagtagacattcttcttttcaatcacaaatctctctctactactgttctcatgggaagaaaacaaggtaggacttcttatctttcatagtttaagaatctgacaggtcactgatatggagcccctgaagaagcacatcatctgggctcagaagattattttttgttttgttttatttgtactatctagtagagagcacttttcttattccctctttccttccttcctcatttaattattccctctcagaattcccatgttgtccattataaggggctcgctatttttaacctttaagaatgtcttctttgttaagcattaagatttccatttaagaggatcaatttcctgttgtactttttaccatgagactgaaacacacacacacacacacacacacacacacacacacacacacgtgttggaagagcaaagagagggaagggggtctttttagaaagtggcacttggcgcttagctgaaagatcagaacacatcattcctccctgcccacccccatattgttccaagggcagttgttacattatttcaacactagagtagggcggactgcattgtttggccctgagaactatagaaacaacgttgcaaataccatgcccaatgtgtattttagaatttactcatttaaatgagtgcatattaccattcctccatgtgagtactcgagttgataattccctctatctttttaaacccataaactacatttttaaaaaaatcaatgggagttttaaattttgactcatgttaaagataagattctgataatgactatatagtgactaatttcattgtttcagtaggaaacaaatcaaactttcaaaaatgttggtcatttcagtcaaattattcaaagatttcatatacatacatcctaagttaggataattatgttaacatttttgaaagaacagccaatgtttatattgcttgttaaaatggaatgtattgtctatctcaaagattacttagctaaataatagtagacaaatggagatttaatttcacaaaatacttcataacatcactcctaattggcaatatagtcacaaagcaaaagaattcaaatttcagcaaacaataaattacattttacattttagagctaacacttatcacattacattatgggtttttattttgagataagttcagctacatagcataaactaggtttttttttataaccatgaaggacagtcttgaattatttcccccattaacaaagtctaattggaatccagtattttttctcaaactgtaatttcacttgtcccaggacacataaataggtaaaaattagaataatatcgtggtagaagttaattgtccagaacaagtgcattatataaatataatgcaagcacatgtcatttaagattttctattagtcacattttaagaaaaatagatgaaagtatagtatttttaatccaattcatccaaattattctatcgatatatagtcaatattaaaatttaatgtgatattttgaattctttatttttatactgttttcaaaatcaagagtgtatgttaggcctttgggacatcaagtgctcaatagtcacatgtggctagtggctaccatattagacagcactagtctagagtactttttattttaagcaaagtgacacttgaagttctatgcttagatttaagtggcctcagttttcacattgaggagctggtgggaggccacaaagaaagtgtttcagaaatgttacacactgagtaaaagcttattgaccactcctgcccattcatttacttcagaggagaaatgattcctaacatgacttcaaagaacgggcattactaaattatctactgaccaatccctctgattcctgatgggccctggagtcttgactacagcctagagtctcctgagtactgccatgatgccaatagcattcttgcttaccaaaatctactctcagccaactatgtgtcttcattcaggaagaactgcacatagaatctgattttgaggcctggattaagcttcatgccatccttgtatcacaggcaatatgtctttctggaaatctaatgaaccataccaaatctgcatgatgaagattgtgtaatgatggtgatatcatgccagttatcctcaaagtgggaatatgaccattagctggcattttttaagatttccttagaagggtttaatcaacactgccattacacatggatttaacaaaagacttttgaaaattttttacatactgattttagaataatcctcaaggttctatagtcatttttagtggaagacttaaaaagaaaggaacaatttttactgtgacttcaatttcatagtattttaaacatattttgtaattcagaatgtttagcaatccctatgtcctgtttcacatgcatggtaactgatggtgggttgcctacaggctgaagatttggagagagccattttgtttcataaatcagtttttattgcacagaagcagctggttgtatttcaagttggaaaaagaaaagtaaatgccagaaaaggcaaaggataaacttagtaagccatttattttgttttagaattgtttttgcaaagcaaatttttttaaaaaaaggtcaacaaagtgaatcagcactagcattttcttgatggttgactcaatgtataattaacaaatatacatagcagagtcaattaatcatagtgccattatgtcacttatttgtcattgcaaagtattcagtcatgttgtctagatttactttagatggtgcaaaatttccagatagtaacctatgtaaaaggatttgtaatttccttgtaattcctgcctattagtccatattctgatttccttatgttcatcactgatatgttcctgatcagggtcattgctagtagttgagcatttactggttgaacattgtttaatggttagatgttatgtgtgtctgcatttaaaaaaattgtgtacatgttatttcactattggtattacaatattcataaccacatgataaacagaaatgtacccaataatttcctataaaatttttcaaagtccttttattcccctgacacactcagggtgaatttttgtctccttggcaaataagaaaaaaaaggagagagaccactggagagatatcagcaaaccacccacagtaaccaagttcagtatttcctctttctatattttgaccaatatattaagagcaaattttgtcattattactccttgtggctattacctgagatcagataatataatctcagctcataaagcttggccatgtctatacttatcttggagagcaataacaaacttgattaa

SEQ ID NO: 2773 - protein, 164 aa, Homo sapiens [sequence omitted]

SEQ ID NO: 2774 - DNA, 5554 bp, Homo sapiens
catttcaagctctccagcatccgtgggtcacaggtaaagcagccaattttgtacacatggataccgctcaaaagaagctccaagaattcaatgcccggcgtaagcttaaggcagcggtgaaggctgtggtggcctcttcgcgcctgggaagtgccagcagcagccatggcagcatccaggagagccacaaggctagccgagacccttctccaatccaagatggcaacgaggacatgaaagctattccagaaggagagaaaattcaaggcgatggggcccaagccgcagttaagggggcacaggctgagctgatgaaggtgcaagccttagagaaagttaaaggtgcagatataaatgctgaagaggcccccaaaatggtgcccaaggcagtggaggatgggataaaggtggctgacctggaactagaggagggcctagcagaggagaagctgaagactgtggaggaggcagcagctcccagagaagggcaaggaagctctgctgtgggttttgaagttccacagcaagatgtgatcctgccagagtactaaacagcttccttcagatctggaagccaaacaccggcattttatgtactttgtccttcagcaagaaaggtgtggaagcatgatatgtactatagtgattctgtttttgaggtgcaaaaaacatacatatataccagttggtaattctaacttcaatgcatgtgactgctttatgaaaataatagtgtcttctatggcatgtaatggatacctaataccgatgagttaaatcttgcaagttaacacaacgtaacacttaaaagcatacattttcagcaaccagtggcacatatttgaagtgaatagtagcaaattgtttttgctttgaaaatctagccatcctacatcctttggatttcttcacaaggcagtaattcctttgaactactgcttagctaatactaggtagtgctaaaagacatgttcccataacttttacaacattttactttttatcattgatgtgttcaaactgtttacaaggagatgcttatagatgatagttgtacatatgtgcaaaaaaaaatccacttgcaatggtaagaaattgaagtatccttaaaggccatgaagccatatgtccctaaagcctgtgtggagaatgctttattttattcttatttatatacactatattaataataaccaaaatgttctaagattctgccattttacaaccctggaggaagtaatttacaaactcacgctgagttccattctttccttcacctgctctccaataagatgactttctgatagacaaagcttagggtgtaataaacagggaagaaaagaaggtaagactgtacttaaactgatgaagataagattgattccttttcattttccagataaaattgtatttactcatgaatttatacaactttacagataagaacattttaatggataaactctataattaccaagttgcaaatatttagaaaattctatttcacaggttagtgccaaaatgtcttcatagagtaggaataatattccattttaagattattcattattgactttaatagagtaagaaaacattattgtttatcaaagctctttttttatccaattgatggttatctacacatatcacttataaactaaagttatttatgaaaagctagtatgtctttttctcgtatttggaatgaaagtacccacattttacaatgtagtgttgagaatgtggctgccaataaatttagcacaatgcaatttatttaccttaaaaaacaaacaaaaacaaaaataaagaaaaatactgatttcaaatcagactcttaaaaagctggaacattagacctgatattttattatgatttttcccagaataagtttaatttctctttgactttcatagaaacactttccccttatagaaattgcactatctccaatttatttctagtttgagttgaaatgaatattttatcagattaattatgtgtcacatttttggtgggttttctcaattttaaaaaagaattcattttaaaaaataattattttcagagaccaaataaagacaataaaaatgactatcacataaaaatccttgttaaaaaagagatcttaaattatgttggctctccctcaaaactattaaattagaaaacgaaactaaagctccagtttgtagaggctgttggacctcagtagacattcttcttttcaatcacaaatctctctctactactgttctcatgggaagaaaacaaggtaggacttcttatctttcatagtttaagaatctgacaggtcactgatatggagcccctgaagaagcacatcatctgggctcagaagattattttttgttttgttttatttgtactatctagtagagagcacttttcttattccctctttccttccttcctcatttaattattccctctcagaattcccatgttgtccattataaggggctcgctatttttaacctttaagaatgtcttctttgttaagcattaagatttccatttaagaggatcaatttcctgttgtactttttaccatgagactgaaacacacacacacacacacacacacacacacacacacacacacgtgttggaagagcaaagagagggaagggggtctttttagaaagtggcacttggcgcttagctgaaagatcagaacacatcattcctccctgcccacccccatattgttccaagggcagttgttacattatttcaacactagagtagggcggactgcattgtttggccctgagaactatagaaacaacgttgcaaataccatgcccaatgtgtattttagaatttactcatttaaatgagtgcatattaccattcctccatgtgagtactcgagttgataattccctctatctttttaaacccataaactacatttttaaaaaaatcaatgggagttttaaattttgactcatgttaaagataagattctgataatgactatatagtgactaatttcattgtttcagtaggaaacaaatcaaactttcaaaaatgttggtcatttcagtcaaattattcaaagatttcatatacatacatcctaagttaggataattatgttaacatttttgaaagaacagccaatgtttatattgcttgttaaaatggaatgtattgtctatctcaaagattacttagctaaataatagtagacaaatggagatttaatttcacaaaatacttcataacatcactcctaattggcaatatagtcacaaagcaaaagaattcaaatttcagcaaacaataaattacattttacattttagagctaacacttatcacattacattatgggtttttattttgagataagttcagctacatagcataaactaggtttttttttataaccatgaaggacagtcttgaattatttcccccattaacaaagtctaattggaatccagtattttttctcaaactgtaatttcacttgtcccaggacacataaataggtaaaaattagaataatatcgtggtagaagttaattgtccagaacaagtgcattatataaatataatgcaagcacatgtcatttaagattttctattagtcacattttaagaaaaatagatgaaagtatagtatttttaatccaattcatccaaattattctatcgatatatagtcaatattaaaatttaatgtgatattttgaattctttatttttatactgttttcaaaatcaagagtgtatgttaggcctttgggacatcaagtgctcaatagtcacatgtggctagtggctaccatattagacagcactagtctagagtactttttattttaagcaaagtgacacttgaagttctatgcttagatttaagtggcctcagttttcacattgaggagctggtgggaggccacaaagaaagtgtttcagaaatgttacacactgagtaaaagcttattgaccactcctgcccattcatttacttcagaggagaaatgattcctaacatgacttcaaagaacgggcattactaaattatctactgaccaatccctctgattcctgatgggccctggagtcttgactacagcctagagtctcctgagtactgccatgatgccaatagcattcttgcttaccaaaatctactctcagccaactatgtgtcttcattcaggaagaactgcacatagaatctgattttgaggcctggattaagcttcatgccatccttgtatcacaggcaatatgtctttctggaaatctaatgaaccataccaaatctgcatgatgaagattgtgtaatgatggtgatatcatgccagttatcctcaaagtgggaatatgaccattagctggcattttttaagatttccttagaagggtttaatcaacactgccattacacatggatttaacaaaagacttttgaaaattttttacatactgattttagaataatcctcaaggttctatagtcatttttagtggaagacttaaaaagaaaggaacaatttttactgtgacttcaatttcatagtattttaaacatattttgtaattcagaatgtttagcaatccctatgtcctgtttcacatgcatggtaactgatggtgggttgcctacaggctgaagatttggagagagccattttgtttcataaatcagtttttattgcacagaagcagctggttgtatttcaagttggaaaaagaaaagtaaatgccagaaaaggcaaaggataaacttagtaagccatttattttgttttagaattgtttttgcaaagcaaatttttttaaaaaaaggtcaacaaagtgaatcagcactagcattttcttgatggttgactcaatgtataattaacaaatatacatagcagagtcaattaatcatagtgccattatgtcacttatttgtcattgcaaagtattcagtcatgttgtctagatttactttagatggtgcaaaatttccagatagtaacctatgtaaaaggatttgtaatttccttgtaattcctgcctattagtccatattctgatttccttatgttcatcactgatatgttcctgatcagggtcattgctagtagttgagcatttactggttgaacattgtttaatggttagatgttatgtgtgtctgcatttaaaaaaattgtgtacatgttatttcactattggtattacaatattcataaccacatgataaacagaaatgtacccaataatttcctataaaatttttcaaagtccttttattcccctgacacactcagggtgaatttttgtctccttggcaaataagaaaaaaaaggagagagaccactggagagatatcagcaaaccacccacagtaaccaagttcagtatttcctctttctatattttgaccaatatattaagagcaaattttgtcattattactccttgtggctattacctgagatcagataatataatctcagctcataaagcttggccatgtctatacttatcttggagagcaataacaaacttgattaa

SEQ ID NO: 2775 - protein, 164 aa, Homo sapiens [sequence omitted]

SEQ ID NO: 2776 - DNA, 460 bp, Homo sapiens
ttttggtggtttcttaaatgatttattatcgtattctacatgccaactgctttacatttcccagcagcaagatataggcttctttgggcatgttctgacatgtctgtctgagtgaacttacaccaagtaacattggccctcaggtcaaatttctacaattagtcttccaacacccattttttataatgtcacgtactcttcaagttcctagaaaacaccccccaaccccccccaaaatttacatatttaattactgaattgggttatccaacctgaatccaagaagaagccacagctctcatgtggtctgcctcaggctttgggcagctgagacagcccatgactgttgtgtcccatgatttttgtaacctcacagtaattctacttctcttccatcattcaaatgacagtcaatcttgctccctatcttccttcatttgtcttcaggaataatgccgcc

SEQ ID NO: 2777 - protein, 50 aa, Homo sapiens
MWSASGFGQLRQPMTVVSHDFCNLTVILLLFHHSNDSQSCSLSSFICLQE

SEQ ID NO: 2778 - DNA, 4497 bp, Homo sapiens
gacttacaagttggctgctgtcgcctgcgcatcggcgggccgggaggctgagcagtactgttgagagcggtgtgaggtgcttggtagcgcgccgtagctgcttccacgtccttgcttcacctcaggtaaagaaagatgtaactgtttggagaaaaccctcagaagaatttaatggatatctctacaaagcccaaggtgttatagatgaccttgtctatagtataatagaccatatacgcccagggccttgtcgtttggattgggacagcttgatgacttctttggatattctggagaactttgaagagaattgctgtgtgatgcgttacactactgctggtcagctttggaatataatttccccaagagaatttgttgatttctcctatactgtgggctataaagaagggcttttatcttgtggaataagtcttgactgggatgaaaagagaccagaatttgttcgaggatataaccatccctgtggttggttttgtgttccacttaaagacaacccaaaccagagtcttttgacaggatatattcagacagatctgcgtgggatgattcctcagtctgcggtagatacagccatggcaagcactttaaccaacttctatggtgatttacgaaaagctttatgagaggcaaaatacattcaaacttgtagtactacagatcaactctctcagctacatggcctgtaaaaatcattgattccacttttctgcatagccggtagaaaaatttgaaatgtttttggttcactagtacaatgtttggttttattcctaaagtaaatagctatctaagagagggcattttcacttttttttttttaaattttgagacaggctctcactctgttgcccatgctggagggcagtggtatgatcacagctcactgcagctttgatctgaccgctcaaggggttattctacctcagcctcctgaatagctgggaatacaggtgcacgccactatgcatggctaatttttgtttaattttttgtagagatgtggtcacactgtgttgcccaggctggtcttgaactcctggcctcaagtcattccccaccttagcctcccaaagtgttgggattataagcgtgagccaccatgcctggccccaatttaaaatgtggaattcagttggtgtccaagacttatcttgagactcttaaaagcatcagtctgtaactagaacaaatacagtcttagatttacccaagtgcctagatatcattttataatgattagaattgagtattgtgggtcccctaattctgtgggtgccttaagtgagaatttctaaatgattttcacattctaaatgactttgggttttgaactctccatctagtttacttctaaaatgggaacttgaggcaattcaggtatccaggcaaatctttgtatatatttttttgtgtacatgcacacatctcgaaatccatttccgtgtttaatgttagttgtttatgtgttagtattcctgtgtctactgttttgttgttgttaatatgggtaaagtgagccctgaaatacatgctaaacaagacatgaaatgcagaaaggtacatagtgtttcaagtgcatggtagtttgatctgtgttttactttattgtgttttcttgagtgtaaagaaagaataaatcaaagttcttcatacccattttgacaaagtggaacagtggagctgttttttgcttttgtttttatttattttttgccactggtgatgatagatttcaaaaaacaaaaggtggcagcagcacaatgttcatggtgaattatctcatagtatctagattgatcaagatctgacagaaggaatgcacaaaggattctatattcttaatgatttattaattaccaggatccttttctaaattgaatgtacttttgaattactaggtttcttctttttttttgttctgcaatagtgaaagaaaactcagtagtttagtttcagtttctcatggaaattggtaaatgttagttttgacttcatctattttttatttgtttttattagcgtagagtaggaagtctcatattctactgttctatctaggatggtgaaattccaaaggtgcctaacttgagtaagggatttgtgacaagatagtacacattactataagggctattatttcctgaactggatgtccctaaaagcaaataaactgcccactatctctactctagtgctctctttgtccttatcaacatatacctccaataagtaattacataattcaccgttaaacatggacccactctaggtaaaattaccctcatggaaacattttcactgtgagaatgatgaatttaaaaattatgtttgaatcacctaaaatgtatgtgcagcttctagatggccccttagatctgctgggctctagctgtgtactttaaaaaaacaaaaacagctttattgatatataatttacatattatgtaatttacccacttttaagtatctaattcagtgatgttttaatacatatgtagaactatgcagccatcagcacaatctggatttagaacgtttccatcattccaaaagattccttttgtcttttttgcagactcatacctaacacaaatctaaagtttatcactgttgccaggataattacagcaggttatgtttggtttcatttttaagagtggaggtgttcatgattctaagctcaggaatcttgtgatcatgtattaaatatgttatctcatactataatgataaaaaagcttaatgatgtgggttgggatggatattaacataaataattgagtccgctgcttctatagcaatgctgtaggatagaacaataatgtaagtgatatatgtaattaaaaaattctagaagccacattaaaaaataaaaataaacagctgaagttaattttaatattttatttaactcaatacatccaaaatgttatcattttaacatgtaattgatgtaaagatttattctgatagtttgtactatttcttgtactaattttttgaaatctggtatgcattttacaaatttgggcaagccacattttaagtgctcattagccacatgaggccagtggatactgtattgaatagcacagtcctatagcatatttattaatttgtcttgtagtaagatgaaatagacaataatacggaataatatcttaaatggaaatctttgttagtctctagagccttcattgcttgataaataggacatctaaactttagatataaatcagttgtcaatgagataaaattattgccagcaaatattttccttcaaagataagtaacttttgatatggcagttggtgaaatgaaagaatataatctgccttcttgttaaatggttgactattctgtagcttgtaggtagtacgtattagaaacttgtgtatgtgggaaatatttggcataatactgttttcagtatatagtagctattttttaaggaaattagtttcatacaagaaaaagattattataaaagtgatacttttgcatgaaatattagtttgtgttgataactcttagttaacccttaaagtttaaaacagtactcaaaaaaaaataatgagaatctagtattctgtagttaactaatctataagataaattgctaaagtactagggagcttgtaaatcttaaaaatctttttatttcagtgttcattcaggttggatatatttgaaattgtagatttctatctgtacaacatctcctagttaatagaatttttttccttcccctcccttctctctcctcctccttttctaaccaaagggcattttatcaacaatcatgctgaattcaattaatatctcaagctaaaaaactatgtaattgaggttgtatctggagaagatgggaaaacattgtataatttaagcccttaattgtctgttgagcttttagggctgagtaattgcctttcatacaaataaaagctttaactcttttctcaagagtgtaccaccgtccttagaatcaggtgttttaaatccagtttcttttaattaaatgggactgtagtgatccctaccctgtagagaaatcaacagaactagagaagctaagggcttgatcaggtttcccctagaacctgtgttgcctgcctgctgtatcttccatgtctttcttattcaacttctagaagtagagaaggttgggacttgagtgtagaagaaacatcagaataatttcaaaaaacaggaagttggaactataatttttaaattattgtattgtttttacggattttacatgtatagttaaatattaaaattcatctcttgcagttcaataaaagctatagtatagattttatttttaagaagtttatataattcttttgtgaaccaatatgtaaaactagaatatttattaaactaataatatgtattagtatcaataaaatatgtatttatttttaaattggtatgaaacaaaataaaaatttgtagacactcttaaaa

SEQ ID NO: 2779 - protein, 123 aa, Homo sapiens
MTSLDILENFEENCCVMRYTTAGQLWNIISPREFVDFSYTVGYKEGLLSCGISLDWDEKRPEFVRGYNHPCGWFCVPLKDNPNQSLLTGYIQTDLRGMIPQSAVDTAMASTLTNFYGDLRKAL

SEQ ID NO: 2780 - DNA, 4504 bp, Homo sapiens
agttggctgcgaccagcggtgacttacaagttggctgctgtcgcctgcgcatcggcgggccgggaggctgagcagtactgttgagagcggtgtgaggtgcttggtagcgcgccgtagctgcttccacgtccttgcttcacctcaggtaaagagagaagtaatggaaggcctgtctgatgttgcttcttttgcaactaaacttaaaaacactctcatccagtaccatagcattgaagaagataagtggcgagttgctaagaaaacgaaagatgtaactgtttggagaaaaccctcagaagaatttaatggatatctaattgctgtgtgatgcgttacactactgctggtcagctttggaatataatttccccaagagaatttgttgatttctcctatactgtgggctataaagaagggcttttatcttgtggaataagtcttgactgggatgaaaagagaccagaatttgttcgaggatataaccatccctgtggttggttttgtgttccacttaaagacaacccaaaccagagtcttttgacaggatatattcagacagatctgcgtgggatgattcctcagtctgcggtagatacagccatggcaagcactttaaccaacttctatggtgatttacgaaaagctttatgagaggcaaaatacattcaaacttgtagtactacagatcaactctctcagctacatggcctgtaaaaatcattgattccacttttctgcatagccggtagaaaaatttgaaatgtttttggttcactagtacaatgtttggttttattcctaaagtaaatagctatctaagagagggcattttcacttttttttttttaaattttgagacaggctctcactctgttgcccatgctggagggcagtggtatgatcacagctcactgcagctttgatctgaccgctcaaggggttattctacctcagcctcctgaatagctgggaatacaggtgcacgccactatgcatggctaatttttgtttaattttttgtagagatgtggtcacactgtgttgcccaggctggtcttgaactcctggcctcaagtcattccccaccttagcctcccaaagtgttgggattataagcgtgagccaccatgcctggccccaatttaaaatgtggaattcagttggtgtccaagacttatcttgagactcttaaaagcatcagtctgtaactagaacaaatacagtcttagatttacccaagtgcctagatatcattttataatgattagaattgagtattgtgggtcccctaattctgtgggtgccttaagtgagaatttctaaatgattttcacattctaaatgactttgggttttgaactctccatctagtttacttctaaaatgggaacttgaggcaattcaggtatccaggcaaatctttgtatatatttttttgtgtacatgcacacatctcgaaatccatttccgtgtttaatgttagttgtttatgtgttagtattcctgtgtctactgttttgttgttgttaatatgggtaaagtgagccctgaaatacatgctaaacaagacatgaaatgcagaaaggtacatagtgtttcaagtgcatggtagtttgatctgtgttttactttattgtgttttcttgagtgtaaagaaagaataaatcaaagttcttcatacccattttgacaaagtggaacagtggagctgttttttgcttttgtttttatttattttttgccactggtgatgatagatttcaaaaaacaaaaggtggcagcagcacaatgttcatggtgaattatctcatagtatctagattgatcaagatctgacagaaggaatgcacaaaggattctatattcttaatgatttattaattaccaggatccttttctaaattgaatgtacttttgaattactaggtttcttctttttttttgttctgcaatagtgaaagaaaactcagtagtttagtttcagtttctcatggaaattggtaaatgttagttttgacttcatctattttttatttgtttttattagcgtagagtaggaagtctcatattctactgttctatctaggatggtgaaattccaaaggtgcctaacttgagtaagggatttgtgacaagatagtacacattactataagggctattatttcctgaactggatgtccctaaaagcaaataaactgcccactatctctactctagtgctctctttgtccttatcaacatatacctccaataagtaattacataattcaccgttaaacatggacccactctaggtaaaattaccctcatggaaacattttcactgtgagaatgatgaatttaaaaattatgtttgaatcacctaaaatgtatgtgcagcttctagatggccccttagatctgctgggctctagctgtgtactttaaaaaaacaaaaacagctttattgatatataatttacatattatgtaatttacccacttttaagtatctaattcagtgatgttttaatacatatgtagaactatgcagccatcagcacaatctggatttagaacgtttccatcattccaaaagattccttttgtcttttttgcagactcatacctaacacaaatctaaagtttatcactgttgccaggataattacagcaggttatgtttggtttcatttttaagagtggaggtgttcatgattctaagctcaggaatcttgtgatcatgtattaaatatgttatctcatactataatgataaaaaagcttaatgatgtgggttgggatggatattaacataaataattgagtccgctgcttctatagcaatgctgtaggatagaacaataatgtaagtgatatatgtaattaaaaaattctagaagccacattaaaaaataaaaataaacagctgaagttaattttaatattttatttaactcaatacatccaaaatgttatcattttaacatgtaattgatgtaaagatttattctgatagtttgtactatttcttgtactaattttttgaaatctggtatgcattttacaaatttgggcaagccacattttaagtgctcattagccacatgaggccagtggatactgtattgaatagcacagtcctatagcatatttattaatttgtcttgtagtaagatgaaatagacaataatacggaataatatcttaaatggaaatctttgttagtctctagagccttcattgcttgataaataggacatctaaactttagatataaatcagttgtcaatgagataaaattattgccagcaaatattttccttcaaagataagtaacttttgatatggcagttggtgaaatgaaagaatataatctgccttcttgttaaatggttgactattctgtagcttgtaggtagtacgtattagaaacttgtgtatgtgggaaatatttggcataatactgttttcagtatatagtagctattttttaaggaaattagtttcatacaagaaaaagattattataaaagtgatacttttgcatgaaatattagtttgtgttgataactcttagttaacccttaaagtttaaaacagtactcaaaaaaaaataatgagaatctagtattctgtagttaactaatctataagataaattgctaaagtactagggagcttgtaaatcttaaaaatctttttatttcagtgttcattcaggttggatatatttgaaattgtagatttctatctgtacaacatctcctagttaatagaatttttttccttcccctcccttctctctcctcctccttttctaaccaaagggcattttatcaacaatcatgctgaattcaattaatatctcaagctaaaaaactatgtaattgaggttgtatctggagaagatgggaaaacattgtataatttaagcccttaattgtctgttgagcttttagggctgagtaattgcctttcatacaaataaaagctttaactcttttctcaagagtgtaccaccgtccttagaatcaggtgttttaaatccagtttcttttaattaaatgggactgtagtgatccctaccctgtagagaaatcaacagaactagagaagctaagggcttgatcaggtttcccctagaacctgtgttgcctgcctgctgtatcttccatgtctttcttattcaacttctagaagtagagaaggttgggacttgagtgtagaagaaacatcagaataatttcaaaaaacaggaagttggaactataatttttaaattattgtattgtttttacggattttacatgtatagttaaatattaaaattcatctcttgcagttcaataaaagctatagtatagattttatttttaagaagtttatataattcttttgtgaaccaatatgtaaaactagaatatttattaaactaataatatgtattagtatcaataaaatatgtatttatttttaaattggtatgaaacaaaataaaaatttgtagacactcttaaaa

SEQ ID NO: 2781 - protein, 107 aa, Homo sapiens
MRYTTAGQLWNIISPREFVDFSYTVGYKEGLLSCGISLDWDEKRPEFVRGYNHPCGWFCVPLKDNPNQSLLTGYIQTDLRGMIPQSAVDTAMASTLTNFYGDLRKAL

SEQ ID NO: 2782 - DNA, 4420 bp, Homo sapiens
agttggctgcgaccagcggtgacttacaagttggctgctgtcgcctgcgcatcggcgggccgggaggctgagcagtactgttgagagcggtgtgaggtgcttggtagcgcgccgtagctgcttccacgtccttgcttcacctcaggtaaagagagaagtaatggaaggcctgtctgatgttgcttcttttgcaactaaacttaaaaacactctcatccagtaccatagcattgaagaagataagtggcgagttgctaagaaaacgaaagatgtaactgtttggagaaaaccctcagaagaatttaatggatatctaattgctgtgtgatgcgttacactactgctggaataagtcttgactgggatgaaaagagaccagaatttgttcgaggatataaccatccctgtggttggttttgtgttccacttaaagacaacccaaaccagagtcttttgacaggatatattcagacagatctgcgtgggatgattcctcagtctgcggtagatacagccatggcaagcactttaaccaacttctatggtgatttacgaaaagctttatgagaggcaaaatacattcaaacttgtagtactacagatcaactctctcagctacatggcctgtaaaaatcattgattccacttttctgcatagccggtagaaaaatttgaaatgtttttggttcactagtacaatgtttggttttattcctaaagtaaatagctatctaagagagggcattttcacttttttttttttaaattttgagacaggctctcactctgttgcccatgctggagggcagtggtatgatcacagctcactgcagctttgatctgaccgctcaaggggttattctacctcagcctcctgaatagctgggaatacaggtgcacgccactatgcatggctaatttttgtttaattttttgtagagatgtggtcacactgtgttgcccaggctggtcttgaactcctggcctcaagtcattccccaccttagcctcccaaagtgttgggattataagcgtgagccaccatgcctggccccaatttaaaatgtggaattcagttggtgtccaagacttatcttgagactcttaaaagcatcagtctgtaactagaacaaatacagtcttagatttacccaagtgcctagatatcattttataatgattagaattgagtattgtgggtcccctaattctgtgggtgccttaagtgagaatttctaaatgattttcacattctaaatgactttgggttttgaactctccatctagtttacttctaaaatgggaacttgaggcaattcaggtatccaggcaaatctttgtatatatttttttgtgtacatgcacacatctcgaaatccatttccgtgtttaatgttagttgtttatgtgttagtattcctgtgtctactgttttgttgttgttaatatgggtaaagtgagccctgaaatacatgctaaacaagacatgaaatgcagaaaggtacatagtgtttcaagtgcatggtagtttgatctgtgttttactttattgtgttttcttgagtgtaaagaaagaataaatcaaagttcttcatacccattttgacaaagtggaacagtggagctgttttttgcttttgtttttatttattttttgccactggtgatgatagatttcaaaaaacaaaaggtggcagcagcacaatgttcatggtgaattatctcatagtatctagattgatcaagatctgacagaaggaatgcacaaaggattctatattcttaatgatttattaattaccaggatccttttctaaattgaatgtacttttgaattactaggtttcttctttttttttgttctgcaatagtgaaagaaaactcagtagtttagtttcagtttctcatggaaattggtaaatgttagttttgacttcatctattttttatttgtttttattagcgtagagtaggaagtctcatattctactgttctatctaggatggtgaaattccaaaggtgcctaacttgagtaagggatttgtgacaagatagtacacattactataagggctattatttcctgaactggatgtccctaaaagcaaataaactgcccactatctctactctagtgctctctttgtccttatcaacatatacctccaataagtaattacataattcaccgttaaacatggacccactctaggtaaaattaccctcatggaaacattttcactgtgagaatgatgaatttaaaaattatgtttgaatcacctaaaatgtatgtgcagcttctagatggccccttagatctgctgggctctagctgtgtactttaaaaaaacaaaaacagctttattgatatataatttacatattatgtaatttacccacttttaagtatctaattcagtgatgttttaatacatatgtagaactatgcagccatcagcacaatctggatttagaacgtttccatcattccaaaagattccttttgtcttttttgcagactcatacctaacacaaatctaaagtttatcactgttgccaggataattacagcaggttatgtttggtttcatttttaagagtggaggtgttcatgattctaagctcaggaatcttgtgatcatgtattaaatatgttatctcatactataatgataaaaaagcttaatgatgtgggttgggatggatattaacataaataattgagtccgctgcttctatagcaatgctgtaggatagaacaataatgtaagtgatatatgtaattaaaaaattctagaagccacattaaaaaataaaaataaacagctgaagttaattttaatattttatttaactcaatacatccaaaatgttatcattttaacatgtaattgatgtaaagatttattctgatagtttgtactatttcttgtactaattttttgaaatctggtatgcattttacaaatttgggcaagccacattttaagtgctcattagccacatgaggccagtggatactgtattgaatagcacagtcctatagcatatttattaatttgtcttgtagtaagatgaaatagacaataatacggaataatatcttaaatggaaatctttgttagtctctagagccttcattgcttgataaataggacatctaaactttagatataaatcagttgtcaatgagataaaattattgccagcaaatattttccttcaaagataagtaacttttgatatggcagttggtgaaatgaaagaatataatctgccttcttgttaaatggttgactattctgtagcttgtaggtagtacgtattagaaacttgtgtatgtgggaaatatttggcataatactgttttcagtatatagtagctattttttaaggaaattagtttcatacaagaaaaagattattataaaagtgatacttttgcatgaaatattagtttgtgttgataactcttagttaacccttaaagtttaaaacagtactcaaaaaaaaataatgagaatctagtattctgtagttaactaatctataagataaattgctaaagtactagggagcttgtaaatcttaaaaatctttttatttcagtgttcattcaggttggatatatttgaaattgtagatttctatctgtacaacatctcctagttaatagaatttttttccttcccctcccttctctctcctcctccttttctaaccaaagggcattttatcaacaatcatgctgaattcaattaatatctcaagctaaaaaactatgtaattgaggttgtatctggagaagatgggaaaacattgtataatttaagcccttaattgtctgttgagcttttagggctgagtaattgcctttcatacaaataaaagctttaactcttttctcaagagtgtaccaccgtccttagaatcaggtgttttaaatccagtttcttttaattaaatgggactgtagtgatccctaccctgtagagaaatcaacagaactagagaagctaagggcttgatcaggtttcccctagaacctgtgttgcctgcctgctgtatcttccatgtctttcttattcaacttctagaagtagagaaggttgggacttgagtgtagaagaaacatcagaataatttcaaaaaacaggaagttggaactataatttttaaattattgtattgtttttacggattttacatgtatagttaaatattaaaattcatctcttgcagttcaataaaagctatagtatagattttatttttaagaagtttatataattcttttgtgaaccaatatgtaaaactagaatatttattaaactaataatatgtattagtatcaataaaatatgtatttatttttaaattggtatgaaacaaaataaaaatttgtagacactcttaaaa

SEQ ID NO: 2783 - protein, 79 aa, Homo sapiens
MRYTTAGISLDWDEKRPEFVRGYNHPCGWFCVPLKDNPNQSLLTGYIQTDLRGMIPQSAVDTAMASTLTNFYGDLRKAL

SEQ ID NO: 2784 - DNA, 4390 bp, Homo sapiens
agttggctgcgaccagcggtgacttacaagttggctgctgtcgcctgcgcatcggcgggccgggaggctgagcagtactgttgagagcggtgtgaggtgcttggtagcgcgccgtagctgcttccacgtccttgcttcacctcaggtaaagaaagatgtaactgtttggagaaaaccctcagaagaatttaatggatatctaattgctgtgtgatgcgttacactactgctggtcagctttggaatataatttccccaagagaatttgttgatttctcctatactgtgggctataaagaagggcttttatcttgtggaataagtcttgactgggatgaaaagagaccagaatttgttcgaggatataaccatccctgtggttggttttgtgttccacttaaagacaacccaaaccagagtcttttgacaggatatattcagacagatctgcgtgggatgattcctcagtctgcggtagatacagccatggcaagcactttaaccaacttctatggtgatttacgaaaagctttatgagaggcaaaatacattcaaacttgtagtactacagatcaactctctcagctacatggcctgtaaaaatcattgattccacttttctgcatagccggtagaaaaatttgaaatgtttttggttcactagtacaatgtttggttttattcctaaagtaaatagctatctaagagagggcattttcacttttttttttttaaattttgagacaggctctcactctgttgcccatgctggagggcagtggtatgatcacagctcactgcagctttgatctgaccgctcaaggggttattctacctcagcctcctgaatagctgggaatacaggtgcacgccactatgcatggctaatttttgtttaattttttgtagagatgtggtcacactgtgttgcccaggctggtcttgaactcctggcctcaagtcattccccaccttagcctcccaaagtgttgggattataagcgtgagccaccatgcctggccccaatttaaaatgtggaattcagttggtgtccaagacttatcttgagactcttaaaagcatcagtctgtaactagaacaaatacagtcttagatttacccaagtgcctagatatcattttataatgattagaattgagtattgtgggtcccctaattctgtgggtgccttaagtgagaatttctaaatgattttcacattctaaatgactttgggttttgaactctccatctagtttacttctaaaatgggaacttgaggcaattcaggtatccaggcaaatctttgtatatatttttttgtgtacatgcacacatctcgaaatccatttccgtgtttaatgttagttgtttatgtgttagtattcctgtgtctactgttttgttgttgttaatatgggtaaagtgagccctgaaatacatgctaaacaagacatgaaatgcagaaaggtacatagtgtttcaagtgcatggtagtttgatctgtgttttactttattgtgttttcttgagtgtaaagaaagaataaatcaaagttcttcatacccattttgacaaagtggaacagtggagctgttttttgcttttgtttttatttattttttgccactggtgatgatagatttcaaaaaacaaaaggtggcagcagcacaatgttcatggtgaattatctcatagtatctagattgatcaagatctgacagaaggaatgcacaaaggattctatattcttaatgatttattaattaccaggatccttttctaaattgaatgtacttttgaattactaggtttcttctttttttttgttctgcaatagtgaaagaaaactcagtagtttagtttcagtttctcatggaaattggtaaatgttagttttgacttcatctattttttatttgtttttattagcgtagagtaggaagtctcatattctactgttctatctaggatggtgaaattccaaaggtgcctaacttgagtaagggatttgtgacaagatagtacacattactataagggctattatttcctgaactggatgtccctaaaagcaaataaactgcccactatctctactctagtgctctctttgtccttatcaacatatacctccaataagtaattacataattcaccgttaaacatggacccactctaggtaaaattaccctcatggaaacattttcactgtgagaatgatgaatttaaaaattatgtttgaatcacctaaaatgtatgtgcagcttctagatggccccttagatctgctgggctctagctgtgtactttaaaaaaacaaaaacagctttattgatatataatttacatattatgtaatttacccacttttaagtatctaattcagtgatgttttaatacatatgtagaactatgcagccatcagcacaatctggatttagaacgtttccatcattccaaaagattccttttgtcttttttgcagactcatacctaacacaaatctaaagtttatcactgttgccaggataattacagcaggttatgtttggtttcatttttaagagtggaggtgttcatgattctaagctcaggaatcttgtgatcatgtattaaatatgttatctcatactataatgataaaaaagcttaatgatgtgggttgggatggatattaacataaataattgagtccgctgcttctatagcaatgctgtaggatagaacaataatgtaagtgatatatgtaattaaaaaattctagaagccacattaaaaaataaaaataaacagctgaagttaattttaatattttatttaactcaatacatccaaaatgttatcattttaacatgtaattgatgtaaagatttattctgatagtttgtactatttcttgtactaattttttgaaatctggtatgcattttacaaatttgggcaagccacattttaagtgctcattagccacatgaggccagtggatactgtattgaatagcacagtcctatagcatatttattaatttgtcttgtagtaagatgaaatagacaataatacggaataatatcttaaatggaaatctttgttagtctctagagccttcattgcttgataaataggacatctaaactttagatataaatcagttgtcaatgagataaaattattgccagcaaatattttccttcaaagataagtaacttttgatatggcagttggtgaaatgaaagaatataatctgccttcttgttaaatggttgactattctgtagcttgtaggtagtacgtattagaaacttgtgtatgtgggaaatatttggcataatactgttttcagtatatagtagctattttttaaggaaattagtttcatacaagaaaaagattattataaaagtgatacttttgcatgaaatattagtttgtgttgataactcttagttaacccttaaagtttaaaacagtactcaaaaaaaaataatgagaatctagtattctgtagttaactaatctataagataaattgctaaagtactagggagcttgtaaatcttaaaaatctttttatttcagtgttcattcaggttggatatatttgaaattgtagatttctatctgtacaacatctcctagttaatagaatttttttccttcccctcccttctctctcctcctccttttctaaccaaagggcattttatcaacaatcatgctgaattcaattaatatctcaagctaaaaaactatgtaattgaggttgtatctggagaagatgggaaaacattgtataatttaagcccttaattgtctgttgagcttttagggctgagtaattgcctttcatacaaataaaagctttaactcttttctcaagagtgtaccaccgtccttagaatcaggtgttttaaatccagtttcttttaattaaatgggactgtagtgatccctaccctgtagagaaatcaacagaactagagaagctaagggcttgatcaggtttcccctagaacctgtgttgcctgcctgctgtatcttccatgtctttcttattcaacttctagaagtagagaaggttgggacttgagtgtagaagaaacatcagaataatttcaaaaaacaggaagttggaactataatttttaaattattgtattgtttttacggattttacatgtatagttaaatattaaaattcatctcttgcagttcaataaaagctatagtatagattttatttttaagaagtttatataattcttttgtgaaccaatatgtaaaactagaatatttattaaactaataatatgtattagtatcaataaaatatgtatttatttttaaattggtatgaaacaaaataaaaatttgtagacactcttaaaa

SEQ ID NO: 2785 - protein, 107 aa, Homo sapiens; identical to SEQ ID NO: 2781

SEQ ID NO: 2786 - DNA, 4658 bp, Homo sapiens
cttgccctgaggcgctgggtgccttccagttggctgcgaccagcggtgacttacaagttggctgctgtcgcctgcgcatcggcgggccgggaggctgagcagtactgttgagagcggtgtgaggtgcttggtagcgcgccgtagctgcttccacgtccttgcttcacctcaggtaaagagagaagtaatggaaggcctgtctgatgttgcttcttttgcaactaaacttaaaaacactctcatccagtaccatagcattgaagaagataagtggcgagttgctaagaaaacgaaagatgtaactgtttggagaaaaccctcagaagaatttaatggatatctctacaaagcccaaggtgttatagatgaccttgtctatagtataatagaccatatacgcccagggccttgtcgtttggattgggacagcttgatgacttctttggatattctggagaactttgaagagaattgctgtgtgatgcgttacactactgctggtcagctttggaatataatttccccaagagaatttgttgatttctcctatactgtgggctataaagaagggcttttatcttgtggaataagtcttgactgggatgaaaagagaccagaatttgttcgaggatataaccatccctgtggttggttttgtgttccacttaaagacaacccaaaccagagtcttttgacaggatatattcagacagatctgcgtgggatgattcctcagtctgcggtagatacagccatggcaagcactttaaccaacttctatggtgatttacgaaaagctttatgagaggcaaaatacattcaaacttgtagtactacagatcaactctctcagctacatggcctgtaaaaatcattgattccacttttctgcatagccggtagaaaaatttgaaatgtttttggttcactagtacaatgtttggttttattcctaaagtaaatagctatctaagagagggcattttcacttttttttttttaaattttgagacaggctctcactctgttgcccatgctggagggcagtggtatgatcacagctcactgcagctttgatctgaccgctcaaggggttattctacctcagcctcctgaatagctgggaatacaggtgcacgccactatgcatggctaatttttgtttaattttttgtagagatgtggtcacactgtgttgcccaggctggtcttgaactcctggcctcaagtcattccccaccttagcctcccaaagtgttgggattataagcgtgagccaccatgcctggccccaatttaaaatgtggaattcagttggtgtccaagacttatcttgagactcttaaaagcatcagtctgtaactagaacaaatacagtcttagatttacccaagtgcctagatatcattttataatgattagaattgagtattgtgggtcccctaattctgtgggtgccttaagtgagaatttctaaatgattttcacattctaaatgactttgggttttgaactctccatctagtttacttctaaaatgggaacttgaggcaattcaggtatccaggcaaatctttgtatatatttttttgtgtacatgcacacatctcgaaatccatttccgtgtttaatgttagttgtttatgtgttagtattcctgtgtctactgttttgttgttgttaatatgggtaaagtgagccctgaaatacatgctaaacaagacatgaaatgcagaaaggtacatagtgtttcaagtgcatggtagtttgatctgtgttttactttattgtgttttcttgagtgtaaagaaagaataaatcaaagttcttcatacccattttgacaaagtggaacagtggagctgttttttgcttttgtttttatttattttttgccactggtgatgatagatttcaaaaaacaaaaggtggcagcagcacaatgttcatggtgaattatctcatagtatctagattgatcaagatctgacagaaggaatgcacaaaggattctatattcttaatgatttattaattaccaggatccttttctaaattgaatgtacttttgaattactaggtttcttctttttttttgttctgcaatagtgaaagaaaactcagtagtttagtttcagtttctcatggaaattggtaaatgttagttttgacttcatctattttttatttgtttttattagcgtagagtaggaagtctcatattctactgttctatctaggatggtgaaattccaaaggtgcctaacttgagtaagggatttgtgacaagatagtacacattactataagggctattatttcctgaactggatgtccctaaaagcaaataaactgcccactatctctactctagtgctctctttgtccttatcaacatatacctccaataagtaattacataattcaccgttaaacatggacccactctaggtaaaattaccctcatggaaacattttcactgtgagaatgatgaatttaaaaattatgtttgaatcacctaaaatgtatgtgcagcttctagatggccccttagatctgctgggctctagctgtgtactttaaaaaaacaaaaacagctttattgatatataatttacatattatgtaatttacccacttttaagtatctaattcagtgatgttttaatacatatgtagaactatgcagccatcagcacaatctggatttagaacgtttccatcattccaaaagattccttttgtcttttttgcagactcatacctaacacaaatctaaagtttatcactgttgccaggataattacagcaggttatgtttggtttcatttttaagagtggaggtgttcatgattctaagctcaggaatcttgtgatcatgtattaaatatgttatctcatactataatgataaaaaagcttaatgatgtgggttgggatggatattaacataaataattgagtccgctgcttctatagcaatgctgtaggatagaacaataatgtaagtgatatatgtaattaaaaaattctagaagccacattaaaaaataaaaataaacagctgaagttaattttaatattttatttaactcaatacatccaaaatgttatcattttaacatgtaattgatgtaaagatttattctgatagtttgtactatttcttgtactaattttttgaaatctggtatgcattttacaaatttgggcaagccacattttaagtgctcattagccacatgaggccagtggatactgtattgaatagcacagtcctatagcatatttattaatttgtcttgtagtaagatgaaatagacaataatacggaataatatcttaaatggaaatctttgttagtctctagagccttcattgcttgataaataggacatctaaactttagatataaatcagttgtcaatgagataaaattattgccagcaaatattttccttcaaagataagtaacttttgatatggcagttggtgaaatgaaagaatataatctgccttcttgttaaatggttgactattctgtagcttgtaggtagtacgtattagaaacttgtgtatgtgggaaatatttggcataatactgttttcagtatatagtagctattttttaaggaaattagtttcatacaagaaaaagattattataaaagtgatacttttgcatgaaatattagtttgtgttgataactcttagttaacccttaaagtttaaaacagtactcaaaaaaaaataatgagaatctagtattctgtagttaactaatctataagataaattgctaaagtactagggagcttgtaaatcttaaaaatctttttatttcagtgttcattcaggttggatatatttgaaattgtagatttctatctgtacaacatctcctagttaatagaatttttttccttcccctcccttctctctcctcctccttttctaaccaaagggcattttatcaacaatcatgctgaattcaattaatatctcaagctaaaaaactatgtaattgaggttgtatctggagaagatgggaaaacattgtataatttaagcccttaattgtctgttgagcttttagggctgagtaattgcctttcatacaaataaaagctttaactcttttctcaagagtgtaccaccgtccttagaatcaggtgttttaaatccagtttcttttaattaaatgggactgtagtgatccctaccctgtagagaaatcaacagaactagagaagctaagggcttgatcaggtttcccctagaacctgtgttgcctgcctgctgtatcttccatgtctttcttattcaacttctagaagtagagaaggttgggacttgagtgtagaagaaacatcagaataatttcaaaaaacaggaagttggaactataatttttaaattattgtattgtttttacggattttacatgtatagttaaatattaaaattcatctcttgcagttcaataaaagctatagtatagattttatttttaagaagtttatataattcttttgtgaaccaatatgtaaaactagaatatttattaaactaataatatgtattagtatcaataaaatatgtatttatttttaaattggtatgaaacaaaataaaaatttgtagacactcttaaaa

SEQ ID NO: 2787 - protein, 205 aa, Homo sapiens; identical to SEQ ID NO: 285

SEQ ID NO: 2788 - DNA, 1470 bp, Homo sapiens
gccagggggcggggctgggggctcggcccgccttgccctgaggcgctgggtgccttccagttggctgcgaccagcggtgacttacaagttggctgctgtcgcctgcgcatcggcgggccgggaggctgagcagtactgttgagagcggtgtgaggtgcttggtagcgcgccgtagctgcttccacgtccttgcttcacctcaggtaaagagagaagtaatggaaggcctgtctgatgttgcttcttttgcaactaaacttaaaaacactctcatccagtaccatagcattgaagaagataagtggcgagttgctaagaaaacgaaagatgtaactgtttggagaaaaccctcagaagaatttaatggatatctctacaaagcccaaggtgttatagatgaccttgtctatagtataatagaccatatacgcccagggccttgtcgtttggattgggacagcttgatgacttctttggatattctggagaactttgaagagaattgctgtgtgatgcgttacactactgctggtcagctttggaatataatttccccaagagaatttgttgatttctcctatactgtgggctataaagaagggcttttatcttgtggtaataatctcaacatgttatgctttttttcagtatggtttaaatatttgtgttttcttggctggatgtctctttccttgtgagatatattttcaactctgactctgtaatcactaacattttttgcaagtgctaaactctagggagtaaaatagcaatatcaaaagagttttgaaacccttctgataagtttttgttcccagttacacagtatcctctaggtcagaggtagcaaatgtggatcacatgactgcctctaagaaagggttctagtaaatggattttcttctaagccactctcagaaaacagtttcttggtcatacacagagaagtactagatttggtgtgtcttagaatattcttccttccttgagctgtgttgtatttttcttttcaagattaaaaatactgccattggaaggctcctgttttctaaaacgtacctataggtaaattaatattattttgtatatagtgtatacttaagttagcagttgtaagtaaacatctacttgtttattcttaactagccagtaccaaactataatatggtagtcgctgtggggaatagttacggtaccatggatttgatttttggcacctcaaggcctggatactacaaccaagatttgtagcttccaaggagtactaagatgatatgatgtcatgtattctgaaaggattaaaagtttccccattacctatctgccaacctcttgtcagaattctccttggtaagtctctttttcactctgccatggtcactttgggatttaattttcatctatatggataataataaatatttaaataagaattctggtaatattttaaaatgagagttttatgtcagt

SEQ ID NO: 2789 - protein, 159 aa, Homo sapiens
MEGLSDVASFATKLKNTLIQYHSIEEDKWRVAKKTKDVTVWRKPSEEFNGYLYKAQGVIDDLVYSIIDHIRPGPCRLDWDSLMTSLDILENFEENCCVMRYTTAGQLWNIISPREFVDFSYTVGYKEGLLSCGNNLNMLCFFSVWFKYLCFLGWMSLSL

SEQ ID NO: 2790 - DNA, 849 bp, Homo sapiens
agttggctgcgaccagcggtgacttacaagttggctgctgtcgcctgcgcatcggcgggccgggaggctgagcagtactgttgagagcggtgtgaggtgcttggtagcgcgccgtagctgcttccacgtccttgcttcacctcaggtaaagagagaagtaatggaaggcctgtctgatgttgcttcttttgcaactaaacttaaaaacactctcatccagtaccatagcattgaagaagataagtggcgagttgctaagaaaacgaaagatgtaactgtttggagaaaaccctcagaagaatttaatggatatctaattgctgtgtgatgcgttacactactgctggtcagctttggaatataatttccccaagagaatttgttgatttctcctatactgtgggctataaagaagggcttttatcttgtggtaataatctcaacatgttatgctttttttcagtatggtttaaatatttgtgttttcttggctggatgtctctttccttgtgagatatattttcaactctgactctgtaatcactaacattttttgcaagtgctaaactctagggagtaaaatagcaatatcaaaagagttttgaaacccttctgataagtttttgttcccagttacacagtatcctctaggtcagaggtagcaaatgtggatcacatgactgcctctaagaaagggttctagtaaatggattttcttctaagccactctcagaaaacagtttcttggtcatacacagagaagtactagatttggtgtgtcttagaatattcttccttccttgagctgtgttgtatttttcttttcaagattaaaaatactgccattgg

SEQ ID NO: 2791 - protein, 55 aa, Homo sapiens
MEGLSDVASFATKLKNTLIQYHSIEEDKWRVAKKTKDVTVWRKPSEEFNGYLIAV

SEQ ID NO: 2792 - DNA, 686 bp, Homo sapiens
agttggctgcgaccagcggtgacttacaagttggctgctgtcgcctgcgcatcggcgggccgggaggctgagcagtactgttgagagcggtgtgaggtgcttggtagcgcgccgtagctgcttccacgtccttgcttcacctcaggtaaagaaagatgtaactgtttggagaaaaccctcagaagaatttaatggatatctaattgctgtgtgatgcgttacactactgctggtcagctttggaatataatttccccaagagaatttgttgatttctcctatactgtgggctataaagaagggcttttatcttgtggtaataatctcaacatgttatgctttttttcagtatggtttaaatatttgtgttttcttggctggatgtctctttccttgtgagatatattttcaactctgactctgtaatcactaacattttttgcaagtgctaaactctagggagtaaaatagcaatatcaaaagagttttgaaacccttctgataagtttttgttcccagttacacagtatcctctaggtcagaggtagcaaatgtggatcacatgactgcctctaagaaagggttctagtaaatggattttcttctaagccactctcagaaaacagtttcttggtcatacacagagaagtactagatttggtgtgtcttagaatattcttccttcc

SEQ ID NO: 2793 - protein, 61 aa, Homo sapiens
MRYTTAGQLWNIISPREFVDFSYTVGYKEGLLSCGNNLNMLCFFSVWFKYLCFLGWMSLSL

SEQ ID NO: 2794 - DNA, 689 bp, Homo sapiens
aggctgagcagtactgttgagagcggtgtgaggtgcttggtagcgcgccgtagctgcttccacgtccttgcttcacctcaggtaaagagagaagtaatggaaggcctgtctgatgttgcttcttttgcaactaaacttaaaaacactctcatccagtaccatagcattgaagaagataagtggcgagttgctaagaaaacgaaagatgtaactgtttggagaaaaccctcagaagaatttaatggatatctagtcttaaagggatatgtgatcaaaagagaattgctgtgtgatgcgttacactactgctggtcagctttggaatataatttccccaagagaatttgttgatttctcctatactgtgggctataaagaagggcttttatcttgtggtaataatctcaacatgttatgctttttttcagtatggtttaaatatttgtgttttcttggctggatgtctctttccttgtgagatatattttcaactctgactctgtaatcactaacattttttgcaagtgctaaactctagggagtaaaatagcaatatcaaaagagttttgaaacccttctgataagtttttgttcccagttacacagtatcctctaggtcagaggtagcaaatgtggatcacatgactgcctctaagaaagggttctagtaaatggattttcttctaagc

SEQ ID NO: 2795 - protein, 84 aa, Homo sapiens
MEGLSDVASFATKLKNTLIQYHSIEEDKWRVAKKTKDVTVWRKPSEEFNGYLVLKGYVIKRELLCDALHYCWSALEYNFPKRIC

SEQ ID NO: 2796 - DNA, 630 bp, Homo sapiens
agttggctgcgaccagcggtgacttacaagttggctgctgtcgcctgcgcatcggcgggccgggaggctgagcagtactgttgagagcggtgtgaggtgcttggtagcgcgccgtagctgcttccacgtccttgcttcacctcaggtaaagaaagatgtaactgtttggagaaaaccctcagaagaatttaatggatatctctacaaagcccaaggtgttatagatgaccttgtctatagtataatagaccatatacgcccagggccttgtcgtttggattgggacagcttgatgacttctttggatattctggagaactttgaagagaattgctgtgtgatgcgttacactactgctggtcagctttggaatataatttccccaagagaatttgttgatttctcctatactgtgggctataaagaagggcttttatcttgtggtaataatctcaacatgttatgctttttttcagtatggtttaaatatttgtgttttcttggctggatgtctctttccttgtgagatatattttcaactctgactctgtaatcactaacattttttgcaagtgctaaactctagggagtaaaatagcaatatcaaaagagttttgaaacccttctgat

SEQ ID NO: 2797 - protein, 77 aa, Homo sapiens
MTSLDILENFEENCCVMRYTTAGQLWNIISPREFVDFSYTVGYKEGLLSCGNNLNMLCFFSVWFKYLCFLGWMSLSL

SEQ ID NO: 2798 - DNA, 404 bp, Homo sapiens
acaagttggctgctgtcgcctgcgcatcggcgggccgggaggctgagcagtactgttgagagcggtgtgaggtgcttggtagcgcgccgtagctgcttccacgtccttgcttcacctcaggtaaagagagaagtaatggaaggcctgtctgatgttgcttcttttgcaactaaacttaaaaacactctcatccagtaccatagcattgaagaagataagtggcgagttgctaagaaaacgaaagatgtaactgtttggagaaaaccctcagaagaatttaatggatatctgtaagtaactttttatagacttacacagctcttaagacatttcaaaacttatatccattgtcactaagtagtcattgctagtaagatttagctttttaagagttctttaacttt

SEQ ID NO: 2799 - protein, 52 aa, Homo sapiens
MEGLSDVASFATKLKNTLIQYHSIEEDKWRVAKKTKDVTVWRKPSEEFNGYL

SEQ ID NO: 2800 - DNA, 5525 bp, Homo sapiens
tgaagtgtcaaaaagaaagttaatttaattggccttcatgaaaaacacaaacttgaattcagacaatgaatgaatggaatgcagtatcagccacgtgtccatgtttggagtgtcagttgatgagcaccaagaagaatgggcagctttacagttcagcaagcacagatggactctagatagatggatcagcttaccagttttctgaccctcatattatcagcactcaaaagcttcagtgatagggtcattgtcagttcctaatattctgaactagttagaaaactgagggcacagaaactcatgggttcatgtgggtcttgttactgctgtggcccctaggagctgcagggagacctggctacagggccacttgcctgcatggagcttattctgcacttatccctcacccttctatcatcttccttggctgattctgacagccatcaaatgccctcccagatgtgctcactgccacccccatttcctttgttgacagcactactggatattatgctaaatgttggttttgtttgttgtttagtctgttgatagatgttccagcagctattacatttgacttaacctatatatttcttttttgttgttgcccttaaaaagcacactgtgtttagtttgcgagggctgccataacaaagtgccacagactgggcagcttacacaacagaaatttattttctaacaatctggacgctggaagtctgagatcaagatgttggcagggttggtttcttctgaggcctcccttctgggcttgtagatggctgtcttctccctgtgtcttcatatggtctttcctctgtgtatctgtgtcctaatctcttcttagaaggacatgggtcacttgagattagggcccaccctgatgatgtccttattttaacttaattgcctctgcaaagatcctgtttccaaatacaatcacattctgaggtattggtggttaggacttccccatatgaattttgaggtgatacaagtcagcccataacacatttttaaaagtaaatttttgtggattgatcacccctgctgtacctgccccacccccagacgtgagcatctagaaggcagaaactctgtttctcttgcaattcccacaacctaacagtgtccagcactttgcagctatttcatgaactcttgctgcatgaatgcaaaaaaggttggtaagaaacttgaagttgaaaagtggcactatttctgactgccagaagtagcacctggcgagtagactagaacatgttccgatgagaagaagaggcaaagaaaatacagtacatttaaaccgagacagcttttgacagaaaggcaaatgattgttgcttgggatcacccattctccacatccagcactgggaatggaatggaagttcaggcccttgcggaataccaaaggtcaggtcagtttttactgtagatactggactttgcctcttagggtgaatacttgtttgacttcaagcggggagagtatactttttaaccaatgacttgctgattttgcagttaagaaagaaaaacagaatccactgaaaataaaatttctatttgaaagtttcataagtgtaattgactaacggtgagtcctcccccagctgttactggtatttcaatgtttaagaaattattttatttacactaaatagtatcaacaattccctatcttatactggcaggcagaaactgaagaggttgtatcaactggcagtttgcactgaaagaaaacaatcttaaatcacttttaatcttgcagagcatttttgaaggtcaaggttgaaatcactggcaggaaagtaggtgaacaaaatggtttgaccctgcctgaactagacttgcactgatttgtagagctggagtggaagagagctaaaatagtagcgctttccttaaaagacacccacaccccaccacctcaccagcagcacaccagcggcacgagcagtataaccacagacattcgtcactgtgccagatcagggcataattctcttaaggcagctgaggccttcacattagttcttgcctcattcaggcatccagaggtcctctctctttgatactggtgacataaaccagaggggcaagactaggcatagttccttgatgagttcagtggtgcctcaccgtacccttagaaagccagccctgctgtgctaggtcttgtctcacacaaagacatgctcccaggggtgggcaccgtggatcatggtattcaggtcttctgctattttaagttctttcttctctaaatatgtgaataatattttaagcatagtgttatttgttctttttccagaagttcccttctggaaaagcatatctttgtataattgtaggaaaaataatcttgacttacttggtccaaagcacattattaactggggattaatttcctagtagtcatctgtcgggagggctgatccaccccgaggcacattaactggcgtgactttcaggacggcggggctgtgggagccactggacacatctgccccccaacccctagcctcttgaattactcaagtccctcagctctgttggcacaaatacgtgctggatgatagaagaaccgtttttcccatggatgaactttttttggcttgaattcttacaaggcctgacttctggatctggagaaagaagacttctttgtgtcccatcttcaaaatgcctcctccacttgttgcagaagcctaaaattcctttagttggggcagaaagcctattattatttaaaaaaaaaaaaaatagtgggagggtgtgtggattgaaatcagtcaggggaagaggattgaaatctagtaaatgcaggactccatagggagaacgcacagaactctgtctcctcaggagcacctctctccacgggcatggtgggctccaggccctcagggtgcttcagtagcacacctccctgtgggccctactaccattgcctcatgagggtccagtctgtatgcttgtcttccacacagcaagttaatgaagggtgagatgggcagggactgttactgtttctgtttcaatctctctctaagcttgaaatcgaatagagtactccagccatagtaggcactcagaaaatgaataattaatgaagaaatgtatattatctgggaccttgaaacagaaaaaatggtaaaaatggtaaattcaaatctgaaataatcgtcactttctttttttctggaagtgcctcttcccaaatccctagctcttccttttgttttgttgtgtatgtttcatggaggtagaagattagtactgagactgagatttaaatagagagatacactaacgttctgtatattcacttttgaacagagtaagtctgaactggagcagttttaaggcaagctgtgtaaagactataattgttgagttaacatttatcaacttttggttttccttcttttcttgcctgtgacaattaacagccattgaactcttcatttgtccaaaacctaagtttgtcctatcctgaaccatggtaactggttgactgtggggtgaggtggggtcgggctggcagcattattttaaagacactgggattacagtggatttcctttttttttttttttttttaaattttgggactgtgtaccaagattccaagattgaaattattttcacaactgcaagtaactacccaatattatgcttttggaaattgaatctagacccttaagggtgtgtgagtggtgaattatatttttatttaattttctggtttggtcccattggtatttaatgataccaaaacaacctctaaaatcacaacctaagattggaatattaaagtacatcatggttatatatgtgcaaaaaatgctgtatgctctcaaagtccgagacttttaagtaaaaaattgaggcataccagatgtttaatatggaaaatctgtacagtaagtaagactttttaaagttgaataatctgttgcatttagttcacccctgggttgctgaaaatatttattcaatttcaagttgtttggaagttactggtttctgaattcttaaaaagaaattcagatgtgttaatttataggccacaaagtaagattatcactttaatccaagtactttacatctagtcaaactggcttattaaaactgtcttgttagaacatgtgacttgagcaacaaaaaaaaaagcccacatgttttaaaaccacaaaggataatttcttccaagaaaatgtcagtaattaaaactccagagttcagctgaaagagagaccatcgtcaaatcttcactgtgttcatacctgtacagggcataaaatctatctgttgtaaatgaatacctgtattgtgcatcatgtgggcaggtgtgcttcactgtgctgtgcttctgctgtctggttgtgatggagagctcctctccactgttggcgctgcagcagtgtgtccgggaagccacgtggcggcggatcagtagtcacactgagattgagttattcttaatttttatataactgtctttagctcttcttttgacagggcaggccttgttctgaactgtttcgcttctgactgttaaacaccgatgacgcatgcactgcacttcttcgttttcttcttgctcccccattggcctgagtttcttgtgcattactcctctccctccttcgttagaataggtatatcagcagatgataaggtgatgatgagcagagccttctagaggtctcatgtgaccctgaaacctggcaattcaggggattcatgcactccctgtgcatgagaaatgtcttctggtttctcctcatccattacgggagtgaaattttaacttggcttgtacacaggttgcttatttggctggtgggttcagatattggagtttcacctcaacagagactaaggaacagacgtggagctggagaatctgctcccaatacaggttagtccatggctgtttgcaggatgcctcagttcttctactcatgagcctctccctagtgctgcttgagtgtccccataacttctggcttcctgttctcatgctcctgtcctgcttcgctcctcacatttgacaaggagctcctcctcctatgaaaggccacttgtcccatagctttcttccatcccatcgtgtctcagcatctcagggatcttgcactgatcattgtcccattttcagagccggtccaagaggcagattacctgagcagcagcctggcatgccaatttgtaagaagtgaagagcatcaagttggctgctgtcgcctgcgcatcggcgggccgggaggctgagcagtactgttgagagcggtgtgaggtgcttggtagcgcgccgtagctgcttccacgtccttgcttcacctcaggtaaaggtaaggagagccacggagccgcggcaggattggggtggcccgtgtggagggcgactgtggcgcccggggcgtcctgccaggtgcgtcttctggacctgctccagaccatggatctggggagctcgcggtggacgttggggatggcgggccccggcgtcc

SEQ ID NO: 2801 - protein, 60 aa, Homo sapiens
MHSLCMRNVFWFLLIHYGSEILTWLVHRLLIWLVGSDIGVSPQQRLRNRRGAGESAPNTG

SEQ ID NO: 2802 - DNA, 3390 bp, Homo sapiens
gctggccagccatggcccggccgggctgcagcagaggcagtgagctccctgtcaccagaggtgtatgagcagaggctgggggctctctagggagggaagccacggaggggctgtctgccctcctggcccctctgaggctgtgagcagtcccttctacttcctgtgcggctttgcccatcacttggcccggttgagcctactgcaggcatctgaccagctgcaggctctgaggtgagtgtgagggcaaaggtttggacacctctggctccaaagtggggctggaggctagagcaggggtggtctctgtaagagtctgatctcaagggggcctcataccaacaacatcaccttctttttggagaggcagcctagtggagtggctggtagccttaggccttctggggccagggaggacagagaccagagggagggattattcttaagccagccacccctcacaggcttcaactttttctaaaaccaggaactggaaggagaaagatgggaagaaataggagagaagagagcctgggtttccattttgctcccgccacttggtagctctgtggctttggcaggtcacttacccttttttggttcgtaagtcacttaccctctttgtcacttaccctctttggtatcatctgtaagataggatgacgggccaggcgcgcacctgtaatcccagatactcgggaggctgaggcaggagaatcgcttgaactcaggaggcagaggttgcagtgagctgagatcatgccactacactccagcctgggtgacaggatgagactccatttaaaaaaaaaaaagaggatgacaacactgcctgtctcactggaatcttgtaaggattaaatggttactgtttttaacgtagttggaagagtttgtggtcctgtgtttgttaaatatacacaaattaacttcccagctcacccatgcctagtattatgcaaggggcttcacatcaattaccttgtttggtcttcaccacagccacatgagcttggaatgactattattagggaaagtggacccaagaaggtcaagttccttgcctgaggtcacacagctagtaaaaggcagagcaaaggttgaaactcaggatggtctgtctccaggaccggggctctccaccactcgggcctgcctattccagggctggcagcctctctacagaggtgaagcgtctactggatcacttttgaccaacaacacatcagccggcagaggaaggaggggtgggccaagaagggccccttccctctcaggccggagagattcctctgactaatttgctgagtgacttcgatggcaaactgcagccctgttccctccagactcctccgtcttgctcatgactgggtcccctgggcagagccaggtcctggcagagagcagatatccagtaaatacctcttggccctaagaatgactgggaacactcatgtagcgagaacaccttcctgtgtgttatctcatctcatcctcacagcagcccagagaggttttcctggcaaaggagcctttggtggtggatgtcttcatggcacatgtgaggaccatcaataccaaatctcccttcatctgcttggagttccctgcatcagtacatgatcccatatagggcaggcagaagatggctgtgccacccacgtatgccgatcttggcaaatctgccagggatgtcttcaccaagggctatggatttggcttaataaagcttgatttgaaaacaaaatctgagaatggattggaatttacaagctcaggctcagccaacactgagaccaccaaagtgacgggcagtctggaaaccaagtacagatggactgagtacggcctgacgtttacagagaaatggaataccgacaatacactaggcaccgagattactgtggaagatcagcttgcacgtggactgaagctgaccttcgattcatccttctcacctaacactgggaaaaaaaatgctaaaatcaagacagggtacaagcgggagcacattaacctgggctgcgacatggatttcgacattgctgggccttccatccggggtgctctggtgctaggttacgagggctggctggccggctaccagatgaattttgagactgcaaaatcccgagtgacccagagcaactttgcagttggctacaagactgatgaattccagcttcacactaatgtgaatgacgggacagagtttggcggctccatttaccagaaagtgaacaagaagttggagaccgctgtcaatcttgcctggacagcaggaaacagtaacacgcgcttcggaatagcagccaagtatcagattgaccctgacgcctgcttctcggctaaagtgaacaactccagcctgataggtttaggatacactcagactctaaagccaggtattaaactgacactgtcagctcttctggatggcaagaacgtcaatgctggtggccacaagcttggtctaggactggaatttcaagcataaatgaatactgtacaattgtttaattttaaactattttgcagcatagctaccttcagaatttagtgtatcttttaatgttgtatgtctgggatgcaagtattgctaaatatgttagccctccaggttaaagttgattcagctttaagatgttacccttccagaggtacagaagaaacctatttccaaaaaaggtcctttcagtggtagactcggggagaacttggtggcccctttgagatgccaggtttcttttttatctagaaatggctgcaagtggaagcggataatatgtaggcactttgtaaattcatattgagtaaatgaatgaaattgtgatttcctgagaatcgaaccttggttccctaaccctaattgatgagaggctcgctgcttgatggtgtgtacaaactcacctgaatgggacttttttagacagatcttcatgacctgttcccaccccagttcatcatcatctcttttacaccaaaaggtctgcagggtgtggtaactgtttcttttgtgccattttggggtggagaaggtggatgtgatgaagccaataattcaggacttattccttcttgtgttgtgtttttttttggcccttgcaccagagtatgaaatagcttccaggagctccagctataagcttggaagtgtctgtgtgattgtaatcacatggtgacaacactcagaatctaaattggacttctgttgtattctcaccactcaatttgttttttagcagtttaatgggtacattttagagtcttccattttgttggaattagatcctccccttcaaatgctgtaattaacaacacttaaaaaacttgaataaaatattgaaacctcatccttcttctgttgtctttattaataaaatataaataaac

SEQ ID NO: 2803 - protein, 283 aa, Homo sapiens
MAVPPTYADLGKSARDVFTKGYGFGLIKLDLKTKSENGLEFTSSGSANTETTKVTGSLETKYRWTEYGLTFTEKWNTDNTLGTEITVEDQLARGLKLTFDSSFSPNTGKKNAKIKTGYKREHINLGCDMDFDIAGPSIRGALVLGYEGWLAGYQMNFETAKSRVTQSNFAVGYKTDEFQLHTNVNDGTEFGGSIYQKVNKKLETAVNLAWTAGNSNTRFGIAAKYQIDPDACFSAKVNNSSLIGLGYTQTLKPGIKLTLSALLDGKNVNAGGHKLGLGLEFQA

SEQ ID NO: 2804 - DNA, 3349 bp, Homo sapiens
gctggccagccatggcccggccgggctgcagcagaggcagtgagctccctgtcaccagaggtgtatgagcagaggctgggggctctctagggagggaagccacggaggggctgtctgccctcctggcccctctgaggctgtgagcagtcccttctacttcctgtgcggctttgcccatcacttggcccggttgagcctactgcaggcatctgaccagctgcaggctctgaggtgagtgtgagggcaaaggtttggacacctctggctccaaagtggggctggaggctagagcaggggtggtctctgtaagagtctgatctcaagggggcctcataccaacaacatcaccttctttttggagaggcagcctagtggagtggctggtagccttaggccttctggggccagggaggacagagaccagagggagggattattcttaagccagccacccctcacaggcttcaactttttctaaaaccaggaactggaaggagaaagatgggaagaaataggagagaagagagcctgggtttccattttgctcccgccacttggtagctctgtggctttggcaggtcacttacccttttttggttcgtaagtcacttaccctctttgtcacttaccctctttggtatcatctgtaagataggatgacgggccaggcgcgcacctgtaatcccagatactcgggaggctgaggcaggagaatcgcttgaactcaggaggcagaggttgcagtgagctgagatcatgccactacactccagcctgggtgacaggatgagactccatttaaaaaaaaaaaagaggatgacaacactgcctgtctcactggaatcttgtaaggattaaatggttactgtttttaacgtagttggaagagtttgtggtcctgtgtttgttaaatatacacaaattaacttcccagctcacccatgcctagtattatgcaaggggcttcacatcaattaccttgtttggtcttcaccacagccacatgagcttggaatgactattattagggaaagtggacccaagaaggtcaagttccttgcctgaggtcacacagctagtaaaaggcagagcaaaggttgaaactcaggatggtctgtctccaggaccggggctctccaccactcgggcctgcctattccagggctggcagcctctctacagaggtgaagcgtctactggatcacttttgaccaacaacacatcagccggcagaggaaggaggggtgggccaagaagggccccttccctctcaggccggagagattcctctgactaatttgctgagtgacttcgatggcaaactgcagccctgttccctccagactcctccgtcttgctcatgactgggtcccctgggcagagccaggtcctggcagagagcagatatccagtaaatacctcttggccctaagaatgactgggaacactcatgtagcgagaacaccttcctgtgtgttatctcatctcatcctcacagcagcccagagaggttttcctggcaaaggagcctttggtggtggatgtcttcatggcacatgtgaggaccatcaataccaaatctcccttcatctgcttggagttccctgcatcagtacatgatcccatatagggcaggcagaagatggctgtgccacccacgtatgccgatcttggcaaatctgccagggatgtcttcaccaagggctatggatttggcttaataaagcttgatttgaaaacaaaatctgagaatggattggaatttacaagctcaggctcagccaacactgagaccaccaaagtgacgggcagtctggaaaccaagtacagatggactgagtacggcctgacgtttacagagaaatggaataccgacaatacactaggcaccgagattactgtggaagatcagcttgcacgtggactgaagctgaccttcgattcatccttctcacctaacactgggaaaaaaaatgctaaaatcaagacagggtacaagcgggagcacattaacctgggctgcgacatggatttcgacattgctgggccttccatccggggtgctctggtgctaggttacgagggctggctggccggctaccagatgaattttgagactgcaaaatcccgagtgacccagagcaactttgcagttggctacaagactgatgaattccagcttcacactaatgtgaatgacgggacagagtttggcggctccatttaccagaaagtgaacaagaagttggagaccgctgtcaatcttgcctggacagcaggaaacagtaacacgcgcttcggaatagcagccaagtatcagattgaccctgacgcctgcttctcggctaaagtgaacaactccagcctgataggtttaggatacactcagactctaaagccaggtattaaactgacactgtcagctcttctggatggcaagaacgtcaatgctggtggccacaagcttggtctaggactggaatttcaagcataaatgaatactgtacaattgtttaattttaaactattttgcagcatagctaccttcagaatttagtgtatcttttaatgttgtatgtctgggatgcaagtattgctaaatatgttagccctccaggttaaagttgattcagctttaagatgttacccttccagaggtacagaagaaacctatttccaaaaaaggtcctttcagtggtagactcggggagaacttggtggcccctttgagatgccaggtttcttttttatctagaaatggctgcaagtggaagcggataatatgtaggcactttgtaaattcatattgagtaaatgaatgaaattgtgatttcctgagaatcgaaccttggttccctaaccctaattgatgagaggctcgctgcttgatggtgtgtacaaactcacctgaatgggacttttttagacagatcttcatgacctgttcccaccccagttcatcatcatctcttttacaccaaaaggtctgcagggtgtggtaactgtttcttttgtgccattttggggtggagaaggtggatgtgatgaagccaataattcaggacttattccttcttgtgttgtgtttttttttggcccttgcaccagagtatgaaatagcttccaggagctccagctataagcttggaagtgtctgtgtgattgtaatcacatggtgacaacactcagaatctaaattggacttctgttgtattctcaccactcaatttgttttttagcagtttaatgggtacattttagagtcttccattttgttggaattagatcctccccttcaaatgctgtaattaacaacacttaaaaaacttgaataaaatattgaaacctc

SEQ ID NO: 2805 - protein, 283 aa, Homo sapiens; identical to SEQ ID NO: 2803

SEQ ID NO: 2806 - DNA, 3276 bp, Homo sapiens
cccgccagctcgcggagccgctctgccccgcgccctagcccgcgcctgcagcccgcccaggcggagtcagcccgcgctccgcccgccgcgatccgagctcggaggttcggactccgggctcgccgccccccgggccggctccgcgccccgcactcccggcgcccagcgccccgcgccccggcgggcggagcgcaccatgccgcagctggactccggcgggggcggcgcgggcggcggcgacgacctcggcgcgccggacgagctgctggccttccaggatgaaggcgaggagcaggacgacaagagccgcgacagcgccgccggtcccgagcgcgacctggccgagctcaagtcgtcgctcgtgaacgagtccgagggcgcggccggcggcgcagggatcccgggggtcccgggggccggcgccggggcccgcggcgaggccgaggctctcgggcgggaacacgctgcgcagagactcttcccggacaaacttccagagcccctggaggacggcctgaaggccccggagtgcaccagcggcatgtacaaagagaccgtctactccgccttcaatctgctcatgcattacccacccccctcgggagcagggcagcacccccagccgcagcccccgctgcacaaggccaatcagcccccccacggtgtcccccaactctctctctacgaacatttcaacagcccacatcccacccctgcacctgcggacatcagccagaagcaagttcacaggcctctgcagacccctgacctctctggcttctactccctgacctcaggcagcatggggcagctcccccacactgtgagctggttcacccacccatccttgatgctaggttctggtgtacctggtcacccagcagccatcccccacccggccattgtgcccccctcagggaagcaggagctgcagcccttcgaccgcaacctgaagacacaagcagagtccaaggcagagaaggaggccaagaagccaaccatcaagaagcccctcaatgccttcatgctgtacatgaaggagatgagagccaaggtcattgcagagtgcacacttaaggagagcgctgccatcaaccagatcctgggccgcaggtggcacgcgctgtcgcgagaagagcaggccaagtactatgagctggcccgcaaggagaggcagctgcacatgcagctatacccaggctggtcagcgcgggacaactacgggaagaagaagaggcggtcgagggaaaagcaccaagaatccaccacaggaggaaaaagaaatgcattcggtacttacccggagaaggccgctgccccagccccgttccttccgatgacagtgctctaggctgccccgggtccccagctccccaggactcaccctcataccatctgctgccccgcttccccacagaactgcttactagccctgcggagccggcacctacatccccaggtctctccactgctctcagcctcccaaccccagggcccccacaggccccccgcagcaccctgcagagcacacaggtacagcaacaggaatctcagagacaggtggcctagcaggcacaggacacctggccgcctccaggagcctaccccctgaaagtgacagagacccagatctcatggaaactggccaggggtcctgttaacgtcatctcagggtccagaccctgaagatttcagaggctgcaggacttctgcctgaacctggggtcatcgattcaaactgctccaagtggtgggaatcagatctgtcttgatgtgtcatctaattaagggaatcccttgtacctatggctgcctgcatctattctttgtaccatctgtcttgccagccagaagcctctgcctccctagcttttctgctataggtcagagatgggctgaactgagcctagctaccttctctacccatctcccccatcccccactgccacaccctccccattcagacacttcatggaccaagaatgagctggtttgtcaaacaacatgtgagcatggtcacaagcacaaagctcaagatgacagctcttctaaggaaatggagaagctctgtttataaaaacaaaaacaaaaccagctgctactcataagttggaccagaggaagccccttactatgatctcaggagcttgcaagaagcaggaaggggaatggaataggttaagtttaggcctatcaacctaagcaacagaaataatctgacactaccttatcaggcaaattggggaggggagggtgtatctagctctagttcaaattatttggaagtgttccctgagaaacccaccagcctaagaagctctggccccaggcttgtcactagcagctgcagtcaacagttcaaagaagtcatggcccaaatccagtgtgcacccctccccattcacagagcctttttcacaattccatttccagttcatctatggcagtccagccagctcctgggcagcttgagagggcaaacccaaaacctcatgacagccagagcctgtctttcagcattcagtccgcctggccggctccagtttccccatggggctgcgggacagaggaccattacaactagatcaaggagcccagaaaacctccagtagtggacaacaggttttcaccatagcctacgttaacccatttttgagccaagcttcaaccctcagccttgaaaaacaagtctttaatttaatttttgttttttgcctaaatccaaagaaaaagggctgccgggccaggcgcggtggctcacgcctgtaatcccagcactttggcaggccgaggcaggtggatcacctgacgtcagtagtttgagaccagcctggccaacatggtgaaaccctgtatctactaaaaatacaaaaattagccggacgtggtggtgcgcgcatgtaatcccagctactcgggaggctgaggcggaagaatcacttgaacccgggaggcggaggttccagtgagccgagatggcgctattgcactccagtctgggtaacagggagactgcatctcaaaaaaaaaaaaaaaaaaaaaaaagggctgtccatgtattcacacacccctcaaaaaaagcctttagttcctactttagccactggtttctcagaatccaaagatcacatattctagtgtaacactgcaagaagtcttgagaaaaagattattgtagtgttcaaaatatttttgtattgttaatgcatcatcatagaaaaacttttaaacatgagaataaagatactttttactgggtttgtttttcaaagcctg

SEQ ID NO: 2807 - protein, 384 aa, Homo sapiens; identical to SEQ ID NO: 287

SEQ ID NO: 2808 - DNA, 628 bp, Homo sapiens
cgcggagccgctctgccccgcgccctagcccgcgcctgcagcccgcccaggcggagtcagcccgcgctccgcccgccgcgatccgagctcggaggttcggactccgggctcgccgccccccgggccggctccgcgccccgcactcccggcgcccagcgccccgcgccccggcgggcggagcgcaccatgccgcagctggactccggcgggggcggcgcgggcggcggcgacgacctcggcgcgccggacgagctgctggccttccaggatgaaggcgaggagcaggacgacaagagccgcgacagcgccgccggtcccgagcgcgacctggccgagctcaagtcgtcgctcgtgaacgagtccgagggcgcggccggcggcgcagggatcccgggggtcccgggggccggcgccggggcccgcggcgaggccgaggctctcgggcgggaacacgctgcgcagagactcttcccggacaaacttccagagcccctggaggacggcctgaaggccccggagtgcaccagcggcatgtacaaagagaccgtctactccgccttcaatctgctcatgcattacccacccccctcgggagcagggcagcacccccagccgcagcccccgctgg

SEQ ID NO: 2809 - protein, 146 aa, Homo sapiens
MPQLDSGGGGAGGGDDLGAPDELLAFQDEGEEQDDKSRDSAAGPERDLAELKSSLVNESEGAAGGAGIPGVPGAGAGARGEAEALGREHAAQRLFPDKLPEPLEDGLKAPECTSGMYKETVYSAFNLLMHYPPPSGAGQHPQPQPP

SEQ ID NO: 2810 - DNA, 221 bp, Homo sapiens
gcgccctagcccgcgcctgcagcccgcccaggcggacgcaccatgccgcagctggactccggcgggggcggcgcgggcggcggcgacgacctcggcgcgccggacgagctgctggccttccaggatgaaggcgaggagcaggacgacaagagccgcgacagcgccgccggtcccgagcgcgacctggccgagctcaagtcgtcgctcgtgaacgagtccga

SEQ ID NO: 2811 - protein, 58 aa, Homo sapiens
MPQLDSGGGGAGGGDDLGAPDELLAFQDEGEEQDDKSRDSAAGPERDLAELKSSLVNE

SEQ ID NO: 2812 - DNA, 280 bp, Homo sapiens
acgagctgctggccttccaggatgaaggcgaggagcaggacgacaagagccgcgacagcgccgccggtcccgagcgcgacctggctctcgggcgggaacacgctgcgcagagactcttcccggacaaacttccagagcccctggaggacggcctgaaggccccggagtgcaccagcggcatgtacaaagagaccgtctactccgccttcaatctgctcatgcattacccacccccctcgggagcagggcagcacccccagccgcagcccccgctggtaag

SEQ ID NO: 2813 - protein, 44 aa, Homo sapiens
MKARSRTTRAATAPPVPSATWLSGGNTLRRDSSRTNFQSPWRTA

SEQ ID NO: 2814 - DNA, 3297 bp, Homo sapiens
atccccgcctcccctcctgcccaggtgactgactaatccgccgccttcaggagacagaattggccaaggcctgaaggccccggagtgcaccagcggcatgtacaaagagaccgtctactccgccttcaatctgctcatgcattacccacccccctcgggagcagggcagcacccccagccgcagcccccgctgcacaaggccaatcagcccccccacggtgtcccccaactctctctctacgaacatttcaacagcccacatcccacccctgcacctgcggacatcagccagaagcaagttcacaggcctctgcagacccctgacctctctggcttctactccctgacctcaggcagcatggggcagctcccccacactgtgagctggttcacccacccatccttgatgctaggttctggtgtacctggtcacccagcagccatcccccacccggccattgtgcccccctcagggaagcaggagctgcagcccttcgaccgcaacctgaagacacaagcagagtccaaggcagagaaggaggccaagaagccaaccatcaagaagcccctcaatgccttcatgctgtacatgaaggagatgagagccaaggtcattgcagagtgcacacttaaggagagcgctgccatcaaccagatcctgggccgcaggtggcacgcgctgtcgcgagaagagcaggccaagtactatgagctggcccgcaaggagaggcagctgcacatgcagctatacccaggctggtcagcgcgggacaactacgggaagaagaagaggcggtcgagggaaaagcaccaagaatccaccacagagacaaactggcccagagaactcaaggatggtaatggacaagagtcactgtccatgtcttcttcctctagcccagcttgaggactgggatggctgggcaaggaagccataggcattgcggccccttgccttggtgcagatgtgagtcccacaaacacatctggagaagctcaaaggccgggactgggagatgactcccttggaagacaggagagatgactcccttggaagacagatgacagcccataggcctagtgacaaaaggcccctttgccaccttgtggctgttctgggaactgcacctgtcctaggtctgggccagaccaagcagaatggcagtctgaggacactgacttaccacccaagtcccaggaagagaggacaaggaatcagccaggcctgtgcaaaggcagcattttttggttgtggtgtatgactatgaattcaccctctgtttacagataactctcttcactattcctaggaggaaaaagaaatgcattcggtacttacccggagaaggccgctgccccagccccgttccttccgatgacagtgctctaggctgccccgggtccccagctccccaggactcaccctcataccatctgctgccccgcttccccacagaactgcttactagccctgcggagccggcacctacatccccaggtctctccactgctctcagcctcccaaccccagggcccccacaggccccccgcagcaccctgcagagcacacaggtacagcaacaggaatctcagagacaggtggcctagcaggcacaggacacctggccgcctccaggagcctaccccctgaaagtgacagagacccagatctcatggaaactggccaggggtcctgttaacgtcatctcagggtccagaccctgaagatttcagaggctgcaggacttctgcctgaacctggggtcatcgattcaaactgctccaagtggtgggaatcagatctgtcttgatgtgtcatctaattaagggaatcccttgtacctatggctgcctgcatctattctttgtaccatctgtcttgccagccagaagcctctgcctccctagcttttctgctataggtcagagatgggctgaactgagcctagctaccttctctacccatctcccccatcccccactgccacaccctccccattcagacacttcatggaccaagaatgagctggtttgtcaaacaacatgtgagcatggtcacaagcacaaagctcaagatgacagctcttctaaggaaatggagaagctctgtttataaaaacaaaaacaaaaccagctgctactcataagttggaccagaggaagccccttactatgatctcaggagcttgcaagaagcaggaaggggaatggaataggttaagtttaggcctatcaacctaagcaacagaaataatctgacactaccttatcaggcaaattggggaggggagggtgtatctagctctagttcaaattatttggaagtgttccctgagaaacccaccagcctaagaagctctggccccaggcttgtcactagcagctgcagtcaacagttcaaagaagtcatggcccaaatccagtgtgcacccctccccattcacagagcctttttcacaattccatttccagttcatctatggcagtccagccagctcctgggcagcttgagagggcaaacccaaaacctcatgacagccagagcctgtctttcagcattcagtccgcctggccggctccagtttccccatggggctgcgggacagaggaccattacaactagatcaaggagcccagaaaacctccagtagtggacaacaggttttcaccatagcctacgttaacccatttttgagccaagcttcaaccctcagccttgaaaaacaagtctttaatttaatttttgttttttgcctaaatccaaagaaaaagggctgccgggccaggcgcggtggctcacgcctgtaatcccagcactttggcaggccgaggcaggtggatcacctgacgtcagtagtttgagaccagcctggccaacatggtgaaaccctgtatctactaaaaatacaaaaattagccggacgtggtggtgcgcgcatgtaatcccagctactcgggaggctgaggcggaagaatcacttgaacccgggaggcggaggttccagtgagccgagatggcgctattgcactccagtctgggtaacagggagactgcatctcaaaaaaaaaaaaaaaaaaaaaaaagggctgtccatgtattcacacacccctcaaaaaaagcctttagttcctactttagccactggtttctcagaatccaaagatcacatattctagtgtaacactgcaagaagtcttgagaaaaagattattgtagtgttcaaaatatttttgtattgttaatgcatcatcatagaaaaacttttaaacatgagaataaagatactttttactggg

SEQ ID NO: 2815 - protein, 269 aa, Homo sapiens; identical to SEQ ID NO: 291

SEQ ID NO: 2816 - DNA, 2905 bp, Homo sapiens
atccccgcctcccctcctgcccaggtgactgactaatccgccgccttcaggagacagaattggccaaggcctgaaggccccggagtgcaccagcggcatgtacaaagagaccgtctactccgccttcaatctgctcatgcattacccacccccctcgggagcagggcagcacccccagccgcagcccccgctgcacaaggccaatcagcccccccacggtgtcccccaactctctctctacgaacatttcaacagcccacatcccacccctgcacctgcggacatcagccagaagcaagttcacaggcctctgcagacccctgacctctctggcttctactccctgacctcaggcagcatggggcagctcccccacactgtgagctggttcacccacccatccttgatgctaggttctggtgtacctggtcacccagcagccatcccccacccggccattgtgcccccctcagggaagcaggagctgcagcccttcgaccgcaacctgaagacacaagcagagtccaaggcagagaaggaggccaagaagccaaccatcaagaagcccctcaatgccttcatgctgtacatgaaggagatgagagccaaggtcattgcagagtgcacacttaaggagagcgctgccatcaaccagatcctgggccgcaggtggcacgcgctgtcgcgagaagagcaggccaagtactatgagctggcccgcaaggagaggcagctgcacatgcagctatacccaggctggtcagcgcgggacaactacgggaagaagaagaggcggtcgagggaaaagcaccaagaatccaccacagaccctggctcgcctaagaaatgccgtgctcgctttggcctcaaccagcagacggattggtgtggtccgtgcaggaggaaaaagaaatgcattcggtacttacccggagaaggccgctgccccagccccgttccttccgatgacagtgctctaggctgccccgggtccccagctccccaggactcaccctcataccatctgctgccccgcttccccacagaactgcttactagccctgcggagccggcacctacatccccaggtctctccactgctctcagcctcccaaccccagggcccccacaggccccccgcagcaccctgcagagcacacaggtacagcaacaggaatctcagagacaggtggcctagcaggcacaggacacctggccgcctccaggagcctaccccctgaaagtgacagagacccagatctcatggaaactggccaggggtcctgttaacgtcatctcagggtccagaccctgaagatttcagaggctgcaggacttctgcctgaacctggggtcatcgattcaaactgctccaagtggtgggaatcagatctgtcttgatgtgtcatctaattaagggaatcccttgtacctatggctgcctgcatctattctttgtaccatctgtcttgccagccagaagcctctgcctccctagcttttctgctataggtcagagatgggctgaactgagcctagctaccttctctacccatctcccccatcccccactgccacaccctccccattcagacacttcatggaccaagaatgagctggtttgtcaaacaacatgtgagcatggtcacaagcacaaagctcaagatgacagctcttctaaggaaatggagaagctctgtttataaaaacaaaaacaaaaccagctgctactcataagttggaccagaggaagccccttactatgatctcaggagcttgcaagaagcaggaaggggaatggaataggttaagtttaggcctatcaacctaagcaacagaaataatctgacactaccttatcaggcaaattggggaggggagggtgtatctagctctagttcaaattatttggaagtgttccctgagaaacccaccagcctaagaagctctggccccaggcttgtcactagcagctgcagtcaacagttcaaagaagtcatggcccaaatccagtgtgcacccctccccattcacagagcctttttcacaattccatttccagttcatctatggcagtccagccagctcctgggcagcttgagagggcaaacccaaaacctcatgacagccagagcctgtctttcagcattcagtccgcctggccggctccagtttccccatggggctgcgggacagaggaccattacaactagatcaaggagcccagaaaacctccagtagtggacaacaggttttcaccatagcctacgttaacccatttttgagccaagcttcaaccctcagccttgaaaaacaagtctttaatttaatttttgttttttgcctaaatccaaagaaaaagggctgccgggccaggcgcggtggctcacgcctgtaatcccagcactttggcaggccgaggcaggtggatcacctgacgtcagtagtttgagaccagcctggccaacatggtgaaaccctgtatctactaaaaatacaaaaattagccggacgtggtggtgcgcgcatgtaatcccagctactcgggaggctgaggcggaagaatcacttgaacccgggaggcggaggttccagtgagccgagatggcgctattgcactccagtctgggtaacagggagactgcatctcaaaaaaaaaaaaaaaaaaaaaaaagggctgtccatgtattcacacacccctcaaaaaaagcctttagttcctactttagccactggtttctcagaatccaaagatcacatattctagtgtaacactgcaagaagtcttgagaaaaagattattgtagtgttcaaaatatttttgtattgttaatgcatcatcatagaaaaacttttaaacatgagaataaagatactttttactgggtttgtttttcaaagcctg

SEQ ID NO: 2817 - protein, 366 aa, Homo sapiens
MYKETVYSAFNLLMHYPPPSGAGQHPQPQPPLHKANQPPHGVPQLSLYEHFNSPHPTPAPADISQKQVHRPLQTPDLSGFYSLTSGSMGQLPHTVSWFTHPSLMLGSGVPGHPAAIPHPAIVPPSGKQELQPFDRNLKTQAESKAEKEAKKPTIKKPLNAFMLYMKEMRAKVIAECTLKESAAINQILGRRWHALSREEQAKYYELARKERQLHMQLYPGWSARDNYGKKKRRSREKHQESTTDPGSPKKCRARFGLNQQTDWCGPCRRKKKCIRYLPGEGRCPSPVPSDDSALGCPGSPAPQDSPSYHLLPRFPTELLTSPAEPAPTSPGLSTALSLPTPGPPQAPRSTLQSTQVQQQESQRQVA

SEQ ID NO: 2818 - DNA, 2832 bp, Homo sapiens
atccccgcctcccctcctgcccaggtgactgactaatccgccgccttcaggagacagaattggccaaggcctgaaggccccggagtgcaccagcggcatgtacaaagagaccgtctactccgccttcaatctgctcatgcattacccacccccctcgggagcagggcagcacccccagccgcagcccccgctgcacaaggccaatcagcccccccacggtgtcccccaactctctctctacgaacatttcaacagcccacatcccacccctgcacctgcggacatcagccagaagcaagttcacaggcctctgcagacccctgacctctctggcttctactccctgacctcaggcagcatggggcagctcccccacactgtgagctggttcacccacccatccttgatgctaggttctggtgtacctggtcacccagcagccatcccccacccggccattgtgcccccctcagggaagcaggagctgcagcccttcgaccgcaacctgaagacacaagcagagtccaaggcagagaaggaggccaagaagccaaccatcaagaagcccctcaatgccttcatgctgtacatgaaggagatgagagccaaggtcattgcagagtgcacacttaaggagagcgctgccatcaaccagatcctgggccgcaggtggcacgcgctgtcgcgagaagagcaggccaagtactatgagctggcccgcaaggagaggcagctgcacatgcagctatacccaggctggtcagcgcgggacaactacgggaagaagaagaggcggtcgagggaaaagcaccaagaatccaccacaggaggaaaaagaaatgcattcggtacttacccggagaaggccgctgccccagccccgttccttccgatgacagtgctctaggctgccccgggtccccagctccccaggactcaccctcataccatctgctgccccgcttccccacagaactgcttactagccctgcggagccggcacctacatccccaggtctctccactgctctcagcctcccaaccccagggcccccacaggccccccgcagcaccctgcagagcacacaggtacagcaacaggaatctcagagacaggtggcctagcaggcacaggacacctggccgcctccaggagcctaccccctgaaagtgacagagacccagatctcatggaaactggccaggggtcctgttaacgtcatctcagggtccagaccctgaagatttcagaggctgcaggacttctgcctgaacctggggtcatcgattcaaactgctccaagtggtgggaatcagatctgtcttgatgtgtcatctaattaagggaatcccttgtacctatggctgcctgcatctattctttgtaccatctgtcttgccagccagaagcctctgcctccctagcttttctgctataggtcagagatgggctgaactgagcctagctaccttctctacccatctcccccatcccccactgccacaccctccccattcagacacttcatggaccaagaatgagctggtttgtcaaacaacatgtgagcatggtcacaagcacaaagctcaagatgacagctcttctaaggaaatggagaagctctgtttataaaaacaaaaacaaaaccagctgctactcataagttggaccagaggaagccccttactatgatctcaggagcttgcaagaagcaggaaggggaatggaataggttaagtttaggcctatcaacctaagcaacagaaataatctgacactaccttatcaggcaaattggggaggggagggtgtatctagctctagttcaaattatttggaagtgttccctgagaaacccaccagcctaagaagctctggccccaggcttgtcactagcagctgcagtcaacagttcaaagaagtcatggcccaaatccagtgtgcacccctccccattcacagagcctttttcacaattccatttccagttcatctatggcagtccagccagctcctgggcagcttgagagggcaaacccaaaacctcatgacagccagagcctgtctttcagcattcagtccgcctggccggctccagtttccccatggggctgcgggacagaggaccattacaactagatcaaggagcccagaaaacctccagtagtggacaacaggttttcaccatagcctacgttaacccatttttgagccaagcttcaaccctcagccttgaaaaacaagtctttaatttaatttttgttttttgcctaaatccaaagaaaaagggctgccgggccaggcgcggtggctcacgcctgtaatcccagcactttggcaggccgaggcaggtggatcacctgacgtcagtagtttgagaccagcctggccaacatggtgaaaccctgtatctactaaaaatacaaaaattagccggacgtggtggtgcgcgcatgtaatcccagctactcgggaggctgaggcggaagaatcacttgaacccgggaggcggaggttccagtgagccgagatggcgctattgcactccagtctgggtaacagggagactgcatctcaaaaaaaaaaaaaaaaaaaaaaaagggctgtccatgtattcacacacccctcaaaaaaagcctttagttcctactttagccactggtttctcagaatccaaagatcacatattctagtgtaacactgcaagaagtcttgagaaaaagattattgtagtgttcaaaatatttttgtattgttaatgcatcatcatagaaaaacttttaaacatgagaataaagatactttttactgggtttgtttttcaaagcctg

SEQ ID NO: 2819 - protein, 269 aa, Homo sapiens; identical to SEQ ID NO: 289

SEQ ID NO: 2820 - DNA, 530 bp, Homo sapiens
cccgcctcccctcctgcccaggtgactgactaatccgccgccttcaggagacagaattggccaaggtttcttggttggagggcggggggtgggaggtcaagtaggggccacctcggggaggcctgccctccaggtccttcccctaaaacttggcactgccgatactcccagcccgttccttcccaagtcaggaacttgcaggggaccccttggcaattctttttctctcaagagcagacagccttcagtcccagccgctgccagggctggtgtgtctgacccagctgtggtttttccaggcctgaaggccccggagtgcaccagcggcatgtacaaagagaccgtctactccgccttcaatctgctcatgcattacccacccccctcgggagcagggcagcacccccagccgcagcccccgctgcacaaggccaatcagcccccccacggtgtcccccaactctctctctacgaacatttcaacagcccacatcccacccctgcacctgcggacatcagccagaagcaag

SEQ ID NO: 2821 - protein, 66 aa, Homo sapiens
MYKETVYSAFNLLMHYPPPSGAGQHPQPQPPLHKANQPPHGVPQLSLYEHFNSPHPTPAPADISQK

SEQ ID NO: 2822 - DNA, 734 bp, Homo sapiens
cccgcctcccctcctgcccaggtgactgactaatccgccgccttcaggagacagaattggccaaggtttcttggttggagggcggggggtgggaggtcaagtaggggccacctcggggaggcctgccctccaggtccttcccctaaaacttggcactgccgatactcccagcccgttccttcccaagtcaggaacttgcaggggaccccttggcaattctttttctctcaagagcagacagccttcagtcccagccgctgccagggctggtgtgtctgacccagctgtggtttttccaggcctgaaggccccggagtgcaccagcggcatgtacaaagagaccgtctactccgccttcaatctgctcatgcattacccacccccctcgggagcagggcagcacccccagccgcagcccccgctgcacaaggccaatcagcccccccacggtgtcccccaactctctctctacgaacatttcaacagcccacatcccacccctgcacctgcggacatcagccagaagcaagttcacaggcctctgcagacccctgacctctctggcttctactccctgacctcaggcagcatggggcagctcccccacactgtgagctggcccagccctcctctctaccccctgtcccccccctgctgtcctgtgcctgagaatgaagctagtgcaagtgccaagaggcctcagcctgggccacaccgtgcagcagagcaccaca

SEQ ID NO: 2823 - protein, 134 aa, Homo sapiens
MYKETVYSAFNLLMHYPPPSGAGQHPQPQPPLHKANQPPHGVPQLSLYEHFNSPHPTPAPADISQKQVHRPLQTPDLSGFYSLTSGSMGQLPHTVSWPSPPLYPLSPPCCPVPENEASASAKRPQPGPHRAAEH

SEQ ID NO: 2824 - DNA, 3063 bp, Homo sapiens
cccgcctcccctcctgcccaggtgactgactaatccgccgccttcaggagacagaattggccaaggtttcttggttggagggcggggggtgggaggtcaagtaggggccacctcggggaggcctgccctccaggtccttcccctaaaacttggcactgccgatactcccagcccgttccttcccaagtcaggaacttgcaggggaccccttggcaattctttttctctcaagagcagacagccttcagtcccagccgctgccagggctggtgtgtctgacccagctgtggtttttccaggcctgaaggccccggagtgcaccagcggcatgtacaaagagaccgtctactccgccttcaatctgctcatgcattacccacccccctcgggagcagggcagcacccccagccgcagcccccgctgcacaaggccaatcagcccccccacggtgtcccccaactctctctctacgaacatttcaacagcccacatcccacccctgcacctgcggacatcagccagaagcaagttcacaggcctctgcagacccctgacctctctggcttctactccctgacctcaggcagcatggggcagctcccccacactgtgagctggttcacccacccatccttgatgctaggttctggtgtacctggtcacccagcagccatcccccacccggccattgtgcccccctcagggaagcaggagctgcagcccttcgaccgcaacctgaagacacaagcagagtccaaggcagagaaggaggccaagaagccaaccatcaagaagcccctcaatgccttcatgctgtacatgaaggagatgagagccaaggtcattgcagagtgcacacttaaggagagcgctgccatcaaccagatcctgggccgcaggtggcacgcgctgtcgcgagaagagcaggccaagtactatgagctggcccgcaaggagaggcagctgcacatgcagctatacccaggctggtcagcgcgggacaactacgggaagaagaagaggcggtcgagggaaaagcaccaagaatccaccacaggaggaaaaagaaatgcattcggtacttacccggagaaggccgctgccccagccccgttccttccgatgacagtgctctaggctgccccgggtccccagctccccaggactcaccctcataccatctgctgccccgcttccccacagaactgcttactagccctgcggagccggcacctacatccccaggtctctccactgctctcagcctcccaaccccagggcccccacaggccccccgcagcaccctgcagagcacacaggtacagcaacaggaatctcagagacaggtggcctagcaggcacaggacacctggccgcctccaggagcctaccccctgaaagtgacagagacccagatctcatggaaactggccaggggtcctgttaacgtcatctcagggtccagaccctgaagatttcagaggctgcaggacttctgcctgaacctggggtcatcgattcaaactgctccaagtggtgggaatcagatctgtcttgatgtgtcatctaattaagggaatcccttgtacctatggctgcctgcatctattctttgtaccatctgtcttgccagccagaagcctctgcctccctagcttttctgctataggtcagagatgggctgaactgagcctagctaccttctctacccatctcccccatcccccactgccacaccctccccattcagacacttcatggaccaagaatgagctggtttgtcaaacaacatgtgagcatggtcacaagcacaaagctcaagatgacagctcttctaaggaaatggagaagctctgtttataaaaacaaaaacaaaaccagctgctactcataagttggaccagaggaagccccttactatgatctcaggagcttgcaagaagcaggaaggggaatggaataggttaagtttaggcctatcaacctaagcaacagaaataatctgacactaccttatcaggcaaattggggaggggagggtgtatctagctctagttcaaattatttggaagtgttccctgagaaacccaccagcctaagaagctctggccccaggcttgtcactagcagctgcagtcaacagttcaaagaagtcatggcccaaatccagtgtgcacccctccccattcacagagcctttttcacaattccatttccagttcatctatggcagtccagccagctcctgggcagcttgagagggcaaacccaaaacctcatgacagccagagcctgtctttcagcattcagtccgcctggccggctccagtttccccatggggctgcgggacagaggaccattacaactagatcaaggagcccagaaaacctccagtagtggacaacaggttttcaccatagcctacgttaacccatttttgagccaagcttcaaccctcagccttgaaaaacaagtctttaatttaatttttgttttttgcctaaatccaaagaaaaagggctgccgggccaggcgcggtggctcacgcctgtaatcccagcactttggcaggccgaggcaggtggatcacctgacgtcagtagtttgagaccagcctggccaacatggtgaaaccctgtatctactaaaaatacaaaaattagccggacgtggtggtgcgcgcatgtaatcccagctactcgggaggctgaggcggaagaatcacttgaacccgggaggcggaggttccagtgagccgagatggcgctattgcactccagtctgggtaacagggagactgcatctcaaaaaaaaaaaaaaaaaaaaaaaagggctgtccatgtattcacacacccctcaaaaaaagcctttagttcctactttagccactggtttctcagaatccaaagatcacatattctagtgtaacactgcaagaagtcttgagaaaaagattattgtagtgttcaaaatatttttgtattgttaatgcatcatcatagaaaaacttttaaacatgagaataaagatactttttactgggtttgtttttcaaagcctg

SEQ ID NO: 2825 - protein, 269 aa, Homo sapiens; identical to SEQ ID NO: 289

SEQ ID NO: 2826 - DNA, 3049 bp, Homo sapiens
gacagaattggccaaggtttcttggttggagggcggggggtgggaggtcaagtaggggccacctcggggaggcctgccctccaggtccttcccctaaaacttggcactgccgatactcccagcccgttccttcccaagtcaggaacttgcaggggaccccttggcaattctttttctctcaagagcagacagccttcagtcccagccgctgccagggctggtgtgtctgacccagctgtggtttttccaggcctgaaggccccggagtgcaccagcggcatgtacaaagagaccgtctactccgccttcaatctgctcatgcattacccacccccctcgggagcagggcagcacccccagccgcagcccccgctggtaagtggaccccgcagccagtgccgccctgtgcttgcagcctccttgaccagcacaaggccaatcagcccccccacggtgtcccccaactctctctctacgaacatttcaacagcccacatcccacccctgcacctgcggacatcagccagaagcaagttcacaggcctctgcagacccctgacctctctggcttctactccctgacctcaggcagcatggggcagctcccccacactgtgagctggttcacccacccatccttgatgctaggttctggtgtacctggtcacccagcagccatcccccacccggccattgtgcccccctcagggaagcaggagctgcagcccttcgaccgcaacctgaagacacaagcagagtccaaggcagagaaggaggccaagaagccaaccatcaagaagcccctcaatgccttcatgctgtacatgaaggagatgagagccaaggtcattgcagagtgcacacttaaggagagcgctgccatcaaccagatcctgggccgcaggtggcacgcgctgtcgcgagaagagcaggccaagtactatgagctggcccgcaaggagaggcagctgcacatgcagctatacccaggctggtcagcgcgggacaactacgggaagaagaagaggcggtcgagggaaaagcaccaagaatccaccacaggaggaaaaagaaatgcattcggtacttacccggagaaggccgctgccccagccccgttccttccgatgacagtgctctaggctgccccgggtccccagctccccaggactcaccctcataccatctgctgccccgcttccccacagaactgcttactagccctgcggagccggcacctacatccccaggtctctccactgctctcagcctcccaaccccagggcccccacaggccccccgcagcaccctgcagagcacacaggtacagcaacaggaatctcagagacaggtggcctagcaggcacaggacacctggccgcctccaggagcctaccccctgaaagtgacagagacccagatctcatggaaactggccaggggtcctgttaacgtcatctcagggtccagaccctgaagatttcagaggctgcaggacttctgcctgaacctggggtcatcgattcaaactgctccaagtggtgggaatcagatctgtcttgatgtgtcatctaattaagggaatcccttgtacctatggctgcctgcatctattctttgtaccatctgtcttgccagccagaagcctctgcctccctagcttttctgctataggtcagagatgggctgaactgagcctagctaccttctctacccatctcccccatcccccactgccacaccctccccattcagacacttcatggaccaagaatgagctggtttgtcaaacaacatgtgagcatggtcacaagcacaaagctcaagatgacagctcttctaaggaaatggagaagctctgtttataaaaacaaaaacaaaaccagctgctactcataagttggaccagaggaagccccttactatgatctcaggagcttgcaagaagcaggaaggggaatggaataggttaagtttaggcctatcaacctaagcaacagaaataatctgacactaccttatcaggcaaattggggaggggagggtgtatctagctctagttcaaattatttggaagtgttccctgagaaacccaccagcctaagaagctctggccccaggcttgtcactagcagctgcagtcaacagttcaaagaagtcatggcccaaatccagtgtgcacccctccccattcacagagcctttttcacaattccatttccagttcatctatggcagtccagccagctcctgggcagcttgagagggcaaacccaaaacctcatgacagccagagcctgtctttcagcattcagtccgcctggccggctccagtttccccatggggctgcgggacagaggaccattacaactagatcaaggagcccagaaaacctccagtagtggacaacaggttttcaccatagcctacgttaacccatttttgagccaagcttcaaccctcagccttgaaaaacaagtctttaatttaatttttgttttttgcctaaatccaaagaaaaagggctgccgggccaggcgcggtggctcacgcctgtaatcccagcactttggcaggccgaggcaggtggatcacctgacgtcagtagtttgagaccagcctggccaacatggtgaaaccctgtatctactaaaaatacaaaaattagccggacgtggtggtgcgcgcatgtaatcccagctactcgggaggctgaggcggaagaatcacttgaacccgggaggcggaggttccagtgagccgagatggcgctattgcactccagtctgggtaacagggagactgcatctcaaaaaaaaaaaaaaaaaaaaaaaagggctgtccatgtattcacacacccctcaaaaaaagcctttagttcctactttagccactggtttctcagaatccaaagatcacatattctagtgtaacactgcaagaagtcttgagaaaaagattattgtagtgttcaaaatatttttgtattgttaatgcatcatcatagaaaaacttttaaacatgagaataaagatactttttactggg

SEQ ID NO: 2827 - protein, 182 aa, Homo sapiens
MGQLPHTVSWFTHPSLMLGSGVPGHPAAIPHPAIVPPSGKQELQPFDRNLKTQAESKAEKEAKKPTIKKPLNAFMLYMKEMRAKVIAECTLKESAAINQILGRRWHALSREEQAKYYELARKERQLHMQLYPGWSARDNYGKKKRRSREKHQESTTGGKRNAFGTYPEKAAAPAPFLPMTVL

SEQ ID NO: 2828 - DNA, 531 bp, Homo sapiens
ttggccaaggtttcttggttggagggcggggggtgggaggtcaagtaggggccacctcggggaggcctgccctccaggtccttcccctaaaacttggcactgccgatactcccagcccgttccttcccaagtcaggaacttgcaggggaccccttggcaattctttttctctcaagagcagacagccttcagtcccagccgctgccagggctggtgtgtctgacccagctgtggtttttccaggcctgaaggccccggagtgcaccagcggcatgtacaaagagaccgtctactccgccttcaatctgctcatgcattacccacccccctcgggagcagggcagcacccccagccgcagcccccgctggagagaaaatgcagccccagagaaggatgagactggcccaggatcctccaataaaagcacaaggccaatcagcccccccacggtgtcccccaactctctctctacgaacatttcaacagcccacatcccacccctgcacctgcggacatcagccagaagcaag

SEQ ID NO: 2829 - protein, 50 aa, Homo sapiens
MQPQRRMRLAQDPPIKAQGQSAPPRCPPTLSLRTFQQPTSHPCTCGHQPE

SEQ ID NO: 2830 - DNA, 999 bp, Homo sapiens
gagtcctgcggtgctgaggaaacaggaagtacgggggctgggcaaggatggccctggaggaagccaggccccatctcccctgatttaggggattgaggagggcccttccctgtgtcagaaaatcctgttaggcctgagctaagacaaatggtcagactcagaatccccagactgggggctagaagatgaggaaagatagctgtgcttcttccagggtgtgctggggtaggcctgggtcctcaggccatgccctgctttagggggctggaggctataagcaacctcccagacaagccaaacctgagatgaggaggccaataagggttttctggacaggggagacgcacctccaggaattgagtgcccagaaagaccaagaggctttctagggggtgggactgcttgggcaaagtcttgggggctagtgggcggggtactggacactgtgacttgagtggtacccccttcgctgaggcctgtggttttggccaccacttttctttgacagctgggcttcctgtataccctcatcccagtgtcttcctccctcaggactcgccacactcacccaccctccttctcatttttcagcacaaggccaatcagcccccccacggtgtcccccaactctctctctacgaacatttcaacagcccacatcccacccctgcacctgcggacatcagccagaagcaagttcacaggcctctgcagacccctgacctctctggcttctactccctgacctcaggcagcatggggcagctcccccacactgtgagctggtgagtgtgggcccaatgggaaaggggtaccgtgtgctggtcagaccaagacctgcctgcccttccatttcctcctccatccctcttggctggccaccctgctgccagctctgtttagatgccaggggctggccagcaactctgtcctaacctggctctgagctaggggtcctcatgtaccccggcctgcattccccagggagcctgacatact

SEQ ID NO: 2831 - protein, 44 aa, Homo sapiens
MGKGYRVLVRPRPACPSISSSIPLGWPPCCQLCLDARGWPATLS

SEQ ID NO: 2832 - DNA, 3860 bp, Homo sapiens
caagagagttgagcctacagcagattttacccaccaaggctgtaaggaggggacttcaggcagccctgtgctctcggcttccacccggtggcacttggctgtgaggaaagaagtaggggtatttaagccatctctccactgagccctattgtgtgccgggcagggttctgggcaccagggaagtcggcactgctgaagccaactgatcgttaggtccctgccctctcagaactcagtctacctcgtgggcaacccaggcaaaaaaccagacagttacagggcactgttggtagtgctctagttagggactgtaggagcccagagaggtacctcatccagcttggaatctcagggatttgaggaggaagggtcacttagctaaggaagacctgaaggatgaccaggaattgaagcaggcaaagtggtgcaaaacaatccagtgttaacagtggctgcaatggccccaggacagatatcagccctataccgtcaaagaaacagaagcaggctggaggggcccaggggcctgctaagctgggtcccaggagaaggataccatttccatccctcaagcacccatacaagtttatagagggaaaccgcacaagctgccctctggtggcagatgcttgaaattccagcagaggcccatctgtctcacaggatgggtcaaggcctgcctagcaaggtagggaagtctttcctcgtgtctggccagcagccagactgctaacagctatctctcccaaccacaggcccagccctcctctctaccccctgtccccttcctgcggatatagacagcacttccctgcccccactgcagcccctggcgccccctaccccaggttcacccacccatccttgatgctaggttctggtgtacctggtcacccagcagccatcccccacccggccattgtgcccccctcagggaagcaggagctgcagcccttcgaccgcaacctgaagacacaagcagagtccaaggcagagaaggaggccaagaagccaaccatcaagaagcccctcaatgccttcatgctgtacatgaaggagatgagagccaaggtcattgcagagtgcacacttaaggagagcgctgccatcaaccagatcctgggccgcagggtgagaccatgggcaggtgggctggcagggatgctccccgaccatcttcagcctggtgcagcctgctgactccctgatgcaccccacctgcccctcttccctgttgcagtggcacgcgctgtcgcgagaagagcaggccaagtactatgagctggcccgcaaggagaggcagctgcacatgcagctatacccaggctggtcagcgcgggacaactacgtgagtgcctagtgacacacagcaggggtgggcaggggaccctttgagataccatgccccaggccacaatctcagtaaggaacgcagaactactgtcctgaaggcaccgatgaggaagggcacggagggtccaaggcctcccatggctgcctcagaagaggacaagcccacatcctattctccactccagaatatgctcacacatgagctgttacccaacatttgattgggccacatgggcagaaggggagaaaggggtctggaagtcacctccttccattcaaactggagaccagattggggtgagggaagagcttctaaatgcactccatagcagcctagcaagaccagcaatcaagaaacaccagcaccccaaggggaagaagaagaggcggtcgagggaaaagcaccaagaatccaccacagaccctggctcgcctaagaaatgccgtgctcgctttggcctcaaccagcagacggattggtgtggtccgtgcaggaggaaaaagaaatgcattcggtacttacccggagaaggccgctgccccagccccgttccttccgatgacagtgctctaggctgccccgggtccccagctccccaggactcaccctcataccatctgctgccccgcttccccacagaactgcttactagccctgcggagccggcacctacatccccaggtctctccactgctctcagcctcccaaccccagggcccccacaggccccccgcagcaccctgcagagcacacaggtacagcaacaggaatctcagagacaggtggcctagcaggcacaggacacctggccgcctccaggagcctaccccctgaaagtgacagagacccagatctcatggaaactggccaggggtcctgttaacgtcatctcagggtccagaccctgaagatttcagaggctgcaggacttctgcctgaacctggggtcatcgattcaaactgctccaagtggtgggaatcagatctgtcttgatgtgtcatctaattaagggaatcccttgtacctatggctgcctgcatctattctttgtaccatctgtcttgccagccagaagcctctgcctccctagcttttctgctataggtcagagatgggctgaactgagcctagctaccttctctacccatctcccccatcccccactgccacaccctccccattcagacacttcatggaccaagaatgagctggtttgtcaaacaacatgtgagcatggtcacaagcacaaagctcaagatgacagctcttctaaggaaatggagaagctctgtttataaaaacaaaaacaaaaccagctgctactcataagttggaccagaggaagccccttactatgatctcaggagcttgcaagaagcaggaaggggaatggaataggttaagtttaggcctatcaacctaagcaacagaaataatctgacactaccttatcaggcaaattggggaggggagggtgtatctagctctagttcaaattatttggaagtgttccctgagaaacccaccagcctaagaagctctggccccaggcttgtcactagcagctgcagtcaacagttcaaagaagtcatggcccaaatccagtgtgcacccctccccattcacagagcctttttcacaattccatttccagttcatctatggcagtccagccagctcctgggcagcttgagagggcaaacccaaaacctcatgacagccagagcctgtctttcagcattcagtccgcctggccggctccagtttccccatggggctgcgggacagaggaccattacaactagatcaaggagcccagaaaacctccagtagtggacaacaggttttcaccatagcctacgttaacccatttttgagccaagcttcaaccctcagccttgaaaaacaagtctttaatttaatttttgttttttgcctaaatccaaagaaaaagggctgccgggccaggcgcggtggctcacgcctgtaatcccagcactttggcaggccgaggcaggtggatcacctgacgtcagtagtttgagaccagcctggccaacatggtgaaaccctgtatctactaaaaatacaaaaattagccggacgtggtggtgcgcgcatgtaatcccagctactcgggaggctgaggcggaagaatcacttgaacccgggaggcggaggttccagtgagccgagatggcgctattgcactccagtctgggtaacagggagactgcatctcaaaaaaaaaaaaaaaaaaaaaaaagggctgtccatgtattcacacacccctcaaaaaaagcctttagttcctactttagccactggtttctcagaatccaaagatcacatattctagtgtaacactgcaagaagtcttgagaaaaagattattgtagtgttcaaaatatttttgtattgttaatgcatcatcatagaaaaacttttaaacatgagaataaagatactttttactgggtttgtttttcaaagcctgaccctgag

SEQ ID NO: 2833 - protein, 197 aa, Homo sapiens
MSCYPTFDWATWAEGEKGVWKSPPSIQTGDQIGVREELLNALHSSLARPAIKKHQHPKGKKKRRSREKHQESTTDPGSPKKCRARFGLNQQTDWCGPCRRKKKCIRYLPGEGRCPSPVPSDDSALGCPGSPAPQDSPSYHLLPRFPTELLTSPAEPAPTSPGLSTALSLPTPGPPQAPRSTLQSTQVQQQESQRQVA

SEQ ID NO: 2834 - DNA, 3148 bp, Homo sapiens
acagcccagtatagcaagtgtagacatggcaccggcagcttaatgggccagctgagtgatggggaagccccaaggagacctcaccaggcctgatgggtcagggagagcttcgcggaaagagtaatagatcttttgcgagaagaaaacaagggaacagccataactggggctgccggggaacggagagggacaggaagcagaggagaagagaaggggctagcaacagcagcaggatgctcatgcagggctgtgcaggcccttgggagcagcctgggttctattctttggacgctgggggaatttcagccgaagcaggccaggaacattcaggtgtctctaatggttactctggctattgtgtggagagaggcctggaagggtcaagcaggagagggatgaggcctcacagggcagccacaggctcctgaggctgggttggtaggggaaggacgtgagaaggggacagattcaaaagctacttgggacctatgtagtaaccatctgaatggcaatctatgtagatttttgcagtgtgtctgtgtagtgtgctgggagcaggtatttgtatttatctctgtgtacttatgtctaggccagtaggatagagtatctatctgttcacctgtgtcctcaagttatgtattatgcaggggcctctgtgtgtgtccaaaggtctggcccataattcttggctcagtgttaactttcttcctgcctccaggttcacccacccatccttgatgctaggttctggtgtacctggtcacccagcagccatcccccacccggccattgtgcccccctcagggaagcaggagctgcagcccttcgaccgcaacctgaagacacaagcagagtccaaggcagagaaggaggccaagaagccaaccatcaagaagcccctcaatgccttcatgctgtacatgaaggagatgagagccaaggtcattgcagagtgcacacttaaggagagcgctgccatcaaccagatcctgggccgcaggtggcacgcgctgtcgcgagaagagcaggccaagtactatgagctggcccgcaaggagaggcagctgcacatgcagctatacccaggctggtcagcgcgggacaactacgggaagaagaagaggcggtcgagggaaaagcaccaagaatccaccacaggaggaaaaagaaatgcattcggtacttacccggagaaggccgctgccccagccccgttccttccgatgacagtgctctaggctgccccgggtccccagctccccaggactcaccctcataccatctgctgccccgcttccccacagaactgcttactagccctgcggagccggcacctacatccccaggtctctccactgctctcagcctcccaaccccagggcccccacaggccccccgcagcaccctgcagagcacacaggtacagcaacaggaatctcagagacaggtggcctagcaggcacaggacacctggccgcctccaggagcctaccccctgaaagtgacagagacccagatctcatggaaactggccaggggtcctgttaacgtcatctcagggtccagaccctgaagatttcagaggctgcaggacttctgcctgaacctggggtcatcgattcaaactgctccaagtggtgggaatcagatctgtcttgatgtgtcatctaattaagggaatcccttgtacctatggctgcctgcatctattctttgtaccatctgtcttgccagccagaagcctctgcctccctagcttttctgctataggtcagagatgggctgaactgagcctagctaccttctctacccatctcccccatcccccactgccacaccctccccattcagacacttcatggaccaagaatgagctggtttgtcaaacaacatgtgagcatggtcacaagcacaaagctcaagatgacagctcttctaaggaaatggagaagctctgtttataaaaacaaaaacaaaaccagctgctactcataagttggaccagaggaagccccttactatgatctcaggagcttgcaagaagcaggaaggggaatggaataggttaagtttaggcctatcaacctaagcaacagaaataatctgacactaccttatcaggcaaattggggaggggagggtgtatctagctctagttcaaattatttggaagtgttccctgagaaacccaccagcctaagaagctctggccccaggcttgtcactagcagctgcagtcaacagttcaaagaagtcatggcccaaatccagtgtgcacccctccccattcacagagcctttttcacaattccatttccagttcatctatggcagtccagccagctcctgggcagcttgagagggcaaacccaaaacctcatgacagccagagcctgtctttcagcattcagtccgcctggccggctccagtttccccatggggctgcgggacagaggaccattacaactagatcaaggagcccagaaaacctccagtagtggacaacaggttttcaccatagcctacgttaacccatttttgagccaagcttcaaccctcagccttgaaaaacaagtctttaatttaatttttgttttttgcctaaatccaaagaaaaagggctgccgggccaggcgcggtggctcacgcctgtaatcccagcactttggcaggccgaggcaggtggatcacctgacgtcagtagtttgagaccagcctggccaacatggtgaaaccctgtatctactaaaaatacaaaaattagccggacgtggtggtgcgcgcatgtaatcccagctactcgggaggctgaggcggaagaatcacttgaacccgggaggcggaggttccagtgagccgagatggcgctattgcactccagtctgggtaacagggagactgcatctcaaaaaaaaaaaaaaaaaaaaaaaagggctgtccatgtattcacacacccctcaaaaaaagcctttagttcctactttagccactggtttctcagaatccaaagatcacatattctagtgtaacactgcaagaagtcttgagaaaaagattattgtagtgttcaaaatatttttgtattgttaatgcatcatcatagaaaaacttttaaacatgagaataaagatactttttactggg

SEQ ID NO: 2835 - protein, 198 aa, Homo sapiens
MQGPLCVSKGLAHNSWLSVNFLPASRFTHPSLMLGSGVPGHPAAIPHPAIVPPSGKQELQPFDRNLKTQAESKAEKEAKKPTIKKPLNAFMLYMKEMRAKVIAECTLKESAAINQILGRRWHALSREEQAKYYELARKERQLHMQLYPGWSARDNYGKKKRRSREKHQESTTGGKRNAFGTYPEKAAAPAPFLPMTVL

SEQ ID NO: 2836 - DNA, 4889 bp, Homo sapiens
cgatgaggaagggcacggagggtccaaggcctcccatggctgcctcagaagaggacaagcccacatcctattctccactccagaatatgctcacacatgagctgttacccaacatttgattgggccacatgggcagaaggggagaaaggggtctggaagtcacctccttccattcaaactggagaccagattggggtgagggaagagcttctaaatgcactccatagcagcctagcaagaccagcaatcaagaaacaccagcaccccaaggggaagaagaagaggcggtcgagggaaaagcaccaagaatccaccacaggtgagaccttctctcagcagcagtggaggctcctctccatgtccccatttcaagagcagccctcctctgacccaaagggaggaacgcggtacccagctaggagccttcagggcctggggcctatgaaaacaaggcctgcatctcacaagtcaaattcccatgcaagaaacagctatattatactaagtcccagggaaacccagcagaactggcttctgctgggtagaattggagtagatggtgcgttcctctgccttgcacccactacctttgctagctccactcaccagagaaaccagcaaagaactgactgtatggtttgatgcttagcccaaacaatgtcctggctagttctgctgagactgggagaggctgagctaggccccatgactaggcccagtagacacacagcctactggctggagcctggcaatttatcacccccacttcaacatttttcatggcagtgcaaagtgctctatgtagagaagcccacaccctgctgcaggcctccttcctaagggtgaattcctgcctctctggtaactgagactccacatccctgaccacctcagccgtgctgtccccacacagggaagctggaggctaggactgggacagagcagggcagagttcctagccctttttccaaggcaaagaataggcccttccttccatctgcaagtgtgtagaacagcataaggtatagccttcagccttatcccttgaaggaatgtaggtcaagaatgaagaaaaactggataaaatgggtagggagttggggaggaggtgggtggccctagggcataaaaggctggatctccatggtcttccttgggcccctctgcagcctccatgctgcaagggccccacaagccacagagatgagccagattgacaggactccctccctcccattcttcccactgcctctactgcgtacctgggtgcccacctttcctgatatcttggctctgggctcttgggctcccactggggctggctgtgccatggagaggcccactctgcctatgggggctgtagggtgtctataactggctaacactgatgttacctcttctttctgggccctgctctgccccgctgcctgctcgccctctgccctgctctacccctctggcatggctgtgagcagaccctggctcgcctaagaaatgccgtgctcgctttggcctcaaccagcagacggattggtgtggtccgtgcaggtgggtttgtccccaccatcgttctccctttgctttaagctgcttccctgactctgcacatgttccactgggcctgcagcccactcctttggcccctcagcccactagcatactcagcagattgggagcccaggcctcctgagaatagtagtaaatactgaacacagcgcgtggagaagaccacttgggtctaagtgcaggaggattggagagaaagacacagaatgttccagaaaggaaggacagactcaagaaggcagctctgatgccagtgggcctagcaggtcctcagcaaacagacagctcagccaccactaagggggcctggagcccattctaccaggcctcaaagtcattatggcccatgggctccctcacttcctcttcaagatgggatccctgcctgtaccatcctgagcccttaatctgaaaaagcaaggtgacaacaacacagaaccatctggttgccaggtagccttatgacttgctatcttgtacctactgataccaaagggctggagaggctgggggagaggacccagggggtaccctgggctgtctgagggaaagggctcatgtgtttcaccatacaacagagaaatacttgtgggtgtgacaaggtttacccaacaagtggttaaagtttcctcagtcagtttcaggccaggcctggcagggctaagatagagggtactccaggcagtaaggccactggctctaaggaacacttgtccagcctctcagtgtacccaccacactccctgtccaagggcaaggaggagtttggggtgtgtctgtgtatccacatacatatgcacggtgggaaacaaccctgtcttcaggggaagttctattccattcattccatcagagacaaactggcccagagaactcaaggatggtaatggacaagagtcactgtccatgtcttcttcctctagcccagcttgaggactgggatggctgggcaaggaagccataggcattgcggccccttgccttggtgcagatgtgagtcccacaaacacatctggagaagctcaaaggccgggactgggagatgactcccttggaagacaggagagatgactcccttggaagacagatgacagcccataggcctagtgacaaaaggcccctttgccaccttgtggctgttctgggaactgcacctgtcctaggtctgggccagaccaagcagaatggcagtctgaggacactgacttaccacccaagtcccaggaagagaggacaaggaatcagccaggcctgtgcaaaggcagcattttttggttgtggtgtatgactatgaattcaccctctgtttacagataactctcttcactattcctaggaggaaaaagaaatgcattcggtacttacccggagaaggccgctgccccagccccgttccttccgatgacagtgctctaggctgccccgggtccccagctccccaggactcaccctcataccatctgctgccccgcttccccacagaactgcttactagccctgcggagccggcacctacatccccaggtctctccactgctctcagcctcccaaccccagggcccccacaggccccccgcagcaccctgcagagcacacaggtacagcaacaggaatctcagagacaggtggcctagcaggcacaggacacctggccgcctccaggagcctaccccctgaaagtgacagagacccagatctcatggaaactggccaggggtcctgttaacgtcatctcagggtccagaccctgaagatttcagaggctgcaggacttctgcctgaacctggggtcatcgattcaaactgctccaagtggtgggaatcagatctgtcttgatgtgtcatctaattaagggaatcccttgtacctatggctgcctgcatctattctttgtaccatctgtcttgccagccagaagcctctgcctccctagcttttctgctataggtcagagatgggctgaactgagcctagctaccttctctacccatctcccccatcccccactgccacaccctccccattcagacacttcatggaccaagaatgagctggtttgtcaaacaacatgtgagcatggtcacaagcacaaagctcaagatgacagctcttctaaggaaatggagaagctctgtttataaaaacaaaaacaaaaccagctgctactcataagttggaccagaggaagccccttactatgatctcaggagcttgcaagaagcaggaaggggaatggaataggttaagtttaggcctatcaacctaagcaacagaaataatctgacactaccttatcaggcaaattggggaggggagggtgtatctagctctagttcaaattatttggaagtgttccctgagaaacccaccagcctaagaagctctggccccaggcttgtcactagcagctgcagtcaacagttcaaagaagtcatggcccaaatccagtgtgcacccctccccattcacagagcctttttcacaattccatttccagttcatctatggcagtccagccagctcctgggcagcttgagagggcaaacccaaaacctcatgacagccagagcctgtctttcagcattcagtccgcctggccggctccagtttccccatggggctgcgggacagaggaccattacaactagatcaaggagcccagaaaacctccagtagtggacaacaggttttcaccatagcctacgttaacccatttttgagccaagcttcaaccctcagccttgaaaaacaagtctttaatttaatttttgttttttgcctaaatccaaagaaaaagggctgccgggccaggcgcggtggctcacgcctgtaatcccagcactttggcaggccgaggcaggtggatcacctgacgtcagtagtttgagaccagcctggccaacatggtgaaaccctgtatctactaaaaatacaaaaattagccggacgtggtggtgcgcgcatgtaatcccagctactcgggaggctgaggcggaagaatcacttgaacccgggaggcggaggttccagtgagccgagatggcgctattgcactccagtctgggtaacagggagactgcatctcaaaaaaaaaaaaaaaaaaaaaaaagggctgtccatgtattcacacacccctcaaaaaaagcctttagttcctactttagccactggtttctcagaatccaaagatcacatattctagtgtaacactgcaagaagtcttgagaaaaagattattgtagtgttcaaaatatttttgtattgttaatgcatcatcatagaaaaacttttaaacatgagaataaagatactttttactggg

SEQ ID NO: 2837 - protein, 181 aa, Homo sapiens
MSCYPTFDWATWAEGEKGVWKSPPSIQTGDQIGVREELLNALHSSLARPAIKKHQHPKGKKKRRSREKHQESTTGETFSQQQWRLLSMSPFQEQPSSDPKGGTRYPARSLQGLGPMKTRPASHKSNSHARNSYIILSPRETQQNWLLLGRIGVDGAFLCLAPTTFASSTHQRNQQRTDCMV

SEQ ID NO: 2838 - DNA, 4322 bp, Homo sapiens
tgaaaacaaggcctgcatctcacaagtcaaattcccatgcaagaaacagctatattatactaagtcccagggaaacccagcagaactggcttctgctgggtagaattggagtagatggtgcgttcctctgccttgcacccactacctttgctagctccactcaccagagaaaccagcaaagaactgactgtatggtttgatgcttagcccaaacaatgtcctggctagttctgctgagactgggagaggctgagctaggccccatgactaggcccagtagacacacagcctactggctggagcctggcaatttatcacccccacttcaacatttttcatggcagtgcaaagtgctctatgtagagaagcccacaccctgctgcaggcctccttcctaagggtgaattcctgcctctctggtaactgagactccacatccctgaccacctcagccgtgctgtccccacacagggaagctggaggctaggactgggacagagcagggcagagttcctagccctttttccaaggcaaagaataggcccttccttccatctgcaagtgtgtagaacagcataaggtatagccttcagccttatcccttgaaggaatgtaggtcaagaatgaaccacagagatgagccagattgacaggactccctccctcccattcttcccactgcctctactgcgtacctgggtgcccacctttcctgatatcttggctctgggctcttgggctcccactggggctggctgtgccatggagaggcccactctgcctatgggggctgtagggtgtctataactggctaacactgatgttacctcttctttctgggccctgctctgccccgctgcctgctcgccctctgccctgctctacccctctggcatggctgtgagcagaccctggctcgcctaagaaatgccgtgctcgctttggcctcaaccagcagacggattggtgtggtccgtgcaggtgggtttgtccccaccatcgttctccctttgctttaagctgcttccctgactctgcacatgttccactgggcctgcagcccactcctttggcccctcagcccactagcatactcagcagattgggagcccaggcctcctgagaatagtagtaaatactgaacacagcgcgtggagaagaccacttgggtctaagtgcaggaggattggagagaaagacacagaatgttccagaaaggaaggacagactcaagaaggcagctctgatgccagtgggcctagcaggtcctcagcaaacagacagctcagccaccactaagggggcctggagcccattctaccaggcctcaaagtcattatggcccatgggctccctcacttcctcttcaagatgggatccctgcctgtaccatcctgagcccttaatctgaaaaagcaaggtgacaacaacacagaaccatctggttgccaggtagccttatgacttgctatcttgtacctactgataccaaagggctggagaggctgggggagaggacccagggggtaccctgggctgtctgagggaaagggctcatgtgtttcaccatacaacagagaaatacttgtgggtgtgacaaggtttacccaacaagtggttaaagtttcctcagtcagtttcaggccaggcctggcagggctaagatagagggtactccaggcagtaaggccactggctctaaggaacacttgtccagcctctcagtgtacccaccacactccctgtccaagggcaaggaggagtttggggtgtgtctgtgtatccacatacatatgcacggtgggaaacaaccctgtcttcaggggaagttctattccattcattccatcagagacaaactggcccagagaactcaaggatggtaatggacaagagtcactgtccatgtcttcttcctctagcccagcttgaggactgggatggctgggcaaggaagccataggcattgcggccccttgccttggtgcagatgtgagtcccacaaacacatctggagaagctcaaaggccgggactgggagatgactcccttggaagacaggagagatgactcccttggaagacagatgacagcccataggcctagtgacaaaaggcccctttgccaccttgtggctgttctgggaactgcacctgtcctaggtctgggccagaccaagcagaatggcagtctgaggacactgacttaccacccaagtcccaggaagagaggacaaggaatcagccaggcctgtgcaaaggcagcattttttggttgtggtgtatgactatgaattcaccctctgtttacagataactctcttcactattcctaggaggaaaaagaaatgcattcggtacttacccggagaaggccgctgccccagccccgttccttccgatgacagtgctctaggctgccccgggtccccagctccccaggactcaccctcataccatctgctgccccgcttccccacagaactgcttactagccctgcggagccggcacctacatccccaggtctctccactgctctcagcctcccaaccccagggcccccacaggccccccgcagcaccctgcagagcacacaggtacagcaacaggaatctcagagacaggtggcctagcaggcacaggacacctggccgcctccaggagcctaccccctgaaagtgacagagacccagatctcatggaaactggccaggggtcctgttaacgtcatctcagggtccagaccctgaagatttcagaggctgcaggacttctgcctgaacctggggtcatcgattcaaactgctccaagtggtgggaatcagatctgtcttgatgtgtcatctaattaagggaatcccttgtacctatggctgcctgcatctattctttgtaccatctgtcttgccagccagaagcctctgcctccctagcttttctgctataggtcagagatgggctgaactgagcctagctaccttctctacccatctcccccatcccccactgccacaccctccccattcagacacttcatggaccaagaatgagctggtttgtcaaacaacatgtgagcatggtcacaagcacaaagctcaagatgacagctcttctaaggaaatggagaagctctgtttataaaaacaaaaacaaaaccagctgctactcataagttggaccagaggaagccccttactatgatctcaggagcttgcaagaagcaggaaggggaatggaataggttaagtttaggcctatcaacctaagcaacagaaataatctgacactaccttatcaggcaaattggggaggggagggtgtatctagctctagttcaaattatttggaagtgttccctgagaaacccaccagcctaagaagctctggccccaggcttgtcactagcagctgcagtcaacagttcaaagaagtcatggcccaaatccagtgtgcacccctccccattcacagagcctttttcacaattccatttccagttcatctatggcagtccagccagctcctgggcagcttgagagggcaaacccaaaacctcatgacagccagagcctgtctttcagcattcagtccgcctggccggctccagtttccccatggggctgcgggacagaggaccattacaactagatcaaggagcccagaaaacctccagtagtggacaacaggttttcaccatagcctacgttaacccatttttgagccaagcttcaaccctcagccttgaaaaacaagtctttaatttaatttttgttttttgcctaaatccaaagaaaaagggctgccgggccaggcgcggtggctcacgcctgtaatcccagcactttggcaggccgaggcaggtggatcacctgacgtcagtagtttgagaccagcctggccaacatggtgaaaccctgtatctactaaaaatacaaaaattagccggacgtggtggtgcgcgcatgtaatcccagctactcgggaggctgaggcggaagaatcacttgaacccgggaggcggaggttccagtgagccgagatggcgctattgcactccagtctgggtaacagggagactgcatctcaaaaaaaaaaaaaaaaaaaaaaaagggctgtccatgtattcacacacccctcaaaaaaagcctttagttcctactttagccactggtttctcagaatccaaagatcacatattctagtgtaacactgcaagaagtcttgagaaaaagattattgtagtgttcaaaatatttttgtattgttaatgcatcatcatagaaaaacttttaaacatgagaataaagatactttttactggg

SEQ ID NO: 2839 - protein, 101 aa, Homo sapiens
MCHLIKGIPCTYGCLHLFFVPSVLPARSLCLPSFSAIGQRWAELSLATFSTHLPHPPLPHPPHSDTSWTKNELVCQTTCEHGHKHKAQDDSSSKEMEKLCL

SEQ ID NO: 2840 - DNA, 1906 bp, Homo sapiens
gctgcctgctcgccctctgccctgctctacccctctggcatggctgtgagcagaccctggctcgcctaagaaatgccgtgctcgctttggcctcaaccagcagacggattggtgtggtccgtgcaggtgggtttgtccccaccatcgttctccctttgctttaagctgcttccctgactctgcacatgttccactgggcctgcagcccactcctttggcccctcagcccactagcatactcagcagattgggagcccaggcctcctgagaatagtagtaaatactgaacacagcgcgtggagaagaccacttgggtctaagtgcaggaggattggagagaaagacacagaatgacttctgcctgaacctggggtcatcgattcaaactgctccaagtggtgggaatcagatctgtcttgatgtgtcatctaattaagggaatcccttgtacctatggctgcctgcatctattctttgtaccatctgtcttgccagccagaagcctctgcctccctagcttttctgctataggtcagagatgggctgaactgagcctagctaccttctctacccatctcccccatcccccactgccacaccctccccattcagacacttcatggaccaagaatgagctggtttgtcaaacaacatgtgagcatggtcacaagcacaaagctcaagatgacagctcttctaaggaaatggagaagctctgtttataaaaacaaaaacaaaaccagctgctactcataagttggaccagaggaagccccttactatgatctcaggagcttgcaagaagcaggaaggggaatggaataggttaagtttaggcctatcaacctaagcaacagaaataatctgacactaccttatcaggcaaattggggaggggagggtgtatctagctctagttcaaattatttggaagtgttccctgagaaacccaccagcctaagaagctctggccccaggcttgtcactagcagctgcagtcaacagttcaaagaagtcatggcccaaatccagtgtgcacccctccccattcacagagcctttttcacaattccatttccagttcatctatggcagtccagccagctcctgggcagcttgagagggcaaacccaaaacctcatgacagccagagcctgtctttcagcattcagtccgcctggccggctccagtttccccatggggctgcgggacagaggaccattacaactagatcaaggagcccagaaaacctccagtagtggacaacaggttttcaccatagcctacgttaacccatttttgagccaagcttcaaccctcagccttgaaaaacaagtctttaatttaatttttgttttttgcctaaatccaaagaaaaagggctgccgggccaggcgcggtggctcacgcctgtaatcccagcactttggcaggccgaggcaggtggatcacctgacgtcagtagtttgagaccagcctggccaacatggtgaaaccctgtatctactaaaaatacaaaaattagccggacgtggtggtgcgcgcatgtaatcccagctactcgggaggctgaggcggaagaatcacttgaacccgggaggcggaggttccagtgagccgagatggcgctattgcactccagtctgggtaacagggagactgcatctcaaaaaaaaaaaaaaaaaaaaaaaagggctgtccatgtattcacacacccctcaaaaaaagcctttagttcctactttagccactggtttctcagaatccaaagatcacatattctagtgtaacactgcaagaagtcttgagaaaaagattattgtagtgttcaaaatatttttgtattgttaatgcatcatcatagaaaaacttttaaacatgagaataaagatactttttactggg

SEQ ID NO: 2841 - protein, 101 aa, Homo sapiens; identical to SEQ ID NO: 2839

SEQ ID NO: 2842 - DNA, 1372 bp, Homo sapiens
ggctgcaaactacttagacatcaaaggtttgcttgatgttacatgcaagactgttgccaatatgatcaaggggaaaactcctgaggagattcgcaagaccttcaatatcaaaaatgactttactgaagaggaggaagcccaggtacgcaaagagaaccagtggtgtgaagagaagtgaaattttgagcacagatcccaaaccttacggccaagtttcttctagtatgatggaaagtttcttttttctttgctctgaataaaactgaactgtgggttctctataagtggcattttgggctttccctcttttttgtaaagcaatgtctgcctagtttattgtccagttaactttagtgaccttttaaaagttggcattgtaaataaaacaacttgcaaaaaagttttctggaatagaattaacaaaatattatctttattcatgagttggaaactggaaaaaggcttcttgaagtaaatgttctgagtggagctactaggatgtcttccagcctcctgcagtcaaggagtaccactgtattgattagcctgtatgtagcagggctcccttcattgcatctgaggacttgttttctttttctttatttttaatcctcttagttttaaatatattgcctagagactcagttactacccagtttgtggttttttgggagaaatgtaactggacagttagcttttcaattaaaaagacacttaacccatgtgggatgtcatctttttataattagtgttcccatgtggagaaaattattcacactacttgcatgtaaagaataatttaacttttaacattaaaatatgtggtaaaacccagaaagcatccatcatgaatgcaagatactttcaataaaaagtaagttatatagtaggtagttaagtttgcttttgtggacttaaatgtgtctcttcacttaaatgggttgaatgtgtatatatttgttcagcttgaaaagacttagtttatatcctagctcactggaggctgctgacataaccataacttctgtcccttctaattgtcatttatatgcctaactggagctagtactttaattcttaacacaaaattactctgccattgtttccagcttccctcctacaatagaatgaagtttttttgatggcttgagatggctcacaaattttgatttttttttcttccttgtgctccctttttttctccttgcttttccagttaacatctatattcacatgtaatcttgttttctcttcacattcactgagttgttcaggctcagatcatcccttgacagtagtttgccttcatctcacctttcatttgtcccaaattcaccttatttaataaagtcccatatgttgtctcacttaa

SEQ ID NO: 2843 - protein, 48 aa, Homo sapiens [sequence omitted]

SEQ ID NO: 2844 - DNA, 3629 bp, Homo sapiens
aaaacaaaaacctttcgctggccaggcacagtggctcatagctgtaatcccaacactttgggagggcaaggtgggtgaattgcttgagttcaggagtttgcaacatgatgaaaccttatctctacaaaaacaaaatacaaaaatgagccaggtgtggtggcatgcacctgtagttgcagctacttgggaggctgaggtgggaggatcgcttaagcacaggaggtcgagtgagccatgatcgcggcactgcattccagcctgggtgacacagtgagatcttgtctcaaaaacaaacaaacaaccctttgcttggcttttccttattgaaattgttctttctttttttttttttggatcctggcaatgtttcttggctctgccattttctctcagcattgtttactcctccaacattttgctatgaaaaagttttagccatacagaaaaatggaaagaattacacagtagacaaccatgtagccactgcctagattctacaactgaaaacactttcagtattgattttggtctttatgctggtatgtatagtctaagtaatcagcttcctgaaactttatggagtaattattctcctattaaggaaattttggggcttttcctgctttgttcctacaccaaatagtctcacacatgtgtctagggtatttggaatttgctggttacaatatatgtacatattcagcttttctgaggagtgctggattagctttcaaaggggttataccaatttatactctctagaagagtttgtgtttcctttccactattgcccaacaattagtatcagtttcttgattttttttcaatctagagaagtatctgtagtgttagttttgcttctagtaaagttgagcgttccttatgtttggctattcagatttcatttattggctgtacatattaacccatttctctttaatgatttttgaaagattttatattctctcagctaatcattgttgtacatattgcaggtatcttccagtcattgtcctaacttttctttttgcatagaagctttttaatgtagtcaagtacagtactctgtctgcatggcttgcttttatctaataagatcttctcccttctagggttataatgattcttcaagcttcatttttgtttttcaagcttggctgttaatggctcaagtcaacctctagctagttattattccaatatagggataagttgtcccagcagtggaatgagtaccttgtgacaaagtgccacagaggaatgaacttttgttgttgtaggtcattcagtggtgcacccaccacaaggatgaccctcctcctcctgaagatgatgagaacaaagaaaagcgaacagatgatatccctgtttgggaccaagaattcctgaaagttgaccaaggaacactttttgaactcattctggctgcaaactacttagacatcaaaggtttgcttgatgttacatgcaagactgttgccaatatgatcaaggggaaaactcctgaggagattcgcaagaccttcaatatcaaaaatgactttactgaagaggaggaagcccaggtaggtagcacacagttttgtctttgatcacatgctcttaaaaagggagtaacacctataacatgccagcaaaagaggtgactgtatcaagtagtcttgatactttagggataatatgtacttaatgtgtcttaaacatactcttactgttctgtctttatgaatctgaacacttagatgatactgcattttaagcataagaacaattagttttcaatgagaagagctcttgttaatgtattaacagttactagttttggcacctgcaactttctgtatagaccatacatatctgacatcagaaaagcaggccctagagagaagtatatactagggtactttagagcaacttaatgaggggaggaaatgaaagaatagatcagaatgattttgttgacatgactacagactgaaataatgtgaatgaattaactgaatttgctctgtcaactttagtaaattgcccattgcctttgctttgttcataatttcagcagggcagaataaaaaccatgggaggcaaagaaaggaaatccggaaatatagtcttaacctggtgttgttctaattttccatctgttcttctgactcaactcactggctatcgatgaatcagtaggtagtatttataagtcttaggaaagactactcaagttaaggtacttccctatatccatctcttttaggtacgcaaagagaaccagtggtgtgaagagaagtgaaatgttgtgcctgacactgtaacactgtaaggattgttccaaatactagttgcactgctctgtttataattgttaatattagacaaacagtagacaaatgcagcagcaagtcaattgtattagcagaatattgtcctcattgcatgtgtagtttgagcacagatcccaaaccttacggccaagtttcttctagtatgatggaaagtttcttttttctttgctctgaataaaactgaactgtgggttctctataagtggcattttgggctttccctcttttttgtaaagcaatgtctgcctagtttattgtccagttaactttagtgaccttttaaaagttggcattgtaaataaaacaacttgcaaaaaagttttctggaatagaattaacaaaatattatctttattcatgagttggaaactggaaaaaggcttcttgaagtaaatgttctgagtggagctactaggatgtcttccagcctcctgcagtcaaggagtaccactgtattgattagcctgtatgtagcagggctcccttcattgcatctgaggacttgttttctttttctttatttttaatcctcttagttttaaatatattgcctagagactcagttactacccagtttgtggttttttgggagaaatgtaactggacagttagcttttcaattaaaaagacacttaacccatgtgggatgtcatctttttataattagtgttcccatgtggagaaaattattcacactacttgcatgtaaagaataatttaacttttaacattaaaatatgtggtaaaacccagaaagcatccatcatgaatgcaagatactttcaataaaaagtaagttatatagtaggtagttaagtttgcttttgtggacttaaatgtgtctcttcacttaaatgggttgaatgtgtatatatttgttcagcttgaaaagacttagtttatatcctagctcactggaggctgctgacataaccataacttctgtcccttctaattgtcatttatatgcctaactggagctagtactttaattcttaacacaaaattactctgccattgtttccagcttccctcctacaatagaatgaagtttttttgatggcttgagatggctcacaaattttgatttttttttcttccttgtgctccctttttttctccttgcttttccagttaacatctatattcacatgtaatcttgttttctcttcacattcactgagttgttcaggctcagatcatcccttgacagtagtttgccttcatctcacctttcatttgtcccaaattcaccttatttaataaagtcccatatgttgtctcacttaa

SEQ ID NO: 2845 - protein, 86 aa, Homo sapiens
MYIFSFSEECWISFQRGYTNLYSLEEFVFPFHYCPTISISFLIFFQSREVSVVLVLLLVKLSVPYVWLFRFHLLAVHINPFLFNDF

SEQ ID NO: 2846 - DNA, 1993 bp, Homo sapiens
gttgtcgaccctgttcttcgggagaccctaccaggttccgttcacctgccccgcccccgactcagcgaggcctcctctggccgggcgtcctcacggcgctccataaacataaatgagcatattctgatgtactctttggatctgaactcatcttcacagatgccttcaattaagttgcagagttctgatggagagatatttgaagttgatgtggaaattgccaaacaatctgtgactattaagaccatgttggaagatttgggaatggatgatgaaggagatgatgacccagttcctctaccaaatgtgaatgcagcaatattaaaaaaggtcattcagtggtgcacccaccacaaggatgaccctcctcctcctgaagatgatgagaacaaagaaaagcgaacagatgatatccctgtttgggaccaagaattcctgaaagttgaccaaggaacactttttgaactcattctggctgcaaactacttagacatcaaaggtttgcttgatgttacatgcaagactgttgccaatatgatcaaggggaaaactcctgaggagattcgcaagaccttcaatatcaaaaatgactttactgaagaggaggaagcccaggtacgcaaagagaaccagtggtgtgaagagaagtgaaatgttgtgcctgacactgtaacactgtaaggattgttccaaatactagttgcactgctctgtttataattgttaatattagacaaacagtagacaaatgcagcagcaagtcaattgtattagcagaatattgtcctcattgcatgtgtagtttgagcacagatcccaaaccttacggccaagtttcttctagtatgatggaaagtttcttttttctttgctctgaataaaactgaactgtgggttctctataagtggcattttgggctttccctcttttttgtaaagcaatgtctgcctagtttattgtccagttaactttagtgaccttttaaaagttggcattgtaaataaaacaacttgcaaaaaagttttctggaatagaattaacaaaatattatctttattcatgagttggaaactggaaaaaggcttcttgaagtaaatgttctgagtggagctactaggatgtcttccagcctcctgcagtcaaggagtaccactgtattgattagcctgtatgtagcagggctcccttcattgcatctgaggacttgttttctttttctttatttttaatcctcttagttttaaatatattgcctagagactcagttactacccagtttgtggttttttgggagaaatgtaactggacagttagcttttcaattaaaaagacacttaacccatgtgggatgtcatctttttataattagtgttcccatgtggagaaaattattcacactacttgcatgtaaagaataatttaacttttaacattaaaatatgtggtaaaacccagaaagcatccatcatgaatgcaagatactttcaataaaaagtaagttatatagtaggtagttaagtttgcttttgtggacttaaatgtgtctcttcacttaaatgggttgaatgtgtatatatttgttcagcttgaaaagacttagtttatatcctagctcactggaggctgctgacataaccataacttctgtcccttctaattgtcatttatatgcctaactggagctagtactttaattcttaacacaaaattactctgccattgtttccagcttccctcctacaatagaatgaagtttttttgatggcttgagatggctcacaaattttgatttttttttcttccttgtgctccctttttttctccttgcttttccagttaacatctatattcacatgtaatcttgttttctcttcacattcactgagttgttcaggctcagatcatcccttgacagtagtttgccttcatctcacctttcatttgtcccaaattcaccttatttaataaagtcccatatgttgtctcacttaa

SEQ ID NO: 2847 - protein, 174 aa, Homo sapiens [sequence omitted]

SEQ ID NO: 2848 - DNA, 2208 bp, Homo sapiens
gacctttctaggccagtcggggtccggcacccagttgacgagacagcgcggcgctttcagagctggggagaggcgaaaactcttccggccccccgatcccccggccagccgcccccggcagctccttgccgcctcccggcctgggcccgcccagccgttctcggcctgccgtcaggcgatctcggcggccagcccagccgcgatgtgacgccgcgcgccccggggtcctcggcgcctgcgccctctcctataaagcagacgccgcgccgcgctgcgacgctgtagtggcttcgtcttcggtttttctcttccttcgctaacgcctcccggctctcgtcagcctcccgccggccgtctccttaacaccgaacaccatgccttcaattaagttgcagagttctgatggagagatatttgaagttgatgtggaaattgccaaacaatctgtgactattaagaccatgttggaagatttgggaatggatgatgaaggagatgatgacccagttcctctaccaaatgtgaatgcagcaatattaaaaaaggtcattcagtggtgcacccaccacaaggatgaccctcctcctcctgaagatgatgagaacaaagaaaagcgaacagatgatatccctgtttgggaccaagaattcctgaaatatactttaaggaaaacaactgtctctttacaggctgcaaactacttagacatcaaaggtttgcttgatgttacatgcaagactgttgccaatatgatcaaggggaaaactcctgaggagattcgcaagaccttcaatatcaaaaatgactttactgaagaggaggaagcccaggtacgcaaagagaaccagtggtgtgaagagaagtgaaatgttgtgcctgacactgtaacactgtaaggattgttccaaatactagttgcactgctctgtttataattgttaatattagacaaacagtagacaaatgcagcagcaagtcaattgtattagcagaatattgtcctcattgcatgtgtagtttgagcacagatcccaaaccttacggccaagtttcttctagtatgatggaaagtttcttttttctttgctctgaataaaactgaactgtgggttctctataagtggcattttgggctttccctcttttttgtaaagcaatgtctgcctagtttattgtccagttaactttagtgaccttttaaaagttggcattgtaaataaaacaacttgcaaaaaagttttctggaatagaattaacaaaatattatctttattcatgagttggaaactggaaaaaggcttcttgaagtaaatgttctgagtggagctactaggatgtcttccagcctcctgcagtcaaggagtaccactgtattgattagcctgtatgtagcagggctcccttcattgcatctgaggacttgttttctttttctttatttttaatcctcttagttttaaatatattgcctagagactcagttactacccagtttgtggttttttgggagaaatgtaactggacagttagcttttcaattaaaaagacacttaacccatgtgggatgtcatctttttataattagtgttcccatgtggagaaaattattcacactacttgcatgtaaagaataatttaacttttaacattaaaatatgtggtaaaacccagaaagcatccatcatgaatgcaagatactttcaataaaaagtaagttatatagtaggtagttaagtttgcttttgtggacttaaatgtgtctcttcacttaaatgggttgaatgtgtatatatttgttcagcttgaaaagacttagtttatatcctagctcactggaggctgctgacataaccataacttctgtcccttctaattgtcatttatatgcctaactggagctagtactttaattcttaacacaaaattactctgccattgtttccagcttccctcctacaatagaatgaagtttttttgatggcttgagatggctcacaaattttgatttttttttcttccttgtgctccctttttttctccttgcttttccagttaacatctatattcacatgtaatcttgttttctcttcacattcactgagttgttcaggctcagatcatcccttgacagtagtttgccttcatctcacctttcatttgtcccaaattcaccttatttaataaagtcccatatgttgtctcacttaa

SEQ ID NO: 2849 - protein, 163 aa, Homo sapiens
MPSIKLQSSDGEIFEVDVEIAKQSVTIKTMLEDLGMDDEGDDDPVPLPNVNAAILKKVIQWCTHHKDDPPPPEDDENKEKRTDDIPVWDQEFLKYTLRKTTVSLQAANYLDIKGLLDVTCKTVANMIKGKTPEEIRKTFNIKNDFTEEEEAQVRKENQWCEEK

SEQ ID NO: 2850 - DNA, 2208 bp, Homo sapiens
gacctttctaggccagtcggggtccggcacccagttgacgagacagcgcggcgctttcagagctggggagaggcgaaaactcttccggccccccgatcccccggccagccgcccccggcagctccttgccgcctcccggcctgggcccgcccagccgttctcggcctgccgtcaggcgatctcggcggccagcccagccgcgatgtgacgccgcgcgccccggggtcctcggcgcctgcgccctctcctataaagcagacgccgcgccgcgctgcgacgctgtagtggcttcgtcttcggtttttctcttccttcgctaacgcctcccggctctcgtcagcctcccgccggccgtctccttaacaccgaacaccatgccttcaattaagttgcagagttctgatggagagatatttgaagttgatgtggaaattgccaaacaatctgtgactattaagaccatgttggaagatttgggaatggatgatgaaggagatgatgacccagttcctctaccaaatgtgaatgcagcaatattaaaaaaggtcattcagtggtgcacccaccacaaggatgaccctcctcctcctgaagatgatgagaacaaagaaaagcgaacagatgatatccctgtttgggaccaagaattcctgaaagttgaccaaggaacactttttgaactcattctggctgcaaactacttagacatcaaaggtttgcttgatgttacatgcaagactgttgccaatatgatcaaggggaaaactcctgaggagattcgcaagaccttcaatatcaaaaatgactttactgaagaggaggaagcccaggtacgcaaagagaaccagtggtgtgaagagaagtgaaatgttgtgcctgacactgtaacactgtaaggattgttccaaatactagttgcactgctctgtttataattgttaatattagacaaacagtagacaaatgcagcagcaagtcaattgtattagcagaatattgtcctcattgcatgtgtagtttgagcacagatcccaaaccttacggccaagtttcttctagtatgatggaaagtttcttttttctttgctctgaataaaactgaactgtgggttctctataagtggcattttgggctttccctcttttttgtaaagcaatgtctgcctagtttattgtccagttaactttagtgaccttttaaaagttggcattgtaaataaaacaacttgcaaaaaagttttctggaatagaattaacaaaatattatctttattcatgagttggaaactggaaaaaggcttcttgaagtaaatgttctgagtggagctactaggatgtcttccagcctcctgcagtcaaggagtaccactgtattgattagcctgtatgtagcagggctcccttcattgcatctgaggacttgttttctttttctttatttttaatcctcttagttttaaatatattgcctagagactcagttactacccagtttgtggttttttgggagaaatgtaactggacagttagcttttcaattaaaaagacacttaacccatgtgggatgtcatctttttataattagtgttcccatgtggagaaaattattcacactacttgcatgtaaagaataatttaacttttaacattaaaatatgtggtaaaacccagaaagcatccatcatgaatgcaagatactttcaataaaaagtaagttatatagtaggtagttaagtttgcttttgtggacttaaatgtgtctcttcacttaaatgggttgaatgtgtatatatttgttcagcttgaaaagacttagtttatatcctagctcactggaggctgctgacataaccataacttctgtcccttctaattgtcatttatatgcctaactggagctagtactttaattcttaacacaaaattactctgccattgtttccagcttccctcctacaatagaatgaagtttttttgatggcttgagatggctcacaaattttgatttttttttcttccttgtgctccctttttttctccttgcttttccagttaacatctatattcacatgtaatcttgttttctcttcacattcactgagttgttcaggctcagatcatcccttgacagtagtttgccttcatctcacctttcatttgtcccaaattcaccttatttaataaagtcccatatgttgtctcacttaa

SEQ ID NO: 2851 - protein, 163 aa, Homo sapiens; identical to SEQ ID NO: 299

SEQ ID NO: 2852 - DNA, 2894 bp, Homo sapiens
gacctttctaggccagtcggggtccggcacccagttgacgagacagcgcggcgctttcagagctggggagaggcgaaaactcttccggccccccgatcccccggccagccgcccccggcagctccttgccgcctcccggcctgggcccgcccagccgttctcggcctgccgtcaggcgatctcggcggccagcccagccgcgatgtgacgccgcgcgccccggggtcctcggcgcctgcgccctctcctataaagcagacgccgcgccgcgctgcgacgctgtagtggcttcgtcttcggtttttctcttccttcgctaacgcctcccggctctcgtcagcctcccgccggccgtctccttaacaccgaacaccatgccttcaattaagttgcagagttctgatggagagatatttgaagttgatgtggaaattgccaaacaatctgtgactattaagaccatgttggaagatttgggaatggatgatgaaggagatgatgacccagttcctctaccaaatgtgaatgcagcaatattaaaaaaggtcattcagtggtgcacccaccacaaggatgaccctcctcctcctgaagatgatgagaacaaagaaaagcgaacagatgatatccctgtttgggaccaagaattcctgaaagttgaccaaggaacactttttgaactcattctggctgcaaactacttagacatcaaaggtttgcttgatgttacatgcaagactgttgccaatatgatcaaggggaaaactcctgaggagattcgcaagaccttcaatatcaaaaatgactttactgaagaggaggaagcccaggtaggtagcacacagttttgtctttgatcacatgctcttaaaaagggagtaacacctataacatgccagcaaaagaggtgactgtatcaagtagtcttgatactttagggataatatgtacttaatgtgtcttaaacatactcttactgttctgtctttatgaatctgaacacttagatgatactgcattttaagcataagaacaattagttttcaatgagaagagctcttgttaatgtattaacagttactagttttggcacctgcaactttctgtatagaccatacatatctgacatcagaaaagcaggccctagagagaagtatatactagggtactttagagcaacttaatgaggggaggaaatgaaagaatagatcagaatgattttgttgacatgactacagactgaaataatgtgaatgaattaactgaatttgctctgtcaactttagtaaattgcccattgcctttgctttgttcataatttcagcagggcagaataaaaaccatgggaggcaaagaaaggaaatccggaaatatagtcttaacctggtgttgttctaattttccatctgttcttctgactcaactcactggctatcgatgaatcagtaggtagtatttataagtcttaggaaagactactcaagttaaggtacttccctatatccatctcttttaggtacgcaaagagaaccagtggtgtgaagagaagtgaaatgttgtgcctgacactgtaacactgtaaggattgttccaaatactagttgcactgctctgtttataattgttaatattagacaaacagtagacaaatgcagcagcaagtcaattgtattagcagaatattgtcctcattgcatgtgtagtttgagcacagatcccaaaccttacggccaagtttcttctagtatgatggaaagtttcttttttctttgctctgaataaaactgaactgtgggttctctataagtggcattttgggctttccctcttttttgtaaagcaatgtctgcctagtttattgtccagttaactttagtgaccttttaaaagttggcattgtaaataaaacaacttgcaaaaaagttttctggaatagaattaacaaaatattatctttattcatgagttggaaactggaaaaaggcttcttgaagtaaatgttctgagtggagctactaggatgtcttccagcctcctgcagtcaaggagtaccactgtattgattagcctgtatgtagcagggctcccttcattgcatctgaggacttgttttctttttctttatttttaatcctcttagttttaaatatattgcctagagactcagttactacccagtttgtggttttttgggagaaatgtaactggacagttagcttttcaattaaaaagacacttaacccatgtgggatgtcatctttttataattagtgttcccatgtggagaaaattattcacactacttgcatgtaaagaataatttaacttttaacattaaaatatgtggtaaaacccagaaagcatccatcatgaatgcaagatactttcaataaaaagtaagttatatagtaggtagttaagtttgcttttgtggacttaaatgtgtctcttcacttaaatgggttgaatgtgtatatatttgttcagcttgaaaagacttagtttatatcctagctcactggaggctgctgacataaccataacttctgtcccttctaattgtcatttatatgcctaactggagctagtactttaattcttaacacaaaattactctgccattgtttccagcttccctcctacaatagaatgaagtttttttgatggcttgagatggctcacaaattttgatttttttttcttccttgtgctccctttttttctccttgcttttccagttaacatctatattcacatgtaatcttgttttctcttcacattcactgagttgttcaggctcagatcatcccttgacagtagtttgccttcatctcacctttcatttgtcccaaattcaccttatttaataaagtcccatatgttgtctcacttaa

SEQ ID NO: 2853 - protein, 160 aa, Homo sapiens; identical to SEQ ID NO: 297

SEQ ID NO: 2854 - DNA, 1881 bp, Homo sapiens
gacctttctaggccagtcggggtccggcacccagttgacgagacagcgcggcgctttcagagctggggagaggcgaaaactcttccggccccccgatcccccggccagccgcccccggcagctccttgccgcctcccggcctgggcccgcccagccgttctcggcctgccgtcaggcgatctcggcggccagcccagccgcgatgtgacgccgcgcgccccggggtcctcggcgcctgcgccctctcctataaagcagacgccgcgccgcgctgcgacgctgtagtggcttcgtcttcggtttttctcttccttcgctaacgcctcccggctctcgtcagcctcccgccggccgtctccttaacaccgaacaccatgccttcaattaagttgcagagttctgatggagagatatttgaagttgatgtggaaattgccaaacaatctgtgactattaagaccatgttggaagatttgggaatggatgatgaaggagatgatgacccagttcctctaccaaatgtgaatgcagcaatattaaaaaaggtcattcagtggtgcacccaccacaaggatgaccctcctcctcctgaagatgatgagaacaaagaaaagcgaacagatgatatccctgtttgggaccaagaattcctgaaagttgaccaaggaacactttttgaactcattctggctgcaaactacttagacatcaaaggtttgcttgatgttacatgcaagactgttgccaatatgatcaaggggaaaactcctgaggagattcgcaagaccttcaatatcaaaaatgagctttccctcttttttgtaaagcaatgtctgcctagtttattgtccagttaactttagtgaccttttaaaagttggcattgtaaataaaacaacttgcaaaaaagttttctggaatagaattaacaaaatattatctttattcatgagttggaaactggaaaaaggcttcttgaagtaaatgttctgagtggagctactaggatgtcttccagcctcctgcagtcaaggagtaccactgtattgattagcctgtatgtagcagggctcccttcattgcatctgaggacttgttttctttttctttatttttaatcctcttagttttaaatatattgcctagagactcagttactacccagtttgtggttttttgggagaaatgtaactggacagttagcttttcaattaaaaagacacttaacccatgtgggatgtcatctttttataattagtgttcccatgtggagaaaattattcacactacttgcatgtaaagaataatttaacttttaacattaaaatatgtggtaaaacccagaaagcatccatcatgaatgcaagatactttcaataaaaagtaagttatatagtaggtagttaagtttgcttttgtggacttaaatgtgtctcttcacttaaatgggttgaatgtgtatatatttgttcagcttgaaaagacttagtttatatcctagctcactggaggctgctgacataaccataacttctgtcccttctaattgtcatttatatgcctaactggagctagtactttaattcttaacacaaaattactctgccattgtttccagcttccctcctacaatagaatgaagtttttttgatggcttgagatggctcacaaattttgatttttttttcttccttgtgctccctttttttctccttgcttttccagttaacatctatattcacatgtaatcttgttttctcttcacattcactgagttgttcaggctcagatcatcccttgacagtagtttgccttcatctcacctttcatttgtcccaaattcaccttatttaataaagtcccatatgttgtctcacttaa

SEQ ID NO: 2855 - protein, 160 aa, Homo sapiens
MPSIKLQSSDGEIFEVDVEIAKQSVTIKTMLEDLGMDDEGDDDPVPLPNVNAAILKKVIQWCTHHKDDPPPPEDDENKEKRTDDIPVWDQEFLKVDQGTLFELILAANYLDIKGLLDVTCKTVANMIKGKTPEEIRKTFNIKNELSLFFVKQCLPSLLSS

SEQ ID NO: 2856 - DNA, 2400 bp, Homo sapiens
gacctttctaggccagtcggggtccggcacccagttgacgagacagcgcggcgctttcagagctggggagaggcgaaaactcttccggccccccgatcccccggccagccgcccccggcagctccttgccgcctcccggcctgggcccgcccagccgttctcggcctgccgtcaggcgatctcggcggccagcccagccgcgatgtgacgccgcgcgccccggggtcctcggcgcctgcgccctctcctataaagcagacgccgcgccgcgctgcgacgctgtagtggcttcgtcttcggtttttctcttccttcgctaacgcctcccggctctcgtcagcctcccgccggccgtctccttaacaccgaacaccatgccttcaattaagttgcagagttctgatggagagatatttgaagttgatgtggaaattgccaaacaatctgtgactattaagaccatgttggaagatttgggaatggatgatgaaggagatgatgacccagttcctctaccaaatgtgaatgcagcaatattaaaaaaggtcattcagtggtgcacccaccacaaggatgaccctcctcctcctgaagatgatgagaacaaagaaaagcgaacagatgatatccctgtttgggaccaagaattcctgaaagttgaccaaggaacactttttgaactcattctggctgcaaactacttagacatcaaaggtttgcttgatgttacatgcaagactgttgccaatatgatcaaggggaaaactcctgaggagattcgcaagaccttcaatatcaaaaatgactttactgaagaggaggaagcccagcagggcagaataaaaaccatgggaggcaaagaaaggaaatccggaaatatagtcttaacctggtgttgttctaattttccatctgttcttctgactcaactcactggctatcgatgaatcagtaggtagtatttataagtcttaggaaagactactcaagttaaggtacttccctatatccatctcttttaggtacgcaaagagaaccagtggtgtgaagagaagtgaaatgttgtgcctgacactgtaacactgtaaggattgttccaaatactagttgcactgctctgtttataattgttaatattagacaaacagtagacaaatgcagcagcaagtcaattgtattagcagaatattgtcctcattgcatgtgtagtttgagcacagatcccaaaccttacggccaagtttcttctagtatgatggaaagtttcttttttctttgctctgaataaaactgaactgtgggttctctataagtggcattttgggctttccctcttttttgtaaagcaatgtctgcctagtttattgtccagttaactttagtgaccttttaaaagttggcattgtaaataaaacaacttgcaaaaaagttttctggaatagaattaacaaaatattatctttattcatgagttggaaactggaaaaaggcttcttgaagtaaatgttctgagtggagctactaggatgtcttccagcctcctgcagtcaaggagtaccactgtattgattagcctgtatgtagcagggctcccttcattgcatctgaggacttgttttctttttctttatttttaatcctcttagttttaaatatattgcctagagactcagttactacccagtttgtggttttttgggagaaatgtaactggacagttagcttttcaattaaaaagacacttaacccatgtgggatgtcatctttttataattagtgttcccatgtggagaaaattattcacactacttgcatgtaaagaataatttaacttttaacattaaaatatgtggtaaaacccagaaagcatccatcatgaatgcaagatactttcaataaaaagtaagttatatagtaggtagttaagtttgcttttgtggacttaaatgtgtctcttcacttaaatgggttgaatgtgtatatatttgttcagcttgaaaagacttagtttatatcctagctcactggaggctgctgacataaccataacttctgtcccttctaattgtcatttatatgcctaactggagctagtactttaattcttaacacaaaattactctgccattgtttccagcttccctcctacaatagaatgaagtttttttgatggcttgagatggctcacaaattttgatttttttttcttccttgtgctccctttttttctccttgcttttccagttaacatctatattcacatgtaatcttgttttctcttcacattcactgagttgttcaggctcagatcatcccttgacagtagtttgccttcatctcacctttcatttgtcccaaattcaccttatttaataaagtcccatatgttgtctcacttaa

SEQ ID NO: 2857 - protein, 190 aa, Homo sapiens
MPSIKLQSSDGEIFEVDVEIAKQSVTIKTMLEDLGMDDEGDDDPVPLPNVNAAILKKVIQWCTHHKDDPPPPEDDENKEKRTDDIPVWDQEFLKVDQGTLFELILAANYLDIKGLLDVTCKTVANMIKGKTPEEIRKTFNIKNDFTEEEEAQQGRIKTMGGKERKSGNIVLTWCCSNFPSVLLTQLTGYR

SEQ ID NO: 2858 - DNA, 2296 bp, Homo sapiens
gacctttctaggccagtcggggtccggcacccagttgacgagacagcgcggcgctttcagagctggggagaggcgaaaactcttccggccccccgatcccccggccagccgcccccggcagctccttgccgcctcccggcctgggcccgcccagccgttctcggcctgccgtcaggcgatctcggcggccagcccagccgcgatgtgacgccgcgcgccccggggtcctcggcgcctgcgccctctcctataaagcagacgccgcgccgcgctgcgacgctgtagtggcttcgtcttcggtttttctcttccttcgctaacgcctcccggctctcgtcagcctcccgccggccgtctccttaacaccgaacaccatgccttcaattaagttgcagagttctgatggagagatatttgaagttgatgtggaaattgccaaacaatctgtgactattaagaccatgttggaagtcactgttcatcaagtacctattgaatgaagagtatgttgtgctcactaaaaaaaactgaaagcaatccaagtgtccctaaaaggcagatttgggaatggatgatgaaggagatgatgacccagttcctctaccaaatgtgaatgcagcaatattaaaaaaggtcattcagtggtgcacccaccacaaggatgaccctcctcctcctgaagatgatgagaacaaagaaaagcgaacagatgatatccctgtttgggaccaagaattcctgaaagttgaccaaggaacactttttgaactcattctggctgcaaactacttagacatcaaaggtttgcttgatgttacatgcaagactgttgccaatatgatcaaggggaaaactcctgaggagattcgcaagaccttcaatatcaaaaatgactttactgaagaggaggaagcccaggtacgcaaagagaaccagtggtgtgaagagaagtgaaatgttgtgcctgacactgtaacactgtaaggattgttccaaatactagttgcactgctctgtttataattgttaatattagacaaacagtagacaaatgcagcagcaagtcaattgtattagcagaatattgtcctcattgcatgtgtagtttgagcacagatcccaaaccttacggccaagtttcttctagtatgatggaaagtttcttttttctttgctctgaataaaactgaactgtgggttctctataagtggcattttgggctttccctcttttttgtaaagcaatgtctgcctagtttattgtccagttaactttagtgaccttttaaaagttggcattgtaaataaaacaacttgcaaaaaagttttctggaatagaattaacaaaatattatctttattcatgagttggaaactggaaaaaggcttcttgaagtaaatgttctgagtggagctactaggatgtcttccagcctcctgcagtcaaggagtaccactgtattgattagcctgtatgtagcagggctcccttcattgcatctgaggacttgttttctttttctttatttttaatcctcttagttttaaatatattgcctagagactcagttactacccagtttgtggttttttgggagaaatgtaactggacagttagcttttcaattaaaaagacacttaacccatgtgggatgtcatctttttataattagtgttcccatgtggagaaaattattcacactacttgcatgtaaagaataatttaacttttaacattaaaatatgtggtaaaacccagaaagcatccatcatgaatgcaagatactttcaataaaaagtaagttatatagtaggtagttaagtttgcttttgtggacttaaatgtgtctcttcacttaaatgggttgaatgtgtatatatttgttcagcttgaaaagacttagtttatatcctagctcactggaggctgctgacataaccataacttctgtcccttctaattgtcatttatatgcctaactggagctagtactttaattcttaacacaaaattactctgccattgtttccagcttccctcctacaatagaatgaagtttttttgatggcttgagatggctcacaaattttgatttttttttcttccttgtgctccctttttttctccttgcttttccagttaacatctatattcacatgtaatcttgttttctcttcacattcactgagttgttcaggctcagatcatcccttgacagtagtttgccttcatctcacctttcatttgtcccaaattcaccttatttaataaagtcccatatgttgtctcacttaa

SEQ ID NO: 2859 - protein, 128 aa, Homo sapiens
MDDEGDDDPVPLPNVNAAILKKVIQWCTHHKDDPPPPEDDENKEKRTDDIPVWDQEFLKVDQGTLFELILAANYLDIKGLLDVTCKTVANMIKGKTPEEIRKTFNIKNDFTEEEEAQVRKENQWCEEK

SEQ ID NO: 2860 - DNA, 2261 bp, Homo sapiens
gacctttctaggccagtcggggtccggcacccagttgacgagacagcgcggcgctttcagagctggggagaggcgaaaactcttccggccccccgatcccccggccagccgcccccggcagctccttgccgcctcccggcctgggcccgcccagccgttctcggcctgccgtcaggcgatctcggcggccagcccagccgcgatgtgacgccgcgcgccccggggtcctcggcgcctgcgccctctcctataaagcagacgccgcgccgcgctgcgacgctgtagtggcttcgtcttcggtttttctcttccttcgctaacgcctcccggctctcgtcagcctcccgccggccgtctccttaacaccgaacaccacataaatgagcatattctgatgtactctttggatctgaactcatcttcacagatgccttcaattaagttgcagagttctgatggagagatatttgaagttgatgtggaaattgccaaacaatctgtgactattaagaccatgttggaagatttgggaatggatgatgaaggagatgatgacccagttcctctaccaaatgtgaatgcagcaatattaaaaaaggtcattcagtggtgcacccaccacaaggatgaccctcctcctcctgaagatgatgagaacaaagaaaagcgaacagatgatatccctgtttgggaccaagaattcctgaaagttgaccaaggaacactttttgaactcattctggctgcaaactacttagacatcaaaggtttgcttgatgttacatgcaagactgttgccaatatgatcaaggggaaaactcctgaggagattcgcaagaccttcaatatcaaaaatgactttactgaagaggaggaagcccaggtacgcaaagagaaccagtggtgtgaagagaagtgaaatgttgtgcctgacactgtaacactgtaaggattgttccaaatactagttgcactgctctgtttataattgttaatattagacaaacagtagacaaatgcagcagcaagtcaattgtattagcagaatattgtcctcattgcatgtgtagtttgagcacagatcccaaaccttacggccaagtttcttctagtatgatggaaagtttcttttttctttgctctgaataaaactgaactgtgggttctctataagtggcattttgggctttccctcttttttgtaaagcaatgtctgcctagtttattgtccagttaactttagtgaccttttaaaagttggcattgtaaataaaacaacttgcaaaaaagttttctggaatagaattaacaaaatattatctttattcatgagttggaaactggaaaaaggcttcttgaagtaaatgttctgagtggagctactaggatgtcttccagcctcctgcagtcaaggagtaccactgtattgattagcctgtatgtagcagggctcccttcattgcatctgaggacttgttttctttttctttatttttaatcctcttagttttaaatatattgcctagagactcagttactacccagtttgtggttttttgggagaaatgtaactggacagttagcttttcaattaaaaagacacttaacccatgtgggatgtcatctttttataattagtgttcccatgtggagaaaattattcacactacttgcatgtaaagaataatttaacttttaacattaaaatatgtggtaaaacccagaaagcatccatcatgaatgcaagatactttcaataaaaagtaagttatatagtaggtagttaagtttgcttttgtggacttaaatgtgtctcttcacttaaatgggttgaatgtgtatatatttgttcagcttgaaaagacttagtttatatcctagctcactggaggctgctgacataaccataacttctgtcccttctaattgtcatttatatgcctaactggagctagtactttaattcttaacacaaaattactctgccattgtttccagcttccctcctacaatagaatgaagtttttttgatggcttgagatggctcacaaattttgatttttttttcttccttgtgctccctttttttctccttgcttttccagttaacatctatattcacatgtaatcttgttttctcttcacattcactgagttgttcaggctcagatcatcccttgacagtagtttgccttcatctcacctttcatttgtcccaaattcaccttatttaataaagtcccatatgttgtctcacttaa

SEQ ID NO: 2861 - protein, 174 aa, Homo sapiens [sequence omitted]

SEQ ID NO: 2862 - DNA, 892 bp, Homo sapiens
ggctgcaaactacttagacatcaaaggtttgcttgatgttacatgcaagactgttgccaatatgatcaaggggaaaactcctgaggagattcgcaagaccttcaatatcaaaaatgactttactgaagaggaggaagcccaggtacgcaaagagaaccagtggtgtgaagagaagtgaaattttgagcacagatcccaaaccttacggccaagtttcttctagtatgatggaaagtttcttttttctttgctctgaataaaactgaactgtgggttctctataagtggcattttgggctttccctcttttttgtaaagcaatgtctgcctagtttattgtccagttaactttagtgaccttttaaaagttggcattgtaaataaaacaacttgcaaaaaagttttctggaatagaattaacaaaatattatctttattcatgagttggaaactggaaaaaggcttcttgaagtaaatgttctgagtggagctactaggatgtcttccagcctcctgcagtcaaggagtaccactgtattgattagcctgtatgtagcagggctcccttcattgcatctgaggacttgttttctttttctttatttttaatcctcttagttttaaatatattgcctagagactcagttactacccagtttgtggttttttgggagaaatgtaactggacagttagcttttcaattaaaaagacacttaacccatgtgggatgtcatctttttataattagtgttcccatgtggagaaaattattcacactacttgcatgtaaagaataatttaacttttaacattaaaatatgtggtaaaacccagaaagcatccatcatgaatgcaagatactttcaataaaaagtaagttatatagtaggt

SEQ ID NO: 2863 - protein, 48 aa, Homo sapiens [sequence omitted]

SEQ ID NO: 2864 - DNA, 3149 bp, Homo sapiens
aaaacaaaaacctttcgctggccaggcacagtggctcatagctgtaatcccaacactttgggagggcaaggtgggtgaattgcttgagttcaggagtttgcaacatgatgaaaccttatctctacaaaaacaaaatacaaaaatgagccaggtgtggtggcatgcacctgtagttgcagctacttgggaggctgaggtgggaggatcgcttaagcacaggaggtcgagtgagccatgatcgcggcactgcattccagcctgggtgacacagtgagatcttgtctcaaaaacaaacaaacaaccctttgcttggcttttccttattgaaattgttctttctttttttttttttggatcctggcaatgtttcttggctctgccattttctctcagcattgtttactcctccaacattttgctatgaaaaagttttagccatacagaaaaatggaaagaattacacagtagacaaccatgtagccactgcctagattctacaactgaaaacactttcagtattgattttggtctttatgctggtatgtatagtctaagtaatcagcttcctgaaactttatggagtaattattctcctattaaggaaattttggggcttttcctgctttgttcctacaccaaatagtctcacacatgtgtctagggtatttggaatttgctggttacaatatatgtacatattcagcttttctgaggagtgctggattagctttcaaaggggttataccaatttatactctctagaagagtttgtgtttcctttccactattgcccaacaattagtatcagtttcttgattttttttcaatctagagaagtatctgtagtgttagttttgcttctagtaaagttgagcgttccttatgtttggctattcagatttcatttattggctgtacatattaacccatttctctttaatgatttttgaaagattttatattctctcagctaatcattgttgtacatattgcaggtatcttccagtcattgtcctaacttttctttttgcatagaagctttttaatgtagtcaagtacagtactctgtctgcatggcttgcttttatctaataagatcttctcccttctagggttataatgattcttcaagcttcatttttgtttttcaagcttggctgttaatggctcaagtcaacctctagctagttattattccaatatagggataagttgtcccagcagtggaatgagtaccttgtgacaaagtgccacagaggaatgaacttttgttgttgtaggtcattcagtggtgcacccaccacaaggatgaccctcctcctcctgaagatgatgagaacaaagaaaagcgaacagatgatatccctgtttgggaccaagaattcctgaaagttgaccaaggaacactttttgaactcattctggctgcaaactacttagacatcaaaggtttgcttgatgttacatgcaagactgttgccaatatgatcaaggggaaaactcctgaggagattcgcaagaccttcaatatcaaaaatgactttactgaagaggaggaagcccaggtaggtagcacacagttttgtctttgatcacatgctcttaaaaagggagtaacacctataacatgccagcaaaagaggtgactgtatcaagtagtcttgatactttagggataatatgtacttaatgtgtcttaaacatactcttactgttctgtctttatgaatctgaacacttagatgatactgcattttaagcataagaacaattagttttcaatgagaagagctcttgttaatgtattaacagttactagttttggcacctgcaactttctgtatagaccatacatatctgacatcagaaaagcaggccctagagagaagtatatactagggtactttagagcaacttaatgaggggaggaaatgaaagaatagatcagaatgattttgttgacatgactacagactgaaataatgtgaatgaattaactgaatttgctctgtcaactttagtaaattgcccattgcctttgctttgttcataatttcagcagggcagaataaaaaccatgggaggcaaagaaaggaaatccggaaatatagtcttaacctggtgttgttctaattttccatctgttcttctgactcaactcactggctatcgatgaatcagtaggtagtatttataagtcttaggaaagactactcaagttaaggtacttccctatatccatctcttttaggtacgcaaagagaaccagtggtgtgaagagaagtgaaatgttgtgcctgacactgtaacactgtaaggattgttccaaatactagttgcactgctctgtttataattgttaatattagacaaacagtagacaaatgcagcagcaagtcaattgtattagcagaatattgtcctcattgcatgtgtagtttgagcacagatcccaaaccttacggccaagtttcttctagtatgatggaaagtttcttttttctttgctctgaataaaactgaactgtgggttctctataagtggcattttgggctttccctcttttttgtaaagcaatgtctgcctagtttattgtccagttaactttagtgaccttttaaaagttggcattgtaaataaaacaacttgcaaaaaagttttctggaatagaattaacaaaatattatctttattcatgagttggaaactggaaaaaggcttcttgaagtaaatgttctgagtggagctactaggatgtcttccagcctcctgcagtcaaggagtaccactgtattgattagcctgtatgtagcagggctcccttcattgcatctgaggacttgttttctttttctttatttttaatcctcttagttttaaatatattgcctagagactcagttactacccagtttgtggttttttgggagaaatgtaactggacagttagcttttcaattaaaaagacacttaacccatgtgggatgtcatctttttataattagtgttcccatgtggagaaaattattcacactacttgcatgtaaagaataatttaacttttaacattaaaatatgtggtaaaacccagaaagcatccatcatgaatgcaagatactttcaataaaaagtaagttatatagtaggt

SEQ ID NO: 2865 - protein, 86 aa, Homo sapiens; identical to SEQ ID NO: 2845

SEQ ID NO: 2866 - DNA, 1513 bp, Homo sapiens
gttgtcgaccctgttcttcgggagaccctaccaggttccgttcacctgccccgcccccgactcagcgaggcctcctctggccgggcgtcctcacggcgctccataaacataaatgagcatattctgatgtactctttggatctgaactcatcttcacagatgccttcaattaagttgcagagttctgatggagagatatttgaagttgatgtggaaattgccaaacaatctgtgactattaagaccatgttggaagatttgggaatggatgatgaaggagatgatgacccagttcctctaccaaatgtgaatgcagcaatattaaaaaaggtcattcagtggtgcacccaccacaaggatgaccctcctcctcctgaagatgatgagaacaaagaaaagcgaacagatgatatccctgtttgggaccaagaattcctgaaagttgaccaaggaacactttttgaactcattctggctgcaaactacttagacatcaaaggtttgcttgatgttacatgcaagactgttgccaatatgatcaaggggaaaactcctgaggagattcgcaagaccttcaatatcaaaaatgactttactgaagaggaggaagcccaggtacgcaaagagaaccagtggtgtgaagagaagtgaaatgttgtgcctgacactgtaacactgtaaggattgttccaaatactagttgcactgctctgtttataattgttaatattagacaaacagtagacaaatgcagcagcaagtcaattgtattagcagaatattgtcctcattgcatgtgtagtttgagcacagatcccaaaccttacggccaagtttcttctagtatgatggaaagtttcttttttctttgctctgaataaaactgaactgtgggttctctataagtggcattttgggctttccctcttttttgtaaagcaatgtctgcctagtttattgtccagttaactttagtgaccttttaaaagttggcattgtaaataaaacaacttgcaaaaaagttttctggaatagaattaacaaaatattatctttattcatgagttggaaactggaaaaaggcttcttgaagtaaatgttctgagtggagctactaggatgtcttccagcctcctgcagtcaaggagtaccactgtattgattagcctgtatgtagcagggctcccttcattgcatctgaggacttgttttctttttctttatttttaatcctcttagttttaaatatattgcctagagactcagttactacccagtttgtggttttttgggagaaatgtaactggacagttagcttttcaattaaaaagacacttaacccatgtgggatgtcatctttttataattagtgttcccatgtggagaaaattattcacactacttgcatgtaaagaataatttaacttttaacattaaaatatgtggtaaaacccagaaagcatccatcatgaatgcaagatactttcaataaaaagtaagttatatagtaggt

SEQ ID NO: 2867 - protein, 174 aa, Homo sapiens [sequence omitted]

SEQ ID NO: 2868 - DNA, 1781 bp, Homo sapiens
gacctttctaggccagtcggggtccggcacccagttgacgagacagcgcggcgctttcagagctggggagaggcgaaaactcttccggccccccgatcccccggccagccgcccccggcagctccttgccgcctcccggcctgggcccgcccagccgttctcggcctgccgtcaggcgatctcggcggccagcccagccgcgatgtgacgccgcgcgccccggggtcctcggcgcctgcgccctctcctataaagcagacgccgcgccgcgctgcgacgctgtagtggcttcgtcttcggtttttctcttccttcgctaacgcctcccggctctcgtcagcctcccgccggccgtctccttaacaccgaacaccacataaatgagcatattctgatgtactctttggatctgaactcatcttcacagatgccttcaattaagttgcagagttctgatggagagatatttgaagttgatgtggaaattgccaaacaatctgtgactattaagaccatgttggaagatttgggaatggatgatgaaggagatgatgacccagttcctctaccaaatgtgaatgcagcaatattaaaaaaggtcattcagtggtgcacccaccacaaggatgaccctcctcctcctgaagatgatgagaacaaagaaaagcgaacagatgatatccctgtttgggaccaagaattcctgaaagttgaccaaggaacactttttgaactcattctggctgcaaactacttagacatcaaaggtttgcttgatgttacatgcaagactgttgccaatatgatcaaggggaaaactcctgaggagattcgcaagaccttcaatatcaaaaatgactttactgaagaggaggaagcccaggtacgcaaagagaaccagtggtgtgaagagaagtgaaatgttgtgcctgacactgtaacactgtaaggattgttccaaatactagttgcactgctctgtttataattgttaatattagacaaacagtagacaaatgcagcagcaagtcaattgtattagcagaatattgtcctcattgcatgtgtagtttgagcacagatcccaaaccttacggccaagtttcttctagtatgatggaaagtttcttttttctttgctctgaataaaactgaactgtgggttctctataagtggcattttgggctttccctcttttttgtaaagcaatgtctgcctagtttattgtccagttaactttagtgaccttttaaaagttggcattgtaaataaaacaacttgcaaaaaagttttctggaatagaattaacaaaatattatctttattcatgagttggaaactggaaaaaggcttcttgaagtaaatgttctgagtggagctactaggatgtcttccagcctcctgcagtcaaggagtaccactgtattgattagcctgtatgtagcagggctcccttcattgcatctgaggacttgttttctttttctttatttttaatcctcttagttttaaatatattgcctagagactcagttactacccagtttgtggttttttgggagaaatgtaactggacagttagcttttcaattaaaaagacacttaacccatgtgggatgtcatctttttataattagtgttcccatgtggagaaaattattcacactacttgcatgtaaagaataatttaacttttaacattaaaatatgtggtaaaacccagaaagcatccatcatgaatgcaagatactttcaataaaaagtaagttatatagtaggt

SEQ ID NO: 2869 - protein, 174 aa, Homo sapiens [sequence omitted]

SEQ ID NO: 2870 - DNA, 2414 bp, Homo sapiens
gacctttctaggccagtcggggtccggcacccagttgacgagacagcgcggcgctttcagagctggggagaggcgaaaactcttccggccccccgatcccccggccagccgcccccggcagctccttgccgcctcccggcctgggcccgcccagccgttctcggcctgccgtcaggcgatctcggcggccagcccagccgcgatgtgacgccgcgcgccccggggtcctcggcgcctgcgccctctcctataaagcagacgccgcgccgcgctgcgacgctgtagtggcttcgtcttcggtttttctcttccttcgctaacgcctcccggctctcgtcagcctcccgccggccgtctccttaacaccgaacaccatgccttcaattaagttgcagagttctgatggagagatatttgaagttgatgtggaaattgccaaacaatctgtgactattaagaccatgttggaagatttgggaatggatgatgaaggagatgatgacccagttcctctaccaaatgtgaatgcagcaatattaaaaaaggtcattcagtggtgcacccaccacaaggatgaccctcctcctcctgaagatgatgagaacaaagaaaagcgaacagatgatatccctgtttgggaccaagaattcctgaaagttgaccaaggaacactttttgaactcattctggctgcaaactacttagacatcaaaggtttgcttgatgttacatgcaagactgttgccaatatgatcaaggggaaaactcctgaggagattcgcaagaccttcaatatcaaaaatgactttactgaagaggaggaagcccaggtaggtagcacacagttttgtctttgatcacatgctcttaaaaagggagtaacacctataacatgccagcaaaagaggtgactgtatcaagtagtcttgatactttagggataatatgtacttaatgtgtcttaaacatactcttactgttctgtctttatgaatctgaacacttagatgatactgcattttaagcataagaacaattagttttcaatgagaagagctcttgttaatgtattaacagttactagttttggcacctgcaactttctgtatagaccatacatatctgacatcagaaaagcaggccctagagagaagtatatactagggtactttagagcaacttaatgaggggaggaaatgaaagaatagatcagaatgattttgttgacatgactacagactgaaataatgtgaatgaattaactgaatttgctctgtcaactttagtaaattgcccattgcctttgctttgttcataatttcagcagggcagaataaaaaccatgggaggcaaagaaaggaaatccggaaatatagtcttaacctggtgttgttctaattttccatctgttcttctgactcaactcactggctatcgatgaatcagtaggtagtatttataagtcttaggaaagactactcaagttaaggtacttccctatatccatctcttttaggtacgcaaagagaaccagtggtgtgaagagaagtgaaatgttgtgcctgacactgtaacactgtaaggattgttccaaatactagttgcactgctctgtttataattgttaatattagacaaacagtagacaaatgcagcagcaagtcaattgtattagcagaatattgtcctcattgcatgtgtagtttgagcacagatcccaaaccttacggccaagtttcttctagtatgatggaaagtttcttttttctttgctctgaataaaactgaactgtgggttctctataagtggcattttgggctttccctcttttttgtaaagcaatgtctgcctagtttattgtccagttaactttagtgaccttttaaaagttggcattgtaaataaaacaacttgcaaaaaagttttctggaatagaattaacaaaatattatctttattcatgagttggaaactggaaaaaggcttcttgaagtaaatgttctgagtggagctactaggatgtcttccagcctcctgcagtcaaggagtaccactgtattgattagcctgtatgtagcagggctcccttcattgcatctgaggacttgttttctttttctttatttttaatcctcttagttttaaatatattgcctagagactcagttactacccagtttgtggttttttgggagaaatgtaactggacagttagcttttcaattaaaaagacacttaacccatgtgggatgtcatctttttataattagtgttcccatgtggagaaaattattcacactacttgcatgtaaagaataatttaacttttaacattaaaatatgtggtaaaacccagaaagcatccatcatgaatgcaagatactttcaataaaaagtaagttatatagtaggt

SEQ ID NO: 2871 - protein, 160 aa, Homo sapiens; identical to SEQ ID NO: 297

SEQ ID NO: 2872 - DNA, 1728 bp, Homo sapiens
gacctttctaggccagtcggggtccggcacccagttgacgagacagcgcggcgctttcagagctggggagaggcgaaaactcttccggccccccgatcccccggccagccgcccccggcagctccttgccgcctcccggcctgggcccgcccagccgttctcggcctgccgtcaggcgatctcggcggccagcccagccgcgatgtgacgccgcgcgccccggggtcctcggcgcctgcgccctctcctataaagcagacgccgcgccgcgctgcgacgctgtagtggcttcgtcttcggtttttctcttccttcgctaacgcctcccggctctcgtcagcctcccgccggccgtctccttaacaccgaacaccatgccttcaattaagttgcagagttctgatggagagatatttgaagttgatgtggaaattgccaaacaatctgtgactattaagaccatgttggaagatttgggaatggatgatgaaggagatgatgacccagttcctctaccaaatgtgaatgcagcaatattaaaaaaggtcattcagtggtgcacccaccacaaggatgaccctcctcctcctgaagatgatgagaacaaagaaaagcgaacagatgatatccctgtttgggaccaagaattcctgaaagttgaccaaggaacactttttgaactcattctggctgcaaactacttagacatcaaaggtttgcttgatgttacatgcaagactgttgccaatatgatcaaggggaaaactcctgaggagattcgcaagaccttcaatatcaaaaatgactttactgaagaggaggaagcccaggtacgcaaagagaaccagtggtgtgaagagaagtgaaatgttgtgcctgacactgtaacactgtaaggattgttccaaatactagttgcactgctctgtttataattgttaatattagacaaacagtagacaaatgcagcagcaagtcaattgtattagcagaatattgtcctcattgcatgtgtagtttgagcacagatcccaaaccttacggccaagtttcttctagtatgatggaaagtttcttttttctttgctctgaataaaactgaactgtgggttctctataagtggcattttgggctttccctcttttttgtaaagcaatgtctgcctagtttattgtccagttaactttagtgaccttttaaaagttggcattgtaaataaaacaacttgcaaaaaagttttctggaatagaattaacaaaatattatctttattcatgagttggaaactggaaaaaggcttcttgaagtaaatgttctgagtggagctactaggatgtcttccagcctcctgcagtcaaggagtaccactgtattgattagcctgtatgtagcagggctcccttcattgcatctgaggacttgttttctttttctttatttttaatcctcttagttttaaatatattgcctagagactcagttactacccagtttgtggttttttgggagaaatgtaactggacagttagcttttcaattaaaaagacacttaacccatgtgggatgtcatctttttataattagtgttcccatgtggagaaaattattcacactacttgcatgtaaagaataatttaacttttaacattaaaatatgtggtaaaacccagaaagcatccatcatgaatgcaagatactttcaataaaaagtaagttatatagtaggt

SEQ ID NO: 2873 - protein, 163 aa, Homo sapiens; identical to SEQ ID NO: 299

SEQ ID NO: 2874 - DNA, 1401 bp, Homo sapiens
gacctttctaggccagtcggggtccggcacccagttgacgagacagcgcggcgctttcagagctggggagaggcgaaaactcttccggccccccgatcccccggccagccgcccccggcagctccttgccgcctcccggcctgggcccgcccagccgttctcggcctgccgtcaggcgatctcggcggccagcccagccgcgatgtgacgccgcgcgccccggggtcctcggcgcctgcgccctctcctataaagcagacgccgcgccgcgctgcgacgctgtagtggcttcgtcttcggtttttctcttccttcgctaacgcctcccggctctcgtcagcctcccgccggccgtctccttaacaccgaacaccatgccttcaattaagttgcagagttctgatggagagatatttgaagttgatgtggaaattgccaaacaatctgtgactattaagaccatgttggaagatttgggaatggatgatgaaggagatgatgacccagttcctctaccaaatgtgaatgcagcaatattaaaaaaggtcattcagtggtgcacccaccacaaggatgaccctcctcctcctgaagatgatgagaacaaagaaaagcgaacagatgatatccctgtttgggaccaagaattcctgaaagttgaccaaggaacactttttgaactcattctggctgcaaactacttagacatcaaaggtttgcttgatgttacatgcaagactgttgccaatatgatcaaggggaaaactcctgaggagattcgcaagaccttcaatatcaaaaatgagctttccctcttttttgtaaagcaatgtctgcctagtttattgtccagttaactttagtgaccttttaaaagttggcattgtaaataaaacaacttgcaaaaaagttttctggaatagaattaacaaaatattatctttattcatgagttggaaactggaaaaaggcttcttgaagtaaatgttctgagtggagctactaggatgtcttccagcctcctgcagtcaaggagtaccactgtattgattagcctgtatgtagcagggctcccttcattgcatctgaggacttgttttctttttctttatttttaatcctcttagttttaaatatattgcctagagactcagttactacccagtttgtggttttttgggagaaatgtaactggacagttagcttttcaattaaaaagacacttaacccatgtgggatgtcatctttttataattagtgttcccatgtggagaaaattattcacactacttgcatgtaaagaataatttaacttttaacattaaaatatgtggtaaaacccagaaagcatccatcatgaatgcaagatactttcaataaaaagtaagttatatagtaggt

SEQ ID NO: 2875 - protein, 160 aa, Homo sapiens; identical to SEQ ID NO: 2855

SEQ ID NO: 2876 - DNA, 1816 bp, Homo sapiens
gacctttctaggccagtcggggtccggcacccagttgacgagacagcgcggcgctttcagagctggggagaggcgaaaactcttccggccccccgatcccccggccagccgcccccggcagctccttgccgcctcccggcctgggcccgcccagccgttctcggcctgccgtcaggcgatctcggcggccagcccagccgcgatgtgacgccgcgcgccccggggtcctcggcgcctgcgccctctcctataaagcagacgccgcgccgcgctgcgacgctgtagtggcttcgtcttcggtttttctcttccttcgctaacgcctcccggctctcgtcagcctcccgccggccgtctccttaacaccgaacaccatgccttcaattaagttgcagagttctgatggagagatatttgaagttgatgtggaaattgccaaacaatctgtgactattaagaccatgttggaagtcactgttcatcaagtacctattgaatgaagagtatgttgtgctcactaaaaaaaactgaaagcaatccaagtgtccctaaaaggcagatttgggaatggatgatgaaggagatgatgacccagttcctctaccaaatgtgaatgcagcaatattaaaaaaggtcattcagtggtgcacccaccacaaggatgaccctcctcctcctgaagatgatgagaacaaagaaaagcgaacagatgatatccctgtttgggaccaagaattcctgaaagttgaccaaggaacactttttgaactcattctggctgcaaactacttagacatcaaaggtttgcttgatgttacatgcaagactgttgccaatatgatcaaggggaaaactcctgaggagattcgcaagaccttcaatatcaaaaatgactttactgaagaggaggaagcccaggtacgcaaagagaaccagtggtgtgaagagaagtgaaatgttgtgcctgacactgtaacactgtaaggattgttccaaatactagttgcactgctctgtttataattgttaatattagacaaacagtagacaaatgcagcagcaagtcaattgtattagcagaatattgtcctcattgcatgtgtagtttgagcacagatcccaaaccttacggccaagtttcttctagtatgatggaaagtttcttttttctttgctctgaataaaactgaactgtgggttctctataagtggcattttgggctttccctcttttttgtaaagcaatgtctgcctagtttattgtccagttaactttagtgaccttttaaaagttggcattgtaaataaaacaacttgcaaaaaagttttctggaatagaattaacaaaatattatctttattcatgagttggaaactggaaaaaggcttcttgaagtaaatgttctgagtggagctactaggatgtcttccagcctcctgcagtcaaggagtaccactgtattgattagcctgtatgtagcagggctcccttcattgcatctgaggacttgttttctttttctttatttttaatcctcttagttttaaatatattgcctagagactcagttactacccagtttgtggttttttgggagaaatgtaactggacagttagcttttcaattaaaaagacacttaacccatgtgggatgtcatctttttataattagtgttcccatgtggagaaaattattcacactacttgcatgtaaagaataatttaacttttaacattaaaatatgtggtaaaacccagaaagcatccatcatgaatgcaagatactttcaataaaaagtaagttatatagtaggt

SEQ ID NO: 2877 - protein, 128 aa, Homo sapiens; identical to SEQ ID NO: 2859

SEQ ID NO: 2878 - DNA, 1920 bp, Homo sapiens
gacctttctaggccagtcggggtccggcacccagttgacgagacagcgcggcgctttcagagctggggagaggcgaaaactcttccggccccccgatcccccggccagccgcccccggcagctccttgccgcctcccggcctgggcccgcccagccgttctcggcctgccgtcaggcgatctcggcggccagcccagccgcgatgtgacgccgcgcgccccggggtcctcggcgcctgcgccctctcctataaagcagacgccgcgccgcgctgcgacgctgtagtggcttcgtcttcggtttttctcttccttcgctaacgcctcccggctctcgtcagcctcccgccggccgtctccttaacaccgaacaccatgccttcaattaagttgcagagttctgatggagagatatttgaagttgatgtggaaattgccaaacaatctgtgactattaagaccatgttggaagatttgggaatggatgatgaaggagatgatgacccagttcctctaccaaatgtgaatgcagcaatattaaaaaaggtcattcagtggtgcacccaccacaaggatgaccctcctcctcctgaagatgatgagaacaaagaaaagcgaacagatgatatccctgtttgggaccaagaattcctgaaagttgaccaaggaacactttttgaactcattctggctgcaaactacttagacatcaaaggtttgcttgatgttacatgcaagactgttgccaatatgatcaaggggaaaactcctgaggagattcgcaagaccttcaatatcaaaaatgactttactgaagaggaggaagcccagcagggcagaataaaaaccatgggaggcaaagaaaggaaatccggaaatatagtcttaacctggtgttgttctaattttccatctgttcttctgactcaactcactggctatcgatgaatcagtaggtagtatttataagtcttaggaaagactactcaagttaaggtacttccctatatccatctcttttaggtacgcaaagagaaccagtggtgtgaagagaagtgaaatgttgtgcctgacactgtaacactgtaaggattgttccaaatactagttgcactgctctgtttataattgttaatattagacaaacagtagacaaatgcagcagcaagtcaattgtattagcagaatattgtcctcattgcatgtgtagtttgagcacagatcccaaaccttacggccaagtttcttctagtatgatggaaagtttcttttttctttgctctgaataaaactgaactgtgggttctctataagtggcattttgggctttccctcttttttgtaaagcaatgtctgcctagtttattgtccagttaactttagtgaccttttaaaagttggcattgtaaataaaacaacttgcaaaaaagttttctggaatagaattaacaaaatattatctttattcatgagttggaaactggaaaaaggcttcttgaagtaaatgttctgagtggagctactaggatgtcttccagcctcctgcagtcaaggagtaccactgtattgattagcctgtatgtagcagggctcccttcattgcatctgaggacttgttttctttttctttatttttaatcctcttagttttaaatatattgcctagagactcagttactacccagtttgtggttttttgggagaaatgtaactggacagttagcttttcaattaaaaagacacttaacccatgtgggatgtcatctttttataattagtgttcccatgtggagaaaattattcacactacttgcatgtaaagaataatttaacttttaacattaaaatatgtggtaaaacccagaaagcatccatcatgaatgcaagatactttcaataaaaagtaagttatatagtaggt

SEQ ID NO: 2879 - protein, 190 aa, Homo sapiens; identical to SEQ ID NO: 2857

SEQ ID NO: 2880 - DNA, 1728 bp, Homo sapiens
gacctttctaggccagtcggggtccggcacccagttgacgagacagcgcggcgctttcagagctggggagaggcgaaaactcttccggccccccgatcccccggccagccgcccccggcagctccttgccgcctcccggcctgggcccgcccagccgttctcggcctgccgtcaggcgatctcggcggccagcccagccgcgatgtgacgccgcgcgccccggggtcctcggcgcctgcgccctctcctataaagcagacgccgcgccgcgctgcgacgctgtagtggcttcgtcttcggtttttctcttccttcgctaacgcctcccggctctcgtcagcctcccgccggccgtctccttaacaccgaacaccatgccttcaattaagttgcagagttctgatggagagatatttgaagttgatgtggaaattgccaaacaatctgtgactattaagaccatgttggaagatttgggaatggatgatgaaggagatgatgacccagttcctctaccaaatgtgaatgcagcaatattaaaaaaggtcattcagtggtgcacccaccacaaggatgaccctcctcctcctgaagatgatgagaacaaagaaaagcgaacagatgatatccctgtttgggaccaagaattcctgaaatatactttaaggaaaacaactgtctctttacaggctgcaaactacttagacatcaaaggtttgcttgatgttacatgcaagactgttgccaatatgatcaaggggaaaactcctgaggagattcgcaagaccttcaatatcaaaaatgactttactgaagaggaggaagcccaggtacgcaaagagaaccagtggtgtgaagagaagtgaaatgttgtgcctgacactgtaacactgtaaggattgttccaaatactagttgcactgctctgtttataattgttaatattagacaaacagtagacaaatgcagcagcaagtcaattgtattagcagaatattgtcctcattgcatgtgtagtttgagcacagatcccaaaccttacggccaagtttcttctagtatgatggaaagtttcttttttctttgctctgaataaaactgaactgtgggttctctataagtggcattttgggctttccctcttttttgtaaagcaatgtctgcctagtttattgtccagttaactttagtgaccttttaaaagttggcattgtaaataaaacaacttgcaaaaaagttttctggaatagaattaacaaaatattatctttattcatgagttggaaactggaaaaaggcttcttgaagtaaatgttctgagtggagctactaggatgtcttccagcctcctgcagtcaaggagtaccactgtattgattagcctgtatgtagcagggctcccttcattgcatctgaggacttgttttctttttctttatttttaatcctcttagttttaaatatattgcctagagactcagttactacccagtttgtggttttttgggagaaatgtaactggacagttagcttttcaattaaaaagacacttaacccatgtgggatgtcatctttttataattagtgttcccatgtggagaaaattattcacactacttgcatgtaaagaataatttaacttttaacattaaaatatgtggtaaaacccagaaagcatccatcatgaatgcaagatactttcaataaaaagtaagttatatagtaggt

SEQ ID NO: 2881 - protein, 163 aa, Homo sapiens; identical to SEQ ID NO: 2849

SEQ ID NO: 2882 - DNA, 2980 bp, Homo sapiens
aaaacaaaaacctttcgctggccaggcacagtggctcatagctgtaatcccaacactttgggagggcaaggtgggtgaattgcttgagttcaggagtttgcaacatgatgaaaccttatctctacaaaaacaaaatacaaaaatgagccaggtgtggtggcatgcacctgtagttgcagctacttgggaggctgaggtgggaggatcgcttaagcacaggaggtcgagtgagccatgatcgcggcactgcattccagcctgggtgacacagtgagatcttgtctcaaaaacaaacaaacaaccctttgcttggcttttccttattgaaattgttctttctttttttttttttggatcctggcaatgtttcttggctctgccattttctctcagcattgtttactcctccaacattttgctatgaaaaagttttagccatacagaaaaatggaaagaattacacagtagacaaccatgtagccactgcctagattctacaactgaaaacactttcagtattgattttggtctttatgctggtatgtatagtctaagtaatcagcttcctgaaactttatggagtaattattctcctattaaggaaattttggggcttttcctgctttgttcctacaccaaatagtctcacacatgtgtctagggtatttggaatttgctggttacaatatatgtacatattcagcttttctgaggagtgctggattagctttcaaaggggttataccaatttatactctctagaagagtttgtgtttcctttccactattgcccaacaattagtatcagtttcttgattttttttcaatctagagaagtatctgtagtgttagttttgcttctagtaaagttgagcgttccttatgtttggctattcagatttcatttattggctgtacatattaacccatttctctttaatgatttttgaaagattttatattctctcagctaatcattgttgtacatattgcaggtatcttccagtcattgtcctaacttttctttttgcatagaagctttttaatgtagtcaagtacagtactctgtctgcatggcttgcttttatctaataagatcttctcccttctagggttataatgattcttcaagcttcatttttgtttttcaagcttggctgttaatggctcaagtcaacctctagctagttattattccaatatagggataagttgtcccagcagtggaatgagtaccttgtgacaaagtgccacagaggaatgaacttttgttgttgtaggtcattcagtggtgcacccaccacaaggatgaccctcctcctcctgaagatgatgagaacaaagaaaagcgaacagatgatatccctgtttgggaccaagaattcctgaaagttgaccaaggaacactttttgaactcattctggctgcaaactacttagacatcaaaggtttgcttgatgttacatgcaagactgttgccaatatgatcaaggggaaaactcctgaggagattcgcaagaccttcaatatcaaaaatgactttactgaagaggaggaagcccaggtaggtagcacacagttttgtctttgatcacatgctcttaaaaagggagtaacacctataacatgccagcaaaagaggtgactgtatcaagtagtcttgatactttagggataatatgtacttaatgtgtcttaaacatactcttactgttctgtctttatgaatctgaacacttagatgatactgcattttaagcataagaacaattagttttcaatgagaagagctcttgttaatgtattaacagttactagttttggcacctgcaactttctgtatagaccatacatatctgacatcagaaaagcaggccctagagagaagtatatactagggtactttagagcaacttaatgaggggaggaaatgaaagaatagatcagaatgattttgttgacatgactacagactgaaataatgtgaatgaattaactgaatttgctctgtcaactttagtaaattgcccattgcctttgctttgttcataatttcagcagggcagaataaaaaccatgggaggcaaagaaaggaaatccggaaatatagtcttaacctggtgttgttctaattttccatctgttcttctgactcaactcactggctatcgatgaatcagtaggtagtatttataagtcttaggaaagactactcaagttaaggtacttccctatatccatctcttttaggtacgcaaagagaaccagtggtgtgaagagaagtgaaatgttgtgcctgacactgtaacactgtaaggattgttccaaatactagttgcactgctctgtttataattgttaatattagacaaacagtagacaaatgcagcagcaagtcaattgtattagcagaatattgtcctcattgcatgtgtagtttgagcacagatcccaaaccttacggccaagtttcttctagtatgatggaaagtttcttttttctttgctctgaataaaactgaactgtgggttctctataagtggcattttgggctttccctcttttttgtaaagcaatgtctgcctagtttattgtccagttaactttagtgaccttttaaaagttggcattgtaaataaaacaacttgcaaaaaagttttctggaatagaattaacaaaatattatctttattcatgagttggaaactggaaaaaggcttcttgaagtaaatgttctgagtggagctactaggatgtcttccagcctcctgcagtcaaggagtaccactgtattgattagcctgtatgtagcagggctcccttcattgcatctgaggacttgttttctttttctttatttttaatcctcttagttttaaatatattgcctagagactcagttactacccagtttgtggttttttgggagaaatgtaactggacagttagcttttcaattaaaaagacacttaacccat

SEQ ID NO: 2883 - protein, 86 aa, Homo sapiens; identical to SEQ ID NO: 2845

SEQ ID NO: 2884 - DNA, 1344 bp, Homo sapiens
gttgtcgaccctgttcttcgggagaccctaccaggttccgttcacctgccccgcccccgactcagcgaggcctcctctggccgggcgtcctcacggcgctccataaacataaatgagcatattctgatgtactctttggatctgaactcatcttcacagatgccttcaattaagttgcagagttctgatggagagatatttgaagttgatgtggaaattgccaaacaatctgtgactattaagaccatgttggaagatttgggaatggatgatgaaggagatgatgacccagttcctctaccaaatgtgaatgcagcaatattaaaaaaggtcattcagtggtgcacccaccacaaggatgaccctcctcctcctgaagatgatgagaacaaagaaaagcgaacagatgatatccctgtttgggaccaagaattcctgaaagttgaccaaggaacactttttgaactcattctggctgcaaactacttagacatcaaaggtttgcttgatgttacatgcaagactgttgccaatatgatcaaggggaaaactcctgaggagattcgcaagaccttcaatatcaaaaatgactttactgaagaggaggaagcccaggtacgcaaagagaaccagtggtgtgaagagaagtgaaatgttgtgcctgacactgtaacactgtaaggattgttccaaatactagttgcactgctctgtttataattgttaatattagacaaacagtagacaaatgcagcagcaagtcaattgtattagcagaatattgtcctcattgcatgtgtagtttgagcacagatcccaaaccttacggccaagtttcttctagtatgatggaaagtttcttttttctttgctctgaataaaactgaactgtgggttctctataagtggcattttgggctttccctcttttttgtaaagcaatgtctgcctagtttattgtccagttaactttagtgaccttttaaaagttggcattgtaaataaaacaacttgcaaaaaagttttctggaatagaattaacaaaatattatctttattcatgagttggaaactggaaaaaggcttcttgaagtaaatgttctgagtggagctactaggatgtcttccagcctcctgcagtcaaggagtaccactgtattgattagcctgtatgtagcagggctcccttcattgcatctgaggacttgttttctttttctttatttttaatcctcttagttttaaatatattgcctagagactcagttactacccagtttgtggttttttgggagaaatgtaactggacagttagcttttcaattaaaaagacacttaacccat

SEQ ID NO: 2885 - protein, 174 aa, Homo sapiens [sequence omitted]

SEQ ID NO: 2886 - DNA, 1647 bp, Homo sapiens
gacctttctaggccagtcggggtccggcacccagttgacgagacagcgcggcgctttcagagctggggagaggcgaaaactcttccggccccccgatcccccggccagccgcccccggcagctccttgccgcctcccggcctgggcccgcccagccgttctcggcctgccgtcaggcgatctcggcggccagcccagccgcgatgtgacgccgcgcgccccggggtcctcggcgcctgcgccctctcctataaagcagacgccgcgccgcgctgcgacgctgtagtggcttcgtcttcggtttttctcttccttcgctaacgcctcccggctctcgtcagcctcccgccggccgtctccttaacaccgaacaccatgccttcaattaagttgcagagttctgatggagagatatttgaagttgatgtggaaattgccaaacaatctgtgactattaagaccatgttggaagtcactgttcatcaagtacctattgaatgaagagtatgttgtgctcactaaaaaaaactgaaagcaatccaagtgtccctaaaaggcagatttgggaatggatgatgaaggagatgatgacccagttcctctaccaaatgtgaatgcagcaatattaaaaaaggtcattcagtggtgcacccaccacaaggatgaccctcctcctcctgaagatgatgagaacaaagaaaagcgaacagatgatatccctgtttgggaccaagaattcctgaaagttgaccaaggaacactttttgaactcattctggctgcaaactacttagacatcaaaggtttgcttgatgttacatgcaagactgttgccaatatgatcaaggggaaaactcctgaggagattcgcaagaccttcaatatcaaaaatgactttactgaagaggaggaagcccaggtacgcaaagagaaccagtggtgtgaagagaagtgaaatgttgtgcctgacactgtaacactgtaaggattgttccaaatactagttgcactgctctgtttataattgttaatattagacaaacagtagacaaatgcagcagcaagtcaattgtattagcagaatattgtcctcattgcatgtgtagtttgagcacagatcccaaaccttacggccaagtttcttctagtatgatggaaagtttcttttttctttgctctgaataaaactgaactgtgggttctctataagtggcattttgggctttccctcttttttgtaaagcaatgtctgcctagtttattgtccagttaactttagtgaccttttaaaagttggcattgtaaataaaacaacttgcaaaaaagttttctggaatagaattaacaaaatattatctttattcatgagttggaaactggaaaaaggcttcttgaagtaaatgttctgagtggagctactaggatgtcttccagcctcctgcagtcaaggagtaccactgtattgattagcctgtatgtagcagggctcccttcattgcatctgaggacttgttttctttttctttatttttaatcctcttagttttaaatatattgcctagagactcagttactacccagtttgtggttttttgggagaaatgtaactggacagttagcttttcaattaaaaagacacttaacccat

SEQ ID NO: 2887 - protein, 128 aa, Homo sapiens; identical to SEQ ID NO: 2859

SEQ ID NO: 2888 - DNA, 1751 bp, Homo sapiens
gacctttctaggccagtcggggtccggcacccagttgacgagacagcgcggcgctttcagagctggggagaggcgaaaactcttccggccccccgatcccccggccagccgcccccggcagctccttgccgcctcccggcctgggcccgcccagccgttctcggcctgccgtcaggcgatctcggcggccagcccagccgcgatgtgacgccgcgcgccccggggtcctcggcgcctgcgccctctcctataaagcagacgccgcgccgcgctgcgacgctgtagtggcttcgtcttcggtttttctcttccttcgctaacgcctcccggctctcgtcagcctcccgccggccgtctccttaacaccgaacaccatgccttcaattaagttgcagagttctgatggagagatatttgaagttgatgtggaaattgccaaacaatctgtgactattaagaccatgttggaagatttgggaatggatgatgaaggagatgatgacccagttcctctaccaaatgtgaatgcagcaatattaaaaaaggtcattcagtggtgcacccaccacaaggatgaccctcctcctcctgaagatgatgagaacaaagaaaagcgaacagatgatatccctgtttgggaccaagaattcctgaaagttgaccaaggaacactttttgaactcattctggctgcaaactacttagacatcaaaggtttgcttgatgttacatgcaagactgttgccaatatgatcaaggggaaaactcctgaggagattcgcaagaccttcaatatcaaaaatgactttactgaagaggaggaagcccagcagggcagaataaaaaccatgggaggcaaagaaaggaaatccggaaatatagtcttaacctggtgttgttctaattttccatctgttcttctgactcaactcactggctatcgatgaatcagtaggtagtatttataagtcttaggaaagactactcaagttaaggtacttccctatatccatctcttttaggtacgcaaagagaaccagtggtgtgaagagaagtgaaatgttgtgcctgacactgtaacactgtaaggattgttccaaatactagttgcactgctctgtttataattgttaatattagacaaacagtagacaaatgcagcagcaagtcaattgtattagcagaatattgtcctcattgcatgtgtagtttgagcacagatcccaaaccttacggccaagtttcttctagtatgatggaaagtttcttttttctttgctctgaataaaactgaactgtgggttctctataagtggcattttgggctttccctcttttttgtaaagcaatgtctgcctagtttattgtccagttaactttagtgaccttttaaaagttggcattgtaaataaaacaacttgcaaaaaagttttctggaatagaattaacaaaatattatctttattcatgagttggaaactggaaaaaggcttcttgaagtaaatgttctgagtggagctactaggatgtcttccagcctcctgcagtcaaggagtaccactgtattgattagcctgtatgtagcagggctcccttcattgcatctgaggacttgttttctttttctttatttttaatcctcttagttttaaatatattgcctagagactcagttactacccagtttgtggttttttgggagaaatgtaactggacagttagcttttcaattaaaaagacacttaacccat

SEQ ID NO: 2889 - protein, 190 aa, Homo sapiens; identical to SEQ ID NO: 2857

SEQ ID NO: 2890 - DNA, 2245 bp, Homo sapiens
gacctttctaggccagtcggggtccggcacccagttgacgagacagcgcggcgctttcagagctggggagaggcgaaaactcttccggccccccgatcccccggccagccgcccccggcagctccttgccgcctcccggcctgggcccgcccagccgttctcggcctgccgtcaggcgatctcggcggccagcccagccgcgatgtgacgccgcgcgccccggggtcctcggcgcctgcgccctctcctataaagcagacgccgcgccgcgctgcgacgctgtagtggcttcgtcttcggtttttctcttccttcgctaacgcctcccggctctcgtcagcctcccgccggccgtctccttaacaccgaacaccatgccttcaattaagttgcagagttctgatggagagatatttgaagttgatgtggaaattgccaaacaatctgtgactattaagaccatgttggaagatttgggaatggatgatgaaggagatgatgacccagttcctctaccaaatgtgaatgcagcaatattaaaaaaggtcattcagtggtgcacccaccacaaggatgaccctcctcctcctgaagatgatgagaacaaagaaaagcgaacagatgatatccctgtttgggaccaagaattcctgaaagttgaccaaggaacactttttgaactcattctggctgcaaactacttagacatcaaaggtttgcttgatgttacatgcaagactgttgccaatatgatcaaggggaaaactcctgaggagattcgcaagaccttcaatatcaaaaatgactttactgaagaggaggaagcccaggtaggtagcacacagttttgtctttgatcacatgctcttaaaaagggagtaacacctataacatgccagcaaaagaggtgactgtatcaagtagtcttgatactttagggataatatgtacttaatgtgtcttaaacatactcttactgttctgtctttatgaatctgaacacttagatgatactgcattttaagcataagaacaattagttttcaatgagaagagctcttgttaatgtattaacagttactagttttggcacctgcaactttctgtatagaccatacatatctgacatcagaaaagcaggccctagagagaagtatatactagggtactttagagcaacttaatgaggggaggaaatgaaagaatagatcagaatgattttgttgacatgactacagactgaaataatgtgaatgaattaactgaatttgctctgtcaactttagtaaattgcccattgcctttgctttgttcataatttcagcagggcagaataaaaaccatgggaggcaaagaaaggaaatccggaaatatagtcttaacctggtgttgttctaattttccatctgttcttctgactcaactcactggctatcgatgaatcagtaggtagtatttataagtcttaggaaagactactcaagttaaggtacttccctatatccatctcttttaggtacgcaaagagaaccagtggtgtgaagagaagtgaaatgttgtgcctgacactgtaacactgtaaggattgttccaaatactagttgcactgctctgtttataattgttaatattagacaaacagtagacaaatgcagcagcaagtcaattgtattagcagaatattgtcctcattgcatgtgtagtttgagcacagatcccaaaccttacggccaagtttcttctagtatgatggaaagtttcttttttctttgctctgaataaaactgaactgtgggttctctataagtggcattttgggctttccctcttttttgtaaagcaatgtctgcctagtttattgtccagttaactttagtgaccttttaaaagttggcattgtaaataaaacaacttgcaaaaaagttttctggaatagaattaacaaaatattatctttattcatgagttggaaactggaaaaaggcttcttgaagtaaatgttctgagtggagctactaggatgtcttccagcctcctgcagtcaaggagtaccactgtattgattagcctgtatgtagcagggctcccttcattgcatctgaggacttgttttctttttctttatttttaatcctcttagttttaaatatattgcctagagactcagttactacccagtttgtggttttttgggagaaatgtaactggacagttagcttttcaattaaaaagacacttaacccat

SEQ ID NO: 2891 - protein, 160 aa, Homo sapiens; identical to SEQ ID NO: 297

SEQ ID NO: 2892 - DNA, 1559 bp, Homo sapiens
gacctttctaggccagtcggggtccggcacccagttgacgagacagcgcggcgctttcagagctggggagaggcgaaaactcttccggccccccgatcccccggccagccgcccccggcagctccttgccgcctcccggcctgggcccgcccagccgttctcggcctgccgtcaggcgatctcggcggccagcccagccgcgatgtgacgccgcgcgccccggggtcctcggcgcctgcgccctctcctataaagcagacgccgcgccgcgctgcgacgctgtagtggcttcgtcttcggtttttctcttccttcgctaacgcctcccggctctcgtcagcctcccgccggccgtctccttaacaccgaacaccatgccttcaattaagttgcagagttctgatggagagatatttgaagttgatgtggaaattgccaaacaatctgtgactattaagaccatgttggaagatttgggaatggatgatgaaggagatgatgacccagttcctctaccaaatgtgaatgcagcaatattaaaaaaggtcattcagtggtgcacccaccacaaggatgaccctcctcctcctgaagatgatgagaacaaagaaaagcgaacagatgatatccctgtttgggaccaagaattcctgaaagttgaccaaggaacactttttgaactcattctggctgcaaactacttagacatcaaaggtttgcttgatgttacatgcaagactgttgccaatatgatcaaggggaaaactcctgaggagattcgcaagaccttcaatatcaaaaatgactttactgaagaggaggaagcccaggtacgcaaagagaaccagtggtgtgaagagaagtgaaatgttgtgcctgacactgtaacactgtaaggattgttccaaatactagttgcactgctctgtttataattgttaatattagacaaacagtagacaaatgcagcagcaagtcaattgtattagcagaatattgtcctcattgcatgtgtagtttgagcacagatcccaaaccttacggccaagtttcttctagtatgatggaaagtttcttttttctttgctctgaataaaactgaactgtgggttctctataagtggcattttgggctttccctcttttttgtaaagcaatgtctgcctagtttattgtccagttaactttagtgaccttttaaaagttggcattgtaaataaaacaacttgcaaaaaagttttctggaatagaattaacaaaatattatctttattcatgagttggaaactggaaaaaggcttcttgaagtaaatgttctgagtggagctactaggatgtcttccagcctcctgcagtcaaggagtaccactgtattgattagcctgtatgtagcagggctcccttcattgcatctgaggacttgttttctttttctttatttttaatcctcttagttttaaatatattgcctagagactcagttactacccagtttgtggttttttgggagaaatgtaactggacagttagcttttcaattaaaaagacacttaacccat

SEQ ID NO: 2893 - protein, 163 aa, Homo sapiens; identical to SEQ ID NO: 299

SEQ ID NO: 2894 - DNA, 1612 bp, Homo sapiens
gacctttctaggccagtcggggtccggcacccagttgacgagacagcgcggcgctttcagagctggggagaggcgaaaactcttccggccccccgatcccccggccagccgcccccggcagctccttgccgcctcccggcctgggcccgcccagccgttctcggcctgccgtcaggcgatctcggcggccagcccagccgcgatgtgacgccgcgcgccccggggtcctcggcgcctgcgccctctcctataaagcagacgccgcgccgcgctgcgacgctgtagtggcttcgtcttcggtttttctcttccttcgctaacgcctcccggctctcgtcagcctcccgccggccgtctccttaacaccgaacaccacataaatgagcatattctgatgtactctttggatctgaactcatcttcacagatgccttcaattaagttgcagagttctgatggagagatatttgaagttgatgtggaaattgccaaacaatctgtgactattaagaccatgttggaagatttgggaatggatgatgaaggagatgatgacccagttcctctaccaaatgtgaatgcagcaatattaaaaaaggtcattcagtggtgcacccaccacaaggatgaccctcctcctcctgaagatgatgagaacaaagaaaagcgaacagatgatatccctgtttgggaccaagaattcctgaaagttgaccaaggaacactttttgaactcattctggctgcaaactacttagacatcaaaggtttgcttgatgttacatgcaagactgttgccaatatgatcaaggggaaaactcctgaggagattcgcaagaccttcaatatcaaaaatgactttactgaagaggaggaagcccaggtacgcaaagagaaccagtggtgtgaagagaagtgaaatgttgtgcctgacactgtaacactgtaaggattgttccaaatactagttgcactgctctgtttataattgttaatattagacaaacagtagacaaatgcagcagcaagtcaattgtattagcagaatattgtcctcattgcatgtgtagtttgagcacagatcccaaaccttacggccaagtttcttctagtatgatggaaagtttcttttttctttgctctgaataaaactgaactgtgggttctctataagtggcattttgggctttccctcttttttgtaaagcaatgtctgcctagtttattgtccagttaactttagtgaccttttaaaagttggcattgtaaataaaacaacttgcaaaaaagttttctggaatagaattaacaaaatattatctttattcatgagttggaaactggaaaaaggcttcttgaagtaaatgttctgagtggagctactaggatgtcttccagcctcctgcagtcaaggagtaccactgtattgattagcctgtatgtagcagggctcccttcattgcatctgaggacttgttttctttttctttatttttaatcctcttagttttaaatatattgcctagagactcagttactacccagtttgtggttttttgggagaaatgtaactggacagttagcttttcaattaaaaagacacttaacccat

SEQ ID NO: 2895 - protein, 174 aa, Homo sapiens [sequence omitted]

SEQ ID NO: 2896 - DNA, 1559 bp, Homo sapiens
gacctttctaggccagtcggggtccggcacccagttgacgagacagcgcggcgctttcagagctggggagaggcgaaaactcttccggccccccgatcccccggccagccgcccccggcagctccttgccgcctcccggcctgggcccgcccagccgttctcggcctgccgtcaggcgatctcggcggccagcccagccgcgatgtgacgccgcgcgccccggggtcctcggcgcctgcgccctctcctataaagcagacgccgcgccgcgctgcgacgctgtagtggcttcgtcttcggtttttctcttccttcgctaacgcctcccggctctcgtcagcctcccgccggccgtctccttaacaccgaacaccatgccttcaattaagttgcagagttctgatggagagatatttgaagttgatgtggaaattgccaaacaatctgtgactattaagaccatgttggaagatttgggaatggatgatgaaggagatgatgacccagttcctctaccaaatgtgaatgcagcaatattaaaaaaggtcattcagtggtgcacccaccacaaggatgaccctcctcctcctgaagatgatgagaacaaagaaaagcgaacagatgatatccctgtttgggaccaagaattcctgaaatatactttaaggaaaacaactgtctctttacaggctgcaaactacttagacatcaaaggtttgcttgatgttacatgcaagactgttgccaatatgatcaaggggaaaactcctgaggagattcgcaagaccttcaatatcaaaaatgactttactgaagaggaggaagcccaggtacgcaaagagaaccagtggtgtgaagagaagtgaaatgttgtgcctgacactgtaacactgtaaggattgttccaaatactagttgcactgctctgtttataattgttaatattagacaaacagtagacaaatgcagcagcaagtcaattgtattagcagaatattgtcctcattgcatgtgtagtttgagcacagatcccaaaccttacggccaagtttcttctagtatgatggaaagtttcttttttctttgctctgaataaaactgaactgtgggttctctataagtggcattttgggctttccctcttttttgtaaagcaatgtctgcctagtttattgtccagttaactttagtgaccttttaaaagttggcattgtaaataaaacaacttgcaaaaaagttttctggaatagaattaacaaaatattatctttattcatgagttggaaactggaaaaaggcttcttgaagtaaatgttctgagtggagctactaggatgtcttccagcctcctgcagtcaaggagtaccactgtattgattagcctgtatgtagcagggctcccttcattgcatctgaggacttgttttctttttctttatttttaatcctcttagttttaaatatattgcctagagactcagttactacccagtttgtggttttttgggagaaatgtaactggacagttagcttttcaattaaaaagacacttaacccat

SEQ ID NO: 2897 - protein, 163 aa, Homo sapiens; identical to SEQ ID NO: 2849

SEQ ID NO: 2898 - DNA, 722 bp, Homo sapiens
ggctgcaaactacttagacatcaaaggtttgcttgatgttacatgcaagactgttgccaatatgatcaaggggaaaactcctgaggagattcgcaagaccttcaatatcaaaaatgactttactgaagaggaggaagcccaggtacgcaaagagaaccagtggtgtgaagagaagtgaaattttgagcacagatcccaaaccttacggccaagtttcttctagtatgatggaaagtttcttttttctttgctctgaataaaactgaactgtgggttctctataagtggcattttgggctttccctcttttttgtaaagcaatgtctgcctagtttattgtccagttaactttagtgaccttttaaaagttggcattgtaaataaaacaacttgcaaaaaagttttctggaatagaattaacaaaatattatctttattcatgagttggaaactggaaaaaggcttcttgaagtaaatgttctgagtggagctactaggatgtcttccagcctcctgcagtcaaggagtaccactgtattgattagcctgtatgtagcagggctcccttcattgcatctgaggacttgttttctttttctttatttttaatcctcttagttttaaatatattgcctagagactcagttactacccagtttgtggttttttgggagaaatgtaactggacagttagcttttcaattaaaaagacacttaaccca

SEQ ID NO: 2899 - protein, 48 aa, Homo sapiens [sequence omitted]

SEQ ID NO: 2900 - DNA, 1231 bp, Homo sapiens
gacctttctaggccagtcggggtccggcacccagttgacgagacagcgcggcgctttcagagctggggagaggcgaaaactcttccggccccccgatcccccggccagccgcccccggcagctccttgccgcctcccggcctgggcccgcccagccgttctcggcctgccgtcaggcgatctcggcggccagcccagccgcgatgtgacgccgcgcgccccggggtcctcggcgcctgcgccctctcctataaagcagacgccgcgccgcgctgcgacgctgtagtggcttcgtcttcggtttttctcttccttcgctaacgcctcccggctctcgtcagcctcccgccggccgtctccttaacaccgaacaccatgccttcaattaagttgcagagttctgatggagagatatttgaagttgatgtggaaattgccaaacaatctgtgactattaagaccatgttggaagatttgggaatggatgatgaaggagatgatgacccagttcctctaccaaatgtgaatgcagcaatattaaaaaaggtcattcagtggtgcacccaccacaaggatgaccctcctcctcctgaagatgatgagaacaaagaaaagcgaacagatgatatccctgtttgggaccaagaattcctgaaagttgaccaaggaacactttttgaactcattctggctgcaaactacttagacatcaaaggtttgcttgatgttacatgcaagactgttgccaatatgatcaaggggaaaactcctgaggagattcgcaagaccttcaatatcaaaaatgagctttccctcttttttgtaaagcaatgtctgcctagtttattgtccagttaactttagtgaccttttaaaagttggcattgtaaataaaacaacttgcaaaaaagttttctggaatagaattaacaaaatattatctttattcatgagttggaaactggaaaaaggcttcttgaagtaaatgttctgagtggagctactaggatgtcttccagcctcctgcagtcaaggagtaccactgtattgattagcctgtatgtagcagggctcccttcattgcatctgaggacttgttttctttttctttatttttaatcctcttagttttaaatatattgcctagagactcagttactacccagtttgtggttttttgggagaaatgtaactggacagttagcttttcaattaaaaagacacttaaccca

SEQ ID NO: 2901 - protein, 160 aa, Homo sapiens; identical to SEQ ID NO: 2855

SEQ ID NO: 2902 - DNA, 2678 bp, Homo sapiens
aaaacaaaaacctttcgctggccaggcacagtggctcatagctgtaatcccaacactttgggagggcaaggtgggtgaattgcttgagttcaggagtttgcaacatgatgaaaccttatctctacaaaaacaaaatacaaaaatgagccaggtgtggtggcatgcacctgtagttgcagctacttgggaggctgaggtgggaggatcgcttaagcacaggaggtcgagtgagccatgatcgcggcactgcattccagcctgggtgacacagtgagatcttgtctcaaaaacaaacaaacaaccctttgcttggcttttccttattgaaattgttctttctttttttttttttggatcctggcaatgtttcttggctctgccattttctctcagcattgtttactcctccaacattttgctatgaaaaagttttagccatacagaaaaatggaaagaattacacagtagacaaccatgtagccactgcctagattctacaactgaaaacactttcagtattgattttggtctttatgctggtatgtatagtctaagtaatcagcttcctgaaactttatggagtaattattctcctattaaggaaattttggggcttttcctgctttgttcctacaccaaatagtctcacacatgtgtctagggtatttggaatttgctggttacaatatatgtacatattcagcttttctgaggagtgctggattagctttcaaaggggttataccaatttatactctctagaagagtttgtgtttcctttccactattgcccaacaattagtatcagtttcttgattttttttcaatctagagaagtatctgtagtgttagttttgcttctagtaaagttgagcgttccttatgtttggctattcagatttcatttattggctgtacatattaacccatttctctttaatgatttttgaaagattttatattctctcagctaatcattgttgtacatattgcaggtatcttccagtcattgtcctaacttttctttttgcatagaagctttttaatgtagtcaagtacagtactctgtctgcatggcttgcttttatctaataagatcttctcccttctagggttataatgattcttcaagcttcatttttgtttttcaagcttggctgttaatggctcaagtcaacctctagctagttattattccaatatagggataagttgtcccagcagtggaatgagtaccttgtgacaaagtgccacagaggaatgaacttttgttgttgtaggtcattcagtggtgcacccaccacaaggatgaccctcctcctcctgaagatgatgagaacaaagaaaagcgaacagatgatatccctgtttgggaccaagaattcctgaaagttgaccaaggaacactttttgaactcattctggctgcaaactacttagacatcaaaggtttgcttgatgttacatgcaagactgttgccaatatgatcaaggggaaaactcctgaggagattcgcaagaccttcaatatcaaaaatgactttactgaagaggaggaagcccaggtaggtagcacacagttttgtctttgatcacatgctcttaaaaagggagtaacacctataacatgccagcaaaagaggtgactgtatcaagtagtcttgatactttagggataatatgtacttaatgtgtcttaaacatactcttactgttctgtctttatgaatctgaacacttagatgatactgcattttaagcataagaacaattagttttcaatgagaagagctcttgttaatgtattaacagttactagttttggcacctgcaactttctgtatagaccatacatatctgacatcagaaaagcaggccctagagagaagtatatactagggtactttagagcaacttaatgaggggaggaaatgaaagaatagatcagaatgattttgttgacatgactacagactgaaataatgtgaatgaattaactgaatttgctctgtcaactttagtaaattgcccattgcctttgctttgttcataatttcagcagggcagaataaaaaccatgggaggcaaagaaaggaaatccggaaatatagtcttaacctggtgttgttctaattttccatctgttcttctgactcaactcactggctatcgatgaatcagtaggtagtatttataagtcttaggaaagactactcaagttaaggtacttccctatatccatctcttttaggtacgcaaagagaaccagtggtgtgaagagaagtgaaatgttgtgcctgacactgtaacactgtaaggattgttccaaatactagttgcactgctctgtttataattgttaatattagacaaacagtagacaaatgcagcagcaagtcaattgtattagcagaatattgtcctcattgcatgtgtagtttgagcacagatcccaaaccttacggccaagtttcttctagtatgatggaaagtttcttttttctttgctctgaataaaactgaactgtgggttctctataagtggcattttgggctttccctcttttttgtaaagcaatgtctgcctagtttattgtccagttaactttagtgaccttttaaaagttggcattgtaaataaaacaacttgcaaaaaagttttctggaatagaattaac

SEQ ID NO: 2903 - protein, 86 aa, Homo sapiens; identical to SEQ ID NO: 2845

SEQ ID NO: 2904 - DNA, 1042 bp, Homo sapiens
gttgtcgaccctgttcttcgggagaccctaccaggttccgttcacctgccccgcccccgactcagcgaggcctcctctggccgggcgtcctcacggcgctccataaacataaatgagcatattctgatgtactctttggatctgaactcatcttcacagatgccttcaattaagttgcagagttctgatggagagatatttgaagttgatgtggaaattgccaaacaatctgtgactattaagaccatgttggaagatttgggaatggatgatgaaggagatgatgacccagttcctctaccaaatgtgaatgcagcaatattaaaaaaggtcattcagtggtgcacccaccacaaggatgaccctcctcctcctgaagatgatgagaacaaagaaaagcgaacagatgatatccctgtttgggaccaagaattcctgaaagttgaccaaggaacactttttgaactcattctggctgcaaactacttagacatcaaaggtttgcttgatgttacatgcaagactgttgccaatatgatcaaggggaaaactcctgaggagattcgcaagaccttcaatatcaaaaatgactttactgaagaggaggaagcccaggtacgcaaagagaaccagtggtgtgaagagaagtgaaatgttgtgcctgacactgtaacactgtaaggattgttccaaatactagttgcactgctctgtttataattgttaatattagacaaacagtagacaaatgcagcagcaagtcaattgtattagcagaatattgtcctcattgcatgtgtagtttgagcacagatcccaaaccttacggccaagtttcttctagtatgatggaaagtttcttttttctttgctctgaataaaactgaactgtgggttctctataagtggcattttgggctttccctcttttttgtaaagcaatgtctgcctagtttattgtccagttaactttagtgaccttttaaaagttggcattgtaaataaaacaacttgcaaaaaagttttctggaatagaattaac

SEQ ID NO: 2905 - protein, 174 aa, Homo sapiens [sequence omitted]

SEQ ID NO: 2906 - DNA, 1449 bp, Homo sapiens
gacctttctaggccagtcggggtccggcacccagttgacgagacagcgcggcgctttcagagctggggagaggcgaaaactcttccggccccccgatcccccggccagccgcccccggcagctccttgccgcctcccggcctgggcccgcccagccgttctcggcctgccgtcaggcgatctcggcggccagcccagccgcgatgtgacgccgcgcgccccggggtcctcggcgcctgcgccctctcctataaagcagacgccgcgccgcgctgcgacgctgtagtggcttcgtcttcggtttttctcttccttcgctaacgcctcccggctctcgtcagcctcccgccggccgtctccttaacaccgaacaccatgccttcaattaagttgcagagttctgatggagagatatttgaagttgatgtggaaattgccaaacaatctgtgactattaagaccatgttggaagatttgggaatggatgatgaaggagatgatgacccagttcctctaccaaatgtgaatgcagcaatattaaaaaaggtcattcagtggtgcacccaccacaaggatgaccctcctcctcctgaagatgatgagaacaaagaaaagcgaacagatgatatccctgtttgggaccaagaattcctgaaagttgaccaaggaacactttttgaactcattctggctgcaaactacttagacatcaaaggtttgcttgatgttacatgcaagactgttgccaatatgatcaaggggaaaactcctgaggagattcgcaagaccttcaatatcaaaaatgactttactgaagaggaggaagcccagcagggcagaataaaaaccatgggaggcaaagaaaggaaatccggaaatatagtcttaacctggtgttgttctaattttccatctgttcttctgactcaactcactggctatcgatgaatcagtaggtagtatttataagtcttaggaaagactactcaagttaaggtacttccctatatccatctcttttaggtacgcaaagagaaccagtggtgtgaagagaagtgaaatgttgtgcctgacactgtaacactgtaaggattgttccaaatactagttgcactgctctgtttataattgttaatattagacaaacagtagacaaatgcagcagcaagtcaattgtattagcagaatattgtcctcattgcatgtgtagtttgagcacagatcccaaaccttacggccaagtttcttctagtatgatggaaagtttcttttttctttgctctgaataaaactgaactgtgggttctctataagtggcattttgggctttccctcttttttgtaaagcaatgtctgcctagtttattgtccagttaactttagtgaccttttaaaagttggcattgtaaataaaacaacttgcaaaaaagttttctggaatagaattaac

SEQ ID NO: 2907 - protein, 190 aa, Homo sapiens; identical to SEQ ID NO: 2857

SEQ ID NO: 2908 - DNA, 1345 bp, Homo sapiens
gacctttctaggccagtcggggtccggcacccagttgacgagacagcgcggcgctttcagagctggggagaggcgaaaactcttccggccccccgatcccccggccagccgcccccggcagctccttgccgcctcccggcctgggcccgcccagccgttctcggcctgccgtcaggcgatctcggcggccagcccagccgcgatgtgacgccgcgcgccccggggtcctcggcgcctgcgccctctcctataaagcagacgccgcgccgcgctgcgacgctgtagtggcttcgtcttcggtttttctcttccttcgctaacgcctcccggctctcgtcagcctcccgccggccgtctccttaacaccgaacaccatgccttcaattaagttgcagagttctgatggagagatatttgaagttgatgtggaaattgccaaacaatctgtgactattaagaccatgttggaagtcactgttcatcaagtacctattgaatgaagagtatgttgtgctcactaaaaaaaactgaaagcaatccaagtgtccctaaaaggcagatttgggaatggatgatgaaggagatgatgacccagttcctctaccaaatgtgaatgcagcaatattaaaaaaggtcattcagtggtgcacccaccacaaggatgaccctcctcctcctgaagatgatgagaacaaagaaaagcgaacagatgatatccctgtttgggaccaagaattcctgaaagttgaccaaggaacactttttgaactcattctggctgcaaactacttagacatcaaaggtttgcttgatgttacatgcaagactgttgccaatatgatcaaggggaaaactcctgaggagattcgcaagaccttcaatatcaaaaatgactttactgaagaggaggaagcccaggtacgcaaagagaaccagtggtgtgaagagaagtgaaatgttgtgcctgacactgtaacactgtaaggattgttccaaatactagttgcactgctctgtttataattgttaatattagacaaacagtagacaaatgcagcagcaagtcaattgtattagcagaatattgtcctcattgcatgtgtagtttgagcacagatcccaaaccttacggccaagtttcttctagtatgatggaaagtttcttttttctttgctctgaataaaactgaactgtgggttctctataagtggcattttgggctttccctcttttttgtaaagcaatgtctgcctagtttattgtccagttaactttagtgaccttttaaaagttggcattgtaaataaaacaacttgcaaaaaagttttctggaatagaattaac

SEQ ID NO: 2909 - protein, 128 aa, Homo sapiens; identical to SEQ ID NO: 2859

SEQ ID NO: 2910 - DNA, 1943 bp, Homo sapiens
gacctttctaggccagtcggggtccggcacccagttgacgagacagcgcggcgctttcagagctggggagaggcgaaaactcttccggccccccgatcccccggccagccgcccccggcagctccttgccgcctcccggcctgggcccgcccagccgttctcggcctgccgtcaggcgatctcggcggccagcccagccgcgatgtgacgccgcgcgccccggggtcctcggcgcctgcgccctctcctataaagcagacgccgcgccgcgctgcgacgctgtagtggcttcgtcttcggtttttctcttccttcgctaacgcctcccggctctcgtcagcctcccgccggccgtctccttaacaccgaacaccatgccttcaattaagttgcagagttctgatggagagatatttgaagttgatgtggaaattgccaaacaatctgtgactattaagaccatgttggaagatttgggaatggatgatgaaggagatgatgacccagttcctctaccaaatgtgaatgcagcaatattaaaaaaggtcattcagtggtgcacccaccacaaggatgaccctcctcctcctgaagatgatgagaacaaagaaaagcgaacagatgatatccctgtttgggaccaagaattcctgaaagttgaccaaggaacactttttgaactcattctggctgcaaactacttagacatcaaaggtttgcttgatgttacatgcaagactgttgccaatatgatcaaggggaaaactcctgaggagattcgcaagaccttcaatatcaaaaatgactttactgaagaggaggaagcccaggtaggtagcacacagttttgtctttgatcacatgctcttaaaaagggagtaacacctataacatgccagcaaaagaggtgactgtatcaagtagtcttgatactttagggataatatgtacttaatgtgtcttaaacatactcttactgttctgtctttatgaatctgaacacttagatgatactgcattttaagcataagaacaattagttttcaatgagaagagctcttgttaatgtattaacagttactagttttggcacctgcaactttctgtatagaccatacatatctgacatcagaaaagcaggccctagagagaagtatatactagggtactttagagcaacttaatgaggggaggaaatgaaagaatagatcagaatgattttgttgacatgactacagactgaaataatgtgaatgaattaactgaatttgctctgtcaactttagtaaattgcccattgcctttgctttgttcataatttcagcagggcagaataaaaaccatgggaggcaaagaaaggaaatccggaaatatagtcttaacctggtgttgttctaattttccatctgttcttctgactcaactcactggctatcgatgaatcagtaggtagtatttataagtcttaggaaagactactcaagttaaggtacttccctatatccatctcttttaggtacgcaaagagaaccagtggtgtgaagagaagtgaaatgttgtgcctgacactgtaacactgtaaggattgttccaaatactagttgcactgctctgtttataattgttaatattagacaaacagtagacaaatgcagcagcaagtcaattgtattagcagaatattgtcctcattgcatgtgtagtttgagcacagatcccaaaccttacggccaagtttcttctagtatgatggaaagtttcttttttctttgctctgaataaaactgaactgtgggttctctataagtggcattttgggctttccctcttttttgtaaagcaatgtctgcctagtttattgtccagttaactttagtgaccttttaaaagttggcattgtaaataaaacaacttgcaaaaaagttttctggaatagaattaac

SEQ ID NO: 2911 - protein, 160 aa, Homo sapiens; identical to SEQ ID NO: 297

SEQ ID NO: 2912 - DNA, 1257 bp, Homo sapiens
gacctttctaggccagtcggggtccggcacccagttgacgagacagcgcggcgctttcagagctggggagaggcgaaaactcttccggccccccgatcccccggccagccgcccccggcagctccttgccgcctcccggcctgggcccgcccagccgttctcggcctgccgtcaggcgatctcggcggccagcccagccgcgatgtgacgccgcgcgccccggggtcctcggcgcctgcgccctctcctataaagcagacgccgcgccgcgctgcgacgctgtagtggcttcgtcttcggtttttctcttccttcgctaacgcctcccggctctcgtcagcctcccgccggccgtctccttaacaccgaacaccatgccttcaattaagttgcagagttctgatggagagatatttgaagttgatgtggaaattgccaaacaatctgtgactattaagaccatgttggaagatttgggaatggatgatgaaggagatgatgacccagttcctctaccaaatgtgaatgcagcaatattaaaaaaggtcattcagtggtgcacccaccacaaggatgaccctcctcctcctgaagatgatgagaacaaagaaaagcgaacagatgatatccctgtttgggaccaagaattcctgaaagttgaccaaggaacactttttgaactcattctggctgcaaactacttagacatcaaaggtttgcttgatgttacatgcaagactgttgccaatatgatcaaggggaaaactcctgaggagattcgcaagaccttcaatatcaaaaatgactttactgaagaggaggaagcccaggtacgcaaagagaaccagtggtgtgaagagaagtgaaatgttgtgcctgacactgtaacactgtaaggattgttccaaatactagttgcactgctctgtttataattgttaatattagacaaacagtagacaaatgcagcagcaagtcaattgtattagcagaatattgtcctcattgcatgtgtagtttgagcacagatcccaaaccttacggccaagtttcttctagtatgatggaaagtttcttttttctttgctctgaataaaactgaactgtgggttctctataagtggcattttgggctttccctcttttttgtaaagcaatgtctgcctagtttattgtccagttaactttagtgaccttttaaaagttggcattgtaaataaaacaacttgcaaaaaagttttctggaatagaattaac

SEQ ID NO: 2913 - protein, 163 aa, Homo sapiens; identical to SEQ ID NO: 299

SEQ ID NO: 2914 - DNA, 1310 bp, Homo sapiens
gacctttctaggccagtcggggtccggcacccagttgacgagacagcgcggcgctttcagagctggggagaggcgaaaactcttccggccccccgatcccccggccagccgcccccggcagctccttgccgcctcccggcctgggcccgcccagccgttctcggcctgccgtcaggcgatctcggcggccagcccagccgcgatgtgacgccgcgcgccccggggtcctcggcgcctgcgccctctcctataaagcagacgccgcgccgcgctgcgacgctgtagtggcttcgtcttcggtttttctcttccttcgctaacgcctcccggctctcgtcagcctcccgccggccgtctccttaacaccgaacaccacataaatgagcatattctgatgtactctttggatctgaactcatcttcacagatgccttcaattaagttgcagagttctgatggagagatatttgaagttgatgtggaaattgccaaacaatctgtgactattaagaccatgttggaagatttgggaatggatgatgaaggagatgatgacccagttcctctaccaaatgtgaatgcagcaatattaaaaaaggtcattcagtggtgcacccaccacaaggatgaccctcctcctcctgaagatgatgagaacaaagaaaagcgaacagatgatatccctgtttgggaccaagaattcctgaaagttgaccaaggaacactttttgaactcattctggctgcaaactacttagacatcaaaggtttgcttgatgttacatgcaagactgttgccaatatgatcaaggggaaaactcctgaggagattcgcaagaccttcaatatcaaaaatgactttactgaagaggaggaagcccaggtacgcaaagagaaccagtggtgtgaagagaagtgaaatgttgtgcctgacactgtaacactgtaaggattgttccaaatactagttgcactgctctgtttataattgttaatattagacaaacagtagacaaatgcagcagcaagtcaattgtattagcagaatattgtcctcattgcatgtgtagtttgagcacagatcccaaaccttacggccaagtttcttctagtatgatggaaagtttcttttttctttgctctgaataaaactgaactgtgggttctctataagtggcattttgggctttccctcttttttgtaaagcaatgtctgcctagtttattgtccagttaactttagtgaccttttaaaagttggcattgtaaataaaacaacttgcaaaaaagttttctggaatagaattaac

SEQ ID NO: 2915 - protein, 174 aa, Homo sapiens [sequence omitted]

SEQ ID NO: 2916 - DNA, 1257 bp, Homo sapiens
gacctttctaggccagtcggggtccggcacccagttgacgagacagcgcggcgctttcagagctggggagaggcgaaaactcttccggccccccgatcccccggccagccgcccccggcagctccttgccgcctcccggcctgggcccgcccagccgttctcggcctgccgtcaggcgatctcggcggccagcccagccgcgatgtgacgccgcgcgccccggggtcctcggcgcctgcgccctctcctataaagcagacgccgcgccgcgctgcgacgctgtagtggcttcgtcttcggtttttctcttccttcgctaacgcctcccggctctcgtcagcctcccgccggccgtctccttaacaccgaacaccatgccttcaattaagttgcagagttctgatggagagatatttgaagttgatgtggaaattgccaaacaatctgtgactattaagaccatgttggaagatttgggaatggatgatgaaggagatgatgacccagttcctctaccaaatgtgaatgcagcaatattaaaaaaggtcattcagtggtgcacccaccacaaggatgaccctcctcctcctgaagatgatgagaacaaagaaaagcgaacagatgatatccctgtttgggaccaagaattcctgaaatatactttaaggaaaacaactgtctctttacaggctgcaaactacttagacatcaaaggtttgcttgatgttacatgcaagactgttgccaatatgatcaaggggaaaactcctgaggagattcgcaagaccttcaatatcaaaaatgactttactgaagaggaggaagcccaggtacgcaaagagaaccagtggtgtgaagagaagtgaaatgttgtgcctgacactgtaacactgtaaggattgttccaaatactagttgcactgctctgtttataattgttaatattagacaaacagtagacaaatgcagcagcaagtcaattgtattagcagaatattgtcctcattgcatgtgtagtttgagcacagatcccaaaccttacggccaagtttcttctagtatgatggaaagtttcttttttctttgctctgaataaaactgaactgtgggttctctataagtggcattttgggctttccctcttttttgtaaagcaatgtctgcctagtttattgtccagttaactttagtgaccttttaaaagttggcattgtaaataaaacaacttgcaaaaaagttttctggaatagaattaac

SEQ ID NO: 2917 - protein, 163 aa, Homo sapiens; identical to SEQ ID NO: 2849

SEQ ID NO: 2918 - DNA, 927 bp, Homo sapiens
gacctttctaggccagtcggggtccggcacccagttgacgagacagcgcggcgctttcagagctggggagaggcgaaaactcttccggccccccgatcccccggccagccgcccccggcagctccttgccgcctcccggcctgggcccgcccagccgttctcggcctgccgtcaggcgatctcggcggccagcccagccgcgatgtgacgccgcgcgccccggggtcctcggcgcctgcgccctctcctataaagcagacgccgcgccgcgctgcgacgctgtagtggcttcgtcttcggtttttctcttccttcgctaacgcctcccggctctcgtcagcctcccgccggccgtctccttaacaccgaacaccatgccttcaattaagttgcagagttctgatggagagatatttgaagttgatgtggaaattgccaaacaatctgtgactattaagaccatgttggaagatttgggaatggatgatgaaggagatgatgacccagttcctctaccaaatgtgaatgcagcaatattaaaaaaggtcattcagtggtgcacccaccacaaggatgaccctcctcctcctgaagatgatgagaacaaagaaaagcgaacagatgatatccctgtttgggaccaagaattcctgaaagttgaccaaggaacactttttgaactcattctggctgcaaactacttagacatcaaaggtttgcttgatgttacatgcaagactgttgccaatatgatcaaggggaaaactcctgaggagattcgcaagaccttcaatatcaaaaatgagctttccctcttttttgtaaagcaatgtctgcctagtttattgtccagttaactttagtgaccttttaaaagttggcattgtaaataaaacaacttgcaaaaaagttttctggaatagaatt

SEQ ID NO: 2919 - protein, 160 aa, Homo sapiens; identical to SEQ ID NO: 2855

SEQ ID NO: 2920 - DNA, 274 bp, Homo sapiens
ctgtaacactgtaaggattgttccaaatactagttgcactgctctgtttataattgttaatattagacaaacagtagacaaattatgatggaaagtttcttttttctttgctctgaataaaactgaactgtgggttctctataagtggcattttgggctttccctcttttttgtaaagcaatgtctgcctagtttattgtccagttaactttagtgaccttttaaaagttggcattgtaaataaaacaacttgcaaaaaagttttctggaatag

SEQ ID NO: 2921 - protein, 39 aa, Homo sapiens
WKVSFFFALNKTELWVLYKWHFGLSLFFVKQCLPSLLSS

SEQ ID NO: 2922 - DNA, 2546 bp, Homo sapiens
aaaacaaaaacctttcgctggccaggcacagtggctcatagctgtaatcccaacactttgggagggcaaggtgggtgaattgcttgagttcaggagtttgcaacatgatgaaaccttatctctacaaaaacaaaatacaaaaatgagccaggtgtggtggcatgcacctgtagttgcagctacttgggaggctgaggtgggaggatcgcttaagcacaggaggtcgagtgagccatgatcgcggcactgcattccagcctgggtgacacagtgagatcttgtctcaaaaacaaacaaacaaccctttgcttggcttttccttattgaaattgttctttctttttttttttttggatcctggcaatgtttcttggctctgccattttctctcagcattgtttactcctccaacattttgctatgaaaaagttttagccatacagaaaaatggaaagaattacacagtagacaaccatgtagccactgcctagattctacaactgaaaacactttcagtattgattttggtctttatgctggtatgtatagtctaagtaatcagcttcctgaaactttatggagtaattattctcctattaaggaaattttggggcttttcctgctttgttcctacaccaaatagtctcacacatgtgtctagggtatttggaatttgctggttacaatatatgtacatattcagcttttctgaggagtgctggattagctttcaaaggggttataccaatttatactctctagaagagtttgtgtttcctttccactattgcccaacaattagtatcagtttcttgattttttttcaatctagagaagtatctgtagtgttagttttgcttctagtaaagttgagcgttccttatgtttggctattcagatttcatttattggctgtacatattaacccatttctctttaatgatttttgaaagattttatattctctcagctaatcattgttgtacatattgcaggtatcttccagtcattgtcctaacttttctttttgcatagaagctttttaatgtagtcaagtacagtactctgtctgcatggcttgcttttatctaataagatcttctcccttctagggttataatgattcttcaagcttcatttttgtttttcaagcttggctgttaatggctcaagtcaacctctagctagttattattccaatatagggataagttgtcccagcagtggaatgagtaccttgtgacaaagtgccacagaggaatgaacttttgttgttgtaggtcattcagtggtgcacccaccacaaggatgaccctcctcctcctgaagatgatgagaacaaagaaaagcgaacagatgatatccctgtttgggaccaagaattcctgaaagttgaccaaggaacactttttgaactcattctggctgcaaactacttagacatcaaaggtttgcttgatgttacatgcaagactgttgccaatatgatcaaggggaaaactcctgaggagattcgcaagaccttcaatatcaaaaatgactttactgaagaggaggaagcccaggtaggtagcacacagttttgtctttgatcacatgctcttaaaaagggagtaacacctataacatgccagcaaaagaggtgactgtatcaagtagtcttgatactttagggataatatgtacttaatgtgtcttaaacatactcttactgttctgtctttatgaatctgaacacttagatgatactgcattttaagcataagaacaattagttttcaatgagaagagctcttgttaatgtattaacagttactagttttggcacctgcaactttctgtatagaccatacatatctgacatcagaaaagcaggccctagagagaagtatatactagggtactttagagcaacttaatgaggggaggaaatgaaagaatagatcagaatgattttgttgacatgactacagactgaaataatgtgaatgaattaactgaatttgctctgtcaactttagtaaattgcccattgcctttgctttgttcataatttcagcagggcagaataaaaaccatgggaggcaaagaaaggaaatccggaaatatagtcttaacctggtgttgttctaattttccatctgttcttctgactcaactcactggctatcgatgaatcagtaggtagtatttataagtcttaggaaagactactcaagttaaggtacttccctatatccatctcttttaggtacgcaaagagaaccagtggtgtgaagagaagtgaaatgttgtgcctgacactgtaacactgtaaggattgttccaaatactagttgcactgctctgtttataattgttaatattagacaaacagtagacaaatgcagcagcaagtcaattgtattagcagaatattgtcctcattgcatgtgtagtttgagcacagatcccaaaccttacggccaagtttcttctagtatgatggaaagtttcttttttctttgctctgaataaaactgaactgtgggttctctataagtggc

SEQ ID NO: 2923 - protein, 86 aa, Homo sapiens; identical to SEQ ID NO: 2845

SEQ ID NO: 2924 - DNA, 910 bp, Homo sapiens
gttgtcgaccctgttcttcgggagaccctaccaggttccgttcacctgccccgcccccgactcagcgaggcctcctctggccgggcgtcctcacggcgctccataaacataaatgagcatattctgatgtactctttggatctgaactcatcttcacagatgccttcaattaagttgcagagttctgatggagagatatttgaagttgatgtggaaattgccaaacaatctgtgactattaagaccatgttggaagatttgggaatggatgatgaaggagatgatgacccagttcctctaccaaatgtgaatgcagcaatattaaaaaaggtcattcagtggtgcacccaccacaaggatgaccctcctcctcctgaagatgatgagaacaaagaaaagcgaacagatgatatccctgtttgggaccaagaattcctgaaagttgaccaaggaacactttttgaactcattctggctgcaaactacttagacatcaaaggtttgcttgatgttacatgcaagactgttgccaatatgatcaaggggaaaactcctgaggagattcgcaagaccttcaatatcaaaaatgactttactgaagaggaggaagcccaggtacgcaaagagaaccagtggtgtgaagagaagtgaaatgttgtgcctgacactgtaacactgtaaggattgttccaaatactagttgcactgctctgtttataattgttaatattagacaaacagtagacaaatgcagcagcaagtcaattgtattagcagaatattgtcctcattgcatgtgtagtttgagcacagatcccaaaccttacggccaagtttcttctagtatgatggaaagtttcttttttctttgctctgaataaaactgaactgtgggttctctataagtggc

SEQ ID NO: 2925 - protein, 174 aa, Homo sapiens [sequence omitted]

SEQ ID NO: 2926 - DNA, 1178 bp, Homo sapiens
gacctttctaggccagtcggggtccggcacccagttgacgagacagcgcggcgctttcagagctggggagaggcgaaaactcttccggccccccgatcccccggccagccgcccccggcagctccttgccgcctcccggcctgggcccgcccagccgttctcggcctgccgtcaggcgatctcggcggccagcccagccgcgatgtgacgccgcgcgccccggggtcctcggcgcctgcgccctctcctataaagcagacgccgcgccgcgctgcgacgctgtagtggcttcgtcttcggtttttctcttccttcgctaacgcctcccggctctcgtcagcctcccgccggccgtctccttaacaccgaacaccacataaatgagcatattctgatgtactctttggatctgaactcatcttcacagatgccttcaattaagttgcagagttctgatggagagatatttgaagttgatgtggaaattgccaaacaatctgtgactattaagaccatgttggaagatttgggaatggatgatgaaggagatgatgacccagttcctctaccaaatgtgaatgcagcaatattaaaaaaggtcattcagtggtgcacccaccacaaggatgaccctcctcctcctgaagatgatgagaacaaagaaaagcgaacagatgatatccctgtttgggaccaagaattcctgaaagttgaccaaggaacactttttgaactcattctggctgcaaactacttagacatcaaaggtttgcttgatgttacatgcaagactgttgccaatatgatcaaggggaaaactcctgaggagattcgcaagaccttcaatatcaaaaatgactttactgaagaggaggaagcccaggtacgcaaagagaaccagtggtgtgaagagaagtgaaatgttgtgcctgacactgtaacactgtaaggattgttccaaatactagttgcactgctctgtttataattgttaatattagacaaacagtagacaaatgcagcagcaagtcaattgtattagcagaatattgtcctcattgcatgtgtagtttgagcacagatcccaaaccttacggccaagtttcttctagtatgatggaaagtttcttttttctttgctctgaataaaactgaactgtgggttctctataagtggc

SEQ ID NO: 2927 - protein, 174 aa, Homo sapiens [sequence omitted]

SEQ ID NO: 2928 - DNA, 1811 bp, Homo sapiens
gacctttctaggccagtcggggtccggcacccagttgacgagacagcgcggcgctttcagagctggggagaggcgaaaactcttccggccccccgatcccccggccagccgcccccggcagctccttgccgcctcccggcctgggcccgcccagccgttctcggcctgccgtcaggcgatctcggcggccagcccagccgcgatgtgacgccgcgcgccccggggtcctcggcgcctgcgccctctcctataaagcagacgccgcgccgcgctgcgacgctgtagtggcttcgtcttcggtttttctcttccttcgctaacgcctcccggctctcgtcagcctcccgccggccgtctccttaacaccgaacaccatgccttcaattaagttgcagagttctgatggagagatatttgaagttgatgtggaaattgccaaacaatctgtgactattaagaccatgttggaagatttgggaatggatgatgaaggagatgatgacccagttcctctaccaaatgtgaatgcagcaatattaaaaaaggtcattcagtggtgcacccaccacaaggatgaccctcctcctcctgaagatgatgagaacaaagaaaagcgaacagatgatatccctgtttgggaccaagaattcctgaaagttgaccaaggaacactttttgaactcattctggctgcaaactacttagacatcaaaggtttgcttgatgttacatgcaagactgttgccaatatgatcaaggggaaaactcctgaggagattcgcaagaccttcaatatcaaaaatgactttactgaagaggaggaagcccaggtaggtagcacacagttttgtctttgatcacatgctcttaaaaagggagtaacacctataacatgccagcaaaagaggtgactgtatcaagtagtcttgatactttagggataatatgtacttaatgtgtcttaaacatactcttactgttctgtctttatgaatctgaacacttagatgatactgcattttaagcataagaacaattagttttcaatgagaagagctcttgttaatgtattaacagttactagttttggcacctgcaactttctgtatagaccatacatatctgacatcagaaaagcaggccctagagagaagtatatactagggtactttagagcaacttaatgaggggaggaaatgaaagaatagatcagaatgattttgttgacatgactacagactgaaataatgtgaatgaattaactgaatttgctctgtcaactttagtaaattgcccattgcctttgctttgttcataatttcagcagggcagaataaaaaccatgggaggcaaagaaaggaaatccggaaatatagtcttaacctggtgttgttctaattttccatctgttcttctgactcaactcactggctatcgatgaatcagtaggtagtatttataagtcttaggaaagactactcaagttaaggtacttccctatatccatctcttttaggtacgcaaagagaaccagtggtgtgaagagaagtgaaatgttgtgcctgacactgtaacactgtaaggattgttccaaatactagttgcactgctctgtttataattgttaatattagacaaacagtagacaaatgcagcagcaagtcaattgtattagcagaatattgtcctcattgcatgtgtagtttgagcacagatcccaaaccttacggccaagtttcttctagtatgatggaaagtttcttttttctttgctctgaataaaactgaactgtgggttctctataagtggc

SEQ ID NO: 2929 - protein, 160 aa, Homo sapiens; identical to SEQ ID NO: 297

SEQ ID NO: 2930 - DNA, 1125 bp, Homo sapiens
gacctttctaggccagtcggggtccggcacccagttgacgagacagcgcggcgctttcagagctggggagaggcgaaaactcttccggccccccgatcccccggccagccgcccccggcagctccttgccgcctcccggcctgggcccgcccagccgttctcggcctgccgtcaggcgatctcggcggccagcccagccgcgatgtgacgccgcgcgccccggggtcctcggcgcctgcgccctctcctataaagcagacgccgcgccgcgctgcgacgctgtagtggcttcgtcttcggtttttctcttccttcgctaacgcctcccggctctcgtcagcctcccgccggccgtctccttaacaccgaacaccatgccttcaattaagttgcagagttctgatggagagatatttgaagttgatgtggaaattgccaaacaatctgtgactattaagaccatgttggaagatttgggaatggatgatgaaggagatgatgacccagttcctctaccaaatgtgaatgcagcaatattaaaaaaggtcattcagtggtgcacccaccacaaggatgaccctcctcctcctgaagatgatgagaacaaagaaaagcgaacagatgatatccctgtttgggaccaagaattcctgaaagttgaccaaggaacactttttgaactcattctggctgcaaactacttagacatcaaaggtttgcttgatgttacatgcaagactgttgccaatatgatcaaggggaaaactcctgaggagattcgcaagaccttcaatatcaaaaatgactttactgaagaggaggaagcccaggtacgcaaagagaaccagtggtgtgaagagaagtgaaatgttgtgcctgacactgtaacactgtaaggattgttccaaatactagttgcactgctctgtttataattgttaatattagacaaacagtagacaaatgcagcagcaagtcaattgtattagcagaatattgtcctcattgcatgtgtagtttgagcacagatcccaaaccttacggccaagtttcttctagtatgatggaaagtttcttttttctttgctctgaataaaactgaactgtgggttctctataagtggc

SEQ ID NO: 2931 - protein, 163 aa, Homo sapiens; identical to SEQ ID NO: 299

SEQ ID NO: 2932 - DNA, 1213 bp, Homo sapiens
gacctttctaggccagtcggggtccggcacccagttgacgagacagcgcggcgctttcagagctggggagaggcgaaaactcttccggccccccgatcccccggccagccgcccccggcagctccttgccgcctcccggcctgggcccgcccagccgttctcggcctgccgtcaggcgatctcggcggccagcccagccgcgatgtgacgccgcgcgccccggggtcctcggcgcctgcgccctctcctataaagcagacgccgcgccgcgctgcgacgctgtagtggcttcgtcttcggtttttctcttccttcgctaacgcctcccggctctcgtcagcctcccgccggccgtctccttaacaccgaacaccatgccttcaattaagttgcagagttctgatggagagatatttgaagttgatgtggaaattgccaaacaatctgtgactattaagaccatgttggaagtcactgttcatcaagtacctattgaatgaagagtatgttgtgctcactaaaaaaaactgaaagcaatccaagtgtccctaaaaggcagatttgggaatggatgatgaaggagatgatgacccagttcctctaccaaatgtgaatgcagcaatattaaaaaaggtcattcagtggtgcacccaccacaaggatgaccctcctcctcctgaagatgatgagaacaaagaaaagcgaacagatgatatccctgtttgggaccaagaattcctgaaagttgaccaaggaacactttttgaactcattctggctgcaaactacttagacatcaaaggtttgcttgatgttacatgcaagactgttgccaatatgatcaaggggaaaactcctgaggagattcgcaagaccttcaatatcaaaaatgactttactgaagaggaggaagcccaggtacgcaaagagaaccagtggtgtgaagagaagtgaaatgttgtgcctgacactgtaacactgtaaggattgttccaaatactagttgcactgctctgtttataattgttaatattagacaaacagtagacaaatgcagcagcaagtcaattgtattagcagaatattgtcctcattgcatgtgtagtttgagcacagatcccaaaccttacggccaagtttcttctagtatgatggaaagtttcttttttctttgctctgaataaaactgaactgtgggttctctataagtggc

SEQ ID NO: 2933 - protein, 128 aa, Homo sapiens; identical to SEQ ID NO: 2859

SEQ ID NO: 2934 - DNA, 1317 bp, Homo sapiens
gacctttctaggccagtcggggtccggcacccagttgacgagacagcgcggcgctttcagagctggggagaggcgaaaactcttccggccccccgatcccccggccagccgcccccggcagctccttgccgcctcccggcctgggcccgcccagccgttctcggcctgccgtcaggcgatctcggcggccagcccagccgcgatgtgacgccgcgcgccccggggtcctcggcgcctgcgccctctcctataaagcagacgccgcgccgcgctgcgacgctgtagtggcttcgtcttcggtttttctcttccttcgctaacgcctcccggctctcgtcagcctcccgccggccgtctccttaacaccgaacaccatgccttcaattaagttgcagagttctgatggagagatatttgaagttgatgtggaaattgccaaacaatctgtgactattaagaccatgttggaagatttgggaatggatgatgaaggagatgatgacccagttcctctaccaaatgtgaatgcagcaatattaaaaaaggtcattcagtggtgcacccaccacaaggatgaccctcctcctcctgaagatgatgagaacaaagaaaagcgaacagatgatatccctgtttgggaccaagaattcctgaaagttgaccaaggaacactttttgaactcattctggctgcaaactacttagacatcaaaggtttgcttgatgttacatgcaagactgttgccaatatgatcaaggggaaaactcctgaggagattcgcaagaccttcaatatcaaaaatgactttactgaagaggaggaagcccagcagggcagaataaaaaccatgggaggcaaagaaaggaaatccggaaatatagtcttaacctggtgttgttctaattttccatctgttcttctgactcaactcactggctatcgatgaatcagtaggtagtatttataagtcttaggaaagactactcaagttaaggtacttccctatatccatctcttttaggtacgcaaagagaaccagtggtgtgaagagaagtgaaatgttgtgcctgacactgtaacactgtaaggattgttccaaatactagttgcactgctctgtttataattgttaatattagacaaacagtagacaaatgcagcagcaagtcaattgtattagcagaatattgtcctcattgcatgtgtagtttgagcacagatcccaaaccttacggccaagtttcttctagtatgatggaaagtttcttttttctttgctctgaataaaactgaactgtgggttctctataagtggc

SEQ ID NO: 2935 - protein, 190 aa, Homo sapiens; identical to SEQ ID NO: 2857

SEQ ID NO: 2936 - DNA, 1081 bp, Homo sapiens
gacctttctaggccagtcggggtccggcacccagttgacgagacagcgcggcgctttcagagctggggagaggcgaaaactcttccggccccccgatcccccggccagccgcccccggcagctccttgccgcctcccggcctgggcccgcccagccgttctcggcctgccgtcaggcgatctcggcggccagcccagccgcgatgtgacgccgcgcgccccggggtcctcggcgcctgcgccctctcctataaagcagacgccgcgccgcgctgcgacgctgtagtggcttcgtcttcggtttttctcttccttcgctaacgcctcccggctctcgtcagcctcccgccggccgtctccttaacaccgaacaccatgccttcaattaagttgcagagttctgatggagagatatttgaagttgatgtggaaattgccaaacaatctgtgactattaagaccatgttggaaggtaagttcattggaaaacctgggtgggaggaaatgtgtaatttgagatagtttgtgaatatcaaatttatatgagcagcagcctgtcataaggtgcttgagagtatgaagaggtaaagtttacatttttttctttataacttacatttttctgatacaggtcatcctttctgcattgtctgaattagtgagggtcgttctctcattaaatggataaaatcataaggtaaaataaacattgaagtgattgccaagccttaggcaatggttaatttctgttcaagtaaatttgaattcataagttccagtgatagaaattaaggtctttggaaaagagataccgtcctataatggtggctgaatagaacaccttatttcagtggagggagtgagctctgtggattgctgtgtagattttatttattgattgatttatttgagacagagtctcactcttgtccaggctggagtgcagtgatgcagtcacggctcactgcagcctcaaccttctgggctcagtcagtcttcccacctcagccttccgaataactgggactacaggcacgtgccaccacatccagctgatttttttgagacggatttttttgctc

SEQ ID NO: 2937 - protein, 48 aa, Homo sapiens [sequence omitted]

SEQ ID NO: 2938 - DNA, 4227 bp, Homo sapiens
tttttttttttaaagtactaaaaaaaaaacaagttttgtaattagggggaaaataaatacatgtgtaccttacaggttgtataaagtacaggagattattaagtcatccagaaaaaaagcattaacatttcttaagcccctttggcaggggtgggaatgagtagagatttttttctctcttgagtgaagtaacatttagttgaattgagggagtaaagtaagatttttgtctccttttccttgcagggatataactggtgccatgaccggaatgtagtaacgattttcagtgctccaaactattgttatcgttgtggtaaccaagctgcaatcatggaacttgacgatactctaaaatactctttcttgcagtttgacccagcacctcgtagaggcgagccacatgttactcgtcgtaccccagactacttcctgtaatgaaattttaaacttgtacagtattgccatgaaccatatatcgacctaatggaaatgggaagagcaacagtaactccaaagtgtcagaaaatagttaacattcaaaaaacttgttttcacatggaccaaaagatgtgccatataaaaatacaaagcctcttgtcatcaacagccgtgaccactttagaatgaaccagttcattgcatgctgaagcgacattgttggtcaagaaaccagtttctggcatagcgctatttgtagttacttttgctttctctgagagactgcagataataagatgtaaacattaacacctcgtgaatacaatttaacttccatttagctatagctttactcagcatgactgtagataaggatagcagcaaacaatcattggagcttaatgaacatttttaaaaataattaccaaggcctcccttctacttgtgagttttgaaattgttctttttattttcagggataccgtttaatttaattatatgatttgtctgcactcagtttattccctactcaaatctcagccccatgttgttctttgttattgtcagaacctggtgagttgttttgaacagaactgttttttccccttcctgtaagacgatgtgactgcacaagagcactgcagtgtttttcataataaacttgtgaactaagaactgagaaggtcaaattttaattgtatcaatgggcaagactggtgctgtttattaaaaaagttaaatcaattgagtaaattttagaatttgtagacttgtaggtaaaataaaaatcaagggcactacataacctctctggtaactccttgacattcttcagattaacttcaggatttatttgtatttcacatattacaatttgtcacattgttggtgtgcactttgtgggttcttcctgcatattaacttgtttgtaagaaaggaaatctgtgctgcttcagtaagacttaattgtaaaaccatataacttgagatttaagtctttgggttttgttttaataaaacagcatgttttcaggtagagcttaaactaaatgatgtgtttacttagtgcagtttctggttatgaatattatattgctatgtgtatattatatggactctttaaaatgattgacagattggcaaattcttaaatctttgtacattgttgagtcatatgttcttagagttaaatttgtctcagataagaaagtgttaaagcattagcctgtgtcaagttctttgagtgatactagtgaaaccaaatagaaaactattgttggatcatgatttagtcttatgtacattcacccgaagacaaaaatggtacttaaagtggcagtgttcaacatttaatgagtttttccccttttatccttcgaataggattagatgtttaaaaaaaagttcttctgtgggaactaatatttgatattttaacctaccagagtaaacaggaacacttaatcatacttgtgagtgtagtaaataaaagttttcttgctttgtgctgtgttgaatctggaaccaacagggaagttatagcatatcccctttctaaaatgcttgaggaacacatacataccgaatgtcttttctgatctaattgatagtatttttagtggcttgtggagttaattttccaaagcaaaaggccattagggtttctacatttcatttcatttcattcttttctttcacaagaaatacattctctgtgtgtctttttgttgctctgtcactctatgccctttctctccgactgaacaaatagcttatccatgtgcagtggttttaatacccaaacaatctagacaccaagcagctattttttccggtcctgtgatatcagaattgaccaaggaatacgtatattgtaattgacacgtggtggtatcttccaggtacaaattctctaaattttgtggttagcagaatgggacttgtgataagaatagcttggttttagcataactagggtttaaaataattgtttaattatagagactgaccgggctttggccatctaaactggaaagtgttagtaccctaccttcttttgaaaatggctatggtaaggaaaatgtgttagtaaattatgtattttcttgaaaaatacataattatggttggatgggaatcactaagttgggtgttaactgatgtctcaattagtaacattaggattttcattaataaacctaaaaagctttccctaagaacaggcctggcacagtggctcatgcctgtaatcccagcactttgggagaccagggtgggtggatcccttgaggtcaggagttgaagagcagcctggccaacatggcaaaaccccatctctacaaaaaatatgaaaatcagccgggcttggtggcataccatagtcccagctacttgggaggctgaggtgagaggatcgcctgagcccaggagatggaggttgcagtgggctgagattgtgccactgtactccagtctgggtgacagagccagaccctgtctcaaaaataaagaggattctgagtttgtatagtgagggcttgcagaaattttgaaacttattttgtaagtttacaatgaatttgtacatgatgtgctcatgtcttgggttgagtatcctagacatgattttttcatttgctgcatattaaacatttgttggttgtagtcggtatttcttaaatagaagtttgtcaatattagattagtttcaagaaggacttagctcaggaaaaggatagttatttctgtggttctcagctttgatgcctacagagattctgatttaaattgctggaggagggcccaggcatacattttttaagtttcccaagtgattctaatttacatctagggttaaaaacagccaggcgcggtggctcatgcctgtaatcccagcacttggggaggccggggtgggtggatcacctgatgtcaggagatcgagaccagcctggccagcgtggtgaaaccccatctctattaaaaatacaaaactgaccggtgtggtggcaggagcctgtaatcccagctacttgggaggctgaggcaggagaatcacttgaactcaggaggaggaggttacagtgagcccagatcgtgccattgcactccagcctgggcaaaaagagcaaaactccatctcaaaaaacaaaaacacctcactgctgtttcctaagtacatacttaagaaaattgggatacatggtggtggttcatggatgttgataaggaattaaaatgtaccgtgcgactctctgtttcagtggtgacttttacctgtttagtataaatattcctttgcttccaaccataaatgtgttcttagaaatgggcctatagtttagtaacctatagtttggtaataggcttgtttgttttcagatggattttggttctgtgagctaaagctattttgcattaaagccttcgtcctcacacattgttttgacatatttctagtcttcataaacttttttaatttagatttttttcccttcacaagtatacatctgttttagcaaatagccttatgaaggttgtagatgtattattttgggcatgcctggtgatttctatattttttccaattacatttaaagctttatgttttaggaatataagtacattttatttctactttttattatatatatttaattgcacaagtactactgtctagaaaaaaatgggatgttgctaacacagcattgttggcttgtaggcagtgctgtcctgtaaatagattgaaatgtatttttatcagctggtatataaatttgaggaaag

SEQ ID NO: 2939 - protein, 34 aa, Homo sapiens
MELDDTLKYSFLQFDPAPRRGEPHVTRRTPDYFL

SEQ ID NO: 2940 - DNA, 5503 bp, Homo sapiens
agaggtgggggtggttaatccaagcggccactcgctgcccgttcctgcccccaaagatgacggaaacccacacgattacagagccgcagcaccccagatgagccacggggtcgcaattctcgtttccgtgatcggactgccaggccccaggtgaggagctgagttcatcaccagagcggccttcccaggggaaccagttacaggctgccagtggccccggcttccatccggtctgcgcctgcgcgcggcccaagccctcgcctctcctggaatagtgctcagggattagtccggttcgccgctgtgcgcactgcgcatgctccagctccatccttcccttcccccaccaccccgccctccgggagccacgcccaaaaagtcaaggcgcttcagttaccagccggctacgtcgcgcctgcgctttgacccccagtttgcgccccaactccggtcgtgcggccgcccggggagggctctgcagttgcgcagcttgctccccggcccttttcccctccgctccccgccgcctcctgacgccgggcgtgacgtcaccacgcccggcggccgccattacagagagccgagctctggagcctcagcgagcggaggaggaggcgcagcggccgacggccgagtactgcggtgagagccagcgggccagcgccagcctcaacagccgccagaagtacacgaggaaccggcggcggcgtgtgcgtgtaggcccgtgtgcgggcggcggcgcgggagcagcgcggagcggcagccggctggggcgggtggcatcatggacgagaaggtgttcaccaaggagctggaccagtggatcgagcagctgaacgagtgcaagcagctgtccgagtcccaggtcaagagcctctgcgagaaggctaaagaaatcctgacaaaagaatccaacgtgcaagaggttcgatgtccagttactgtctgtggagatgtgcatgggcaatttcatgatctcatggaactgtttagaattggtggcaaatcaccagatacaaattacttgtttatgggagattatgttgacagaggatattattcagttgaaacagttacactgcttgtagctcttaaggttcgttaccgtgaacgcatcaccattcttcgagggaatcatgagagcagacagatcacacaagtttatggtttctatgatgaatgtttaagaaaatatggaaatgcaaatgtttggaaatattttacagatctttttgactatcttcctctcactgccttggtggatgggcagatcttctgtctacatggtggtctctcgccatctatagatacactggatcatatcagagcacttgatcgcctacaagaagttccccatgagggtccaatgtgtgacttgctgtggtcagatccagatgaccgtggtggttggggtatatctcctcgaggagctggttacacctttgggcaagatatttctgagacatttaatcatgccaatggcctcacgttggtgtctagagctcaccagctagtgatggagggatataactggtgccatgaccggaatgtagtaacgattttcagtgctccaaactattgttatcgttgtggtaaccaagctgcaatcatggaacttgacgatactctaaaatactctttcttgcagtttgacccagcacctcgtagaggcgagccacatgttactcgtcgtaccccagactacttcctgtaatgaaattttaaacttgtacagtattgccatgaaccatatatcgacctaatggaaatgggaagagcaacagtaactccaaagtgtcagaaaatagttaacattcaaaaaacttgttttcacatggaccaaaagatgtgccatataaaaatacaaagcctcttgtcatcaacagccgtgaccactttagaatgaaccagttcattgcatgctgaagcgacattgttggtcaagaaaccagtttctggcatagcgctatttgtagttacttttgctttctctgagagactgcagataataagatgtaaacattaacacctcgtgaatacaatttaacttccatttagctatagctttactcagcatgactgtagataaggatagcagcaaacaatcattggagcttaatgaacatttttaaaaataattaccaaggcctcccttctacttgtgagttttgaaattgttctttttattttcagggataccgtttaatttaattatatgatttgtctgcactcagtttattccctactcaaatctcagccccatgttgttctttgttattgtcagaacctggtgagttgttttgaacagaactgttttttccccttcctgtaagacgatgtgactgcacaagagcactgcagtgtttttcataataaacttgtgaactaagaactgagaaggtcaaattttaattgtatcaatgggcaagactggtgctgtttattaaaaaagttaaatcaattgagtaaattttagaatttgtagacttgtaggtaaaataaaaatcaagggcactacataacctctctggtaactccttgacattcttcagattaacttcaggatttatttgtatttcacatattacaatttgtcacattgttggtgtgcactttgtgggttcttcctgcatattaacttgtttgtaagaaaggaaatctgtgctgcttcagtaagacttaattgtaaaaccatataacttgagatttaagtctttgggttttgttttaataaaacagcatgttttcaggtagagcttaaactaaatgatgtgtttacttagtgcagtttctggttatgaatattatattgctatgtgtatattatatggactctttaaaatgattgacagattggcaaattcttaaatctttgtacattgttgagtcatatgttcttagagttaaatttgtctcagataagaaagtgttaaagcattagcctgtgtcaagttctttgagtgatactagtgaaaccaaatagaaaactattgttggatcatgatttagtcttatgtacattcacccgaagacaaaaatggtacttaaagtggcagtgttcaacatttaatgagtttttccccttttatccttcgaataggattagatgtttaaaaaaaagttcttctgtgggaactaatatttgatattttaacctaccagagtaaacaggaacacttaatcatacttgtgagtgtagtaaataaaagttttcttgctttgtgctgtgttgaatctggaaccaacagggaagttatagcatatcccctttctaaaatgcttgaggaacacatacataccgaatgtcttttctgatctaattgatagtatttttagtggcttgtggagttaattttccaaagcaaaaggccattagggtttctacatttcatttcatttcattcttttctttcacaagaaatacattctctgtgtgtctttttgttgctctgtcactctatgccctttctctccgactgaacaaatagcttatccatgtgcagtggttttaatacccaaacaatctagacaccaagcagctattttttccggtcctgtgatatcagaattgaccaaggaatacgtatattgtaattgacacgtggtggtatcttccaggtacaaattctctaaattttgtggttagcagaatgggacttgtgataagaatagcttggttttagcataactagggtttaaaataattgtttaattatagagactgaccgggctttggccatctaaactggaaagtgttagtaccctaccttcttttgaaaatggctatggtaaggaaaatgtgttagtaaattatgtattttcttgaaaaatacataattatggttggatgggaatcactaagttgggtgttaactgatgtctcaattagtaacattaggattttcattaataaacctaaaaagctttccctaagaacaggcctggcacagtggctcatgcctgtaatcccagcactttgggagaccagggtgggtggatcccttgaggtcaggagttgaagagcagcctggccaacatggcaaaaccccatctctacaaaaaatatgaaaatcagccgggcttggtggcataccatagtcccagctacttgggaggctgaggtgagaggatcgcctgagcccaggagatggaggttgcagtgggctgagattgtgccactgtactccagtctgggtgacagagccagaccctgtctcaaaaataaagaggattctgagtttgtatagtgagggcttgcagaaattttgaaacttattttgtaagtttacaatgaatttgtacatgatgtgctcatgtcttgggttgagtatcctagacatgattttttcatttgctgcatattaaacatttgttggttgtagtcggtatttcttaaatagaagtttgtcaatattagattagtttcaagaaggacttagctcaggaaaaggatagttatttctgtggttctcagctttgatgcctacagagattctgatttaaattgctggaggagggcccaggcatacattttttaagtttcccaagtgattctaatttacatctagggttaaaaacagccaggcgcggtggctcatgcctgtaatcccagcacttggggaggccggggtgggtggatcacctgatgtcaggagatcgagaccagcctggccagcgtggtgaaaccccatctctattaaaaatacaaaactgaccggtgtggtggcaggagcctgtaatcccagctacttgggaggctgaggcaggagaatcacttgaactcaggaggaggaggttacagtgagcccagatcgtgccattgcactccagcctgggcaaaaagagcaaaactccatctcaaaaaacaaaaacacctcactgctgtttcctaagtacatacttaagaaaattgggatacatggtggtggttcatggatgttgataaggaattaaaatgtaccgtgcgactctctgtttcagtggtgacttttacctgtttagtataaatattcctttgcttccaaccataaatgtgttcttagaaatgggcctatagtttagtaacctatagtttggtaataggcttgtttgttttcagatggattttggttctgtgagctaaagctattttgcattaaagccttcgtcctcacacattgttttgacatatttctagtcttcataaacttttttaatttagatttttttcccttcacaagtatacatctgttttagcaaatagccttatgaaggttgtagatgtattattttgggcatgcctggtgatttctatattttttccaattacatttaaagctttatgttttaggaatataagtacattttatttctactttttattatatatatttaattgcacaagtactactgtctagaaaaaaatgggatgttgctaacacagcattgttggcttgtaggcagtgctgtcctgtaaatagattgaaatgtatttttatcagctggtatataaatttgaggaaag

SEQ ID NO: 2941 - protein, 309 aa, Homo sapiens; identical to SEQ ID NO: 301

SEQ ID NO: 2942 - DNA, 5423 bp, Homo sapiens
agaggtgggggtggttaatccaagcggccactcgctgcccgttcctgcccccaaagatgacggaaacccacacgattacagagccgcagcaccccagatgagccacggggtcgcaattctcgtttccgtgatcggactgccaggccccaggtgaggagctgagttcatcaccagagcggccttcccaggggaaccagttacaggctgccagtggccccggcttccatccggtctgcgcctgcgcgcggcccaagccctcgcctctcctggaatagtgctcagggattagtccggttcgccgctgtgcgcactgcgcatgctccagctccatccttcccttcccccaccaccccgccctccgggagccacgcccaaaaagtcaaggcgcttcagttaccagccggctacgtcgcgcctgcgctttgacccccagtttgcgccccaactccggtcgtgcggccgcccggggagggctctgcagttgcgcagcttgctccccggcccttttcccctccgctccccgccgcctcctgacgccgggcgtgacgtcaccacgcccggcggccgccattacagagagccgagctctggagcctcagcgagcggaggaggaggcgcagcggccgacggccgagtactgcggtgagagccagcgggccagcgccagcctcaacagccgccagaagtacacgaggaaccggcggcggcgtgtgcgtgtaggcccgtgtgcgggcggcggcgcgggagcagcgcggagcggcagccggctggggcgggtggcatcatggacgagaaggtgttcaccaaggagctggaccagtggatcgagcagctgaacgagtgcaagcagctgtccgattactgtctgtggagatgtgcatgggcaatttcatgatctcatggaactgtttagaattggtggcaaatcaccagatacaaattacttgtttatgggagattatgttgacagaggatattattcagttgaaacagttacactgcttgtagctcttaaggttcgttaccgtgaacgcatcaccattcttcgagggaatcatgagagcagacagatcacacaagtttatggtttctatgatgaatgtttaagaaaatatggaaatgcaaatgtttggaaatattttacagatctttttgactatcttcctctcactgccttggtggatgggcagatcttctgtctacatggtggtctctcgccatctatagatacactggatcatatcagagcacttgatcgcctacaagaagttccccatgagggtccaatgtgtgacttgctgtggtcagatccagatgaccgtggtggttggggtatatctcctcgaggagctggttacacctttgggcaagatatttctgagacatttaatcatgccaatggcctcacgttggtgtctagagctcaccagctagtgatggagggatataactggtgccatgaccggaatgtagtaacgattttcagtgctccaaactattgttatcgttgtggtaaccaagctgcaatcatggaacttgacgatactctaaaatactctttcttgcagtttgacccagcacctcgtagaggcgagccacatgttactcgtcgtaccccagactacttcctgtaatgaaattttaaacttgtacagtattgccatgaaccatatatcgacctaatggaaatgggaagagcaacagtaactccaaagtgtcagaaaatagttaacattcaaaaaacttgttttcacatggaccaaaagatgtgccatataaaaatacaaagcctcttgtcatcaacagccgtgaccactttagaatgaaccagttcattgcatgctgaagcgacattgttggtcaagaaaccagtttctggcatagcgctatttgtagttacttttgctttctctgagagactgcagataataagatgtaaacattaacacctcgtgaatacaatttaacttccatttagctatagctttactcagcatgactgtagataaggatagcagcaaacaatcattggagcttaatgaacatttttaaaaataattaccaaggcctcccttctacttgtgagttttgaaattgttctttttattttcagggataccgtttaatttaattatatgatttgtctgcactcagtttattccctactcaaatctcagccccatgttgttctttgttattgtcagaacctggtgagttgttttgaacagaactgttttttccccttcctgtaagacgatgtgactgcacaagagcactgcagtgtttttcataataaacttgtgaactaagaactgagaaggtcaaattttaattgtatcaatgggcaagactggtgctgtttattaaaaaagttaaatcaattgagtaaattttagaatttgtagacttgtaggtaaaataaaaatcaagggcactacataacctctctggtaactccttgacattcttcagattaacttcaggatttatttgtatttcacatattacaatttgtcacattgttggtgtgcactttgtgggttcttcctgcatattaacttgtttgtaagaaaggaaatctgtgctgcttcagtaagacttaattgtaaaaccatataacttgagatttaagtctttgggttttgttttaataaaacagcatgttttcaggtagagcttaaactaaatgatgtgtttacttagtgcagtttctggttatgaatattatattgctatgtgtatattatatggactctttaaaatgattgacagattggcaaattcttaaatctttgtacattgttgagtcatatgttcttagagttaaatttgtctcagataagaaagtgttaaagcattagcctgtgtcaagttctttgagtgatactagtgaaaccaaatagaaaactattgttggatcatgatttagtcttatgtacattcacccgaagacaaaaatggtacttaaagtggcagtgttcaacatttaatgagtttttccccttttatccttcgaataggattagatgtttaaaaaaaagttcttctgtgggaactaatatttgatattttaacctaccagagtaaacaggaacacttaatcatacttgtgagtgtagtaaataaaagttttcttgctttgtgctgtgttgaatctggaaccaacagggaagttatagcatatcccctttctaaaatgcttgaggaacacatacataccgaatgtcttttctgatctaattgatagtatttttagtggcttgtggagttaattttccaaagcaaaaggccattagggtttctacatttcatttcatttcattcttttctttcacaagaaatacattctctgtgtgtctttttgttgctctgtcactctatgccctttctctccgactgaacaaatagcttatccatgtgcagtggttttaatacccaaacaatctagacaccaagcagctattttttccggtcctgtgatatcagaattgaccaaggaatacgtatattgtaattgacacgtggtggtatcttccaggtacaaattctctaaattttgtggttagcagaatgggacttgtgataagaatagcttggttttagcataactagggtttaaaataattgtttaattatagagactgaccgggctttggccatctaaactggaaagtgttagtaccctaccttcttttgaaaatggctatggtaaggaaaatgtgttagtaaattatgtattttcttgaaaaatacataattatggttggatgggaatcactaagttgggtgttaactgatgtctcaattagtaacattaggattttcattaataaacctaaaaagctttccctaagaacaggcctggcacagtggctcatgcctgtaatcccagcactttgggagaccagggtgggtggatcccttgaggtcaggagttgaagagcagcctggccaacatggcaaaaccccatctctacaaaaaatatgaaaatcagccgggcttggtggcataccatagtcccagctacttgggaggctgaggtgagaggatcgcctgagcccaggagatggaggttgcagtgggctgagattgtgccactgtactccagtctgggtgacagagccagaccctgtctcaaaaataaagaggattctgagtttgtatagtgagggcttgcagaaattttgaaacttattttgtaagtttacaatgaatttgtacatgatgtgctcatgtcttgggttgagtatcctagacatgattttttcatttgctgcatattaaacatttgttggttgtagtcggtatttcttaaatagaagtttgtcaatattagattagtttcaagaaggacttagctcaggaaaaggatagttatttctgtggttctcagctttgatgcctacagagattctgatttaaattgctggaggagggcccaggcatacattttttaagtttcccaagtgattctaatttacatctagggttaaaaacagccaggcgcggtggctcatgcctgtaatcccagcacttggggaggccggggtgggtggatcacctgatgtcaggagatcgagaccagcctggccagcgtggtgaaaccccatctctattaaaaatacaaaactgaccggtgtggtggcaggagcctgtaatcccagctacttgggaggctgaggcaggagaatcacttgaactcaggaggaggaggttacagtgagcccagatcgtgccattgcactccagcctgggcaaaaagagcaaaactccatctcaaaaaacaaaaacacctcactgctgtttcctaagtacatacttaagaaaattgggatacatggtggtggttcatggatgttgataaggaattaaaatgtaccgtgcgactctctgtttcagtggtgacttttacctgtttagtataaatattcctttgcttccaaccataaatgtgttcttagaaatgggcctatagtttagtaacctatagtttggtaataggcttgtttgttttcagatggattttggttctgtgagctaaagctattttgcattaaagccttcgtcctcacacattgttttgacatatttctagtcttcataaacttttttaatttagatttttttcccttcacaagtatacatctgttttagcaaatagccttatgaaggttgtagatgtattattttgggcatgcctggtgatttctatattttttccaattacatttaaagctttatgttttaggaatataagtacattttatttctactttttattatatatatttaattgcacaagtactactgtctagaaaaaaatgggatgttgctaacacagcattgttggcttgtaggcagtgctgtcctgtaaatagattgaaatgtatttttatcagctggtatataaatttgaggaaag

SEQ ID NO: 2943 - protein, 244 aa, Homo sapiens
MELFRIGGKSPDTNYLFMGDYVDRGYYSVETVTLLVALKVRYRERITILRGNHESRQITQVYGFYDECLRKYGNANVWKYFTDLFDYLPLTALVDGQIFCLHGGLSPSIDTLDHIRALDRLQEVPHEGPMCDLLWSDPDDRGGWGISPRGAGYTFGQDISETFNHANGLTLVSRAHQLVMEGYNWCHDRNVVTIFSAPNYCYRCGNQAAIMELDDTLKYSFLQFDPAPRRGEPHVTRRTPDYFL

SEQ ID NO: 2944 - DNA, 1663 bp, Homo sapiens
tttttttttttaaagtactaaaaaaaaaacaagttttgtaattagggggaaaataaatacatgtgtaccttacaggttgtataaagtacaggagattattaagtcatccagaaaaaaagcattaacatttcttaagcccctttggcaggggtgggaatgagtagagatttttttctctcttgagtgaagtaacatttagttgaattgagggagtaaagtaagatttttgtctccttttccttgcagggatataactggtgccatgaccggaatgtagtaacgattttcagtgctccaaactattgttatcgttgtggtaaccaagctgcaatcatggaacttgacgatactctaaaatactctttcttgcagtttgacccagcacctcgtagaggcgagccacatgttactcgtcgtaccccagactacttcctgtaatgaaattttaaacttgtacagtattgccatgaaccatatatcgacctaatggaaatgggaagagcaacagtaactccaaagtgtcagaaaatagttaacattcaaaaaacttgttttcacatggaccaaaagatgtgccatataaaaatacaaagcctcttgtcatcaacagccgtgaccactttagaatgaaccagttcattgcatgctgaagcgacattgttggtcaagaaaccagtttctggcatagcgctatttgtagttacttttgctttctctgagagactgcagataataagatgtaaacattaacacctcgtgaatacaatttaacttccatttagctatagctttactcagcatgactgtagataaggatagcagcaaacaatcattggagcttaatgaacatttttaaaaataattaccaaggcctcccttctacttgtgagttttgaaattgttctttttattttcagggataccgtttaatttaattatatgatttgtctgcactcagtttattccctactcaaatctcagccccatgttgttctttgttattgtcagaacctggtgagttgttttgaacagaactgttttttccccttcctgtaagacgatgtgactgcacaagagcactgcagtgtttttcataataaacttgtgaactaagaactgagaaggtcaaattttaattgtatcaatgggcaagactggtgctgtttattaaaaaagttaaatcaattgagtaaattttagaatttgtagacttgtaggtaaaataaaaatcaagggcactacataacctctctggtaactccttgacattcttcagattaacttcaggatttatttgtatttcacatattacaatttgtcacattgttggtgtgcactttgtgggttcttcctgcatattaacttgtttgtaagaaaggaaatctgtgctgcttcagtaagacttaattgtaaaaccatataacttgagatttaagtctttgggttttgttttaataaaacagcatgttttcaggtagagcttaaactaaatgatgtgtttacttagtgcagtttctggttatgaatattatattgctatgtgtatattatatggactctttaaaatgattgacagattggcaaattcttaaatctttgtacattgttgagtcatatgttcttagagttaaatttgtctcagataagaaagtgttaaagcatt

SEQ ID NO: 2945 - protein, 34 aa, Homo sapiens; identical to SEQ ID NO: 2939

SEQ ID NO: 2946 - DNA, 2939 bp, Homo sapiens
agaggtgggggtggttaatccaagcggccactcgctgcccgttcctgcccccaaagatgacggaaacccacacgattacagagccgcagcaccccagatgagccacggggtcgcaattctcgtttccgtgatcggactgccaggccccaggtgaggagctgagttcatcaccagagcggccttcccaggggaaccagttacaggctgccagtggccccggcttccatccggtctgcgcctgcgcgcggcccaagccctcgcctctcctggaatagtgctcagggattagtccggttcgccgctgtgcgcactgcgcatgctccagctccatccttcccttcccccaccaccccgccctccgggagccacgcccaaaaagtcaaggcgcttcagttaccagccggctacgtcgcgcctgcgctttgacccccagtttgcgccccaactccggtcgtgcggccgcccggggagggctctgcagttgcgcagcttgctccccggcccttttcccctccgctccccgccgcctcctgacgccgggcgtgacgtcaccacgcccggcggccgccattacagagagccgagctctggagcctcagcgagcggaggaggaggcgcagcggccgacggccgagtactgcggtgagagccagcgggccagcgccagcctcaacagccgccagaagtacacgaggaaccggcggcggcgtgtgcgtgtaggcccgtgtgcgggcggcggcgcgggagcagcgcggagcggcagccggctggggcgggtggcatcatggacgagaaggtgttcaccaaggagctggaccagtggatcgagcagctgaacgagtgcaagcagctgtccgagtcccaggtcaagagcctctgcgagaaggctaaagaaatcctgacaaaagaatccaacgtgcaagaggttcgatgtccagttactgtctgtggagatgtgcatgggcaatttcatgatctcatggaactgtttagaattggtggcaaatcaccagatacaaattacttgtttatgggagattatgttgacagaggatattattcagttgaaacagttacactgcttgtagctcttaaggttcgttaccgtgaacgcatcaccattcttcgagggaatcatgagagcagacagatcacacaagtttatggtttctatgatgaatgtttaagaaaatatggaaatgcaaatgtttggaaatattttacagatctttttgactatcttcctctcactgccttggtggatgggcagatcttctgtctacatggtggtctctcgccatctatagatacactggatcatatcagagcacttgatcgcctacaagaagttccccatgagggtccaatgtgtgacttgctgtggtcagatccagatgaccgtggtggttggggtatatctcctcgaggagctggttacacctttgggcaagatatttctgagacatttaatcatgccaatggcctcacgttggtgtctagagctcaccagctagtgatggagggatataactggtgccatgaccggaatgtagtaacgattttcagtgctccaaactattgttatcgttgtggtaaccaagctgcaatcatggaacttgacgatactctaaaatactctttcttgcagtttgacccagcacctcgtagaggcgagccacatgttactcgtcgtaccccagactacttcctgtaatgaaattttaaacttgtacagtattgccatgaaccatatatcgacctaatggaaatgggaagagcaacagtaactccaaagtgtcagaaaatagttaacattcaaaaaacttgttttcacatggaccaaaagatgtgccatataaaaatacaaagcctcttgtcatcaacagccgtgaccactttagaatgaaccagttcattgcatgctgaagcgacattgttggtcaagaaaccagtttctggcatagcgctatttgtagttacttttgctttctctgagagactgcagataataagatgtaaacattaacacctcgtgaatacaatttaacttccatttagctatagctttactcagcatgactgtagataaggatagcagcaaacaatcattggagcttaatgaacatttttaaaaataattaccaaggcctcccttctacttgtgagttttgaaattgttctttttattttcagggataccgtttaatttaattatatgatttgtctgcactcagtttattccctactcaaatctcagccccatgttgttctttgttattgtcagaacctggtgagttgttttgaacagaactgttttttccccttcctgtaagacgatgtgactgcacaagagcactgcagtgtttttcataataaacttgtgaactaagaactgagaaggtcaaattttaattgtatcaatgggcaagactggtgctgtttattaaaaaagttaaatcaattgagtaaattttagaatttgtagacttgtaggtaaaataaaaatcaagggcactacataacctctctggtaactccttgacattcttcagattaacttcaggatttatttgtatttcacatattacaatttgtcacattgttggtgtgcactttgtgggttcttcctgcatattaacttgtttgtaagaaaggaaatctgtgctgcttcagtaagacttaattgtaaaaccatataacttgagatttaagtctttgggttttgttttaataaaacagcatgttttcaggtagagcttaaactaaatgatgtgtttacttagtgcagtttctggttatgaatattatattgctatgtgtatattatatggactctttaaaatgattgacagattggcaaattcttaaatctttgtacattgttgagtcatatgttcttagagttaaatttgtctcagataagaaagtgttaaagcatt

SEQ ID NO: 2947 - protein, 309 aa, Homo sapiens; identical to SEQ ID NO: 301

SEQ ID NO: 2948 - DNA, 2859 bp, Homo sapiens
agaggtgggggtggttaatccaagcggccactcgctgcccgttcctgcccccaaagatgacggaaacccacacgattacagagccgcagcaccccagatgagccacggggtcgcaattctcgtttccgtgatcggactgccaggccccaggtgaggagctgagttcatcaccagagcggccttcccaggggaaccagttacaggctgccagtggccccggcttccatccggtctgcgcctgcgcgcggcccaagccctcgcctctcctggaatagtgctcagggattagtccggttcgccgctgtgcgcactgcgcatgctccagctccatccttcccttcccccaccaccccgccctccgggagccacgcccaaaaagtcaaggcgcttcagttaccagccggctacgtcgcgcctgcgctttgacccccagtttgcgccccaactccggtcgtgcggccgcccggggagggctctgcagttgcgcagcttgctccccggcccttttcccctccgctccccgccgcctcctgacgccgggcgtgacgtcaccacgcccggcggccgccattacagagagccgagctctggagcctcagcgagcggaggaggaggcgcagcggccgacggccgagtactgcggtgagagccagcgggccagcgccagcctcaacagccgccagaagtacacgaggaaccggcggcggcgtgtgcgtgtaggcccgtgtgcgggcggcggcgcgggagcagcgcggagcggcagccggctggggcgggtggcatcatggacgagaaggtgttcaccaaggagctggaccagtggatcgagcagctgaacgagtgcaagcagctgtccgattactgtctgtggagatgtgcatgggcaatttcatgatctcatggaactgtttagaattggtggcaaatcaccagatacaaattacttgtttatgggagattatgttgacagaggatattattcagttgaaacagttacactgcttgtagctcttaaggttcgttaccgtgaacgcatcaccattcttcgagggaatcatgagagcagacagatcacacaagtttatggtttctatgatgaatgtttaagaaaatatggaaatgcaaatgtttggaaatattttacagatctttttgactatcttcctctcactgccttggtggatgggcagatcttctgtctacatggtggtctctcgccatctatagatacactggatcatatcagagcacttgatcgcctacaagaagttccccatgagggtccaatgtgtgacttgctgtggtcagatccagatgaccgtggtggttggggtatatctcctcgaggagctggttacacctttgggcaagatatttctgagacatttaatcatgccaatggcctcacgttggtgtctagagctcaccagctagtgatggagggatataactggtgccatgaccggaatgtagtaacgattttcagtgctccaaactattgttatcgttgtggtaaccaagctgcaatcatggaacttgacgatactctaaaatactctttcttgcagtttgacccagcacctcgtagaggcgagccacatgttactcgtcgtaccccagactacttcctgtaatgaaattttaaacttgtacagtattgccatgaaccatatatcgacctaatggaaatgggaagagcaacagtaactccaaagtgtcagaaaatagttaacattcaaaaaacttgttttcacatggaccaaaagatgtgccatataaaaatacaaagcctcttgtcatcaacagccgtgaccactttagaatgaaccagttcattgcatgctgaagcgacattgttggtcaagaaaccagtttctggcatagcgctatttgtagttacttttgctttctctgagagactgcagataataagatgtaaacattaacacctcgtgaatacaatttaacttccatttagctatagctttactcagcatgactgtagataaggatagcagcaaacaatcattggagcttaatgaacatttttaaaaataattaccaaggcctcccttctacttgtgagttttgaaattgttctttttattttcagggataccgtttaatttaattatatgatttgtctgcactcagtttattccctactcaaatctcagccccatgttgttctttgttattgtcagaacctggtgagttgttttgaacagaactgttttttccccttcctgtaagacgatgtgactgcacaagagcactgcagtgtttttcataataaacttgtgaactaagaactgagaaggtcaaattttaattgtatcaatgggcaagactggtgctgtttattaaaaaagttaaatcaattgagtaaattttagaatttgtagacttgtaggtaaaataaaaatcaagggcactacataacctctctggtaactccttgacattcttcagattaacttcaggatttatttgtatttcacatattacaatttgtcacattgttggtgtgcactttgtgggttcttcctgcatattaacttgtttgtaagaaaggaaatctgtgctgcttcagtaagacttaattgtaaaaccatataacttgagatttaagtctttgggttttgttttaataaaacagcatgttttcaggtagagcttaaactaaatgatgtgtttacttagtgcagtttctggttatgaatattatattgctatgtgtatattatatggactctttaaaatgattgacagattggcaaattcttaaatctttgtacattgttgagtcatatgttcttagagttaaatttgtctcagataagaaagtgttaaagcatt

SEQ ID NO: 2949 - protein, 244 aa, Homo sapiens; identical to SEQ ID NO: 2943

SEQ ID NO: 2950 - DNA, 1483 bp, Homo sapiens
tttttttttttaaagtactaaaaaaaaaacaagttttgtaattagggggaaaataaatacatgtgtaccttacaggttgtataaagtacaggagattattaagtcatccagaaaaaaagcattaacatttcttaagcccctttggcaggggtgggaatgagtagagatttttttctctcttgagtgaagtaacatttagttgaattgagggagtaaagtaagatttttgtctccttttccttgcagggatataactggtgccatgaccggaatgtagtaacgattttcagtgctccaaactattgttatcgttgtggtaaccaagctgcaatcatggaacttgacgatactctaaaatactctttcttgcagtttgacccagcacctcgtagaggcgagccacatgttactcgtcgtaccccagactacttcctgtaatgaaattttaaacttgtacagtattgccatgaaccatatatcgacctaatggaaatgggaagagcaacagtaactccaaagtgtcagaaaatagttaacattcaaaaaacttgttttcacatggaccaaaagatgtgccatataaaaatacaaagcctcttgtcatcaacagccgtgaccactttagaatgaaccagttcattgcatgctgaagcgacattgttggtcaagaaaccagtttctggcatagcgctatttgtagttacttttgctttctctgagagactgcagataataagatgtaaacattaacacctcgtgaatacaatttaacttccatttagctatagctttactcagcatgactgtagataaggatagcagcaaacaatcattggagcttaatgaacatttttaaaaataattaccaaggcctcccttctacttgtgagttttgaaattgttctttttattttcagggataccgtttaatttaattatatgatttgtctgcactcagtttattccctactcaaatctcagccccatgttgttctttgttattgtcagaacctggtgagttgttttgaacagaactgttttttccccttcctgtaagacgatgtgactgcacaagagcactgcagtgtttttcataataaacttgtgaactaagaactgagaaggtcaaattttaattgtatcaatgggcaagactggtgctgtttattaaaaaagttaaatcaattgagtaaattttagaatttgtagacttgtaggtaaaataaaaatcaagggcactacataacctctctggtaactccttgacattcttcagattaacttcaggatttatttgtatttcacatattacaatttgtcacattgttggtgtgcactttgtgggttcttcctgcatattaacttgtttgtaagaaaggaaatctgtgctgcttcagtaagacttaattgtaaaaccatataacttgagatttaagtctttgggttttgttttaataaaacagcatgttttcaggtagagctt

SEQ ID NO: 2951 - protein, 34 aa, Homo sapiens; identical to SEQ ID NO: 2939

SEQ ID NO: 2952 - DNA, 2759 bp, Homo sapiens
agaggtgggggtggttaatccaagcggccactcgctgcccgttcctgcccccaaagatgacggaaacccacacgattacagagccgcagcaccccagatgagccacggggtcgcaattctcgtttccgtgatcggactgccaggccccaggtgaggagctgagttcatcaccagagcggccttcccaggggaaccagttacaggctgccagtggccccggcttccatccggtctgcgcctgcgcgcggcccaagccctcgcctctcctggaatagtgctcagggattagtccggttcgccgctgtgcgcactgcgcatgctccagctccatccttcccttcccccaccaccccgccctccgggagccacgcccaaaaagtcaaggcgcttcagttaccagccggctacgtcgcgcctgcgctttgacccccagtttgcgccccaactccggtcgtgcggccgcccggggagggctctgcagttgcgcagcttgctccccggcccttttcccctccgctccccgccgcctcctgacgccgggcgtgacgtcaccacgcccggcggccgccattacagagagccgagctctggagcctcagcgagcggaggaggaggcgcagcggccgacggccgagtactgcggtgagagccagcgggccagcgccagcctcaacagccgccagaagtacacgaggaaccggcggcggcgtgtgcgtgtaggcccgtgtgcgggcggcggcgcgggagcagcgcggagcggcagccggctggggcgggtggcatcatggacgagaaggtgttcaccaaggagctggaccagtggatcgagcagctgaacgagtgcaagcagctgtccgagtcccaggtcaagagcctctgcgagaaggctaaagaaatcctgacaaaagaatccaacgtgcaagaggttcgatgtccagttactgtctgtggagatgtgcatgggcaatttcatgatctcatggaactgtttagaattggtggcaaatcaccagatacaaattacttgtttatgggagattatgttgacagaggatattattcagttgaaacagttacactgcttgtagctcttaaggttcgttaccgtgaacgcatcaccattcttcgagggaatcatgagagcagacagatcacacaagtttatggtttctatgatgaatgtttaagaaaatatggaaatgcaaatgtttggaaatattttacagatctttttgactatcttcctctcactgccttggtggatgggcagatcttctgtctacatggtggtctctcgccatctatagatacactggatcatatcagagcacttgatcgcctacaagaagttccccatgagggtccaatgtgtgacttgctgtggtcagatccagatgaccgtggtggttggggtatatctcctcgaggagctggttacacctttgggcaagatatttctgagacatttaatcatgccaatggcctcacgttggtgtctagagctcaccagctagtgatggagggatataactggtgccatgaccggaatgtagtaacgattttcagtgctccaaactattgttatcgttgtggtaaccaagctgcaatcatggaacttgacgatactctaaaatactctttcttgcagtttgacccagcacctcgtagaggcgagccacatgttactcgtcgtaccccagactacttcctgtaatgaaattttaaacttgtacagtattgccatgaaccatatatcgacctaatggaaatgggaagagcaacagtaactccaaagtgtcagaaaatagttaacattcaaaaaacttgttttcacatggaccaaaagatgtgccatataaaaatacaaagcctcttgtcatcaacagccgtgaccactttagaatgaaccagttcattgcatgctgaagcgacattgttggtcaagaaaccagtttctggcatagcgctatttgtagttacttttgctttctctgagagactgcagataataagatgtaaacattaacacctcgtgaatacaatttaacttccatttagctatagctttactcagcatgactgtagataaggatagcagcaaacaatcattggagcttaatgaacatttttaaaaataattaccaaggcctcccttctacttgtgagttttgaaattgttctttttattttcagggataccgtttaatttaattatatgatttgtctgcactcagtttattccctactcaaatctcagccccatgttgttctttgttattgtcagaacctggtgagttgttttgaacagaactgttttttccccttcctgtaagacgatgtgactgcacaagagcactgcagtgtttttcataataaacttgtgaactaagaactgagaaggtcaaattttaattgtatcaatgggcaagactggtgctgtttattaaaaaagttaaatcaattgagtaaattttagaatttgtagacttgtaggtaaaataaaaatcaagggcactacataacctctctggtaactccttgacattcttcagattaacttcaggatttatttgtatttcacatattacaatttgtcacattgttggtgtgcactttgtgggttcttcctgcatattaacttgtttgtaagaaaggaaatctgtgctgcttcagtaagacttaattgtaaaaccatataacttgagatttaagtctttgggttttgttttaataaaacagcatgttttcaggtagagctt

SEQ ID NO: 2953 - protein, 309 aa, Homo sapiens; identical to SEQ ID NO: 301

SEQ ID NO: 2954 - DNA, 2679 bp, Homo sapiens
agaggtgggggtggttaatccaagcggccactcgctgcccgttcctgcccccaaagatgacggaaacccacacgattacagagccgcagcaccccagatgagccacggggtcgcaattctcgtttccgtgatcggactgccaggccccaggtgaggagctgagttcatcaccagagcggccttcccaggggaaccagttacaggctgccagtggccccggcttccatccggtctgcgcctgcgcgcggcccaagccctcgcctctcctggaatagtgctcagggattagtccggttcgccgctgtgcgcactgcgcatgctccagctccatccttcccttcccccaccaccccgccctccgggagccacgcccaaaaagtcaaggcgcttcagttaccagccggctacgtcgcgcctgcgctttgacccccagtttgcgccccaactccggtcgtgcggccgcccggggagggctctgcagttgcgcagcttgctccccggcccttttcccctccgctccccgccgcctcctgacgccgggcgtgacgtcaccacgcccggcggccgccattacagagagccgagctctggagcctcagcgagcggaggaggaggcgcagcggccgacggccgagtactgcggtgagagccagcgggccagcgccagcctcaacagccgccagaagtacacgaggaaccggcggcggcgtgtgcgtgtaggcccgtgtgcgggcggcggcgcgggagcagcgcggagcggcagccggctggggcgggtggcatcatggacgagaaggtgttcaccaaggagctggaccagtggatcgagcagctgaacgagtgcaagcagctgtccgattactgtctgtggagatgtgcatgggcaatttcatgatctcatggaactgtttagaattggtggcaaatcaccagatacaaattacttgtttatgggagattatgttgacagaggatattattcagttgaaacagttacactgcttgtagctcttaaggttcgttaccgtgaacgcatcaccattcttcgagggaatcatgagagcagacagatcacacaagtttatggtttctatgatgaatgtttaagaaaatatggaaatgcaaatgtttggaaatattttacagatctttttgactatcttcctctcactgccttggtggatgggcagatcttctgtctacatggtggtctctcgccatctatagatacactggatcatatcagagcacttgatcgcctacaagaagttccccatgagggtccaatgtgtgacttgctgtggtcagatccagatgaccgtggtggttggggtatatctcctcgaggagctggttacacctttgggcaagatatttctgagacatttaatcatgccaatggcctcacgttggtgtctagagctcaccagctagtgatggagggatataactggtgccatgaccggaatgtagtaacgattttcagtgctccaaactattgttatcgttgtggtaaccaagctgcaatcatggaacttgacgatactctaaaatactctttcttgcagtttgacccagcacctcgtagaggcgagccacatgttactcgtcgtaccccagactacttcctgtaatgaaattttaaacttgtacagtattgccatgaaccatatatcgacctaatggaaatgggaagagcaacagtaactccaaagtgtcagaaaatagttaacattcaaaaaacttgttttcacatggaccaaaagatgtgccatataaaaatacaaagcctcttgtcatcaacagccgtgaccactttagaatgaaccagttcattgcatgctgaagcgacattgttggtcaagaaaccagtttctggcatagcgctatttgtagttacttttgctttctctgagagactgcagataataagatgtaaacattaacacctcgtgaatacaatttaacttccatttagctatagctttactcagcatgactgtagataaggatagcagcaaacaatcattggagcttaatgaacatttttaaaaataattaccaaggcctcccttctacttgtgagttttgaaattgttctttttattttcagggataccgtttaatttaattatatgatttgtctgcactcagtttattccctactcaaatctcagccccatgttgttctttgttattgtcagaacctggtgagttgttttgaacagaactgttttttccccttcctgtaagacgatgtgactgcacaagagcactgcagtgtttttcataataaacttgtgaactaagaactgagaaggtcaaattttaattgtatcaatgggcaagactggtgctgtttattaaaaaagttaaatcaattgagtaaattttagaatttgtagacttgtaggtaaaataaaaatcaagggcactacataacctctctggtaactccttgacattcttcagattaacttcaggatttatttgtatttcacatattacaatttgtcacattgttggtgtgcactttgtgggttcttcctgcatattaacttgtttgtaagaaaggaaatctgtgctgcttcagtaagacttaattgtaaaaccatataacttgagatttaagtctttgggttttgttttaataaaacagcatgttttcaggtagagctt

SEQ ID NO: 2955 - protein, 244 aa, Homo sapiens; identical to SEQ ID NO: 2943

SEQ ID NO: 2956 - DNA, 1240 bp, Homo sapiens
tttttttttttaaagtactaaaaaaaaaacaagttttgtaattagggggaaaataaatacatgtgtaccttacaggttgtataaagtacaggagattattaagtcatccagaaaaaaagcattaacatttcttaagcccctttggcaggggtgggaatgagtagagatttttttctctcttgagtgaagtaacatttagttgaattgagggagtaaagtaagatttttgtctccttttccttgcagggatataactggtgccatgaccggaatgtagtaacgattttcagtgctccaaactattgttatcgttgtggtaaccaagctgcaatcatggaacttgacgatactctaaaatactctttcttgcagtttgacccagcacctcgtagaggcgagccacatgttactcgtcgtaccccagactacttcctgtaatgaaattttaaacttgtacagtattgccatgaaccatatatcgacctaatggaaatgggaagagcaacagtaactccaaagtgtcagaaaatagttaacattcaaaaaacttgttttcacatggaccaaaagatgtgccatataaaaatacaaagcctcttgtcatcaacagccgtgaccactttagaatgaaccagttcattgcatgctgaagcgacattgttggtcaagaaaccagtttctggcatagcgctatttgtagttacttttgctttctctgagagactgcagataataagatgtaaacattaacacctcgtgaatacaatttaacttccatttagctatagctttactcagcatgactgtagataaggatagcagcaaacaatcattggagcttaatgaacatttttaaaaataattaccaaggcctcccttctacttgtgagttttgaaattgttctttttattttcagggataccgtttaatttaattatatgatttgtctgcactcagtttattccctactcaaatctcagccccatgttgttctttgttattgtcagaacctggtgagttgttttgaacagaactgttttttccccttcctgtaagacgatgtgactgcacaagagcactgcagtgtttttcataataaacttgtgaactaagaactgagaaggtcaaattttaattgtatcaatgggcaagactggtgctgtttattaaaaaagttaaatcaattgagtaaattttagaatttgtagacttgtaggtaaaataaaaatcaagggcact

SEQ ID NO: 2957 - protein, 34 aa, Homo sapiens; identical to SEQ ID NO: 2939

SEQ ID NO: 2958 - DNA, 2516 bp, Homo sapiens
agaggtgggggtggttaatccaagcggccactcgctgcccgttcctgcccccaaagatgacggaaacccacacgattacagagccgcagcaccccagatgagccacggggtcgcaattctcgtttccgtgatcggactgccaggccccaggtgaggagctgagttcatcaccagagcggccttcccaggggaaccagttacaggctgccagtggccccggcttccatccggtctgcgcctgcgcgcggcccaagccctcgcctctcctggaatagtgctcagggattagtccggttcgccgctgtgcgcactgcgcatgctccagctccatccttcccttcccccaccaccccgccctccgggagccacgcccaaaaagtcaaggcgcttcagttaccagccggctacgtcgcgcctgcgctttgacccccagtttgcgccccaactccggtcgtgcggccgcccggggagggctctgcagttgcgcagcttgctccccggcccttttcccctccgctccccgccgcctcctgacgccgggcgtgacgtcaccacgcccggcggccgccattacagagagccgagctctggagcctcagcgagcggaggaggaggcgcagcggccgacggccgagtactgcggtgagagccagcgggccagcgccagcctcaacagccgccagaagtacacgaggaaccggcggcggcgtgtgcgtgtaggcccgtgtgcgggcggcggcgcgggagcagcgcggagcggcagccggctggggcgggtggcatcatggacgagaaggtgttcaccaaggagctggaccagtggatcgagcagctgaacgagtgcaagcagctgtccgagtcccaggtcaagagcctctgcgagaaggctaaagaaatcctgacaaaagaatccaacgtgcaagaggttcgatgtccagttactgtctgtggagatgtgcatgggcaatttcatgatctcatggaactgtttagaattggtggcaaatcaccagatacaaattacttgtttatgggagattatgttgacagaggatattattcagttgaaacagttacactgcttgtagctcttaaggttcgttaccgtgaacgcatcaccattcttcgagggaatcatgagagcagacagatcacacaagtttatggtttctatgatgaatgtttaagaaaatatggaaatgcaaatgtttggaaatattttacagatctttttgactatcttcctctcactgccttggtggatgggcagatcttctgtctacatggtggtctctcgccatctatagatacactggatcatatcagagcacttgatcgcctacaagaagttccccatgagggtccaatgtgtgacttgctgtggtcagatccagatgaccgtggtggttggggtatatctcctcgaggagctggttacacctttgggcaagatatttctgagacatttaatcatgccaatggcctcacgttggtgtctagagctcaccagctagtgatggagggatataactggtgccatgaccggaatgtagtaacgattttcagtgctccaaactattgttatcgttgtggtaaccaagctgcaatcatggaacttgacgatactctaaaatactctttcttgcagtttgacccagcacctcgtagaggcgagccacatgttactcgtcgtaccccagactacttcctgtaatgaaattttaaacttgtacagtattgccatgaaccatatatcgacctaatggaaatgggaagagcaacagtaactccaaagtgtcagaaaatagttaacattcaaaaaacttgttttcacatggaccaaaagatgtgccatataaaaatacaaagcctcttgtcatcaacagccgtgaccactttagaatgaaccagttcattgcatgctgaagcgacattgttggtcaagaaaccagtttctggcatagcgctatttgtagttacttttgctttctctgagagactgcagataataagatgtaaacattaacacctcgtgaatacaatttaacttccatttagctatagctttactcagcatgactgtagataaggatagcagcaaacaatcattggagcttaatgaacatttttaaaaataattaccaaggcctcccttctacttgtgagttttgaaattgttctttttattttcagggataccgtttaatttaattatatgatttgtctgcactcagtttattccctactcaaatctcagccccatgttgttctttgttattgtcagaacctggtgagttgttttgaacagaactgttttttccccttcctgtaagacgatgtgactgcacaagagcactgcagtgtttttcataataaacttgtgaactaagaactgagaaggtcaaattttaattgtatcaatgggcaagactggtgctgtttattaaaaaagttaaatcaattgagtaaattttagaatttgtagacttgtaggtaaaataaaaatcaagggcact

SEQ ID NO: 2959 - protein, 309 aa, Homo sapiens; identical to SEQ ID NO: 301

SEQ ID NO: 2960 - DNA, 2436 bp, Homo sapiens
agaggtgggggtggttaatccaagcggccactcgctgcccgttcctgcccccaaagatgacggaaacccacacgattacagagccgcagcaccccagatgagccacggggtcgcaattctcgtttccgtgatcggactgccaggccccaggtgaggagctgagttcatcaccagagcggccttcccaggggaaccagttacaggctgccagtggccccggcttccatccggtctgcgcctgcgcgcggcccaagccctcgcctctcctggaatagtgctcagggattagtccggttcgccgctgtgcgcactgcgcatgctccagctccatccttcccttcccccaccaccccgccctccgggagccacgcccaaaaagtcaaggcgcttcagttaccagccggctacgtcgcgcctgcgctttgacccccagtttgcgccccaactccggtcgtgcggccgcccggggagggctctgcagttgcgcagcttgctccccggcccttttcccctccgctccccgccgcctcctgacgccgggcgtgacgtcaccacgcccggcggccgccattacagagagccgagctctggagcctcagcgagcggaggaggaggcgcagcggccgacggccgagtactgcggtgagagccagcgggccagcgccagcctcaacagccgccagaagtacacgaggaaccggcggcggcgtgtgcgtgtaggcccgtgtgcgggcggcggcgcgggagcagcgcggagcggcagccggctggggcgggtggcatcatggacgagaaggtgttcaccaaggagctggaccagtggatcgagcagctgaacgagtgcaagcagctgtccgattactgtctgtggagatgtgcatgggcaatttcatgatctcatggaactgtttagaattggtggcaaatcaccagatacaaattacttgtttatgggagattatgttgacagaggatattattcagttgaaacagttacactgcttgtagctcttaaggttcgttaccgtgaacgcatcaccattcttcgagggaatcatgagagcagacagatcacacaagtttatggtttctatgatgaatgtttaagaaaatatggaaatgcaaatgtttggaaatattttacagatctttttgactatcttcctctcactgccttggtggatgggcagatcttctgtctacatggtggtctctcgccatctatagatacactggatcatatcagagcacttgatcgcctacaagaagttccccatgagggtccaatgtgtgacttgctgtggtcagatccagatgaccgtggtggttggggtatatctcctcgaggagctggttacacctttgggcaagatatttctgagacatttaatcatgccaatggcctcacgttggtgtctagagctcaccagctagtgatggagggatataactggtgccatgaccggaatgtagtaacgattttcagtgctccaaactattgttatcgttgtggtaaccaagctgcaatcatggaacttgacgatactctaaaatactctttcttgcagtttgacccagcacctcgtagaggcgagccacatgttactcgtcgtaccccagactacttcctgtaatgaaattttaaacttgtacagtattgccatgaaccatatatcgacctaatggaaatgggaagagcaacagtaactccaaagtgtcagaaaatagttaacattcaaaaaacttgttttcacatggaccaaaagatgtgccatataaaaatacaaagcctcttgtcatcaacagccgtgaccactttagaatgaaccagttcattgcatgctgaagcgacattgttggtcaagaaaccagtttctggcatagcgctatttgtagttacttttgctttctctgagagactgcagataataagatgtaaacattaacacctcgtgaatacaatttaacttccatttagctatagctttactcagcatgactgtagataaggatagcagcaaacaatcattggagcttaatgaacatttttaaaaataattaccaaggcctcccttctacttgtgagttttgaaattgttctttttattttcagggataccgtttaatttaattatatgatttgtctgcactcagtttattccctactcaaatctcagccccatgttgttctttgttattgtcagaacctggtgagttgttttgaacagaactgttttttccccttcctgtaagacgatgtgactgcacaagagcactgcagtgtttttcataataaacttgtgaactaagaactgagaaggtcaaattttaattgtatcaatgggcaagactggtgctgtttattaaaaaagttaaatcaattgagtaaattttagaatttgtagacttgtaggtaaaataaaaatcaagggcact

SEQ ID NO: 2961 - protein, 244 aa, Homo sapiens; identical to SEQ ID NO: 2943

SEQ ID NO: 2962 - DNA, 1140 bp, Homo sapiens
tttttttttttaaagtactaaaaaaaaaacaagttttgtaattagggggaaaataaatacatgtgtaccttacaggttgtataaagtacaggagattattaagtcatccagaaaaaaagcattaacatttcttaagcccctttggcaggggtgggaatgagtagagatttttttctctcttgagtgaagtaacatttagttgaattgagggagtaaagtaagatttttgtctccttttccttgcagggatataactggtgccatgaccggaatgtagtaacgattttcagtgctccaaactattgttatcgttgtggtaaccaagctgcaatcatggaacttgacgatactctaaaatactctttcttgcagtttgacccagcacctcgtagaggcgagccacatgttactcgtcgtaccccagactacttcctgtaatgaaattttaaacttgtacagtattgccatgaaccatatatcgacctaatggaaatgggaagagcaacagtaactccaaagtgtcagaaaatagttaacattcaaaaaacttgttttcacatggaccaaaagatgtgccatataaaaatacaaagcctcttgtcatcaacagccgtgaccactttagaatgaaccagttcattgcatgctgaagcgacattgttggtcaagaaaccagtttctggcatagcgctatttgtagttacttttgctttctctgagagactgcagataataagatgtaaacattaacacctcgtgaatacaatttaacttccatttagctatagctttactcagcatgactgtagataaggatagcagcaaacaatcattggagcttaatgaacatttttaaaaataattaccaaggcctcccttctacttgtgagttttgaaattgttctttttattttcagggataccgtttaatttaattatatgatttgtctgcactcagtttattccctactcaaatctcagccccatgttgttctttgttattgtcagaacctggtgagttgttttgaacagaactgttttttccccttcctgtaagacgatgtgactgcacaagagcactgcagtgtttttcataataaacttgtgaactaagaactgagaaggtcaaattttaattgt

SEQ ID NO: 2963 - protein, 34 aa, Homo sapiens; identical to SEQ ID NO: 2939

SEQ ID NO: 2964 - DNA, 2336 bp, Homo sapiens
agaggtgggggtggttaatccaagcggccactcgctgcccgttcctgcccccaaagatgacggaaacccacacgattacagagccgcagcaccccagatgagccacggggtcgcaattctcgtttccgtgatcggactgccaggccccaggtgaggagctgagttcatcaccagagcggccttcccaggggaaccagttacaggctgccagtggccccggcttccatccggtctgcgcctgcgcgcggcccaagccctcgcctctcctggaatagtgctcagggattagtccggttcgccgctgtgcgcactgcgcatgctccagctccatccttcccttcccccaccaccccgccctccgggagccacgcccaaaaagtcaaggcgcttcagttaccagccggctacgtcgcgcctgcgctttgacccccagtttgcgccccaactccggtcgtgcggccgcccggggagggctctgcagttgcgcagcttgctccccggcccttttcccctccgctccccgccgcctcctgacgccgggcgtgacgtcaccacgcccggcggccgccattacagagagccgagctctggagcctcagcgagcggaggaggaggcgcagcggccgacggccgagtactgcggtgagagccagcgggccagcgccagcctcaacagccgccagaagtacacgaggaaccggcggcggcgtgtgcgtgtaggcccgtgtgcgggcggcggcgcgggagcagcgcggagcggcagccggctggggcgggtggcatcatggacgagaaggtgttcaccaaggagctggaccagtggatcgagcagctgaacgagtgcaagcagctgtccgattactgtctgtggagatgtgcatgggcaatttcatgatctcatggaactgtttagaattggtggcaaatcaccagatacaaattacttgtttatgggagattatgttgacagaggatattattcagttgaaacagttacactgcttgtagctcttaaggttcgttaccgtgaacgcatcaccattcttcgagggaatcatgagagcagacagatcacacaagtttatggtttctatgatgaatgtttaagaaaatatggaaatgcaaatgtttggaaatattttacagatctttttgactatcttcctctcactgccttggtggatgggcagatcttctgtctacatggtggtctctcgccatctatagatacactggatcatatcagagcacttgatcgcctacaagaagttccccatgagggtccaatgtgtgacttgctgtggtcagatccagatgaccgtggtggttggggtatatctcctcgaggagctggttacacctttgggcaagatatttctgagacatttaatcatgccaatggcctcacgttggtgtctagagctcaccagctagtgatggagggatataactggtgccatgaccggaatgtagtaacgattttcagtgctccaaactattgttatcgttgtggtaaccaagctgcaatcatggaacttgacgatactctaaaatactctttcttgcagtttgacccagcacctcgtagaggcgagccacatgttactcgtcgtaccccagactacttcctgtaatgaaattttaaacttgtacagtattgccatgaaccatatatcgacctaatggaaatgggaagagcaacagtaactccaaagtgtcagaaaatagttaacattcaaaaaacttgttttcacatggaccaaaagatgtgccatataaaaatacaaagcctcttgtcatcaacagccgtgaccactttagaatgaaccagttcattgcatgctgaagcgacattgttggtcaagaaaccagtttctggcatagcgctatttgtagttacttttgctttctctgagagactgcagataataagatgtaaacattaacacctcgtgaatacaatttaacttccatttagctatagctttactcagcatgactgtagataaggatagcagcaaacaatcattggagcttaatgaacatttttaaaaataattaccaaggcctcccttctacttgtgagttttgaaattgttctttttattttcagggataccgtttaatttaattatatgatttgtctgcactcagtttattccctactcaaatctcagccccatgttgttctttgttattgtcagaacctggtgagttgttttgaacagaactgttttttccccttcctgtaagacgatgtgactgcacaagagcactgcagtgtttttcataataaacttgtgaactaagaactgagaaggtcaaattttaattgt

SEQ ID NO: 2965 - protein, 244 aa, Homo sapiens; identical to SEQ ID NO: 2943

SEQ ID NO: 2966 - DNA, 2416 bp, Homo sapiens
agaggtgggggtggttaatccaagcggccactcgctgcccgttcctgcccccaaagatgacggaaacccacacgattacagagccgcagcaccccagatgagccacggggtcgcaattctcgtttccgtgatcggactgccaggccccaggtgaggagctgagttcatcaccagagcggccttcccaggggaaccagttacaggctgccagtggccccggcttccatccggtctgcgcctgcgcgcggcccaagccctcgcctctcctggaatagtgctcagggattagtccggttcgccgctgtgcgcactgcgcatgctccagctccatccttcccttcccccaccaccccgccctccgggagccacgcccaaaaagtcaaggcgcttcagttaccagccggctacgtcgcgcctgcgctttgacccccagtttgcgccccaactccggtcgtgcggccgcccggggagggctctgcagttgcgcagcttgctccccggcccttttcccctccgctccccgccgcctcctgacgccgggcgtgacgtcaccacgcccggcggccgccattacagagagccgagctctggagcctcagcgagcggaggaggaggcgcagcggccgacggccgagtactgcggtgagagccagcgggccagcgccagcctcaacagccgccagaagtacacgaggaaccggcggcggcgtgtgcgtgtaggcccgtgtgcgggcggcggcgcgggagcagcgcggagcggcagccggctggggcgggtggcatcatggacgagaaggtgttcaccaaggagctggaccagtggatcgagcagctgaacgagtgcaagcagctgtccgagtcccaggtcaagagcctctgcgagaaggctaaagaaatcctgacaaaagaatccaacgtgcaagaggttcgatgtccagttactgtctgtggagatgtgcatgggcaatttcatgatctcatggaactgtttagaattggtggcaaatcaccagatacaaattacttgtttatgggagattatgttgacagaggatattattcagttgaaacagttacactgcttgtagctcttaaggttcgttaccgtgaacgcatcaccattcttcgagggaatcatgagagcagacagatcacacaagtttatggtttctatgatgaatgtttaagaaaatatggaaatgcaaatgtttggaaatattttacagatctttttgactatcttcctctcactgccttggtggatgggcagatcttctgtctacatggtggtctctcgccatctatagatacactggatcatatcagagcacttgatcgcctacaagaagttccccatgagggtccaatgtgtgacttgctgtggtcagatccagatgaccgtggtggttggggtatatctcctcgaggagctggttacacctttgggcaagatatttctgagacatttaatcatgccaatggcctcacgttggtgtctagagctcaccagctagtgatggagggatataactggtgccatgaccggaatgtagtaacgattttcagtgctccaaactattgttatcgttgtggtaaccaagctgcaatcatggaacttgacgatactctaaaatactctttcttgcagtttgacccagcacctcgtagaggcgagccacatgttactcgtcgtaccccagactacttcctgtaatgaaattttaaacttgtacagtattgccatgaaccatatatcgacctaatggaaatgggaagagcaacagtaactccaaagtgtcagaaaatagttaacattcaaaaaacttgttttcacatggaccaaaagatgtgccatataaaaatacaaagcctcttgtcatcaacagccgtgaccactttagaatgaaccagttcattgcatgctgaagcgacattgttggtcaagaaaccagtttctggcatagcgctatttgtagttacttttgctttctctgagagactgcagataataagatgtaaacattaacacctcgtgaatacaatttaacttccatttagctatagctttactcagcatgactgtagataaggatagcagcaaacaatcattggagcttaatgaacatttttaaaaataattaccaaggcctcccttctacttgtgagttttgaaattgttctttttattttcagggataccgtttaatttaattatatgatttgtctgcactcagtttattccctactcaaatctcagccccatgttgttctttgttattgtcagaacctggtgagttgttttgaacagaactgttttttccccttcctgtaagacgatgtgactgcacaagagcactgcagtgtttttcataataaacttgtgaactaagaactgagaaggtcaaattttaattgt

SEQ ID NO: 2967 - protein, 309 aa, Homo sapiens; identical to SEQ ID NO: 301

SEQ ID NO: 2968 - DNA, 1136 bp, Homo sapiens
agaggtgggggtggttaatccaagcggccactcgctgcccgttcctgcccccaaagatgacggaaacccacacgattacagagccgcagcaccccagatgagccacggggtcgcaattctcgtttccgtgatcggactgccaggccccaggtgaggagctgagttcatcaccagagcggccttcccaggggaaccagttacaggctgccagtggccccggcttccatccggtctgcgcctgcgcgcggcccaagccctcgcctctcctggaatagtgctcagggattagtccggttcgccgctgtgcgcactgcgcatgctccagctccatccttcccttcccccaccaccccgccctccgggagccacgcccaaaaagtcaaggcgcttcagttaccagccggctacgtcgcgcctgcgctttgacccccagtttgcgccccaactccggtcgtgcggccgcccggggagggctctgcagttgcgcagcttgctccccggcccttttcccctccgctccccgccgcctcctgacgccgggcgtgacgtcaccacgcccggcggccgccattacagagagccgagctctggagcctcagcgagcggaggaggaggcgcagcggccgacggccgagtactgcggtgagagccagcgggccagcgccagcctcaacagccgccagaagtacacgaggaaccggcggcggcgtgtgcgtgtaggcccgtgtgcgggcggcggcgcgggagcagcgcggagcggcagccggctggggcgggtggcatcatggacgagaaggtgttcaccaaggagctggaccagtggatcgagcagctgaacgagtgcaagcagctgtccgagtcccaggtcaagagcctctgcgagaaggctaaagaaatcctgacaaaagaatccaacgtgcaagaggttcgatgtccagttactgtctgtggagatgtgcatgggcaatttcatgatctcatggaactgtttagaattggtggcaaatcaccagatacaaattacttgtttatgggagattatgttgacagaggatattattcagttgaaacagttacactgcttgtagctcttaagagattaggacacagatggggagaagataagacagatggag

SEQ ID NO: 2969 - protein, 116 aa, Homo sapiens
MDEKVFTKELDQWIEQLNECKQLSESQVKSLCEKAKEILTKESNVQEVRCPVTVCGDVHGQFHDLMELFRIGGKSPDTNYLFMGDYVDRGYYSVETVTLLVALKRLGHRWGEDKTD

SEQ ID NO: 2970 - DNA, 2065 bp, Homo sapiens
agaggtgggggtggttaatccaagcggccactcgctgcccgttcctgcccccaaagatgacggaaacccacacgattacagagccgcagcaccccagatgagccacggggtcgcaattctcgtttccgtgatcggactgccaggccccaggtgaggagctgagttcatcaccagagcggccttcccaggggaaccagttacaggctgccagtggccccggcttccatccggtctgcgcctgcgcgcggcccaagccctcgcctctcctggaatagtgctcagggattagtccggttcgccgctgtgcgcactgcgcatgctccagctccatccttcccttcccccaccaccccgccctccgggagccacgcccaaaaagtcaaggcgcttcagttaccagccggctacgtcgcgcctgcgctttgacccccagtttgcgccccaactccggtcgtgcggccgcccggggagggctctgcagttgcgcagcttgctccccggcccttttcccctccgctccccgccgcctcctgacgccgggcgtgacgtcaccacgcccggcggccgccattacagagagccgagctctggagcctcagcgagcggaggaggaggcgcagcggccgacggccgagtactgcggtgagagccagcgggccagcgccagcctcaacagccgccagaagtacacgaggaaccggcggcggcgtgtgcgtgtaggcccgtgtgcgggcggcggcgcgggagcagcgcggagcggcagccggctggggcgggtggcatcatggacgagaaggtgttcaccaaggagctggaccagtggatcgagcagctgaacgagtgcaagcagctgtccgagtcccaggtcaagagcctctgcgagaaggctaaagaaatcctgacaaaagaatccaacgtgcaagaggttcgatgtccagttactgtctgtggagatgtgcatgggcaatttcatgatctcatggaactgtttagaattggtggcaaatcaccagatacaaattacttgtttatgggagattatgttgacagaggatattattcagttgaaacagttacactgcttgtagctcttaaggtaatttcaattttatgttggggcatgttgaaatgggtaagacagtcctcttgaaagttttttttcccccagttattttctctatctgaatgttaaaacaaaattccacatttaggaatgcatatgttcaggttttggacttaaaaatcataggcgtctgcgttctgagtaaggggatggtacagaatcaaaacaaaaggaggagaatgaatgcctcagtcagattgtttgaaaaaataggctgggcgtgatggcttatgcctgtaatcccagcactttgggacgctgaggtaggcagatcacctgaggtcaggagttcgagaccagcctggagaacatggtgaagccccatctctactaaaagtacaaaaaactagccgggggtggtggcgggtgcctgtaatcccagctactctggagcctgaggcaggagaattgcttgaacctgggaggcggaggttgcagtgagctgagattgcgccactacacgccagcctggacaacagagcgagactgtctcaaaaaaaaaaaaaggaaaagaaaaatgttagagggctggtcaaatagatattttagttcagtaaattggggtatggagaggtaatataattagatttgtgtttttagatacttttgaagtattataaatatataaacataccaaatgtcaaaatgttttaaatcagctggtcacggtggctcgtggctataatcccagcactttgggaggacaggacaaagtgagcatattgcttgagtccaagagtttgtgaccagcctgggcaacatagtgagaccttgtctacaaaaaaataataataattaaccgagtgtggtggcacaggcctgtagtcccagctactcaggctgaggtgggcagagttgcctgagcccaggaggtcgtggctgcaatgagacttgatcttgccaccctacactctaacttggggaacaatgagaccctgtctc

SEQ ID NO: 2971 - protein, 121 aa, Homo sapiens
MDEKVFTKELDQWIEQLNECKQLSESQVKSLCEKAKEILTKESNVQEVRCPVTVCGDVHGQFHDLMELFRIGGKSPDTNYLFMGDYVDRGYYSVETVTLLVALKVISILCWGMLKWVRQSS

SEQ ID NO: 2972 - DNA, 922 bp, Homo sapiens
agaacgggtcacgtgagcgcctcgcctggatgtgagtttcagccagagccaaatggagaagggtatatttaatgagcgaacaggtcacagtgaccaaatggcaaatgagaacaaaaggaagctgaatttttccagatctgacaggaaagaattccattttccagaattgcctgtcacaatacagtcaaaagatacaaaaggaatggaagttaaacagataaaaatgctgaagagggagtcaaagaaaacagagtcatctaagataccaactttacttaacgtggatcaaaatcaagaaaaacaagagggtggagatggccattgcgaggggaagaatttgaagagaaacaggttttttttctggtagtgtcttttcttttacatagtccaaaaaatacaagatgacaactcttcccgttttatttatctacaatagaagtgtgatgtgagttgttgttaagacagccatccatgtgcatgagcatcatccagctttttttgttagcaaaacatttactgttttcttttcccttttaagactctgttgatgtgataatttgatttggaattataaagtcatctcttctctgcctacttcttttttttgccatgattactgagtggataacacaagccgtgacatgatacaaactgtacttatacttaatgatctctgccttcttgtagccacataacttcgagtcagttatctcctataacacacaggcctctttaaatgagttcttaataaaatatttgagccgttgttttaaaagctattcatggctgggtgcaatggctcatgcctgtaatcccaacactttgggaggctgaggcaggcggatcacttgaggtcaggagttcgaaaccagcctgaccaacacggtgaaacaccatctctactaaaaatgcaaaaattagc

SEQ ID NO: 2973 - protein, 104 aa, Homo sapiens [sequence omitted]

SEQ ID NO: 2974 - DNA, 2129 bp, Homo sapiens
ggaactacgcagagccagaccagcgggaccacagaatgggctgaggcggcggcggctgtttggataaagtcaacagcgggacgtggggcgtgacgccgtagtaaaagcccagcttgaaaatggagatgtatgaaacccttggaaaagtgggagagggaagttacggaacagtcatgaaatgtaaacataagaatactgggcagatagtggccattaagatattttatgagagaccagaacaatctgtcaacaaaattgcgatgagagaaataaagtttctaaagcaatttcatcacgaaaacctggtcaatctgattgaagtttttagacagaaaaagaaaattcatttggtatttgaatttattgaccacacagtattagatgagttacaacattattgtcatggactagagagtaagcgacttagaaaatacctcttccagatccttcgagcaattgactatcttcacagtaataatatcattcatcgagatataaaacctgagaatattttagtatcccagtcaggaattactaagctctgtgattttggttttgcacgaacactagcagctcctggggacatttatacggactatgtggccacacgctggtatagagctcccgaattagtattaaaagatacttcttatggaaaacctgtggatatctgggctttgggctgtatgatcattgagatggccactggaaatccctatcttcctagtagttctgatttggatttactccataaaattgttttgaaagtgggcaatttgtcacctcacttgcagaatatcttttccaagagccccatttttgctggggtagttcttcctcaagttcaacaccccaaaaatgcaagaaaaaaatatccaaagcttaatggattgttggcagatatagttcatgcttgtttacaaattgatcctgctgacaggatatcatctagtgatcttttgcatcatgagtattttactagagatggatttattgaaaaattcatgccagaactgaaagctaaattactgcaggaagcaaaagtcaattcattaataaagccaaaagagagttctaaagaaaatgaactcaggaaagatgaaagaaaaacagtttataccaatacactgctaagtagttcagttttgggaaaggaaatagaaaaagagaaaaagcccaaggagatcaaagtcagagttattaaagtcaaaggaggaagaggagatatctcagaaccaaaaaagaaagagtatgaaggtggacttggtcaacaggatgcaaatgaaaatgttcatcctatgtctccagatacaaaacttgtaaccattgaaccaccaaaccctatcaatcccagcactaactgtaatggcttgaaagaaaatccacattgcggaggttctgtgacaatgccacccatcaatctaactaacagtaatttgatggctgcaaatctcagttcaaatctctttcaccccagtgtgaggttaactgaaagagcaaaaaagagacgcacttcttcacaatctattggacaagttatgcctaatagcaggcaagaggatccaggtcctattcaaagccaaatggagaagggtatatttaatgagcgaacaggtcacagtgaccaaatggcaaatgagaacaaaaggaagctgaatttttccagatctgacaggaaagaattccattttccagaattgcctgtcacaatacagtcaaaagatacaaaaggaatggaagttaaacagataaaaatgctgaagagggagtcaaagaaaacagagtcatctaagataccaactttacttaacgtggatcaaaatcaagaaaaacaagagggtggagatggccattgcgaggggaagaatttgaagagaaacaggttttttttctggtagtgtcttttcttttacatagtccaaaaaatacaagatgacaactcttcccgttttatttatctacaatagaagtgtgatgtgagttgttgttaagacagccatccatgtgcatgagcatcatccagctttttttgttagcaaaacatttactgttttcttttcccttttaagactctgttgatgtgataatttgatttggaattataaagtcatctcttctctgcctacttc

SEQ ID NO: 2975 - protein, 592 aa, Homo sapiens
MEMYETLGKVGEGSYGTVMKCKHKNTGQIVAIKIFYERPEQSVNKIAMREIKFLKQFHHENLVNLIEVFRQKKKIHLVFEFIDHTVLDELQHYCHGLESKRLRKYLFQILRAIDYLHSNNIIHRDIKPENILVSQSGITKLCDFGFARTLAAPGDIYTDYVATRWYRAPELVLKDTSYGKPVDIWALGCMIIEMATGNPYLPSSSDLDLLHKIVLKVGNLSPHLQNIFSKSPIFAGVVLPQVQHPKNARKKYPKLNGLLADIVHACLQIDPADRISSSDLLHHEYFTRDGFIEKFMPELKAKLLQEAKVNSLIKPKESSKENELRKDERKTVYTNTLLSSSVLGKEIEKEKKPKEIKVRVIKVKGGRGDISEPKKKEYEGGLGQQDANENVHPMSPDTKLVTIEPPNPINPSTNCNGLKENPHCGGSVTMPPINLTNSNLMAANLSSNLFHPSVRLTERAKKRRTSSQSIGQVMPNSRQEDPGPIQSQMEKGIFNERTGHSDQMANENKRKLNFSRSDRKEFHFPELPVTIQSKDTKGMEVKQIKMLKRESKKTESSKIPTLLNVDQNQEKQEGGDGHCEGKNLKRNRFFFW

SEQ ID NO: 2976 - DNA, 434 bp, Homo sapiens
gcccgcggccttgtcaacaatccacccctgagtgggagggggagaagtatctagaaccacgtgtccctatgacgcgtttagaacgggtcacgtgagcgcctcgcctggatgtgagtttcagccagacctgtggatatctgggctttgggctgtatgatcattgagatggccactggaaatccctatcttcctagtagttctgatttggatttactccataaaattgttttgaaagtgggcaatttgtcacctcacttgcagaatatcttttccaagagccccatttttgctggggtagttcttcctcaagttcaacaccccaaaaatgcaagaaaaaaatatccaaagcttaatggattgttggcagatatagttcatagccaaatggagaagggtatatttaatgagcgaacaggtcacagtgaccaaatggc

SEQ ID NO: 2977 - protein, 92 aa, Homo sapiens
MIIEMATGNPYLPSSSDLDLLHKIVLKVGNLSPHLQNIFSKSPIFAGVVLPQVQHPKNARKKYPKLNGLLADIVHSQMEKGIFNERTGHSDQ

SEQ ID NO: 2978 - DNA, 699 bp, Homo sapiens
cagacctgtggatatctgggctttgggctgtatgatcattgagatggccactggaaatccctatcttcctagtagttctgatttggatttactccataaaattgttttgaaagtgggaaatagaaaaagagaaaaagcccaaggagatcaaagtcagagttattaaagtcaaaggaggaagaggagatatctcagaaccaaaaaagaaagagtatgaaggtggacttggtcaacaggatgcaaatgaaaatgttcatcctatgtctccagatacaaaacttgtaaccattgaaccaccaaaccctatcaatcccagcactaactgtaatggcttgaaagaaaatccacattgcggaggttctgtgacaatgccacccatcaatctaactaacagtaatttgatggctgcaaatctcagttcaaatctctttcaccccagtgtgaggtgagctgtaacagagaagaaacctaaataatacaacattcctgtataatggtatttcaaagaatcgtgttcatagtgtctgtatgtaaactgaacttgaagaaaatatattgaaattaaagctgtataatgggccatttactgagtgtttcttatggatgctgtagaagaaattaacttttcttggccatatagatgtttaaattttcactaatgtcttcttgaaaaaccttattaaaaaaaaagaccctttg

SEQ ID NO: 2979 - protein, 44 aa, Homo sapiens
MIIEMATGNPYLPSSSDLDLLHKIVLKVGNRKREKAQGDQSQSY

SEQ ID NO: 2980 - DNA, 975 bp, Homo sapiens
gtttagaacgggtcacgtgagcgcctcgcctggatgtgagtttcagccagacctgtggatatctgggctttgggctgtatgatcattgagatggccactggaaatccctatcttcctagtagttctgatttggatttactccataaaattgttttgaaagtgggcaatttgtcacctcacttgcagaatatcttttccaagagccccatttttgctggggtagttcttcctcaagttcaacaccccaaaaatgcaagaaaaaaatatccaaagcttaatggattgttggcagatatagttcatgcttgtttacaaattgatcctgctgacaggatatcatctagtgatcttttgcatcatgagtattttactagagatggatttattgaaaagaaatagaaaaagagaaaaagcccaaggagatcaaagtcagagttattaaagtcaaaggaggaagaggagatatctcagaaccaaaaaagaaagagtatgaaggtggacttggtcaacaggatgcaaatgaaaatgttcatcctatgtctccagatacaaaacttgtaaccattgaaccaccaaaccctatcaatcccagcactaactgtaatggcttgaaagaaaatccacattgcggaggttctgtgacaatgccacccatcaatctaactaacagtaatttgatggctgcaaatctcagttcaaatctctttcaccccagtgtgaggtgagctgtaacagagaagaaacctaaataatacaacattcctgtataatggtatttcaaagaatcgtgttcatagtgtctgtatgtaaactgaacttgaagaaaatatattgaaattaaagctgtataatgggccatttactgagtgtttcttatggatgctgtagaagaaattaacttttcttggccatatagatgtttaaattttcactaatgtcttcttgaaaaaccttattaaaaaaaaagaccctttg

SEQ ID NO: 2981 - protein, 106 aa, Homo sapiens
MIIEMATGNPYLPSSSDLDLLHKIVLKVGNLSPHLQNIFSKSPIFAGVVLPQVQHPKNARKKYPKLNGLLADIVHACLQIDPADRISSSDLLHHEYFTRDGFIEKK

SEQ ID NO: 2982 - DNA, 651 bp, Homo sapiens
agcttaatggattgttggcagatatagttcatattcatgccagaactgaaagctaaattactgcaggaagcaaaagtcaattcattaataaagccaaaagagagttctaaagaaaatgaactcaggaaagatgaaagaaaaacagtttataccaatacactgctaagtagttcagttttgggaaaggaaatagaaaaagagaaaaagcccaaggagatcaaagtcagagttattaaagtcaaaggaggaagaggagatatctcagaaccaaaaaagaaagagtatgaaggtggacttggtcaacaggatgcaaatgaaaatgttcatcctatgtctccagatacaaaacttgtaaccattgaaccaccaaaccctatcaatcccagcactaactgtaatggcttgaaagaaaatccacattgcggaggttctgtgacaatgccacccatcaatctaactaacagtaatttgatggctgcaaatctcagttcaaatctctttcaccccagtgtgaggtgagctgtaacagagaagaaacctaaataatacaacattcctgtataatggtatttcaaagaatcgtgttcatagtgtctgtatgtaaactgaacttgaagaaaatatattgaaattaaagctgtataatgggcc

SEQ ID NO: 2983 - protein, 160 aa, Homo sapiens [sequence omitted]

SEQ ID NO: 2984 - DNA, 581 bp, Homo sapiens
cagacctgtggatatctgggctttgggctgtatgatcattgagatggccactggaaatccctatcttcctagtagttctgatttggatttactccataaaattgttttgaaagtgggaaatagaaaaagagaaaaagcccaaggagatcaaagtcagagttattaaagtcaaaggaggaagaggagatatctcagaaccaaaaaagaaagagtatgaaggtggacttggtcaacaggatgcaaatgaaaatgttcatcctatgtctccagatacaaaacttgtaaccattgaaccaccaaaccctatcaatcccagcactaactgtaatggcttgaaagaaaatccacattgcggaggttctgtgacaatgccacccatcaatctaactaacagtaatttgatggctgcaaatctcagttcaaatctctttcaccccagtgtgaggtgagctgtaacagagaagaaacctaaataatacaacattcctgtataatggtatttcaaagaatcgtgttcatagtgtctgtatgtaaactgaacttgaagaaaatatattgaaattaaagctgtataatgggcc

SEQ ID NO: 2985 - protein, 44 aa, Homo sapiens; identical to SEQ ID NO: 2979

SEQ ID NO: 2986 - DNA, 1619 bp, Homo sapiens
ggaactacgcagagccagaccagcgggaccacagaatgggctgaggcggcggcggctgtttggataaagtcaacagcgggacgtggggcgtgacgccgtagtaaaagcccagcttgaaaatggagatgtatgaaacccttggaaaagtgggagagggaagttacggaacagtcatgaaatgtaaacataagaatactgggcagatagtggccattaagatattttatgagagaccagaacaatctgtcaacaaaattgcgatgagagaaataaagtttctaaagcaatttcatcacgaaaacctggtcaatctgattgaagtttttagacagaaaaagaaaattcatttggtatttgaatttattgaccacacagtattagatgagttacaacattattgtcatggactagagagtaagcgacttagaaaatacctcttccagatccttcgagcaattgactatcttcacagtaataatatcattcatcgagatataaaacctgagaatattttagtatcccagtcaggaattactaagctctgtgattttggttttgcacgaacactagcagctcctggggacatttatacggactatgtggccacacgctggtatagagctcccgaattagtattaaaagatacttcttatggaaaacctgtggatatctgggctttgggctgtatgatcattgagatggccactggaaatccctatcttcctagtagttctgatttggatttactccataaaattgttttgaaagtgggcaatttgtcacctcacttgcagaatatcttttccaagagccccatttttgctggggtagttcttcctcaagttcaacaccccaaaaatgcaagaaaaaaatatccaaagcttaatggattgttggcagatatagttcatgcttgtttacaaattgatcctgctgacaggatatcatctagtgatcttttgcatcatgagtattttactagagatggatttattgaaaaattcatgccagaactgaaagctaaattactgcaggaagcaaaagtcaattcattaataaagccaaaagagagttctaaagaaaatgaactcaggaaagatgaaagaaaaacagtttataccaatacactgctaagtagttcagttttgggaaaggaaatagaaaaagagaaaaagcccaaggagatcaaagtcagagttattaaagtcaaaggaggaagaggagatatctcagaaccaaaaaagaaagagtatgaaggtggacttggtcaacaggatgcaaatgaaaatgttcatcctatgtctccagatacaaaacttgtaaccattgaaccaccaaaccctatcaatcccagcactaactgtaatggcttgaaagaaaatccacattgcggaggttctgtgacaatgccacccatcaatctaactaacagtaatttgatggctgcaaatctcagttcaaatctctttcaccccagtgtgaggtgagctgtaacagagaagaaacctaaataatacaacattcctgtataatggtatttcaaagaatcgtgttcatagtgtctgtatgtaaactgaacttgaagaaaatatattgaaattaaagctgtataatgggcc

SEQ ID NO: 2987 - protein, 455 aa, Homo sapiens
MEMYETLGKVGEGSYGTVMKCKHKNTGQIVAIKIFYERPEQSVNKIAMREIKFLKQFHHENLVNLIEVFRQKKKIHLVFEFIDHTVLDELQHYCHGLESKRLRKYLFQILRAIDYLHSNNIIHRDIKPENILVSQSGITKLCDFGFARTLAAPGDIYTDYVATRWYRAPELVLKDTSYGKPVDIWALGCMIIEMATGNPYLPSSSDLDLLHKIVLKVGNLSPHLQNIFSKSPIFAGVVLPQVQHPKNARKKYPKLNGLLADIVHACLQIDPADRISSSDLLHHEYFTRDGFIEKFMPELKAKLLQEAKVNSLIKPKESSKENELRKDERKTVYTNTLLSSSVLGKEIEKEKKPKEIKVRVIKVKGGRGDISEPKKKEYEGGLGQQDANENVHPMSPDTKLVTIEPPNPINPSTNCNGLKENPHCGGSVTMPPINLTNSNLMAANLSSNLFHPSVR

SEQ ID NO: 2988 - DNA, 857 bp, Homo sapiens
gtttagaacgggtcacgtgagcgcctcgcctggatgtgagtttcagccagacctgtggatatctgggctttgggctgtatgatcattgagatggccactggaaatccctatcttcctagtagttctgatttggatttactccataaaattgttttgaaagtgggcaatttgtcacctcacttgcagaatatcttttccaagagccccatttttgctggggtagttcttcctcaagttcaacaccccaaaaatgcaagaaaaaaatatccaaagcttaatggattgttggcagatatagttcatgcttgtttacaaattgatcctgctgacaggatatcatctagtgatcttttgcatcatgagtattttactagagatggatttattgaaaagaaatagaaaaagagaaaaagcccaaggagatcaaagtcagagttattaaagtcaaaggaggaagaggagatatctcagaaccaaaaaagaaagagtatgaaggtggacttggtcaacaggatgcaaatgaaaatgttcatcctatgtctccagatacaaaacttgtaaccattgaaccaccaaaccctatcaatcccagcactaactgtaatggcttgaaagaaaatccacattgcggaggttctgtgacaatgccacccatcaatctaactaacagtaatttgatggctgcaaatctcagttcaaatctctttcaccccagtgtgaggtgagctgtaacagagaagaaacctaaataatacaacattcctgtataatggtatttcaaagaatcgtgttcatagtgtctgtatgtaaactgaacttgaagaaaatatattgaaattaaagctgtataatgggcc

SEQ ID NO: 2989 - protein, 106 aa, Homo sapiens; identical to SEQ ID NO: 2981

SEQ ID NO: 2990 - DNA, 407 bp, Homo sapiens
agaacgggtcacgtgagcgcctcgcctggatgtgagtttcagccagacctgtggatatctgggctttgggctgtatgatcattgagatggccactggaaatccctatcttcctagtagttctgatttggatttactccataaaattgttttgaaagtgggcaatttgtcacctcacttgcagaatatcttttccaagagccccatttttgctggggtagttcttcctcaagttcaacaccccaaaaatgcaagaaaaaaatatccaaagcttaatggattgttggcagatatagttcatagacggggtttcaccgtgttggctgtggttggccaggctgctcttgaactcctgagcttaggtgatccgcccacctcggcctcccaaagtgctgggattacaggcatg

SEQ ID NO: 2991 - protein, 110 aa, Homo sapiens
MIIEMATGNPYLPSSSDLDLLHKIVLKVGNLSPHLQNIFSKSPIFAGVVLPQVQHPKNARKKYPKLNGLLADIVHRRGFTVLAVVGQAALELLSLGDPPTSASQSAGITG

SEQ ID NO: 2992 - DNA, 831 bp, Homo sapiens
ggcaggagtcgggagaggggttcgccccaacacggctcctcggagaagacggcggggccgtgaaacaaagctgactggtgctgccggagaggaacaagctcccgcaggagctcactttgaggggacaagaagggggcgccgcagggtgcaggggcgggcggataatgtctgatcgcctgggcgagacgccgggcagctggccgaaatgggcagcagggaaccctagaccagtcgatcgacaccgttttactttttgtggggaggggaagcagtatcaaaatttcttcgggcgccagaacgagcggcaaagcttatgggagtagggccgaggctaggacccggcttccgccagtcccgctgggcccacagccggccctctgagggtcacaaaggggaaggtgtctgggatccacgccctgcagccccgcagctttgaggggccgtcatctaggcgaaggtgaaggcccttaccgcttgaaatcccgcatgagcctcctccgggccggggtcgacatgctccgcagctgccccgcggtcagtctgaaaaaaaaaaagtcccgcgcagcccccccaccccccggcgcggcggccgaatcactgtggatcgccgccgccgccgccgccgccgccgccgccgagactgacaaacaaccctgcaatgacgtctccctccgccgcctccggatccctccgccctccgccgctaccacagtgatcttgctctgttgctcaggctggaatgcagtggtgtgatctcggatcactgcagccttgacttccccagcttaagtgatcctcccacctcagcctcccgagtagctgagactacag

SEQ ID NO: 2993 - protein, 88 aa, Homo sapiens [sequence omitted]

SEQ ID NO: 2994 - DNA, 337 bp, Homo sapiens
gcgtttagaacgggtcacgtgagcgcctcgcctggatgtatagagacaacattacccaagaggtcatggcagaatcaacagcttgttttgttttctttaaaccgggaccaaaaataattcccctctggttggttcagtggcttattaactctggtacttggggcaagaagagtgagaggatcgcacgatcttctaaggcagccttgaatactgaggcccacacaacaatctcctgaaatggttccttgaagctaccagatagtctttctgctttgcagtggggtttctagtattggaaattctgggcaaatattaaaggatggtgtattatgcagtt

SEQ ID NO: 2995 - protein, 66 aa, Homo sapiens
MYRDNITQEVMAESTACFVFFKPGPKIIPLWLVQWLINSGTWGKKSERIARSSKAALNTEAHTTIS

SEQ ID NO: 2996 - DNA, 4868 bp, Homo sapiens
gtagatgagtcccccattcgtgagaggggtccctgggtctagaggcgcgacaggcgccccaggtgcgcgagcgctgcccgtgcccgccgcggggtccccgcctccgggctggggcgctgggacgcctgggtgcccggggctcgcggccgcccgccctcttcgctcatcgccctgcgcgccctgccccgcagatgccggcgatcgcggtgttggcggcggccgccgcggcgtggtgcttcctccaagtcgagagccggcacctggacgcgctcgccggaggcgcgggccccaaccacggcaatttcctagacaatgaccagtggctgagcaccgtctcccagtacgaccgggacaagtactggaaccgctttcgagacgatgattatttcagaaactggaatcccaacaagccctttgaccaagccctggacccatccaaggacccctgcctgaaggtaaaatgcagccctcacaaagtgtgtgtgacccaggactaccagaccgccctgtgtgtcagccgcaagcacctgctccccaggcaaaagaaggggaacgtggcccagaaacactgggttggaccttcgaatttggtcaagtgcaagccctgtcccgtggcacagtcagccatggtctgcggctcagatggccactcctacacatccaagtgcaaattggagttccatgcttgttctactggcaaaagcctcgccaccctctgtgatgggccctgtccctgtctcccagagcctgagccaccaaagcacaaggcagaaaggagtgcctgcacagacaaggagttgcggaaccttgcctcccggctgaaggattggtttggagctctccacgaggatgcgaacagagtcatcaagcccaccagctccaacacagcccaaggcaggtttgacactagcatcctgcccatctgcaaggactccctgggctggatgttcaacaagttggacatgaactatgacctcctgcttgacccttcagagatcaatgccatctacctggataagtacgagccctgtatcaagcctcttttcaactcgtgtgactccttcaaggatggcaagctttctaacaatgagtggtgctactgcttccagaagcctggaggtctcccttgccagaatgaaatgaacagaattcagaagctgagtaaggggaaaagcctgttgggggccttcatacctcggtgtaatgaggagggctattacaaagccacacagtgccacggcagcacggggcagtgctggtgtgtggacaaatatgggaatgagttggctggctccaggaaacagggtgctgtgagctgtgaagaggagcaggaaacctcaggggattttggcagtggtgggtccgtggtcctgctggatgacctagaatatgaacgggagctgggaccaaaggacaaagaggggaagctgagggtgcacacccgagccgtgacagaggatgatgaggatgaggatgatgacaaagaggatgaggtcgggtacatatggtagtgcccacaagaaagaggacacaagttttgcacaaaattgcaagtcacttcctattcctgcatttgtatctaagactccaaggcaccaaggtctcttctccattgttgctctctatacccgacctaaggtttggaagacaactgcttgttcccagaggattctgattttgcatatgtttgtatgggagaaagggtgttgtgttttttttttgttgttgtttattttttggatagggaagtcattggcttaattagagcctccttcctttctgtgagatttttccaacaagcatgtgatttacgtggaattctgacagtgcagggagccccaaccctcttaaatgtcaaagaccctttttgattacccacactggtggttattacagcatggttcccagccttacagtgtctaagtgcttctcttgtgtcctgtagatgttgtgaaaaagaaaaaaacaaaaaatacaccacactgtactttttccccctgcccccgttactgccggtgattattattaaaaattagtttttttcacatcattatatctggcttcctataaacaacagccttaattcagtcaagactccctttggggaattcattttattaaaaattggtgtctggatacttccctgtacatgcataaatatgcatgcatgtacagaaagactgtatgtgtgtgccttgcacacacacccatacctctcagaaaaagtgtttgggtatcttaaaaactcgaaaaacaatgataaatttctcagcttgtccagacctggaacaaaatttctggaataagaaatttgtattaaagtccttttttgcactaacagttggctcttgtagcctgcaggctgaggaagtctcttctctgtgcatcagcagagttactgaaagcctctgattgagaaaaaacctccgtctgcctaaatcacttttctcgcagaagccatgcgactcccacacgacacgggcagcttcacaagccatctctttcatttctgcttgaagccccttggctgcagcaatcctgtctgccataggtttcttccttccttacctactcaagggctttttctaaggcatgcacacatatctcctgttctctgagagtaccatggtgttccttaaaagaagaaaatttctaattctgaactcaatgttttgcttttactccctttctactgacaaatcatgataagggcacaaaagctgtacagatttttttttttaaccactcaatcccaaatggaggcctacaaagaacatcgtaataacacatggaagcaaaccctgggtttttaagagcaaattctgtccccccctcactcccccaagtgacaagatactaatgaagaaagttcttcaccatagtgtttgttttaactaaactcattggagtctagttccaaatttggtagggtcatcatctctacattccttaggatttctctccctatcaagctggcccagatacaagtaccaaacagtagtctctgaagttcccccatttccttcagtaccagtctataagctactgtccgccactgattttcatttatcagggtgtcctaatcagaatcagccacccaagcaagcctctctggcccacatatctatctcttgccttcccccatgaacttcagcctgtccacacaaaagccacataaactcaagcaagaaatatgttcagccaaaacatgattatagtggcagctgaccaatcccccatcccaaattgaccatttagatgtaccaactcaccttaaattagcatgttccaatccagtcggcattgcctgaatacagtagcatcatacctatagttggtcttagataagaaatgaactacttgatatagcaaagtcctttggcttcgtaaataaccctgaggttttgtacttactttccccataggaagacagaccataggcaaactctgttttgggatctcaactccatcacctttgtttcaatattttttttctctcttgaacaaaactgagataatttagaaaacaggtgcttaattgcaataaaattactatgaagtatattaaaaatcacgacattgtaaaatctcactttagatcatcaaagaaaaccattgttactatctcctttgagcttaggaaaatgtacaagagaacaaattaaaattgaaaaattgatttcacttagaaaaacttctaggaacagggtgaaccactgattttaatttgcctaattatcttatgacaagtatcaaattaagatgacacttaaagatccttagcattaacttaatgatggagaagagtgctcaatagacagttcccagtaaggtaatgagatgccattttcagagacattctaagaagatattttgattcattaaaacattaaataaaaagccctcctcagattggaacccccaaatcgatggagccacattaataatacttttcatgcctcactttgacatgacagcattcgatttttttaaagatctttaatactttccatgagtactaaagattgtaatgagttaccttatccttagaagtagaatgtttgctttcttcttcttggaaatagtcctccaaaaagtccacttgtaccagtgacaagaagtcacttgtatagtgaccaagtacacataaaatactgattataaaaatattgtaataaaccacttcctcatttgatacaggtattaagctgaatcctcactaattcacttttgaaaagttcttaatgaacagttttattcttattccatgaacagctcttttaatacaatttccttggtatccaacttaaatcccagaattttgttccaccatggttagttatttgccatatgaatgtattcttgtttctaccaatattctaggcatgagaataccttaatactgagttggagattttgtatctgtttctcctcctttacgcccattttcctacccacagcagcaaatgacaacgtgtctgtccaggtctgtccccctgctcatcccaggatgccactcacatttttttcttcttgttaccttgaccacgctgtacagtaacatccaagagcccattctacagtgggtggttttggtctttttataactttttctcaaagtcactgatgtttgttcctgttaaatgtatagcattgtaatgagagcccatcaaatcctgagtgtcagtttgttgtccctattgtagatgaaatagtgatgtagcaaaaacctagtaaattctgaatgcttttccacgtagacttatctggaatgtgaacacaactctttggttaatagtaaatgcttaactgtagtcctgagtaggtgcatttctgtctgtctcaataaattttactttgtctgcaat

SEQ ID NO: 2997 - protein, 439 aa, Homo sapiens; identical to SEQ ID NO: 305

SEQ ID NO: 2998 - DNA, 4841 bp, Homo sapiens
agcgagcgagcagagcacatcgctgcgggctcacaaagcggccagacgctcggcggcggcgtgtggcaggagcgcaggggcgcgagccggcgatcagccttcccggcgaccgtgccgcgggagctcgagcaactcggactaggggacccgggccggcccccaagatgccggcgatcgcggtgttggcggcggccgccgcggcgtggtgcttcctccaagtcgagagccggcacctggacgcgctcgccggaggcgcgggccccaaccacggcaatttcctagacaatgaccagtggctgagcaccgtctcccagtacgaccgggacaagtactggaaccgctttcgagacgatgattatttcagaaactggaatcccaacaagccctttgaccaagccctggacccatccaaggacccctgcctgaaggtaaaatgcagccctcacaaagtgtgtgtgacccaggactaccagaccgccctgtgtgtcagccgcaagcacctgctccccaggcaaaagaaggggaacgtggcccagaaacactgggttggaccttcgaatttggtcaagtgcaagccctgtcccgtggcacagtcagccatggtctgcggctcagatggccactcctacacatccaagtgcaaattggagttccatgcttgttctactggcaaaagcctcgccaccctctgtgatgggccctgtccctgtctcccagagcctgagccaccaaagcacaaggcagaaaggagtgcctgcacagacaaggagttgcggaaccttgcctcccggctgaaggattggtttggagctctccacgaggatgcgaacagagtcatcaagcccaccagctccaacacagcccaaggcaggtttgacactagcatcctgcccatctgcaaggactccctgggctggatgttcaacaagttggacatgaactatgacctcctgcttgacccttcagagatcaatgccatctacctggataagtacgagccctgtatcaagcctcttttcaactcgtgtgactccttcaaggatggcaagctttctaacaatgagtggtgctactgcttccagaagcctggaggtctcccttgccagaatgaaatgaacagaattcagaagctgagtaaggggaaaagcctgttgggggccttcatacctcggtgtaatgaggagggctattacaaagccacacagtgccacggcagcacggggcagtgctggtgtgtggacaaatatgggaatgagttggctggctccaggaaacagggtgctgtgagctgtgaagaggagcaggaaacctcaggggattttggcagtggtgggtccgtggtcctgctggatgacctagaatatgaacgggagctgggaccaaaggacaaagaggggaagctgagggtgcacacccgagccgtgacagaggatgatgaggatgaggatgatgacaaagaggatgaggtcgggtacatatggtagtgcccacaagaaagaggacacaagttttgcacaaaattgcaagtcacttcctattcctgcatttgtatctaagactccaaggcaccaaggtctcttctccattgttgctctctatacccgacctaaggtttggaagacaactgcttgttcccagaggattctgattttgcatatgtttgtatgggagaaagggtgttgtgttttttttttgttgttgtttattttttggatagggaagtcattggcttaattagagcctccttcctttctgtgagatttttccaacaagcatgtgatttacgtggaattctgacagtgcagggagccccaaccctcttaaatgtcaaagaccctttttgattacccacactggtggttattacagcatggttcccagccttacagtgtctaagtgcttctcttgtgtcctgtagatgttgtgaaaaagaaaaaaacaaaaaatacaccacactgtactttttccccctgcccccgttactgccggtgattattattaaaaattagtttttttcacatcattatatctggcttcctataaacaacagccttaattcagtcaagactccctttggggaattcattttattaaaaattggtgtctggatacttccctgtacatgcataaatatgcatgcatgtacagaaagactgtatgtgtgtgccttgcacacacacccatacctctcagaaaaagtgtttgggtatcttaaaaactcgaaaaacaatgataaatttctcagcttgtccagacctggaacaaaatttctggaataagaaatttgtattaaagtccttttttgcactaacagttggctcttgtagcctgcaggctgaggaagtctcttctctgtgcatcagcagagttactgaaagcctctgattgagaaaaaacctccgtctgcctaaatcacttttctcgcagaagccatgcgactcccacacgacacgggcagcttcacaagccatctctttcatttctgcttgaagccccttggctgcagcaatcctgtctgccataggtttcttccttccttacctactcaagggctttttctaaggcatgcacacatatctcctgttctctgagagtaccatggtgttccttaaaagaagaaaatttctaattctgaactcaatgttttgcttttactccctttctactgacaaatcatgataagggcacaaaagctgtacagatttttttttttaaccactcaatcccaaatggaggcctacaaagaacatcgtaataacacatggaagcaaaccctgggtttttaagagcaaattctgtccccccctcactcccccaagtgacaagatactaatgaagaaagttcttcaccatagtgtttgttttaactaaactcattggagtctagttccaaatttggtagggtcatcatctctacattccttaggatttctctccctatcaagctggcccagatacaagtaccaaacagtagtctctgaagttcccccatttccttcagtaccagtctataagctactgtccgccactgattttcatttatcagggtgtcctaatcagaatcagccacccaagcaagcctctctggcccacatatctatctcttgccttcccccatgaacttcagcctgtccacacaaaagccacataaactcaagcaagaaatatgttcagccaaaacatgattatagtggcagctgaccaatcccccatcccaaattgaccatttagatgtaccaactcaccttaaattagcatgttccaatccagtcggcattgcctgaatacagtagcatcatacctatagttggtcttagataagaaatgaactacttgatatagcaaagtcctttggcttcgtaaataaccctgaggttttgtacttactttccccataggaagacagaccataggcaaactctgttttgggatctcaactccatcacctttgtttcaatattttttttctctcttgaacaaaactgagataatttagaaaacaggtgcttaattgcaataaaattactatgaagtatattaaaaatcacgacattgtaaaatctcactttagatcatcaaagaaaaccattgttactatctcctttgagcttaggaaaatgtacaagagaacaaattaaaattgaaaaattgatttcacttagaaaaacttctaggaacagggtgaaccactgattttaatttgcctaattatcttatgacaagtatcaaattaagatgacacttaaagatccttagcattaacttaatgatggagaagagtgctcaatagacagttcccagtaaggtaatgagatgccattttcagagacattctaagaagatattttgattcattaaaacattaaataaaaagccctcctcagattggaacccccaaatcgatggagccacattaataatacttttcatgcctcactttgacatgacagcattcgatttttttaaagatctttaatactttccatgagtactaaagattgtaatgagttaccttatccttagaagtagaatgtttgctttcttcttcttggaaatagtcctccaaaaagtccacttgtaccagtgacaagaagtcacttgtatagtgaccaagtacacataaaatactgattataaaaatattgtaataaaccacttcctcatttgatacaggtattaagctgaatcctcactaattcacttttgaaaagttcttaatgaacagttttattcttattccatgaacagctcttttaatacaatttccttggtatccaacttaaatcccagaattttgttccaccatggttagttatttgccatatgaatgtattcttgtttctaccaatattctaggcatgagaataccttaatactgagttggagattttgtatctgtttctcctcctttacgcccattttcctacccacagcagcaaatgacaacgtgtctgtccaggtctgtccccctgctcatcccaggatgccactcacatttttttcttcttgttaccttgaccacgctgtacagtaacatccaagagcccattctacagtgggtggttttggtctttttataactttttctcaaagtcactgatgtttgttcctgttaaatgtatagcattgtaatgagagcccatcaaatcctgagtgtcagtttgttgtccctattgtagatgaaatagtgatgtagcaaaaacctagtaaattctgaatgcttttccacgtagacttatctggaatgtgaacacaactctttggttaatagtaaatgcttaactgtagtcctgagtaggtgcatttctgtctgtctcaataaattttactttgtctgcaat

SEQ ID NO: 2999 - protein, 439 aa, Homo sapiens; identical to SEQ ID NO: 305

SEQ ID NO: 3000 - DNA, 4850 bp, Homo sapiens
agcgagcgagcagagcacatcgctgcgggctcacaaagcggccagacgctcggcggcggcgtgtggcaggagcgcaggggcgcgagccggcgatcagccttcccggcgaccgtgccgcgggagctcgagcaactcggactaggggacccgggccggcccccaagatgccggcgatcgcggtgttggcggcggccgccgcggcgtggtgcttcctccaagtcgagagccggcacctggacgcgctcgccggaggcgcgggccccaaccacggcaatttcctagacaatgaccagtggctgagcaccgtctcccagtacgaccgggacaagtactggaaccgctttcgagacgaagttgaggatgattatttcagaaactggaatcccaacaagccctttgaccaagccctggacccatccaaggacccctgcctgaaggtaaaatgcagccctcacaaagtgtgtgtgacccaggactaccagaccgccctgtgtgtcagccgcaagcacctgctccccaggcaaaagaaggggaacgtggcccagaaacactgggttggaccttcgaatttggtcaagtgcaagccctgtcccgtggcacagtcagccatggtctgcggctcagatggccactcctacacatccaagtgcaaattggagttccatgcttgttctactggcaaaagcctcgccaccctctgtgatgggccctgtccctgtctcccagagcctgagccaccaaagcacaaggcagaaaggagtgcctgcacagacaaggagttgcggaaccttgcctcccggctgaaggattggtttggagctctccacgaggatgcgaacagagtcatcaagcccaccagctccaacacagcccaaggcaggtttgacactagcatcctgcccatctgcaaggactccctgggctggatgttcaacaagttggacatgaactatgacctcctgcttgacccttcagagatcaatgccatctacctggataagtacgagccctgtatcaagcctcttttcaactcgtgtgactccttcaaggatggcaagctttctaacaatgagtggtgctactgcttccagaagcctggaggtctcccttgccagaatgaaatgaacagaattcagaagctgagtaaggggaaaagcctgttgggggccttcatacctcggtgtaatgaggagggctattacaaagccacacagtgccacggcagcacggggcagtgctggtgtgtggacaaatatgggaatgagttggctggctccaggaaacagggtgctgtgagctgtgaagaggagcaggaaacctcaggggattttggcagtggtgggtccgtggtcctgctggatgacctagaatatgaacgggagctgggaccaaaggacaaagaggggaagctgagggtgcacacccgagccgtgacagaggatgatgaggatgaggatgatgacaaagaggatgaggtcgggtacatatggtagtgcccacaagaaagaggacacaagttttgcacaaaattgcaagtcacttcctattcctgcatttgtatctaagactccaaggcaccaaggtctcttctccattgttgctctctatacccgacctaaggtttggaagacaactgcttgttcccagaggattctgattttgcatatgtttgtatgggagaaagggtgttgtgttttttttttgttgttgtttattttttggatagggaagtcattggcttaattagagcctccttcctttctgtgagatttttccaacaagcatgtgatttacgtggaattctgacagtgcagggagccccaaccctcttaaatgtcaaagaccctttttgattacccacactggtggttattacagcatggttcccagccttacagtgtctaagtgcttctcttgtgtcctgtagatgttgtgaaaaagaaaaaaacaaaaaatacaccacactgtactttttccccctgcccccgttactgccggtgattattattaaaaattagtttttttcacatcattatatctggcttcctataaacaacagccttaattcagtcaagactccctttggggaattcattttattaaaaattggtgtctggatacttccctgtacatgcataaatatgcatgcatgtacagaaagactgtatgtgtgtgccttgcacacacacccatacctctcagaaaaagtgtttgggtatcttaaaaactcgaaaaacaatgataaatttctcagcttgtccagacctggaacaaaatttctggaataagaaatttgtattaaagtccttttttgcactaacagttggctcttgtagcctgcaggctgaggaagtctcttctctgtgcatcagcagagttactgaaagcctctgattgagaaaaaacctccgtctgcctaaatcacttttctcgcagaagccatgcgactcccacacgacacgggcagcttcacaagccatctctttcatttctgcttgaagccccttggctgcagcaatcctgtctgccataggtttcttccttccttacctactcaagggctttttctaaggcatgcacacatatctcctgttctctgagagtaccatggtgttccttaaaagaagaaaatttctaattctgaactcaatgttttgcttttactccctttctactgacaaatcatgataagggcacaaaagctgtacagatttttttttttaaccactcaatcccaaatggaggcctacaaagaacatcgtaataacacatggaagcaaaccctgggtttttaagagcaaattctgtccccccctcactcccccaagtgacaagatactaatgaagaaagttcttcaccatagtgtttgttttaactaaactcattggagtctagttccaaatttggtagggtcatcatctctacattccttaggatttctctccctatcaagctggcccagatacaagtaccaaacagtagtctctgaagttcccccatttccttcagtaccagtctataagctactgtccgccactgattttcatttatcagggtgtcctaatcagaatcagccacccaagcaagcctctctggcccacatatctatctcttgccttcccccatgaacttcagcctgtccacacaaaagccacataaactcaagcaagaaatatgttcagccaaaacatgattatagtggcagctgaccaatcccccatcccaaattgaccatttagatgtaccaactcaccttaaattagcatgttccaatccagtcggcattgcctgaatacagtagcatcatacctatagttggtcttagataagaaatgaactacttgatatagcaaagtcctttggcttcgtaaataaccctgaggttttgtacttactttccccataggaagacagaccataggcaaactctgttttgggatctcaactccatcacctttgtttcaatattttttttctctcttgaacaaaactgagataatttagaaaacaggtgcttaattgcaataaaattactatgaagtatattaaaaatcacgacattgtaaaatctcactttagatcatcaaagaaaaccattgttactatctcctttgagcttaggaaaatgtacaagagaacaaattaaaattgaaaaattgatttcacttagaaaaacttctaggaacagggtgaaccactgattttaatttgcctaattatcttatgacaagtatcaaattaagatgacacttaaagatccttagcattaacttaatgatggagaagagtgctcaatagacagttcccagtaaggtaatgagatgccattttcagagacattctaagaagatattttgattcattaaaacattaaataaaaagccctcctcagattggaacccccaaatcgatggagccacattaataatacttttcatgcctcactttgacatgacagcattcgatttttttaaagatctttaatactttccatgagtactaaagattgtaatgagttaccttatccttagaagtagaatgtttgctttcttcttcttggaaatagtcctccaaaaagtccacttgtaccagtgacaagaagtcacttgtatagtgaccaagtacacataaaatactgattataaaaatattgtaataaaccacttcctcatttgatacaggtattaagctgaatcctcactaattcacttttgaaaagttcttaatgaacagttttattcttattccatgaacagctcttttaatacaatttccttggtatccaacttaaatcccagaattttgttccaccatggttagttatttgccatatgaatgtattcttgtttctaccaatattctaggcatgagaataccttaatactgagttggagattttgtatctgtttctcctcctttacgcccattttcctacccacagcagcaaatgacaacgtgtctgtccaggtctgtccccctgctcatcccaggatgccactcacatttttttcttcttgttaccttgaccacgctgtacagtaacatccaagagcccattctacagtgggtggttttggtctttttataactttttctcaaagtcactgatgtttgttcctgttaaatgtatagcattgtaatgagagcccatcaaatcctgagtgtcagtttgttgtccctattgtagatgaaatagtgatgtagcaaaaacctagtaaattctgaatgcttttccacgtagacttatctggaatgtgaacacaactctttggttaatagtaaatgcttaactgtagtcctgagtaggtgcatttctgtctgtctcaataaattttactttgtctgcaat

SEQ ID NO: 3001 - protein, 442 aa, Homo sapiens
MPAIAVLAAAAAAWCFLQVESRHLDALAGGAGPNHGNFLDNDQWLSTVSQYDRDKYWNRFRDEVEDDYFRNWNPNKPFDQALDPSKDPCLKVKCSPHKVCVTQDYQTALCVSRKHLLPRQKKGNVAQKHWVGPSNLVKCKPCPVAQSAMVCGSDGHSYTSKCKLEFHACSTGKSLATLCDGPCPCLPEPEPPKHKAERSACTDKELRNLASRLKDWFGALHEDANRVIKPTSSNTAQGRFDTSILPICKDSLGWMFNKLDMNYDLLLDPSEINAIYLDKYEPCIKPLFNSCDSFKDGKLSNNEWCYCFQKPGGLPCQNEMNRIQKLSKGKSLLGAFIPRCNEEGYYKATQCHGSTGQCWCVDKYGNELAGSRKQGAVSCEEEQETSGDFGSGGSVVLLDDLEYERELGPKDKEGKLRVHTRAVTEDDEDEDDDKEDEVGYIW

SEQ ID NO: 3002 - DNA, 2052 bp, Homo sapiens
gtagatgagtcccccattcgtgagaggggtccctgggtctagaggcgcgacaggcgccccaggtgcgcgagcgctgcccgtgcccgccgcggggtccccgcctccgggctggggcgctgggacgcctgggtgcccggggctcgcggccgcccgccctcttcgctcatcgccctgcgcgccctgccccgcagatgccggcgatcgcggtgttggcggcggccgccgcggcgtggtgcttcctccaagtcgagagccggcacctggacgcgctcgccggaggcgcgggccccaaccacggcaatttcctagacaatgaccagtggctgagcaccgtctcccagtacgaccgggacaagtactggaaccgctttcgagacgatgattatttcagaaactggaatcccaacaagccctttgaccaagccctggacccatccaaggacccctgcctgaaggtaaaatgcagccctcacaaagtgtgtgtgacccaggactaccagaccgccctgtgtgtcagccgcaagcacctgctccccaggcaaaagaaggggaacgtggcccagaaacactgggttggaccttcgaatttggtcaagtgcaagccctgtcccgtggcacagtcagccatggtctgcggctcagatggccactcctacacatccaagtgcaaattggagttccatgcttgttctactggcaaaagcctcgccaccctctgtgatgggccctgtccctgtctcccagagcctgagccaccaaagcacaaggcagaaaggagtgcctgcacagacaaggagttgcggaaccttgcctcccggctgaaggattggtttggagctctccacgaggatgcgaacagagtcatcaagcccaccagctccaacacagcccaaggcaggtttgacactagcatcctgcccatctgcaaggactccctgggctggatgttcaacaagttggacatgaactatgacctcctgcttgacccttcagagatcaatgccatctacctggataagtacgagccctgtatcaagcctcttttcaactcgtgtgactccttcaaggatggcaagctttctaacaatgagtggtgctactgcttccagaagcctggaggtctcccttgccagaatgaaatgaacagaattcagaagctgagtaaggggaaaagcctgttgggggccttcatacctcggtgtaatgaggagggctattacaaagccacacagtgccacggcagcacggggcagtgctggtgtgtggacaaatatgggaatgagttggctggctccaggaaacagggtgctgtgagctgtgaagaggagcaggaaacctcaggggattttggcagtggtgggtccgtggtcctgctggatgacctagaatatgaacgggagctgggaccaaaggacaaagaggggaagctgagggtgcacacccgagccgtgacagaggatgatgaggatgaggatgatgacaaagaggatgaggtcgggtacatatggtagtgcccacaagaaagaggacacaagttttgcacaaaattgcaagtcacttcctattcctgcatttgtatctaagactccaaggcaccaaggtctcttctccattgttgctctctatacccgacctaaggtttggaagacaactgcttgttcccagaggattctgattttgcatatgtttgtatgggagaaagggtgttgtgttttttttttgttgttgtttattttttggatagggaagtcattggcttaattagagcctccttcctttctgtgagatttttccaacaagcatgtgatttacgtggaattctgacagtgcagggagccccaaccctcttaaatgtcaaagaccctttttgattacccacactggtggttattacagcatggttcccagccttacagtgtctaagtgcttctcttgtgtcctgtagatgttgtgaaaaagaaaaaaacaaaaaatacaccacactgtactttttccccctgcccccgttactgccggtgattattattaaaaattagtttttttcacatcatt

SEQ ID NO: 3003 - protein, 439 aa, Homo sapiens; identical to SEQ ID NO: 305

SEQ ID NO: 3004 - DNA, 2034 bp, Homo sapiens
agcgagcgagcagagcacatcgctgcgggctcacaaagcggccagacgctcggcggcggcgtgtggcaggagcgcaggggcgcgagccggcgatcagccttcccggcgaccgtgccgcgggagctcgagcaactcggactaggggacccgggccggcccccaagatgccggcgatcgcggtgttggcggcggccgccgcggcgtggtgcttcctccaagtcgagagccggcacctggacgcgctcgccggaggcgcgggccccaaccacggcaatttcctagacaatgaccagtggctgagcaccgtctcccagtacgaccgggacaagtactggaaccgctttcgagacgaagttgaggatgattatttcagaaactggaatcccaacaagccctttgaccaagccctggacccatccaaggacccctgcctgaaggtaaaatgcagccctcacaaagtgtgtgtgacccaggactaccagaccgccctgtgtgtcagccgcaagcacctgctccccaggcaaaagaaggggaacgtggcccagaaacactgggttggaccttcgaatttggtcaagtgcaagccctgtcccgtggcacagtcagccatggtctgcggctcagatggccactcctacacatccaagtgcaaattggagttccatgcttgttctactggcaaaagcctcgccaccctctgtgatgggccctgtccctgtctcccagagcctgagccaccaaagcacaaggcagaaaggagtgcctgcacagacaaggagttgcggaaccttgcctcccggctgaaggattggtttggagctctccacgaggatgcgaacagagtcatcaagcccaccagctccaacacagcccaaggcaggtttgacactagcatcctgcccatctgcaaggactccctgggctggatgttcaacaagttggacatgaactatgacctcctgcttgacccttcagagatcaatgccatctacctggataagtacgagccctgtatcaagcctcttttcaactcgtgtgactccttcaaggatggcaagctttctaacaatgagtggtgctactgcttccagaagcctggaggtctcccttgccagaatgaaatgaacagaattcagaagctgagtaaggggaaaagcctgttgggggccttcatacctcggtgtaatgaggagggctattacaaagccacacagtgccacggcagcacggggcagtgctggtgtgtggacaaatatgggaatgagttggctggctccaggaaacagggtgctgtgagctgtgaagaggagcaggaaacctcaggggattttggcagtggtgggtccgtggtcctgctggatgacctagaatatgaacgggagctgggaccaaaggacaaagaggggaagctgagggtgcacacccgagccgtgacagaggatgatgaggatgaggatgatgacaaagaggatgaggtcgggtacatatggtagtgcccacaagaaagaggacacaagttttgcacaaaattgcaagtcacttcctattcctgcatttgtatctaagactccaaggcaccaaggtctcttctccattgttgctctctatacccgacctaaggtttggaagacaactgcttgttcccagaggattctgattttgcatatgtttgtatgggagaaagggtgttgtgttttttttttgttgttgtttattttttggatagggaagtcattggcttaattagagcctccttcctttctgtgagatttttccaacaagcatgtgatttacgtggaattctgacagtgcagggagccccaaccctcttaaatgtcaaagaccctttttgattacccacactggtggttattacagcatggttcccagccttacagtgtctaagtgcttctcttgtgtcctgtagatgttgtgaaaaagaaaaaaacaaaaaatacaccacactgtactttttccccctgcccccgttactgccggtgattattattaaaaattagtttttttcacatcatt

SEQ ID NO: 3005 - protein, 442 aa, Homo sapiens; identical to SEQ ID NO: 3001

SEQ ID NO: 3006 - DNA, 542 bp, Homo sapiens
taggtcctcaccagacacagaatctgccagtaccctgaccttggattttcgagcctccagaactgtcaatgtcactgttccgaagctagacttgcagttcactgggaagcatgacaccacagcacctccagctgtggacgcatcatggacaagccaggctgagaggagaacttctcattacttgcagcacagcaacattgggttcaatgtatgcccatgaaaaacctcatttaagagaatgccttggaaaggtgccaaggtccccaaactaattaactttcatctctcctggccctctgcaccctctctccatgaggaacattaaacatagaacatcagcttgagaacactctatttaaagcaaaagtccttctaaagatagccttgaacgtccatctaaatcatcctaagtccattttctggcccagaatccacaaggccagcgcccccgatgggccctactatggtggcttatatccataaagaatgtctttcacggttcattggttggattaatctgatataaagtgtctaaactgaaa

SEQ ID NO: 3007 - protein, 53 aa, Homo sapiens
MTPQHLQLWTHHGQARLRGELLITCSTATLGSMYAHEKPHLRECLGKVPRSPN

SEQ ID NO: 3008 - DNA, 566 bp, Homo sapiens
gcttttttgctggtagacgcacaccatcacatcctacataatatttagctctgaggcgtttccagatgggaagtgcgtttctgtattttcatagccgtgttctctacgtgaatggactggcgtgaagctgggggctgacggctggcagggcagaacaacttccagtaaaagaaggcactgaggtttaagtgctacgtgggagcagttgccgatttttgcaatgggaggctgcatagattcaaggacttccttgagtgctccaggagcttgtcattccagagacagagcagcccagaagtcctgggatttacacctctagtagaaaccctcaaccagagaaggatggaagtcaatgggcagagtgctcgggagacctttacctgttttacctgattacatcctctgaggtatgtgccatttatacctggggaaactgaggctcagaaaaatgaccttgtctgtggtcacacagctggtaaggggtaggaatggaatttaaacccagttgtctaacttcagggcccacatttcagccacaactgaggtttttcctaacctaaccccat

SEQ ID NO: 3009 - protein, 32 aa, Homo sapiens
MGGCIDSRTSLSAPGACHSRDRAAQKSWDLHL

SEQ ID NO: 3010 - DNA, 358 bp, Homo sapiens
cgcacaccatcacatcctacataatatttagctctgaggcgtttccagatgggaagtgcgtttctgtattttcatagccgtgttctctacgtgaatggactggcgtgaagctgggggctgacggctggcagggcagaacaacttccagtaaaagaaggcactgaggtttaagtgctacgtgggagcagttgccgatttttgcaatgggaggctgcatagattcaagtgtgagaattcgaagagattcaaagactatatcaccaccatggtcttgccagaatctgccctctgagtcatttcttaatctactgattatctgtagaaccagccttatataaacaaggaagcatctagcagg

SEQ ID NO: 3011 - protein, 44 aa, Homo sapiens
MGGCIDSSVRIRRDSKTISPPWSCQNLPSESFLNLLIICRTSLI

SEQ ID NO: 3012 - DNA, 4855 bp, Homo sapiens
atcgcctcctccctccccaagatggcgtccttgctgcagtcggaccgggttctctatctagtccagggagaaaagaaggttcgggccccgctctcgcaactctacttctgccgctattgtagcgaactgcggtcgctggaatgtgtgtctcacgaggtaacagagtcgccctatagcgagtatgtggggtggggggggcgcggcgttcatgctagtcactgccaccggaaggctggagctattttccttccttactgattggttatgtcttccgtcactcgggtttgcctgcgatttaatttgcttctaatctgtcacttggaaaggaggagcagcctcgggtgggactgagcggatcttctggttctagagcggcctctgattggacaaacttgacttagggaccgtgtctgtctgcgatggggcttggtaattgggtggactacggagaaaggtctgggggtgcttagttcaggccacttaaggggcgaaaaactgcctttccaggatttattgcgaggatggagggaggcgcaggcgttctcattcatagttctcccatcctgaaagttctgttcctcttttgtccagaaactgggccctcgtcagactgccttgccctgttcctgactcaggccaaggcctgcagccgggaagaggttggggcggcgtgagttatgtgaaaagcgctcagaatacagtatgtcatgtaagaagctgaaagtgtatttatggagctagaggacaatgctgtccttccctggcacaagtgggcgtccgaagttggatttttcaaaaagaagaccccggccagtaaaaagtcaccaaataacaaaaccccaaaacttctgcagcgcttggcacatcttgtttattcagtaagctttagggattaaaaggtggactcccattattgtcccagttgtttagaaaatatgccatcggctgaagccaaactaaaaaagaatagatgtgccaattgttttgactgtcctggctgcatgcacaccctctctactcgggccacgagcatctccacacagcttccagatgacccagccaagaccaccatgaagaaagcctattacctggcatgtggattttgtcgctggacgtctagagatgtgggcatggcagacaaatctgtagctagtggcggttggcaggaacctgaaaatcctcacacacaacggatgaacaaattgattgaatattaccagcagcttgctcagaaagagaaggttgagcgagatcgcaagaaactggcacgacgtagaaactatatgcctctggctttttcggacaaatatggtcttggaaccaggcttcagcgaccacgagctggtgcatccatcagtacccttgccggactttcccttaaagaaggagaggatcagaaagagataaagattgagccagctcaggctgtggatgaagtggaacctctacctgaagactattatacaagaccagtaaatttaacagaggtaacaacccttcagcagcgtctgttacagcctgacttccagccagtctgtgcttcacagctctatcctcgccacaaacatcttctgatcaaacggtccctgcgctgccgtaaatgtgaacataatttgagcaagccagaatttaacccaacgtcaatcaaattcaaaatccagctggtcgctgtcaattatattccagaagtgagaatcatgtcaattcccaaccttcgctacatgaaggagagccaggtcctcctgactcttacaaatccagttgagaacctcacccatgtgactctcttcgagtgtgaggagggggaccctgatgatatcaacagcactgctaaggtggtggtgcctcccaaagagctcgttttagctggcaaggatgcagcagcagagtacgatgagttggcagaacctcaagactttcaggacgatcctgacattatagccttcagaaaggccaacaaagtgggtattttcatcaaagttacaccacagcgtgaggagggtgaagtgaccgtgtgcttcaagatgaagcatgattttaaaaacctggcagcccccattcgccccattgaagaaagtgaccagggaacagaagtcatctggctcacccagcatgtggaacttagcttgggcccacttcttccttaaaaggttccactggagggcagatcccaaaggacagtatcaccgtaaacctgcgttaaaatgtggaagctgctgcttcattaggccttgtttataacgatgtacccatgcactacggaattctattgctaagaaagtgggagcataggcaaggcattgggaacacagggtagctgctgttgctcttgctctcacccctgttgacaccagtaagtctgtgtctccctcactgaaccctgcacgttgagtaacagcagcataattccatcctaggaaaggggatgggtgttccttggaatggcattgtatttaccacctgagaaactctgtactgtctcttgatctgatctcactaaggatcacaatgtcacagatgaaacttaaatgataacccaaaggtagacctgctgttaatgatccagcattggtcacaatgtaccaactgctttctgcattccgttaaatatcatctaacagtctaaaacatatcccttcattgccataatggctgccattttgccatagatttccatataactgaaaaactgaattgtcactttatctttagtatcatgatgattggaaaaacctgtgaagttgttaaggcactctcatttgccctctttttctaagtgaatacaggacacgtattagttgttcttaatttttttcccagtaaaatatggatcttttaagaagaatttgagaagcaaacaattacatgtcatgtcaagggggtagcagattccattcgttttcaatattgccacaatacccagggattaatgctgccacaggggggcaatctttatttgtcttacttcctaccccttccctgttctgcctctttaactcagttaagttgttctgtttgggacctggaaaagaacccaaagaaaacctgagtggacaggttcatttctggaatgcagaaaacattttaaaggctagatttttagaatattctcaactagcattctttccattgatttgaaggggaaattaactattataatctcttgaatccaaaactggatattaagaactttcccccttactaagtttaagacttttgtcatgtggtgagtcaaataagaccattttgattgtaaaccataaaatagttcagcaagtagcccacagttctggcctaacagcagacttgctgttttcacttggtatcctggagttgggttgctaaccttaatttctatgatgttttctaaaatgaaacttgataaagtagaccaccagctgcaccgtgttttctgtaaaagtattgttagtaagtggccaagagacttgaggaaaatacagattttttgtttaccttggtcttgttttaagtcttaaaaaattaaagataacattataatgtagaatacagatgggacatagtccttgtaagcttcccttgaaaatgttttaaatatttaggaagcttttaaaagacactaaattgtactctaaaagacactaaattgtactaattgtacaaaggtcaagccaattttatgaaacagtcctacagagtaatatatgtgatgcagtgtaagaaggaaaatactcatctctaacattatggtaataacatttagcctcttaggagttggagcagggggatgggtaattacagatttgcagactatagaaagagtttcatttttttgtgaccccacagagtctcaaatttttatttcactacctgctagagcctactgtgaaatcactgctccatatttgccagtggaggaaatgggcatagagtagagaatagcttcatatgtttacacgtttgcatagactacacacatgtcatgcgtttatggcaggtagctggtatttattccccaaagtaataatgttgaagtatgggtctcatcattcccatacacagaaacacaaaacactttgatcataaacttttttcttcagaagccaaactaacttgcagaataatagagccactggtttaatgtttcctcaagataggttttagtgtaagctagtattctgtgtgttcgtagaaatgattcaatacctgcagctggtgaattaggaattgtatttgttgccttttttatattagatgaggtgcaaaaattttaatgctagtcagtatgcaccaccacaggaaagttagatcccattagcacttgaaactacagctttggaaacttaggctaagttaatttggatttgttacttgattcacctactgaccttttcttttgtttgaagtgcttatcagcataatgagctaagtgtcatgcatatttgtgaagaaacaccctttttggtcccttttgggacagagaggtactccttgatctttatgaatgacaggttactgttttgccttattgcttaacttaatgtagtgaaataaagcagacaaagcttgagcgtgtcttttgtttgctctcatgtagatactaagtagcatggctcagagccaaaagacaagcgtgaagttaagagagttggctaagagagttggtggggcatgctcccttccattccttaaatgaagtaatctaaaatctcttagcaggttagttcaccataatatataagtagatgttgctttgagcttcttatatacatattcacagaaccattatataaatgttgttagacctctaccagtttttatcctgggtcattgcttctaaagatatcctttacaatatacacagtggtctgactcc

SEQ ID NO: 3013 - protein, 403 aa, Homo sapiens
MPSAEAKLKKNRCANCFDCPGCMHTLSTRATSISTQLPDDPAKTTMKKAYYLACGFCRWTSRDVGMADKSVASGGWQEPENPHTQRMNKLIEYYQQLAQKEKVERDRKKLARRRNYMPLAFSDKYGLGTRLQRPRAGASISTLAGLSLKEGEDQKEIKIEPAQAVDEVEPLPEDYYTRPVNLTEVTTLQQRLLQPDFQPVCASQLYPRHKHLLIKRSLRCRKCEHNLSKPEFNPTSIKFKIQLVAVNYIPEVRIMSIPNLRYMKESQVLLTLTNPVENLTHVTLFECEEGDPDDINSTAKVVVPPKELVLAGKDAAAEYDELAEPQDFQDDPDIIAFRKANKVGIFIKVTPQREEGEVTVCFKMKHDFKNLAAPIRPIEESDQGTEVIWLTQHVELSLGPLLP

SEQ ID NO: 3014 - DNA, 4554 bp, Homo sapiens
atcgcctcctccctccccaagatggcgtccttgctgcagtcggaccgggttctctatctagtccagggagaaaagaaggttcgggccccgctctcgcaactctacttctgccgctattgtagcgaactgcggtcgctggaatgtgtgtctcacgaggtaacagagtcgccctatagcgagtatgtggggtggggggggcgcggcgttcatgctagtcactgccaccggaaggctggagctattttccttccttactgattggttatgtcttccgtcactcgggtttgcctgcgatttaatttgcttctaatctgtcacttggaaaggaggagcagcctcgggtgggactgagcggatcttctggttctagagcggcctctgattggacaaacttgacttagggaccgtgtctgtctgcgatggggcttggtaattgggtggactacggagaaaggtctgggggtgcttagttcaggccacttaaggggcgaaaaactgcctttccaggatttattgcgaggatggagggaggcgcaggcgttctcattcatagttctcccatcctgaaagttctgttcctcttttgtccagaaactgggccctcgtcagactgccttgccctgttcctgactcaggccaaggcctgcagccgggaagaggttggggcggcgtgagttatgtgaaaagcgctcagaatacagtatgtcatgtaagaagctgaaagtgtatttatggagctagaggacaatgctgtccttccctggcacaagtgggcgtccgaagttggatttttcaaaaagaagaccccggccagtaaaaagtcaccaaataacaaaaccccaaaacttctgcagcgcttggcacatcttgtttattcagtaagctttagggattaaaaggtggactcccattattgtcccagttgtttagaaaatatgccatcggctgaagccaaactaaaaaagaatagatgtgccaattgttttgactgtcctggctgcatgcacaccctctctactcgggccacgagcatctccacacagcttccagatgacccagccaagaccaccatgaagaaagcctattacctggcatgtggattttgtcgctggacgtctagagatgtgggcatggcagacaaatctgtagctagtggcggttggcaggaacctgaaaatcctcacacacaacggatgaacaaattgattgaatattaccagcagcttgctcagaaagagaaggttgagcgagatcgcaagaaactggcacgacgtagaaactatatgcctctggctttttcggacaaatatggtcttggaaccaggcttcagcgaccacgagctggtgcatccatcagtacccttgccggactttcccttaaagaaggagaggatcagaaagagataaagattgagccagctcaggctgtggatgaagtggaacctctacctgaagactattatacaagaccagtaaatttaacagaggtaacaacccttcagcagcgtctgttacagcctgacttccagccagtctgtgcttcacagctctatcctcgccacaaacatcttctgatcaaacggtccctgcgctgccgtaaatgtgaacataatttgagcaagccagaatttaacccaacgtcaatcaaattcaaaatccagctggtcgctgtcaattatattccagaagtgagaatcatgtcaattcccaaccttcgctacatgaaggagagccaggtcctcctgactcttacaaatccagttgagaacctcacccatgtgactctcttcgagtgtgaggagggggaccctgatgatatcaacagcactgctaaggtggtggtgcctcccaaagagctcgttttagctggcaaggatgcagcagcagagtacgatgagttggcagaacctcaagactttcaggacgatcctgacattatagccttcagaaaggccaacaaagtgggtattttcatcaaagttacaccacagcgtgaggagggtgaagtgaccgtgtgcttcaagatgaagcatgattttaaaaacctggcagcccccattcgccccattgaagaaagtgaccagggaacagaagtcatctggctcacccagcatgtggaacttagcttgggcccacttcttccttaaaaggttccactggagggcagatcccaaaggacagtatcaccgtaaacctgcgttaaaatgtggaagctgctgcttcattaggccttgtttataacgatgtacccatgcactacggaattctattgctaagaaagtgggagcataggcaaggcattgggaacacagggtagctgctgttgctcttgctctcacccctgttgacaccagtaagtctgtgtctccctcactgaaccctgcacgttgagtaacagcagcataattccatcctaggaaaggggatgggtgttccttggaatggcattgtatttaccacctgagaaactctgtactgtctcttgatctgatctcactaaggatcacaatgtcacagatgaaacttaaatgataacccaaaggtagacctgctgttaatgatccagcattggtcacaatgtaccaactgctttctgcattccgttaaatatcatctaacagtctaaaacatatcccttcattgccataatggctgccattttgccatagatttccatataactgaaaaactgaattgtcactttatctttagtatcatgatgattggaaaaacctgtgaagttgttaaggcactctcatttgccctctttttctaagtgaatacaggacacgtattagttgttcttaatttttttcccagtaaaatatggatcttttaagaagaatttgagaagcaaacaattacatgtcatgtcaagggggtagcagattccattcgttttcaatattgccacaatacccagggattaatgctgccacaggggggcaatctttatttgtcttacttcctaccccttccctgttctgcctctttaactcagttaagttgttctgtttgggacctggaaaagaacccaaagaaaacctgagtggacaggttcatttctggaatgcagaaaacattttaaaggctagatttttagaatattctcaactagcattctttccattgatttgaaggggaaattaactattataatctcttgaatccaaaactggatattaagaactttcccccttactaagtttaagacttttgtcatgtggtgagtcaaataagaccattttgattgtaaaccataaaatagttcagcaagtagcccacagttctggcctaacagcagacttgctgttttcacttggtatcctggagttgggttgctaaccttaatttctatgatgttttctaaaatgaaacttgataaagtagaccaccagctgcaccgtgttttctgtaaaagtattgttagtaagtggccaagagacttgaggaaaatacagattttttgtttaccttggtcttgttttaagtcttaaaaaattaaagataacattataatgtagaatacagatgggacatagtccttgtaagcttcccttgaaaatgttttaaatatttaggaagcttttaaaagacactaaattgtactctaaaagacactaaattgtactaattgtacaaaggtcaagccaattttatgaaacagtcctacagagtaatatatgtgatgcagtgtaagaaggaaaatactcatctctaacattatggtaataacatttagcctcttaggagttggagcagggggatgggtaattacagatttgcagactatagaaagagtttcatttttttgtgaccccacagagtctcaaatttttatttcactacctgctagagcctactgtgaaatcactgctccatatttgccagtggaggaaatgggcatagagtagagaatagcttcatatgtttacacgtttgcatagactacacacatgtcatgcgtttatggcaggtagctggtatttattccccaaagtaataatgttgaagtatgggtctcatcattcccatacacagaaacacaaaacactttgatcataaacttttttcttcagaagccaaactaacttgcagaataatagagccactggtttaatgtttcctcaagataggttttagtgtaagctagtattctgtgtgttcgtagaaatgattcaatacctgcagctggtgaattaggaattgtatttgttgccttttttatattagatgaggtgcaaaaattttaatgctagtcagtatgcaccaccacaggaaagttagatcccattagcacttgaaactacagctttggaaacttaggctaagttaatttggatttgttacttgattcacctactgaccttttcttttgtttgaagtgcttatcagcataatgagctaagtgtcatgcatatttgtgaagaaacaccctttttggtcccttttgggacagagaggtactccttgatctttatgaatgacaggttactgttttgccttattgcttaacttaatgtagtgaaataaagcagacaaagcttgagcgtg

SEQ ID NO: 3015 - protein, 403 aa, Homo sapiens; identical to SEQ ID NO: 3013

SEQ ID NO: 3016 - DNA, 3906 bp, Homo sapiens
gtgggaaacctaacgtcaaagtctacgtaggaagtcgtagggaaggcagcgaggaagacgctggctctcgggtcacgtgatgcgccgggagcgtcatcgcctcctccctccccaagatggcgtccttgctgcagtcggaccgggttctctatctagtccagggagaaaagaaggttcgggccccgctctcgcaactctacttctgccgctattgtagcgaactgcggtcgctggaatgtgtgtctcacgaggtggactcccattattgtcccagttgtttagaaaatatgccatcggctgaagccaaactaaaaaagaatagatgtgccaattgttttgactgtcctggctgcatgcacaccctctctactcgggccacgagcatctccacacagcttccagatgacccagccaagaccaccatgaagaaagcctattacctggcatgtggattttgtcgctggacgtctagagatgtgggcatggcagacaaatctgtagctagtggcggttggcaggaacctgaaaatcctcacacacaacggatgaacaaattgattgaatattaccagcagcttgctcagaaagagaaggttgagcgagatcgcaagaaactggcacgacgtagaaactatatgcctctggctttttcggacaaatatggtcttggaaccaggcttcagcgaccacgagctggtgcatccatcagtacccttgccggactttcccttaaagaaggagaggatcagaaagagataaagattgagccagctcaggctgtggatgaagtggaacctctacctgaagactattatacaagaccagtaaatttaacagaggtaacaacccttcagcagcgtctgttacagcctgacttccagccagtctgtgcttcacagctctatcctcgccacaaacatcttctgatcaaacggtccctgcgctgccgtaaatgtgaacataatttgagcaagccagaatttaacccaacgtcaatcaaattcaaaatccagctggtcgctgtcaattatattccagaagtgagaatcatgtcaattcccaaccttcgctacatgaaggagagccaggtcctcctgactcttacaaatccagttgagaacctcacccatgtgactctcttcgagtgtgaggagggggaccctgatgatatcaacagcactgctaaggtggtggtgcctcccaaagagctcgttttagctggcaaggatgcagcagcagagtacgatgagttggcagaacctcaagactttcaggacgatcctgacattatagccttcagaaaggccaacaaagtgggtattttcatcaaagttacaccacagcgtgaggagggtgaagtgaccgtgtgcttcaagatgaagcatgattttaaaaacctggcagcccccattcgccccattgaagaaagtgaccagggaacagaagtcatctggctcacccagcatgtggaacttagcttgggcccacttcttccttaaaaggttccactggagggcagatcccaaaggacagtatcaccgtaaacctgcgttaaaatgtggaagctgctgcttcattaggccttgtttataacgatgtacccatgcactacggaattctattgctaagaaagtgggagcataggcaaggcattgggaacacagggtagctgctgttgctcttgctctcacccctgttgacaccagtaagtctgtgtctccctcactgaaccctgcacgttgagtaacagcagcataattccatcctaggaaaggggatgggtgttccttggaatggcattgtatttaccacctgagaaactctgtactgtctcttgatctgatctcactaaggatcacaatgtcacagatgaaacttaaatgataacccaaaggtagacctgctgttaatgatccagcattggtcacaatgtaccaactgctttctgcattccgttaaatatcatctaacagtctaaaacatatcccttcattgccataatggctgccattttgccatagatttccatataactgaaaaactgaattgtcactttatctttagtatcatgatgattggaaaaacctgtgaagttgttaaggcactctcatttgccctctttttctaagtgaatacaggacacgtattagttgttcttaatttttttcccagtaaaatatggatcttttaagaagaatttgagaagcaaacaattacatgtcatgtcaagggggtagcagattccattcgttttcaatattgccacaatacccagggattaatgctgccacaggggggcaatctttatttgtcttacttcctaccccttccctgttctgcctctttaactcagttaagttgttctgtttgggacctggaaaagaacccaaagaaaacctgagtggacaggttcatttctggaatgcagaaaacattttaaaggctagatttttagaatattctcaactagcattctttccattgatttgaaggggaaattaactattataatctcttgaatccaaaactggatattaagaactttcccccttactaagtttaagacttttgtcatgtggtgagtcaaataagaccattttgattgtaaaccataaaatagttcagcaagtagcccacagttctggcctaacagcagacttgctgttttcacttggtatcctggagttgggttgctaaccttaatttctatgatgttttctaaaatgaaacttgataaagtagaccaccagctgcaccgtgttttctgtaaaagtattgttagtaagtggccaagagacttgaggaaaatacagattttttgtttaccttggtcttgttttaagtcttaaaaaattaaagataacattataatgtagaatacagatgggacatagtccttgtaagcttcccttgaaaatgttttaaatatttaggaagcttttaaaagacactaaattgtactctaaaagacactaaattgtactaattgtacaaaggtcaagccaattttatgaaacagtcctacagagtaatatatgtgatgcagtgtaagaaggaaaatactcatctctaacattatggtaataacatttagcctcttaggagttggagcagggggatgggtaattacagatttgcagactatagaaagagtttcatttttttgtgaccccacagagtctcaaatttttatttcactacctgctagagcctactgtgaaatcactgctccatatttgccagtggaggaaatgggcatagagtagagaatagcttcatatgtttacacgtttgcatagactacacacatgtcatgcgtttatggcaggtagctggtatttattccccaaagtaataatgttgaagtatgggtctcatcattcccatacacagaaacacaaaacactttgatcataaacttttttcttcagaagccaaactaacttgcagaataatagagccactggtttaatgtttcctcaagataggttttagtgtaagctagtattctgtgtgttcgtagaaatgattcaatacctgcagctggtgaattaggaattgtatttgttgccttttttatattagatgaggtgcaaaaattttaatgctagtcagtatgcaccaccacaggaaagttagatcccattagcacttgaaactacagctttggaaacttaggctaagttaatttggatttgttacttgattcacctactgaccttttcttttgtttgaagtgcttatcagcataatgagctaagtgtcatgcatatttgtgaagaaacaccctttttggtcccttttgggacagagaggtactccttgatctttatgaatgacaggttactgttttgccttattgcttaacttaatgtagtgaaataaagcagacaaagcttgagcgtg

SEQ ID NO: 3017 - protein, 460 aa, Homo sapiens; identical to SEQ ID NO: 307

SEQ ID NO: 3018 - DNA, 2824 bp, Homo sapiens
gtgggaaacctaacgtcaaagtctacgtaggaagtcgtagggaaggcagcgaggaagacgctggctctcgggtcacgtgatgcgccgggagcgtcatcgcctcctccctccccaagatggcgtccttgctgcagtcggaccgggttctctatctagtccagggagaaaagaaggttcgggccccgctctcgcaactctacttctgccgctattgtagcgaactgcggtcgctggaatgtgtgtctcacgaggtggactcccattattgtcccagttgtttagaaaatatgccatcggctgaagccaaactaaaaaagaatagatgtgccaattgttttgactgtcctggctgcatgcacaccctctctactcgggccacgagcatctccacacagcttccagatgacccagccaagaccaccatgaagaaagcctattacctggcatgtggattttgtcgctggacgtctagagatgtgggcatggcagacaaatctgtagctagtggcggttggcaggaacctgaaaatcctcacacacaacggatgaacaaattgattgaatattaccagcagcttgctcagaaagagaaggttgagcgagatcgcaagaaactggcacgacgtagaaactatatgcctctggctttttcggacaaatatggtcttggaaccaggcttcagcgaccacgagctggtgcatccatcagtacccttgccggactttcccttaaagaaggagaggatcagaaagagataaagattgagccagctcaggctgtggatgaagtggaacctctacctgaagactattatacaagaccagtaaatttaacagaggtaacaacccttcagcagcgtctgttacagcctgacttccagccagtctgtgcttcacagctctatcctcgccacaaacatcttctgatcaaacggtccctgcgctgccgtaaatgtgaacataatttgagcaagccagaatttaacccaacgtcaatcaaattcaaaatccagctggtcgctgtcaattatattccagaagtgagaatcatgtcaattcccaaccttcgctacatgaaggagagccaggtcctcctgactcttacaaatccagttgagaacctcacccatgtgactctcttcgagtgtgaggagggggaccctgatgatatcaacagcactgctaaggtggtggtgcctcccaaagagctcgttttagctggcaaggatgcagcagcagagtacgatgagttggcagaacctcaagactttcaggacgatcctgacattatagccttcagaaaggccaacaaagtgggtattttcatcaaagttacaccacagcgtgaggagggtgaagtgaccgtgtgcttcaagatgaagcatgattttaaaaacctggcagcccccattcgccccattgaagaaagtgaccagggaacagaagtcatctggctcacccagcatgtggaacttagcttgggcccacttcttccttaaaaggttccactggagggcagatcccaaaggacagtatcaccgtaaacctgcgttaaaatgtggaagctgctgcttcattaggccttgtttataacgatgtacccatgcactacggaattctattgctaagaaagtgggagcataggcaaggcattgggaacacagggtagctgctgttgctcttgctctcacccctgttgacaccagtaagtctgtgtctccctcactgaaccctgcacgttgagtaacagcagcataattccatcctaggaaaggggatgggtgttccttggaatggcattgtatttaccacctgagaaactctgtactgtctcttgatctgatctcactaaggatcacaatgtcacagatgaaacttaaatgataacccaaaggtagacctgctgttaatgatccagcattggtcacaatgtaccaactgctttctgcattccgttaaatatcatctaacagtctaaaacatatcccttcattgccataatggctgccattttgccatagatttccatataactgaaaaactgaattgtcactttatctttagtatcatgatgattggaaaaacctgtgaagttgttaaggcactctcatttgccctctttttctaagtgaatacaggacacgtattagttgttcttaatttttttcccagtaaaatatggatcttttaagaagaatttgagaagcaaacaattacatgtcatgtcaagggggtagcagattccattcgttttcaatattgccacaatacccagggattaatgctgccacaggggggcaatctttatttgtcttacttcctaccccttccctgttctgcctctttaactcagttaagttgttctgtttgggacctggaaaagaacccaaagaaaacctgagtggacaggttcatttctggaatgcagaaaacattttaaaggctagatttttagaatattctcaactagcattctttccattgatttgaaggggaaattaactattataatctcttgaatccaaaactggatattaagaactttcccccttactaagtttaagacttttgtcatgtggtgagtcaaataagaccattttgattgtaaaccataaaatagttcagcaagtagcccacagttctggcctaacagcagacttgctgttttcacttggtatcctggagttgggttgctaaccttaatttctatgatgttttctaaaatgaaacttgataaagtagaccaccagctgcaccgtgttttctgtaaaagtattgttagtaagtggccaagagacttgaggaaaatacagattttttgttt

SEQ ID NO: 3019 - protein, 460 aa, Homo sapiens; identical to SEQ ID NO: 307

SEQ ID NO: 3020 - DNA, 500 bp, Homo sapiens
tgaatcatgtgatgcttgccaaaaccgctgaggacatgggaaagaagttctacattgtctggaccaagctagacatggacctcagcacaggtgccctcccagaagtgcagctactgcagatcagagaaaatgtcctggaaaatctccagaaggagcggagctctagaaaccaacaagtgtacccaaaccacagccacgtacctcttgcttgctgaaaggatcctgagagaaaagcaagacaaagaaatacagatcagctccgcaagccctagaaatagcaaggcccagctcagctggcctgccatgagaaatacctcaagagtactccagagaattccacaaggcccagaaatattccttccagaagaaaactatacgtaaatctgctcaggatattcaacagctagccagtgcatatgacatatactgggtacttaagaaacgtttgttaaatgaatcatgattataaagaaaaaataaattaaaacttatgtttagtt

SEQ ID NO: 3021 - protein, 83 aa, Homo sapiens
MSWKISRRSGALETNKCTQTTATYLLLAERILREKQDKEIQISSASPRNSKAQLSWPAMRNTSRVLQRIPQGPEIFLPEENYT

SEQ ID NO: 3022 - DNA, 4015 bp, Homo sapiens
tattatacaaaactaggtgtggatgtagttgtgcacattatagcagaaattatgagaatgatcatttcagattgaacaggaatttactattacaggggttagtatcattcaaggatgtggctgtggatttcacccaggaggagtggcagcaacttgacccttctcagaggaccctgtacagggatgtgatgctggagaactacagccacctggtctcaatggggtatccagtttccaaaccagatgtcatctccaagttggaacaaggagaagagccatggatcataaagggagacatatcaaattggatctatccagatgaatatcaggcagatgggagacaagggaagtgaaatatcaatttatgtttttttaattgattggtgcctgaggtttatgtttctatccttatcaaaatctcctattctttgcttctatgctgagaatttagtagtcactcaacaagtaattgtgaagcctttcagaggagttctatttgttgttgatcctgtctcttgtgtgtatatatatatgtttatatttgttgtctttcctgaaagggttttaaaggcaatagaaggcaaattcctttcaagaacacaagctgtgctttaaaaggcaatattcccagataaatgactgtattaaattaaatgtcaaatacagttactgttttagaagttcagagaaaattaagagtctaaagagatgtgagcgtatttgagaaacatttttcagagcatgcaactgtaactgctctgaatgacataaatgctgatgaggctgaaggaggagggtgaaggcaagcagtgttggagagagagtatatgaacaaaaccttagggtcaggaagatacagcttttctgggagaactttactagttttacttgacatgtatagaaagtagtttattgggagtagtggaatttacgtctgtattctcagtttgactctgatactgaatctgtagcaggatattggatttttctattatttgttagttgttaggaaaatagatggaggagagttaaagtattttgcatacagaagataccttgttttttagagtgatggtaggataataagaatgtgtagcacatgatttataatataaatgaaattaaaaggtgaaaaggggtttctattcagaaagcagaagtgaaatattctagaagaataatcaaaaattagtgatgagaccccactttttcatctcttttaagtttagtttttacatgaatatttctgtttaacattcttgtctgtctattcacctgataacactatatgctgtactgtcttctgagatgacctgtttccatcctttttttgtgagttcatctactatgttggatcatccatttgttctacttctttaccctcttaattgactcttgtgatgactcttaaattgtatcttttcttcttttagacaggaagagtaaccttcacaactcccagtcatgtattttggggacagtttccttccatcataagatactgaaaggagtcacaagggatggttcattgtgctccattttaaaagtctgtcaaggtgatggtcagctgcagagatttctagagaatcaagacaaactcttcaggcaggtcacatttgttaacagcaaaacagtgactgaggcatcagggcataaatataatccactggggaaaatatttcaagagtgcatagaaacagatatatcaatacagagattccataaatatgatgcttttaaaaagaacttaaaaccaaatattgacctaccgagttgttataagagcaattcaagaaaaaaacctgatcagagttttggaggtggaaaatcatctagccagagtgagcccaattctaatcttgagaagattcacaatggagtaataccttttgatgataatcagtgtggaaacgtttttagaaatacacaatcccttattcaatatcagaatgtggaaactaaagagaaaagctgtgtatgtgttacatgtggaaaagcctttgctaagaagtcacaactcattgtacatcaaagaattcatactggaaagaaaccatatgattgtggtgcatgcggaaaagccttcagtgagaagtttcatcttgttgtacatcagagaactcatactggggagaaaccttatgattgttctgaatgtggaaaagccttctctcagaaatcgtcccttattatacatcagagagttcacactggggaaaaaccctatgaatgtagtgaatgcgggaaagccttctcccagaaatcacccctcattatacatcagagaatacatactggggaaaaaccctatgaatgtagagagtgtgggaaggccttttcccagaagtcacagctgattatacaccacagagctcatactggagagaagccgtatgagtgtaccgaatgtgggaaagccttctgtgagaagtcccacctcattatacataaaagaattcacactggtgagaaaccctacaaatgtgctcaatgtgaggaagccttcagcaggaagacagaactcattacacatcagttagttcatactggggaaaaaccttatgaatgtactgaatgtggaaagacattctcccgcaagtcacagctcatcatacatcagagaacacatactggagaaaaaccctataaatgtagtgaatgtggcaaagccttctgccagaagtcacatctcattggacatcagagaattcacacaggagaaaaaccttatatatgtactgaatgtgggaaagccttctctcagaagtcccaccttccgggacaccagcgaattcatacaggagagaaaccttacatatgtgctgaatgtggaaaggccttttctcagaagtcagaccttgttttacatcagaggattcatactggggaaagaccctatcaatgtgctatatgtgggaaggccttcatccagaagtcacaactaactgtacaccagagaattcacacagtggtaaaatcataatgaactggccacagaaaagccttagtattagctcaagccttaataattactagaaacccaattaatttgataagcttggggacaacatcccaatagataaaaatttttaagggaatttgtttctagtttggtgatgcctaacttttccagcaaagatgatggaaaatagttatataaatgaagaacatttttaatatggcatgtaaagcttttaaagttatgaactcagtgatcagcacagcaagttaagcatacagaatattgtcaagttgcatattccttatactacaaaatgataatcagccattgtgaaactgctaatattagcttgtcataattatggccataaactaatttttctataaaagacgtggaagaaagcttaagtaaacaataaaataaaacctatacactattttaagaaggggcttgagcatgacccctaaagctacatgtaaagttcttgtacaaaaaatggaatgataggttgatcagattcagtaaagttgatctgtatgcattttcccatctcaagcatataagttgacctgcatctctggaaggaccttgagattgatgcattttgagcaggtctcccttttactcttcccaactgggaacttggagctgaaaaacattggcactgaggccagatggccttgggtttaatcctggctcagtgcctcacagattgtgtgactttaggcaaacatacttctcctagctgagtattttttatcagtaagtacaaatacaatgcagagctcattttcagttaatattagtactttttaaatctttactctctatcttgaagcattagatgttaagactaatgtgtaaaaaccacgtctgagcttgcttttccctctggacactctgcttttgattgcctatccctataagtggctcattttactgtcttctgatcctggtggccttatttttgctatgttaaggttgtgttttttaatacttggatttattttcatatacttacataaaccgtggtgattgcacataaagaccctg

SEQ ID NO: 3023 - protein, 54 aa, Homo sapiens
MLENYSHLVSMGYPVSKPDVISKLEQGEEPWIIKGDISNWIYPDEYQADGRQGK

SEQ ID NO: 3024 - DNA, 3223 bp, Homo sapiens
acgaagacgaccgggctctcaagatggcggccccatgcggaaacagctccagggagcagccatgttgcttcctgaacaaagcctctgaagatgcggaacgggcaaaaccgcccagtacggaacggcgcagcctcgggagcccggtgtggtgctcgcggacaggaagcaggagagtttgccaatagggatgtgacagcggttcccattaagcggtgatggtggttttgggacctgataatcgagctgggagtcagaggcgggatgtgtgcggtgaaggatgttttgatacccccatataaaataatctgtctgtcatgggagcccccacgtcctctgaaatagttcagctctgtctgcatgacttgtcctgggactgaggaaaatttaccaggggttagtatcattcaaggatgtggctgtggatttcacccaggaggagtggcagcaacttgacccttctcagaggaccctgtacagggatgtgatgctggagaactacagccacctggtctcaatggggtatccagtttccaaaccagatgtcatctccaagttggaacaaggagaagagccatggatcataaagggagacatatcaaattggatctatccagatgaatatcaggcagatgggagacaagggaagaagagtaaccttcacaactcccagtcatgtattttggggacagtttccttccatcataagatactgaaaggagtcacaagggatggttcattgtgctccattttaaaagtctgtcaaggtgatggtcagctgcagagatttctagagaatcaagacaaactcttcaggcaggtcacatttgttaacagcaaaacagtgactgaggcatcagggcataaatataatccactggggaaaatatttcaagagtgcatagaaacagatatatcaatacagagattccataaatatgatgcttttaaaaagaacttaaaaccaaatattgacctaccgagttgttataagagcaattcaagaaaaaaacctgatcagagttttggaggtggaaaatcatctagccagagtgagcccaattctaatcttgagaagattcacaatggagtaataccttttgatgataatcagtgtggaaacgtttttagaaatacacaatcccttattcaatatcagaatgtggaaactaaagagaaaagctgtgtatgtgttacatgtggaaaagcctttgctaagaagtcacaactcattgtacatcaaagaattcatactggaaagaaaccatatgattgtggtgcatgcggaaaagccttcagtgagaagtttcatcttgttgtacatcagagaactcatactggggagaaaccttatgattgttctgaatgtggaaaagccttctctcagaaatcgtcccttattatacatcagagagttcacactggggaaaaaccctatgaatgtagtgaatgcgggaaagccttctcccagaaatcacccctcattatacatcagagaatacatactggggaaaaaccctatgaatgtagagagtgtgggaaggccttttcccagaagtcacagctgattatacaccacagagctcatactggagagaagccgtatgagtgtaccgaatgtgggaaagccttctgtgagaagtcccacctcattatacataaaagaattcacactggtgagaaaccctacaaatgtgctcaatgtgaggaagccttcagcaggaagacagaactcattacacatcagttagttcatactggggaaaaaccttatgaatgtactgaatgtggaaagacattctcccgcaagtcacagctcatcatacatcagagaacacatactggagaaaaaccctataaatgtagtgaatgtggcaaagccttctgccagaagtcacatctcattggacatcagagaattcacacaggagaaaaaccttatatatgtactgaatgtgggaaagccttctctcagaagtcccaccttccgggacaccagcgaattcatacaggagagaaaccttacatatgtgctgaatgtggaaaggccttttctcagaagtcagaccttgttttacatcagaggattcatactggggaaagaccctatcaatgtgctatatgtgggaaggccttcatccagaagtcacaactaactgtacaccagagaattcacacagtggtaaaatcataatgaactggccacagaaaagccttagtattagctcaagccttaataattactagaaacccaattaatttgataagcttggggacaacatcccaatagataaaaatttttaagggaatttgtttctagtttggtgatgcctaacttttccagcaaagatgatggaaaatagttatataaatgaagaacatttttaatatggcatgtaaagcttttaaagttatgaactcagtgatcagcacagcaagttaagcatacagaatattgtcaagttgcatattccttatactacaaaatgataatcagccattgtgaaactgctaatattagcttgtcataattatggccataaactaatttttctataaaagacgtggaagaaagcttaagtaaacaataaaataaaacctatacactattttaagaaggggcttgagcatgacccctaaagctacatgtaaagttcttgtacaaaaaatggaatgataggttgatcagattcagtaaagttgatctgtatgcattttcccatctcaagcatataagttgacctgcatctctggaaggaccttgagattgatgcattttgagcaggtctcccttttactcttcccaactgggaacttggagctgaaaaacattggcactgaggccagatggccttgggtttaatcctggctcagtgcctcacagattgtgtgactttaggcaaacatacttctcctagctgagtattttttatcagtaagtacaaatacaatgcagagctcattttcagttaatattagtactttttaaatctttactctctatcttgaagcattagatgttaagactaatgtgtaaaaaccacgtctgagcttgcttttccctctggacactctgcttttgattgcctatccctataagtggctcattttactgtcttctgatcctggtggccttatttttgctatgttaaggttgtgttttttaatacttggatttattttcatatacttacataaaccgtggtgattgcacataaagaccctg

SEQ ID NO: 3025 - protein, 568 aa, Homo sapiens
MLENYSHLVSMGYPVSKPDVISKLEQGEEPWIIKGDISNWIYPDEYQADGRQGKKSNLHNSQSCILGTVSFHHKILKGVTRDGSLCSILKVCQGDGQLQRFLENQDKLFRQVTFVNSKTVTEASGHKYNPLGKIFQECIETDISIQRFHKYDAFKKNLKPNIDLPSCYKSNSRKKPDQSFGGGKSSSQSEPNSNLEKIHNGVIPFDDNQCGNVFRNTQSLIQYQNVETKEKSCVCVTCGKAFAKKSQLIVHQRIHTGKKPYDCGACGKAFSEKFHLVVHQRTHTGEKPYDCSECGKAFSQKSSLIIHQRVHTGEKPYECSECGKAFSQKSPLIIHQRIHTGEKPYECRECGKAFSQKSQLIIHHRAHTGEKPYECTECGKAFCEKSHLIIHKRIHTGEKPYKCAQCEEAFSRKTELITHQLVHTGEKPYECTECGKTFSRKSQLIIHQRTHTGEKPYKCSECGKAFCQKSHLIGHQRIHTGEKPYICTECGKAFSQKSHLPGHQRIHTGEKPYICAECGKAFSQKSDLVLHQRIHTGERPYQCAICGKAFIQKSQLTVHQRIHTVVKS

SEQ ID NO: 3026 - DNA, 4353 bp, Homo sapiens
acgaagacgaccgggctctcaagatggcggccccatgcggaaacagctccagggagcagccatgttgcttcctgaacaaagcctctgaagatgcggaacgggcaaaaccgcccagtacggaacggcgcagcctcgggagcccggtgtggtgctcgcggacaggaagcaggagagtttgccaatagggatgtgacagcggttcccattaagcggtgatggtggttttgggacctgataatcgagctgggagtcagaggcgggatgtgtgcggtgaaggatgttttgatacccccatataaaataatctgtctgtcatgggagcccccacgtcctctgaaatagttcagctctgtctgcatgacttgtcctgggactgaggaaaatttaccagtcatctggccttttggaagagcaaaaaatgatgaagtcccaggggttagtatcattcaaggatgtggctgtggatttcacccaggaggagtggcagcaacttgacccttctcagaggaccctgtacagggatgtgatgctggagaactacagccacctggtctcaatggggtatccagtttccaaaccagatgtcatctccaagttggaacaaggagaagagccatggatcataaagggagacatatcaaattggatctatccagatgaatatcaggcagatgggagacaagggaagtgaaatatcaatttatgtttttttaattgattggtgcctgaggtttatgtttctatccttatcaaaatctcctattctttgcttctatgctgagaatttagtagtcactcaacaagtaattgtgaagcctttcagaggagttctatttgttgttgatcctgtctcttgtgtgtatatatatatgtttatatttgttgtctttcctgaaagggttttaaaggcaatagaaggcaaattcctttcaagaacacaagctgtgctttaaaaggcaatattcccagataaatgactgtattaaattaaatgtcaaatacagttactgttttagaagttcagagaaaattaagagtctaaagagatgtgagcgtatttgagaaacatttttcagagcatgcaactgtaactgctctgaatgacataaatgctgatgaggctgaaggaggagggtgaaggcaagcagtgttggagagagagtatatgaacaaaaccttagggtcaggaagatacagcttttctgggagaactttactagttttacttgacatgtatagaaagtagtttattgggagtagtggaatttacgtctgtattctcagtttgactctgatactgaatctgtagcaggatattggatttttctattatttgttagttgttaggaaaatagatggaggagagttaaagtattttgcatacagaagataccttgttttttagagtgatggtaggataataagaatgtgtagcacatgatttataatataaatgaaattaaaaggtgaaaaggggtttctattcagaaagcagaagtgaaatattctagaagaataatcaaaaattagtgatgagaccccactttttcatctcttttaagtttagtttttacatgaatatttctgtttaacattcttgtctgtctattcacctgataacactatatgctgtactgtcttctgagatgacctgtttccatcctttttttgtgagttcatctactatgttggatcatccatttgttctacttctttaccctcttaattgactcttgtgatgactcttaaattgtatcttttcttcttttagacaggaagagtaaccttcacaactcccagtcatgtattttggggacagtttccttccatcataagatactgaaaggagtcacaagggatggttcattgtgctccattttaaaagtctgtcaaggtgatggtcagctgcagagatttctagagaatcaagacaaactcttcaggcaggtcacatttgttaacagcaaaacagtgactgaggcatcagggcataaatataatccactggggaaaatatttcaagagtgcatagaaacagatatatcaatacagagattccataaatatgatgcttttaaaaagaacttaaaaccaaatattgacctaccgagttgttataagagcaattcaagaaaaaaacctgatcagagttttggaggtggaaaatcatctagccagagtgagcccaattctaatcttgagaagattcacaatggagtaataccttttgatgataatcagtgtggaaacgtttttagaaatacacaatcccttattcaatatcagaatgtggaaactaaagagaaaagctgtgtatgtgttacatgtggaaaagcctttgctaagaagtcacaactcattgtacatcaaagaattcatactggaaagaaaccatatgattgtggtgcatgcggaaaagccttcagtgagaagtttcatcttgttgtacatcagagaactcatactggggagaaaccttatgattgttctgaatgtggaaaagccttctctcagaaatcgtcccttattatacatcagagagttcacactggggaaaaaccctatgaatgtagtgaatgcgggaaagccttctcccagaaatcacccctcattatacatcagagaatacatactggggaaaaaccctatgaatgtagagagtgtgggaaggccttttcccagaagtcacagctgattatacaccacagagctcatactggagagaagccgtatgagtgtaccgaatgtgggaaagccttctgtgagaagtcccacctcattatacataaaagaattcacactggtgagaaaccctacaaatgtgctcaatgtgaggaagccttcagcaggaagacagaactcattacacatcagttagttcatactggggaaaaaccttatgaatgtactgaatgtggaaagacattctcccgcaagtcacagctcatcatacatcagagaacacatactggagaaaaaccctataaatgtagtgaatgtggcaaagccttctgccagaagtcacatctcattggacatcagagaattcacacaggagaaaaaccttatatatgtactgaatgtgggaaagccttctctcagaagtcccaccttccgggacaccagcgaattcatacaggagagaaaccttacatatgtgctgaatgtggaaaggccttttctcagaagtcagaccttgttttacatcagaggattcatactggggaaagaccctatcaatgtgctatatgtgggaaggccttcatccagaagtcacaactaactgtacaccagagaattcacacagtggtaaaatcataatgaactggccacagaaaagccttagtattagctcaagccttaataattactagaaacccaattaatttgataagcttggggacaacatcccaatagataaaaatttttaagggaatttgtttctagtttggtgatgcctaacttttccagcaaagatgatggaaaatagttatataaatgaagaacatttttaatatggcatgtaaagcttttaaagttatgaactcagtgatcagcacagcaagttaagcatacagaatattgtcaagttgcatattccttatactacaaaatgataatcagccattgtgaaactgctaatattagcttgtcataattatggccataaactaatttttctataaaagacgtggaagaaagcttaagtaaacaataaaataaaacctatacactattttaagaaggggcttgagcatgacccctaaagctacatgtaaagttcttgtacaaaaaatggaatgataggttgatcagattcagtaaagttgatctgtatgcattttcccatctcaagcatataagttgacctgcatctctggaaggaccttgagattgatgcattttgagcaggtctcccttttactcttcccaactgggaacttggagctgaaaaacattggcactgaggccagatggccttgggtttaatcctggctcagtgcctcacagattgtgtgactttaggcaaacatacttctcctagctgagtattttttatcagtaagtacaaatacaatgcagagctcattttcagttaatattagtactttttaaatctttactctctatcttgaagcattagatgttaagactaatgtgtaaaaaccacgtctgagcttgcttttccctctggacactctgcttttgattgcctatccctataagtggctcattttactgtcttctgatcctggtggccttatttttgctatgttaaggttgtgttttttaatacttggatttattttcatatacttacataaaccgtggtgattgcacataaagaccctg

SEQ ID NO: 3027 - protein, 90 aa, Homo sapiens
MMKSQGLVSFKDVAVDFTQEEWQQLDPSQRTLYRDVMLENYSHLVSMGYPVSKPDVISKLEQGEEPWIIKGDISNWIYPDEYQADGRQGK

SEQ ID NO: 3028 - DNA, 3268 bp, Homo sapiens
agtacgaagacgaccgggctctcaagatggcggccccatgcggaaacagctccagggagcagccatgttgcttcctgaacaaagcctctgaagatgcggaacgggcaaaaccgcccagtacggaacggcgcagcctcgggagcccggtgtggtgctcgcggacaggaagcaggagagtttgccaatagggatgtgacagcggttcccattaagcggtgatggtggttttgggacctgataatcgagctgggagtcagaggcgggatgtgtgcggtgaaggatgttttgatacccccatataaaataatctgtctgtcatgggagcccccacgtcctctgaaatagttcagctctgtctgcatgacttgtcctgggactgaggaaaatttaccagtcatctggccttttggaagagcaaaaaatgatgaagtcccaggggttagtatcattcaaggatgtggctgtggatttcacccaggaggagtggcagcaacttgacccttctcagaggaccctgtacagggatgtgatgctggagaactacagccacctggtctcaatggggtatccagtttccaaaccagatgtcatctccaagttggaacaaggagaagagccatggatcataaagggagacatatcaaattggatctatccagatgaatatcaggcagatgggagacaagggaagaagagtaaccttcacaactcccagtcatgtattttggggacagtttccttccatcataagatactgaaaggagtcacaagggatggttcattgtgctccattttaaaagtctgtcaaggtgatggtcagctgcagagatttctagagaatcaagacaaactcttcaggcaggtcacatttgttaacagcaaaacagtgactgaggcatcagggcataaatataatccactggggaaaatatttcaagagtgcatagaaacagatatatcaatacagagattccataaatatgatgcttttaaaaagaacttaaaaccaaatattgacctaccgagttgttataagagcaattcaagaaaaaaacctgatcagagttttggaggtggaaaatcatctagccagagtgagcccaattctaatcttgagaagattcacaatggagtaataccttttgatgataatcagtgtggaaacgtttttagaaatacacaatcccttattcaatatcagaatgtggaaactaaagagaaaagctgtgtatgtgttacatgtggaaaagcctttgctaagaagtcacaactcattgtacatcaaagaattcatactggaaagaaaccatatgattgtggtgcatgcggaaaagccttcagtgagaagtttcatcttgttgtacatcagagaactcatactggggagaaaccttatgattgttctgaatgtggaaaagccttctctcagaaatcgtcccttattatacatcagagagttcacactggggaaaaaccctatgaatgtagtgaatgcgggaaagccttctcccagaaatcacccctcattatacatcagagaatacatactggggaaaaaccctatgaatgtagagagtgtgggaaggccttttcccagaagtcacagctgattatacaccacagagctcatactggagagaagccgtatgagtgtaccgaatgtgggaaagccttctgtgagaagtcccacctcattatacataaaagaattcacactggtgagaaaccctacaaatgtgctcaatgtgaggaagccttcagcaggaagacagaactcattacacatcagttagttcatactggggaaaaaccttatgaatgtactgaatgtggaaagacattctcccgcaagtcacagctcatcatacatcagagaacacatactggagaaaaaccctataaatgtagtgaatgtggcaaagccttctgccagaagtcacatctcattggacatcagagaattcacacaggagaaaaaccttatatatgtactgaatgtgggaaagccttctctcagaagtcccaccttccgggacaccagcgaattcatacaggagagaaaccttacatatgtgctgaatgtggaaaggccttttctcagaagtcagaccttgttttacatcagaggattcatactggggaaagaccctatcaatgtgctatatgtgggaaggccttcatccagaagtcacaactaactgtacaccagagaattcacacagtggtaaaatcataatgaactggccacagaaaagccttagtattagctcaagccttaataattactagaaacccaattaatttgataagcttggggacaacatcccaatagataaaaatttttaagggaatttgtttctagtttggtgatgcctaacttttccagcaaagatgatggaaaatagttatataaatgaagaacatttttaatatggcatgtaaagcttttaaagttatgaactcagtgatcagcacagcaagttaagcatacagaatattgtcaagttgcatattccttatactacaaaatgataatcagccattgtgaaactgctaatattagcttgtcataattatggccataaactaatttttctataaaagacgtggaagaaagcttaagtaaacaataaaataaaacctatacactattttaagaaggggcttgagcatgacccctaaagctacatgtaaagttcttgtacaaaaaatggaatgataggttgatcagattcagtaaagttgatctgtatgcattttcccatctcaagcatataagttgacctgcatctctggaaggaccttgagattgatgcattttgagcaggtctcccttttactcttcccaactgggaacttggagctgaaaaacattggcactgaggccagatggccttgggtttaatcctggctcagtgcctcacagattgtgtgactttaggcaaacatacttctcctagctgagtattttttatcagtaagtacaaatacaatgcagagctcattttcagttaatattagtactttttaaatctttactctctatcttgaagcattagatgttaagactaatgtgtaaaaaccacgtctgagcttgcttttccctctggacactctgcttttgattgcctatccctataagtggctcattttactgtcttctgatcctggtggccttatttttgctatgttaaggttgtgttttttaatacttggatttattttcatatacttacataaaccgtggtgattgcacataaagaccctg

SEQ ID NO: 3029 - protein, 604 aa, Homo sapiens [sequence omitted]

SEQ ID NO: 3030 - DNA, 3143 bp, Homo sapiens
agtacgaagacgaccgggctctcaagatggcggccccatgcggaaacagctccagggagcagccatgttgcttcctgaacaaagcctctgaagatgcggaacgggcaaaaccgcccagtacggaacggcgcagcctcgggagcccggtgtggtgctcgcggacaggaagcaggagagtttgccaatagggatgtgacagcggttcccattaagcggtgatggtggttttgggacctgataatcgagctgggagtcagaggcgggatgtgtgcggtgaaggatgttttgatacccccatataaaataatctgtctgtcatgggagcccccacgtcctctgaaatagttcagctctgtctgcatgacttgtcctgggactgaggaaaatttaccagtcatctggccttttggaagagcaaaaaatgatgaagtcccaggggttagtatcattcaaggatgtggctgtggatttcacccaggaggagtggcagcaacttgacccttctcagaggaccctgtacagggatgtgatgctggagaactacagccacctggtctcaatggggtatccagtttccaaaccagatgtcatctccaagttggaacaaggagaagagccatggatcataaagggagacatatcaaattggatctatccagatgaatatcaggcagatgggagacaagggaagaagagtaaccttcacaactcccagtcatgtattttggggacagtttccttccatcataagatactgaaaggagtcacaagggatggttcattgtgctccattttaaaagtctgtcaaggtgatggtcagctgcagagatttctagagaatcaagacaaactcttcaggcaggtcacatttgttaacagcaaaacagtgactgaggcatcagggcataaatataatccactggggaaaatatttcaagagtgcatagaaacagatatatcaatacagagattccataaatatgatgcttttaaaaagaacttaaaaccaaatattgacctaccgagttgttataagagcaattcaagaaaaaaacctgatcagagttttggaggtggaaaatcatctagccagagtgagcccaattctaatcttgagaagattcacaatggagtaataccttttgatgataatcagtgtggaaacgtttttagaaatacacaatcccttattcaatatcagaatgtggaaactaaagagaaaagctgtgtatgtgttacatgtggaaaagcctttgctaagaagtcacaactcattgtacatcaaagaattcatactggaaagaaaccatatgattgtggtgcatgcggaaaagccttcagtgagaagtttcatcttgttgtacatcagagaactcatactggggagaaaccttatgattgttctgaatgtggaaaagccttctctcagaaatcgtcccttattatacatcagagagttcacactggggaaaaaccctatgaatgtagtgaatgcgggaaagccttctcccagaaatcacccctcattatacatcagagaatacatactggggaaaaaccctatgaatgtagagagtgtgggaaggccttttcccagaagtcacagctgattatacaccacagagctcatactggagagaagccgtatgagtgtaccgaatgtgggaaagccttctgtgagaagtcccacctcattatacataaaagaattcacactggtgagaaaccctacaaatgtgctcaatgtgaggaagccttcagcaggaagacagaactcattacacatcagttagttcatactggggaaaaaccttatgaatgtactgaatgtggaaagacattctcccgcaagtcacagctcatcatacatcagagaacacatactggagaaaaaccctataaatgtagtgaatgtggcaaagccttctgccagaagtcacatctcattggacatcagagaattcacacaggagaaaaaccttatatatgtactgaatgtgggaaagccttctctcagaagtcccaccttccgggacaccagcgaattcatacaggagagaaaccttacatatgtgctgaatgtggaaaggccttttctcagaagtcagaccttgttttacatcagaggattcatactggggaaagaccctatcaatgtgctatatgtgggaaggccttcatccagaagtcacaactaactgtacaccagagaattcacacagtggtaaaatcataatgaactggccacagaaaagccttagtattagctcaagccttaataattactagaaacccaattaatttgataagcttggggacaacatcccaatagataaaaatttttaagggaatttgtttctagtttggtgatgcctaacttttccagcaaagatgatggaaaatagttatataaatgaagaacatttttaatatggcatgtaaagcttttaaagttatgaactcagtgatcagcacagcaagttaagcatacagaatattgtcaagttgcatattccttatactacaaaatgataatcagccattgtgaaactgctaatattagcttgtcataattatggccataaactaatttttctataaaagacgtggaagaaagcttaagtaaacaataaaataaaacctatacactattttaagaaggggcttgagcatgacccctaaagctacatgtaaagttcttgtacaaaaaatggaatgataggttgatcagattcagtaaagttgatctgtatgcattttcccatctcaagcatataagttgacctgcatctctggaaggaccttgagattgatgcattttgagcaggtctcccttttactcttcccaactgggaacttggagctggtacaaatacaatgcagagctcattttcagttaatattagtactttttaaatctttactctctatcttgaagcattagatgttaagactaatgtgtaaaaaccacgtctgagcttgcttttccctctggacactctgcttttgattgcctatccctataagtggctcattttactgtcttctgatcctggtggccttatttttgctatgttaaggttgtgttttttaatacttggatttattttcatatacttacataaaccgtggtgattgcacat

SEQ ID NO: 3031 - protein, 604 aa, Homo sapiens [sequence omitted]

SEQ ID NO: 3032 - DNA, 733 bp, Homo sapiens
acgaagacgaccgggctctcaagatggcggccccatgcggaaacagctccagggagcagccatgttgcttcctgaacaaagcctctgaagatgcggaacgggcaaaaccgcccagtacggaacggcgcagcctcgggagcccggtgtggtgctcgcggacaggaagcaggagagtttgccaatagggatgtgacagcggttcccattaagcggtgatggtggttttgggacctgataatcgagctgggagtcagaggcgggatgtgtgcggtgaaggatgttttgatacccccatataaaataatctgtctgtcatgggagcccccacgtcctctgaaatagttcagctctgtctgcatgacttgtcctgggactgaggaaaatttaccagtcatctggccttttggaagagcaaaaaatgatgaagtcccagcttttttctagctacaatggcagagttgagtagttacaacagaaaccgtatggcctgcaatgccaaaaatgtaaactttactgaaaaagtttgttgacccctgctttcaaggaacaaattgattacagatgcttcctattgtccagctttatccacaggggttagtatcattcaaggatgtggctgtggatttcacccaggaggagtggcagcaacttgacccttctcagaggaccctgtacagggatgtgatgctggagaactacagccacctggtctcaatggggtatccagtttcca

SEQ ID NO: 3033 - protein, 56 aa, Homo sapiens
MLPIVQLYPQGLVSFKDVAVDFTQEEWQQLDPSQRTLYRDVMLENYSHLVSMGYPV

SEQ ID NO: 3034 - DNA, 1127 bp, Homo sapiens
acgaagacgaccgggctctcaagatggcggccccatgcggaaacagctccagggagcagccatgttgcttcctgaacaaagcctctgaagatgcggaacgggcaaaaccgcccagtacggaacggcgcagcctcgggagcccggtgtggtgctcgcggacaggaagcaggagagtttgccaatagggatgtgacagcggttcccattaagcggtgatggtggttttgggacctgataatcgagctgggagtcagaggcgggatgtgtgcggtgaaggatgttttgatacccccatataaaataatctgtctgtcatgggagcccccacgtcctctgaaatagttcagctctgtctgcatgacttgtcctgggactgaggaaaatttaccaggtatttaccttcctgcattgtggtatactctttttttttccagtggttccaacctatcaccatttttgtatacagacaatagagctgttgaaaaagagcaataaaaatttaaacagaaaacatcttaaaattaacctttgagttcatgcacattgatttagcaagagttttctaagttgggggaaaatataagagagttcttggaaaattgttggaattcagctgctggttctttttaggaatagggaacacatgcctcagttttccatttggtcattcccattcttactgccaaggagctccatcttcacttatatccttatatagctatccatgattattgcctcatgaaaatcttctataaatagaattgctgattcccaaggggaacagtaagttgttagtaaatcaactggaaacatatcttcacatctatccaattataaaaccttggtcaacttctatgtgatcatattataggtacaagaggagtaaagaatgatccctcctccacatggtgcctgctgagacttctgtaaggctcaaacaaccttatcccacagggtagcccattagttacttgacttctgatgttagttgttgcaagattggtgaatgtgaaagctgcagtctgggtttggactatgaaaaacattctgatcaccagttttgctttttcagtcatctggccttttggaagagcaaaaaatgatgaagtcccaggtgagttgctttt

SEQ ID NO: 3035 - protein, 53 aa, Homo sapiens
MAAPCGNSSREQPCCFLNKASEDAERAKPPSTERRSLGSPVWCSRTGSRRVCQ

SEQ ID NO: 3036 - DNA, 1156 bp, Homo sapiens
atgatacactgtgaagctactcattgtggaaagattcttagcaataaacaatctcttattcattatgtgaatgttgaaactggggagaagacctatgtatgtgttgaatgtggaaaatcctttctcaagaagtcacagattattatacatcaaagaattcatactggagagaaaccttatgattgtggtgcatgtggaaaagccttcagtgagaagtcacaccttattgcacatcagagaactcatactggggagaaaccttatgattgttctgaatgtggaaaaggcttttctcagaaatcatccctcattatacatcagagagttcacactggggaaaaaccatatgaatgtagtgaatgtgagaaagccttctcccagaaatcacccctcattatacatcagagaatacatactggggaaaagccctatgaatgtagagtagttcacactggtgagaaaccctacaaatgtgctcaatgtgaggaagccttcagcaggaagtcagaactcattatacatcagataattcatactggggagaaaccgtatgaatgtacagaatgtgggaaaacattctctcgcaagtcacaactcatcatacatcagagaacccacactggagagaaaccctataaatgtaccaaatgtggaaaatccttctgtcagcagtcacatctcattggacatcagagaattcacacgggagaacaaccttatataattcatactggagagaaacctgatcgatgtactgtatgtgggaaggccttcatccagaagtcccaactcactgtacatcagagaattcatacactaatgaaatcataagaatggtctgaacacagaaaagccttcagggtcagttcaagccttaatagatagtgcaacaaccaatggatttgatgattttggggactacatctttgttgataaaattttacaagtgaagtcatgttcctaatgtatttcattctttatcaaagataatagagaagtcaatacgtaaatgatggacattttcactatggcatataaaagtttttaaattgagaaatgaatgattagcataacagaacgaattgcatgtacatctcttttgaagttatgtgctcctgattatactacataacaatcagatatgtgtaagattgtt

SEQ ID NO: 3037 - protein, 276 aa, Homo sapiens
MIHCEATHCGKILSNKQSLIHYVNVETGEKTYVCVECGKSFLKKSQIIIHQRIHTGEKPYDCGACGKAFSEKSHLIAHQRTHTGEKPYDCSECGKGFSQKSSLIIHQRVHTGEKPYECSECEKAFSQKSPLIIHQRIHTGEKPYECRVVHTGEKPYKCAQCEEAFSRKSELIIHQIIHTGEKPYECTECGKTFSRKSQLIIHQRTHTGEKPYKCTKCGKSFCQQSHLIGHQRIHTGEQPYIIHTGEKPDRCTVCGKAFIQKSQLTVHQRIHTLMKS

SEQ ID NO: 3038 - DNA, 3583 bp, Homo sapiens
ccgcttgtactgagacgcctgggatctcaaaatggcggccccgtgcggaaacagcgtctgggagcagtcatgttgcctcctgaacaaagccgctgaagatgaagaatgggcaaaatcgccccatacggaacagcgcagcctcgggagcccgttacctggctcgcgaacacgaagcgggagagttcgccaatatggatgtgacagcggttcccattaagcggtgataggatttttgggacctgataatcaagctagggaccctgggatggcacaaatgaaacaatctctctatcatgatattcccccgttgctctgaatgagttcagctctgtctgcatgatctatcccagactgaaaagagtttaccagctaagtactttcctgcaatgtagtatattcccgtttattgttccaacctgtcagtaattttttatacaggcaactgccttgttgaaaatcagcaataaaaatttaaaccaaagaaatcttaaaatcagcaataaaaatttaaaccaaagaaatcttaaaatcagcaattttaatccacaaatattgatttatcaagagaatttgctggtttggagtaaaatataaaagagcttgtcttactcagtttgggctgctgtaacagaatgccacagatggaggaccttaaacagcaaacatttatttctcacatttctggaggcagagaagttcaagatcaaggtgccagcaggtctagtgtttgctgatagcactcttcctgttttgtaaacttctcattgtatcctcacaaggccaagagacaaatcatctctctgatatttcctgttgtaagggcattaatcccatttattagggctctcatttcatgacctaattacctcccaaagaccccacttcccaatacaatcacattagaattgcaacatttgaattttggagggacaaacattcagtccataacagagctcttagaattttgtaggctgctttggtttaggaaataagggaatacactccttaattttcctcttggtcactcccattcttgtctccagggaacatctgcagttaaatatatatttctccatgatatccatgattattgtcttaagatagttctacaaatagaaattcaaatagaattgctggttcaaaggggaacaattaggtgtttgtaaatccacaggaaacatatctgcatttatctaattaaaaatacaccttgccctatgtgatcaaattatacacctagttctgtatgatcatatcatagtcacaaaaggactaaaggtggatacctccttcacatggtgtttgctataagggtcaaacgaccttctcccatcacgaccttctcccacaggatggcctatcagctacctgacttctggtggtggttgtttagagactggtgaatgttagttctggcccataaaaactccattctttcttccagacctgattcctcagacctctgccctatcggaagggaagcagaaaatgatcaggtctcagggtccagtgtcatttgaggatgtggctgtggatttcacccaggaggagtggcagcaactggactatgctcagaggaccctgtacagggatgtgatgctggagatctatagccacctggtctcaatgggatatccagtttccaaaccagatgtcatctccaagttggaacaaggagaagagccatggatcataaagagacacataccaaattggatctatccagacagagagagtagacttgacacccctcaactggatatatttagagatgttttcttccataaggagacactggaaagtattacaaggggtcattcattgtactccattttaaaagtctggcaaggtgatgaccagctggagagagatcaggaaaactgagacaaatttgtcaggcaagttgtagtcatcaacaacaaaagaatatctgaagagtcaggtcatccatataatatatttggaaaaatatttcatgactgcacagacctagatacttcaaaacaaagactgtgtaagtgtgattcatttgaaaagaccttgaaaccaaatattaacctagtgagttataataggaattttgcaagaaaaaacattgatgagaattttagatgtgggaaaacacctagctacagttcttgctattctaagcatgaaaaaaatcatagtggaatgatacactgtgaagctactcattgtggaaagattcttagcaataaacaatctcttattcattatgtgaatgttgaaactggggagaagacctatgtatgtgttgaatgtggaaaatcctttctcaagaagtcacagattattatacatcaaagaattcatactggagagaaaccttatgattgtggtgcatgtggaaaagccttcagtgagaagtcacaccttattgcacatcagagaactcatactggggagaaaccttatgattgttctgaatgtggaaaaggcttttctcagaaatcatccctcattatacatcagagagttcacactggggaaaaaccatatgaatgtagtgaatgtgagaaagccttctcccagaaatcacccctcattatacatcagagaatacatactggggaaaagccctatgaatgtagagtgtgggaaagccttttcccagagtcacagctgattatacatcacagagctcatactggagagaagccatgtaagtgtactgaatgtgggaaagcattctgttttatacattaaagagttcacactggtgagaaaccctacaaatgtgctcaatgtgaggaagccttcagcaggaagtcagaactcattatacatcagataattcatactggggagaaaccgtatgaatgtacagaatgtgggaaaacattctctcgcaagtcacaactcatcatacatcagagaacccacactggagagaaaccctataaatgtaccaaatgtggaaaatccttctgtcagcagtcacatctcattggacatcagagaattcacacgggagaacaaccttatgtatgttctgaatgtgggaaagccttctctcagaagtctcacctcccagggcattggtgaattcatacaggagagaaaccttacatatgtgctgaatgtggaaaggccttttctcagaagtcagaccttgttgtacatcagataattcatactggagagaaacctgatcgatgtactgtatgtgggaaggccttcatccagaagtcccaactcactgtacatcagagaattcatacactaatgaaatcataagaatggtctgaacacagaaaagccttcagggtcagttcaagccttaatagatagtgcaacaaccaatggatttgatgattttggggactacatctttgttgataaaattttacaagtgaagtcatgttcctaatgtatttcattctttatcaaagataatagagaagtcaatacgtaaatgatggacattttcactatggcatataaaagtttttaaattgagaaatgaatgattagcataacagaacgaattgcatgtacatctcttttgaagttatgtgctcctgattatactacataacaatcagatatgtgtaagattgtt

SEQ ID NO: 3039 - protein, 131 aa, Homo sapiens
MIRSQGPVSFEDVAVDFTQEEWQQLDYAQRTLYRDVMLEIYSHLVSMGYPVSKPDVISKLEQGEEPWIIKRHIPNWIYPDRESRLDTPQLDIFRDVFFHKETLESITRGHSLYSILKVWQGDDQLERDQEN

SEQ ID NO: 3040 - DNA, 3240 bp, Homo sapiens
agtcctccgcttgtactgagacgcctgggatctcaaaatggcggccccgtgcggaaacagcgtctgggagcagtcatgttgcctcctgaacaaagccgctgaagatgaagaatgggcaaaatcgccccatacggaacagcgcagcctcgggagcccgttacctggctcgcgaacacgaagcgggagagttcgccaatatggatgtgacagcggttcccattaagcggtgataggatttttgggacctgataatcaagctagggaccctgggatggcacaaatgaaacaatctctctatcatgatattcccccgttgctctgaatgagttcagctctgtctgcatgatctatcccagactgaaaagagtttaccagctaagtactttcctgcaatgtagtatattcccgtttattgttccaacctgtcagtaattttttatacaggcaactgccttgttgaaaatcagcaataaaaatttaaaccaaagaaatcttaaaatcagcaataaaaatttaaaccaaagaaatcttaaaatcagcaattttaatccacaaatattgatttatcaagagaatttgctggtttggagtaaaatataaaagagctgagctcttagaattttgtaggctgctttggtttaggaaataagggaatacactccttaattttcctcttggtcactcccattcttgtctccagggaacatctgcagttaaatatatatttctccatgatatccatgattattgtcttaagatagttctacaaatagaaattcaaatagaattgctggttcaaaggggaacaattaggtgtttgtaaatccacaggaaacatatctgcatttatctaattaaaaatacaccttgccctatgtgatcaaattatacacctagttctgtatgatcatatcatagtcacaaaaggactaaaggtggatacctccttcacatggtgtttgctataagggtcaaacgaccttctcccatcacgaccttctcccacaggatggcctatcagctacctgacttctggtggtggttgtttagagactggtgaatgttagttctggcccataaaaactccattctttcttccagacctgattcctcagacctctgccctatcggaagggaagcagaaaatgatcaggtctcagggtccagtgtcatttgaggatgtggctgtggatttcacccaggaggagtggcagcaactggactatgctcagaggaccctgtacagggatgtgatgctggagatctatagccacctggtctcaatgggatatccagtttccaaaccagatgtcatctccaagttggaacaaggagaagagccatggatcataaagagacacataccaaattggatctatccagacagagagagtagacttgacacccctcaactggatatatttagagatgttttcttccataaggagacactggaaagtattacaaggggtcattcattgtactccattttaaaagtctggcaaggtgatgaccagctggagagagatcaggaaaactgagacaaatttgtcaggcaagttgtagtcatcaacaacaaaagaatatctgaagagtcaggtcatccatataatatatttggaaaaatatttcatgactgcacagacctagatacttcaaaacaaagactgtgtaagtgtgattcatttgaaaagaccttgaaaccaaatattaacctagtgagttataataggaattttgcaagaaaaaacattgatgagaattttagatgtgggaaaacacctagctacagttcttgctattctaagcatgaaaaaaatcatagtggaatgatacactgtgaagctactcattgtggaaagattcttagcaataaacaatctcttattcattatgtgaatgttgaaactggggagaagacctatgtatgtgttgaatgtggaaaatcctttctcaagaagtcacagattattatacatcaaagaattcatactggagagaaaccttatgattgtggtgcatgtggaaaagccttcagtgagaagtcacaccttattgcacatcagagaactcatactggggagaaaccttatgattgttctgaatgtggaaaaggcttttctcagaaatcatccctcattatacatcagagagttcacactggggaaaaaccatatgaatgtagtgaatgtgagaaagccttctcccagaaatcacccctcattatacatcagagaatacatactggggaaaagccctatgaatgtagagtgtgggaaagccttttcccagagtcacagctgattatacatcacagagctcatactggagagaagccatgtaagtgtactgaatgtgggaaagcattctgttttatacattaaagagttcacactggtgagaaaccctacaaatgtgctcaatgtgaggaagccttcagcaggaagtcagaactcattatacatcagataattcatactggggagaaaccgtatgaatgtacagaatgtgggaaaacattctctcgcaagtcacaactcatcatacatcagagaacccacactggagagaaaccctataaatgtaccaaatgtggaaaatccttctgtcagcagtcacatctcattggacatcagagaattcacacgggagaacaaccttatgtatgttctgaatgtgggaaagccttctctcagaagtctcacctcccagggcattggtgaattcatacaggagagaaaccttacatatgtgctgaatgtggaaaggccttttctcagaagtcagaccttgttgtacatcagataattcatactggagagaaacctgatcgatgtactgtatgtgggaaggccttcatccagaagtcccaactcactgtacatcagagaattcatacactaatgaaatcataagaatggtctgaacacagaaaagccttcagggtcagttcaagccttaatagatagtgcaacaaccaatggatttgatgattttggggactacatctttgttgataaaattttacaagtgaagtcatgttcctaatgtatttcattctttatcaaagataatagagaagtcaatacgtaaatgatggacattttcactatggcatataaaagtttttaaattgagaaatgaatgattagcataacagaacgaattgcatgtacatctcttttgaagttatgtgctcctgattatactacataacaatcagatatgtgtaagattgtt

SEQ ID NO: 3041 - protein, 131 aa, Homo sapiens; identical to SEQ ID NO: 3039

SEQ ID NO: 3042 - DNA, 2413 bp, Homo sapiens
agcgcctggcgagtcctccgcttgtactgagacgcctgggatctcaaaatggcggccccgtgcggaaacagcgtctgggagcagtcatgttgcctcctgaacaaagccgctgaagatgaagaatgggcaaaatcgccccatacggaacagcgcagcctcgggagcccgttacctggctcgcgaacacgaagcgggagagttcgccaatatggatgtgacagcggttcccattaagcggtgataggatttttgggacctgataatcaagctagggacctgattcctcagacctctgccctatcggaagggaagcagaaaatgatcaggtctcagggtccagtgtcatttgaggatgtggctgtggatttcacccaggaggagtggcagcaactggactatgctcagaggaccctgtacagggatgtgatgctggagatctatagccacctggtctcaatgggatatccagtttccaaaccagatgtcatctccaagttggaacaaggagaagagccatggatcataaagagacacataccaaattggatctatccagacagagagagtagacttgacacccctcaactggatatatttagagatgttttcttccataaggagacactggaaagtattacaaggggtcattcattgtactccattttaaaagtctggcaaggtgatgaccagctggagagagatcaggaaaactgagacaaatttgtcaggcaagttgtagtcatcaacaacaaaagaatatctgaagagtcaggtcatccatataatatatttggaaaaatatttcatgactgcacagacctagatacttcaaaacaaagactgtgtaagtgtgattcatttgaaaagaccttgaaaccaaatattaacctagtgagttataataggaattttgcaagaaaaaacattgatgagaattttagatgtgggaaaacacctagctacagttcttgctattctaagcatgaaaaaaatcatagtggaatgatacactgtgaagctactcattgtggaaagattcttagcaataaacaatctcttattcattatgtgaatgttgaaactggggagaagacctatgtatgtgttgaatgtggaaaatcctttctcaagaagtcacagattattatacatcaaagaattcatactggagagaaaccttatgattgtggtgcatgtggaaaagccttcagtgagaagtcacaccttattgcacatcagagaactcatactggggagaaaccttatgattgttctgaatgtggaaaaggcttttctcagaaatcatccctcattatacatcagagagttcacactggggaaaaaccatatgaatgtagtgaatgtgagaaagccttctcccagaaatcacccctcattatacatcagagaatacatactggggaaaagccctatgaatgtagagtgtgggaaagccttttcccagagtcacagctgattatacatcacagagctcatactggagagaagccatgtaagtgtactgaatgtgggaaagcattctgttttatacattaaagagttcacactggtgagaaaccctacaaatgtgctcaatgtgaggaagccttcagcaggaagtcagaactcattatacatcagataattcatactggggagaaaccgtatgaatgtacagaatgtgggaaaacattctctcgcaagtcacaactcatcatacatcagagaacccacactggagagaaaccctataaatgtaccaaatgtggaaaatccttctgtcagcagtcacatctcattggacatcagagaattcacacgggagaacaaccttatgtatgttctgaatgtgggaaagccttctctcagaagtctcacctcccagggcattggtgaattcatacaggagagaaaccttacatatgtgctgaatgtggaaaggccttttctcagaagtcagaccttgttgtacatcagataattcatactggagagaaacctgatcgatgtactgtatgtgggaaggccttcatccagaagtcccaactcactgtacatcagagaattcatacactaatgaaatcataagaatggtctgaacacagaaaagccttcagggtcagttcaagccttaatagatagtgcaacaaccaatggatttgatgattttggggactacatctttgttgataaaattttacaagtgaagtcatgttcctaatgtatttcattctttatcaaagataatagagaagtcaatacgtaaatgatggacattttcactatggcatataaaagtttttaaattgagaaatgaatgattagcataacagaacgaattgcatgtacatctcttttgaagttatgtgctcctgattatactacataacaatcagatatgtgtaagattgtt

SEQ ID NO: 3043 - protein, 131 aa, Homo sapiens; identical to SEQ ID NO: 3039

SEQ ID NO: 3044 - DNA, 2314 bp, Homo sapiens
ggctcagcgcctggcgagtcctccgcttgtactgagacgcctgggatctcaaaatggcggccccgtgcggaaacagcgtctgggagcagtcatgttgcctcctgaacaaagccgctgaagatgaagaatgggcaaaatcgccccatacggaacagcgcagcctcgggagcccgttacctggctcgcgaacacgaagcgggagagttcgccaatatggatgtgacagcggttcccattaagcggtgataggatttttgggacctgataatcaagctagggacctgattcctcagacctctgccctatcggaagggaagcagaaaatgatcaggtctcagggtccagtgtcatttgaggatgtggctgtggatttcacccaggaggagtggcagcaactggactatgctcagaggaccctgtacagggatgtgatgctggagatctatagccacctggtctcaatgggatatccagtttccaaaccagatgtcatctccaagttggaacaaggagaagagccatggatcataaagagacacataccaaattggatctatccagacagagagagtagacttgacacccctcaactggatatatttagagatgttttcttccataaggagacactggaaagtattacaaggggtcattcattgtactccattttaaaagtctggcaaggtgatgaccagctggagagagatcaggaaaactgagacaaatttgtcaggcaagttgtagtcatcaacaacaaaagaatatctgaagagtcaggtcatccatataatatatttggaaaaatatttcatgactgcacagacctagatacttcaaaacaaagactgtgtaagtgtgattcatttgaaaagaccttgaaaccaaatattaacctagtgagttataataggaattttgcaagaaaaaacattgatgagaattttagatgtgggaaaacacctagctacagttcttgctattctaagcatgaaaaaaatcatagtggaatgatacactgtgaagctactcattgtggaaagattcttagcaataaacaatctcttattcattatgtgaatgttgaaactggggagaagacctatgtatgtgttgaatgtggaaaatcctttctcaagaagtcacagattattatacatcaaagaattcatactggagagaaaccttatgattgtggtgcatgtggaaaagccttcagtgagaagtcacaccttattgcacatcagagaactcatactggggagaaaccttatgattgttctgaatgtggaaaaggcttttctcagaaatcatccctcattatacatcagagagttcacactggggaaaaaccatatgaatgtagtgaatgtgagaaagccttctcccagaaatcacccctcattatacatcagagaatacatactggggaaaagccctatgaatgtagagtgtgggaaagccttttcccagagtcacagctgattatacatcacagagctcatactggagagaagccatgtaagtgtactgaatgtgggaaagcattctgttttatacattaaagagttcacactggtgagaaaccctacaaatgtgctcaatgtgaggaagccttcagcaggaagtcagaactcattatacatcagataattcatactggggagaaaccgtatgaatgtacagaatgtgggaaaacattctctcgcaagtcacaactcatcatacatcagagaacccacactggagagaaaccctataaatgtaccaaatgtggaaaatccttctgtcagcagtcacatctcattggacatcagagaattcacacgggagaacaaccttatgtatgttctgaatgtgggaaagccttctctcagaagtctcacctcccagggcattggtgaattcatacaggagagaaaccttacatatgtgctgaatgtggaaaggccttttctcagaagtcagaccttgttgtacatcagataattcatactggagagaaacctgatcgatgtactgtatgtgggaaggccttcatccagaagtcccaactcactgtacatcagagaattcatacactaatgaaatcataagaatggtctgaacacagaaaagccttcagggtcagttcaagccttaatagatagtgcaacaaccaatggatttgatgattttggggactacatctttgttgataaaattttacaagtgaagtcatgttcctaatgtatttcattctttatcaaagataatagagaagtcaatacgtaaatgatggacattttcactatggcatataaaagtttttaaattg

SEQ ID NO: 3045 - protein, 131 aa, Homo sapiens; identical to SEQ ID NO: 3039

SEQ ID NO: 3046 - DNA, 863 bp, Homo sapiens
gtactgagacgcctgggatctcaaaatggcggccccgtgcggaaacagcgtctgggagcagtcatgttgcctcctgaacaaagccgctgaagatgaagaatgggcaaaatcgccccatacggaacagcgcagcctcgggagcccgttacctggctcgcgaacacgaagcgggagagttcgccaatatggatgtgacagcggttcccattaagcgacctgattcctcagacctctgccctatcggaagggaagcagaaaatgatcaggtctcagggtccagtgtcatttgaggatgtggctgtggatttcacccaggaggagtggcagcaactggactatgctcagaggaccctgtacagggatgtgatgctggagatctatagccacctggtctcaatgggatatccagtttccaaaccagatgtcatctccaagttggaacaaggagaagagccatggatcataaagagacacataccaaattggatctatccagacagagagagtagacttgacacccctcaactggatatatttagagatgttttcttccataaggagacactggaaagtattacaaggggtcattcattgtactccattttaaaagtctggcaaggtgatgaccagctggagagagatcaggaaaactgagacaaatttgtcaggcaagttgtagtcatcaacaacaaaagaatatctgaagagtcaggtcatccatataatatatttggaaaaatatttcatgactgcacagacctagatacttcaaaacaaagactgtgtaagtgtgattcatttgaaaagaccttgaaaccaaatattaacctagtgagttataataggaattttgcaagaaaaaa

SEQ ID NO: 3047 - protein, 131 aa, Homo sapiens; identical to SEQ ID NO: 3039

SEQ ID NO: 3048 - DNA, 1726 bp, Homo sapiens
tatcccagactgaaaagagtttaccagctaagtactttcctgcaatgtagtatattcccgtttattgttccaacctgtcagtaattttttatacaggcaactgccttgttgaaaatcagcaataaaaatttaaaccaaagaaatcttaaaatcagcaataaaaatttaaaccaaagaaatcttaaaatcagcaattttaatccacaaatattgatttatcaagagaatttgctggtttggagtaaaatataaaagagcttgtcttactcagtttgggctgctgtaacagaatgccacagatggaggaccttaaacagcaaacatttatttctcacatttctggaggcagagaagttcaagatcaaggtgccagcaggtctagtgtttgctgatagcactcttcctgttttgtaaacttctcattgtatcctcacaaggccaagagacaaatcatctctctgatatttcctgttgtaagggcattaatcccatttattagggctctcatttcatgacctaattacctcccaaagaccccacttcccaatacaatcacattagaattgcaacatttgaattttggagggacaaacattcagtccataacagagctcttagaattttgtaggctgctttggtttaggaaataagggaatacactccttaattttcctcttggtcactcccattcttgtctccagggaacatctgcagttaaatatatatttctccatgatatccatgattattgtcttaagatagttctacaaatagaaattcaaatagaattgctggttcaaaggggaacaattaggtgtttgtaaatccacaggaaacatatctgcatttatctaattaaaaatacaccttgccctatgtgatcaaattatacacctagttctgtatgatcatatcatagtcacaaaaggactaaaggtggatacctccttcacatggtgtttgctataagggtcaaacgaccttctcccatcacgaccttctcccacaggatggcctatcagctacctgacttctggtggtggttgtttagagactggtgaatgttagttctggcccataaaaactccattctttcttccagacctgattcctcagacctctgccctatcggaagggaagcagaaaatgatcaggtctcagggtccagtgtcatttgaggatgtggctgtggatttcacccaggaggagtggcagcaactggactatgctcagaggaccctgtacagggatgtgatgctggagatctatagccacctggtctcaatgggatatccagtttccaaaccagatgtcatctccaagttggaacaaggagaagagccatggatcataaagagacacataccaaattggatctatccaggtgaaaatgtggcagatgggagacaagaaaaataaatgctcagttgctttattttatttttaactggcttatggctgaggcttagatctccacccagattgccatctcctatttcttcttgctcctgtggagagcatgtagtaggcattcaacaactaactcattaatagtgagccatgtacaaaaagaggtatttattttttgttcactcaacaatcataactttagtgtcttcctaaaagaaattcaaaggcaatagaaacaaatgcctttcagggacataggttgtacaagaaaaggtaagtcatcatgattcatggctgcataaaattacatgtcaaa

SEQ ID NO: 3049 - protein, 90 aa, Homo sapiens
MIRSQGPVSFEDVAVDFTQEEWQQLDYAQRTLYRDVMLEIYSHLVSMGYPVSKPDVISKLEQGEEPWIIKRHIPNWIYPGENVADGRQEK

SEQ ID NO: 3050 - DNA, 974 bp, Homo sapiens
ctgggatctcaaaatggcggccccgtgcggaaacagcgtctgggagcagtcatgttgcctcctgaacaaagccgctgaagatgaagaatgggcaaaatcgccccatacggaacagcgcagcctcgggagcccgttacctggctcgcgaacacgaagcgggagagttcgccaatatggatgtgacagcggttcccattaagcggtgataggatttttgggacctgataatcaagctagggaccctgggatggcacaaatgaaacaatctctctatcatgatattcccccgttgctctgaatgagttcagctctgtctgcatgatctatcccagactgaaaagagtttaccaacctgattcctcagacctctgccctatcggaagggaagcagaaaatgatcaggtctcagggtccagtgtcatttgaggatgtggctgtggatttcacccaggaggagtggcagcaactggactatgctcagaggaccctgtacagggatgtgatgctggagatctatagccacctggtctcaatgggatatccagtttccaaaccagatgtcatctccaagttggaacaaggagaagagccatggatcataaagagacacataccaaattggatctatccaggtgaaaatgtggcagatgggagacaagaaaaataaatgctcagttgctttattttatttttaactggcttatggctgaggcttagatctccacccagattgccatctcctatttcttcttgctcctgtggagagcatgtagtaggcattcaacaactaactcattaatagtgagccatgtacaaaaagaggtatttattttttgttcactcaacaatcataactttagtgtcttcctaaaagaaattcaaaggcaatagaaacaaatgcctttcagggacataggttgtacaagaaaaggtaagtcatcatgattcatggctgcataaaattacatgtcaaa

SEQ ID NO: 3051 - protein, 90 aa, Homo sapiens; identical to SEQ ID NO: 3049

SEQ ID NO: 3052 - DNA, 577 bp, Homo sapiens
attaaggacgcgcgttccagtgttgtgccacggtagctggtttcttaacctctctgaccatcagttttcttctctgtaaaaaagggataaagctgaaggttcaaacaagtggtggaaggagtatggaaattaatcttgtggaagtggttctctgtgtgagaaacatcggcctgaccacctgactttctgatcacattccactgggaaaaagtccaaggaacatccctatcacattctgctggaacaaggaccaagtcacctcatcatgggaacatcttatcaatagcctgttgggcagcaagccatactgcccagacccctccctcccatacctacctgattcctcagacctctgccctatcggaagggaagcagaaaatgatcaggtctcagggtccagtgtcatttgaggatgtggctgtggatttcacccaggaggagtggcagcaactggactatgctcagaggaccctgtacagggatgtgatgctggagatctatagccacctggtctcaatgggatatccagtttccaaaccagatgtcatctccaagttggaacaaggagaagagccat

SEQ ID NO: 3053 - protein, 65 aa, Homo sapiens
MIRSQGPVSFEDVAVDFTQEEWQQLDYAQRTLYRDVMLEIYSHLVSMGYPVSKPDVISKLEQGEE

SEQ ID NO: 3054 - DNA, 1384 bp, Homo sapiens
gaacaaagccgctgaagatgaagaatgggcaaaatcgccccatacggaacagcgcagcctcgggagcccgttacctggctcgcgaacacgaagcgggagagttcgccaatatggatgtgacagcggttcccattaagcggtgataggatttttgggacctgataatcaagctaggggtcacagactactctcaagttgaaaaccttcagaagttttctcaaaccacttgtcccctccataactcgtgccttcacagaagaaaacatccttcaaataaatatcaaaacaaatattaaaggaatgggatcattattgtcaattctttctagcccaaataaaccaggaataccctgtggttgaataagttaggaagctgagttaggatgaatcagttcagccctgtcaccacagggaactgttgggaccctgggatggcacaaatgaaacaatctctctatcatgatattcccccgttgctctgaatgagttcagctctgtctgcatgatctatcccagactgaaaagagtttaccagctaagtactttcctgcaatgtagtatattcccgtttattgttccaacctgtcagtaattttttatacaggcaactgccttgttgaaaatcagcaataaaaatttaaaccaaagaaatcttaaaatcagcaataaaaatttaaaccaaagaaatcttaaaatcagcaattttaatccacaaatattgatttatcaagagaatttgctggtttggagtaaaatataaaagagcttgtcttactcagtttgggctgctgtaacagaatgccacagatggaggaccttaaacagcaaacatttatttctcacatttctggaggcagagaagttcaagatcaaggtgccagcaggtctagtgtttgctgatagcactcttcctgttttgtaaacttctcattgtatcctcacaaggccaagagacaaatcatctctctgatatttcctgttgtaagggcattaatcccatttattagggctctcatttcatgacctaattacctcccaaagaccccacttcccaatacaatcacattagaattgcaacatttgaattttggagggacaaacattcagtccataacagagctcttagaattttgtaggctgctttggtttaggaaataagggaatacactccttaattttcctcttggtcactcccattcttgtctccagggaacatctgcagttaaatatatatttctccatgatatccatgattattgtcttaagatagttctacaaatagaaattcaaatagaattgctggttcaaaggggaacaattaggtgtttgtaaatccacaggaaacatatctgcatttatctaattaaaaatacaccttgcccta

SEQ ID NO: 3055 - protein, 32 aa, Homo sapiens [sequence omitted]

SEQ ID NO: 3056 - DNA, 626 bp, Homo sapiens
ctggaaagcagcaagcagcaaaaattagactgaggcctgcttccagatcctgagtagactccctctttgcagccctttttctcttattctctctcctttggccctgggctgacctctagatcctgatcaaactctctagcctcttttttctttctccccctttctgggtggctccggcaaggatcacccccattgcagaacatcacgtccaacgccgtctccaattaatgggcaaaggcccaactaaagaaacctccctatcctgtcttactgggcaaaggcccaaggaacaccatgatgacatcccaccagaaaaagggtcaaaccaccctatcatgggtacatcttattgatatcctgccgggcagcaagccacactatccagacttctcccagccataccttatctaccaaagcaaacacgactgtcatactgaagcatggagaagaaccatggacactggggggagaacctcaaggtttggactattaatgaattgaaataatatgccagaagaaccagaagctatcatagctgaagatgtttcattgtctaatgagataatgaaaaaattgagataatgaaaatagtgagataataaaataattaaaataatgagataatg

SEQ ID NO: 3057 - protein, 68 aa, Homo sapiens [sequence omitted]

SEQ ID NO: 3058 - DNA, 551 bp, Homo sapiens
agttacctagacaagcaccaagtattagaagccttagtgtttcaatttgccatcaacttgctctgcaagcccagaccaaaccctgagcttccctctggctttctctttggttaaacaagaagcctttatcttcatctctccatcagaaccagtggcctgctcctctctcccttctctgctttcattgtccaccaacactgaagtcataaatgactagagggagctggagtgtgagggtccagaaacttgtatgatccagaatgccatgtcatacatccaataaaattcaactctgcaagcatgagagagaagaggaaggaaaagagagaatctgaagtgtgagtgattctgtttaccattccacagacaaattttcaggcgggcagcattttcttcattctatactccaaggaagaggagggtcagagaggataaataacctgcctcggatctcagaataggtaaatgacagagactccactgcctctgtgatttctctcgaggccctgggaccctcagatggtgaaaggcaagagtctgcgaacccctgg

SEQ ID NO: 3059 - protein, 41 aa, Homo sapiens
SVSDSVYHSTDKFSGGQHFLHSILQGRGGSERINNLPRISE

SEQ ID NO: 3060 - DNA, 568 bp, Homo sapiens
acacggctggggaaccgtggggcaggatggagtgtgggtccttcgtctcttggcttcctgggtgtcggagctgggtgtaaatccaagcacccaccctgcagcctgtgctcagcccaccgtgctccaggctgctcaggctttgtgcacggagtagagtcagaggcaacggaagaggaggtggcagccagcactcttgggcccgggacccttgcttgagacttgacatgaaatggaagagagtgcgagaactggaaggagatcacagtagctctggctttcagacacaagtgtctatttcctcagtcaaggagaagccttcctcacaccatgagaggtgtggaccttgtatctcttacaacaaccaaggctggacaccacctcctaatgtcgttggaaaagccagtgctccaccttatgacccaaactgactgagagaatgtttgccaggcccctggctgtctacgaggaatgggagagacgggatttcaccgtgttagccaggatagtctcaatctcctgacctcatgatccacccgccttggcctccctaagtgctgggattacaggc

SEQ ID NO: 3061 - protein, 67 aa, Homo sapiens
MKWKRVRELEGDHSSSGFQTQVSISSVKEKPSSHHERCGPCISYNNQGWTPPPNVVGKASAPPYDPN

SEQ ID NO: 3062 - DNA, 571 bp, Homo sapiens
ctaaaatacctaaggtgactccctgtggaaatattgatgacttgccctatgcattagaagatcacgcaggctcccagcccaaagggactacagaacaatcttgatcacatccacccagcaacctggaaacagctttgaatttcttgtcgtgttaacctctggatctgaagagagggtaaacttaaaattaccttcccatggggacctgggactctggatgaatctacagtacaatgctgtgaagaactgaagagcctcaggcttagagaccaggctaatgttgagagtcccagggcaaaatgcatggctctgaatccttgcagagtctccctaggggcatggagagggccctgacttggggctcgaggtcaggtggcagtgaagggcctctacagcgataaagcccagctgcctctttacctttcctcatagtgaaaatacatgggaagaaaaggagtgctttgtccaactctgttctagcccatttcatggtctggttgattcttttggtagatgctgaacactggaaaaatcctgcaaggattgaagaatgctactactaatagcagtg

SEQ ID NO: 3063 - protein, 33 aa, Homo sapiens
MHGSESLQSLPRGMERALTWGSRSGGSEGPLQR

SEQ ID NO: 3064 - DNA, 485 bp, Homo sapiens
ggcgcgcggtggctgaggcgcttgcggcggcggcggaagaccccgtcggcgaaggtgtactcgctgttggggttgagcatccagtagttgtccttgccccagggccgcgaggggtcgcgcagcaccttgacgaagcagtcgttgagcgaaaggttgtggcgcacggagttgcgccagcccgtgtagctgccgcggaaaaaggggaacttgcccatgagctatcagagaaaccgagaatgtatggagcagggcgtgtctatccacaacaccctcaaggctgaatacagttggggagaccagacgctgccagacgtcacatgcatttttttaaagtttcccagaagtgcttggatatttctgccccttaattcccattccttggggagtacattgatgggttaataaaaaatgcctgcaggtggagcttgaccaaacacttgtaggtgactccctgtggaaatattgatgacttgccctatgcatta

SEQ ID NO: 3065 - protein, 62 aa, Homo sapiens [sequence omitted]

SEQ ID NO: 3066 - DNA, 2321 bp, Homo sapiens
ctcaacgtcgaaccgaaggcgacacccacccaactcctccctctccgccccatagtccacccaacacttgcagcccctccagagaaaaagcccagcggaagaggactccggaaaagtgactatctcggaagaccagggtagagctcccgggagaaaaaggcgaagatccccggccccggatcgccatccccttccctggcaccagcttctctaggctgcgcgaaggaagagggtacgacgccggggagggactgggtgcgcgggcatgaagttggaggtgttcgtccctcgcgcggcccacggggacaagcagggcagtgacctggagggcgcgggcggcagcgacgcgccgtccccgctgtcggcggcgggagacgactccctgggctcagatggggactgcgcggccaacagcccggccgcgggcggcggcgccagagatacgcagggcgacggcgaacagagtgcgggaggcgggccgggcgcggaggaggcgatcccggcagcagctgctgcagcggtggtggcggagggcgcggaggccggggcggcggggccaggcgcgggcggcgcggggagcggcgagggtgcacgcagcaagccatatacgcggcggcccaagcccccctactcgtacatcgcgctcatcgccatggccatccgcgactcggcgggcgggcgcttgacgctggcggagatcaacgagtacctcatgggcaagttcccctttttccgcggcagctacacgggctggcgcaactccgtgcgccacaacctttcgctcaacgactgcttcgtcaaggtgctgcgcgacccctcgcggccctggggcaaggacaactactggatgctcaaccccaacagcgagtacaccttcgccgacggggtcttccgccgccgccgcaagcgcctcagccaccgcgcgccggtccccgcgcccgggctgcggcccgaggaggccccgggcctccccgccgccccgccgcccgcgcccgccgccccggcctcgccccgcatgcgctcgcccgcccgccaggaggagcgcgccagccccgcgggcaagttctccagctccttcgccatcgacagcatcctgcgcaagcccttccgcagccgccgcctcagggacacggcccccgggacgacgcttcagtggggcgccgcgccctgcccgccgctgcccgcgttccccgcgctcctccccgcggcgccctgcagggccctgctgccgctctgcgcgtacggcgcgggcgagccggcgcggctgggcgcgcgcgaggccgaggtgccaccgaccgcgccgcccctcctgcttgcacctctcccggcggcggcccccgccaagccactccgaggcccggcggccggcggcgcgcacctgtactgccccctgcggctgcccgcagccctgcaggcggcctcagtccgccgccctggcccgcacctgccgtacccggtggagacgctcctagcctgagtagcgccgcggggcccgggaacgccgagtgcgcgccgtcggggaggcgggaacgcgggcccgcgcgcggactttgcactttgaatccagaggaagatgaatttttaaaatctccatcaaacgtgccttaaagctaaagcattttgacaggagtatttaaacttagtccaggatattttcctttgtgttttataactttacagaggaccaaagcaattcttgttttagtttctttgcgaagcctgctcctccttcccttcataaggactttttttgtctttctttaacgcccaggcttcgtcttatttctactgtttttgtcgcaacttccattgatttatgtcccttccctcccccctaagtacatcagggaacctttccacactataaatgatatgactactgtttggggtttctgggcccccatccgtgtacgtatgtggcatttccaggtatgactgagtgtgagagacatgtcagaggctcttcagtgatttcttgctattgaccgatgcttcactgtgccaaaagagaaaaaaaatgttgggttttgtaattaaattatttatatatttttgaaacccgaattgaaaatgttgcaggcaacgggctacagctttattagtggttctctaactgtggtctccttgggccaagcaatttctttaaaggaaaagttgattatgtatgtggggtgccaggaccactgccttgaaagcaagtgtgatttttatttttaatattattttatttgtgtctgtgtacatattcatgtataaattttatgaaacccaagcatagtgcttattttttaataaaacaactgacttaacacattgtgatg

SEQ ID NO: 3067 - protein, 403 aa, Homo sapiens; identical to SEQ ID NO: 316

SEQ ID NO: 3068 - DNA, 413 bp, Homo sapiens
tgggcacagaggttgccaaaagggccagtaggaggagaaggcttcatggaggacgggggcaagagcgggccgaccatgctggcttcctcgccttgtgtctggctgactgcacaggcctgaggaggctgtgtgtaagttggcaaatgacaggaagagcatgtgcttctaatcacccacccatcttaataacgtcgaacagatacagtgcagaaactattgcacaaccaccagcatttcattacatcagaatccttgccaatttgaaagaggtccttgaatccagggagagttacatctttacgtttttgatcacgatcctcttggaagatacttattagggccatttgttgatgacaatattaagaattagcaaatatcttcttaaatataacaaaaattgaattgtttcatta

SEQ ID NO: 3069 - protein, 64 aa, Homo sapiens
MTGRACASNHPPILITSNRYSAETIAQPPAFHYIRILANLKEVLESRESYIFTFLITILLEDTY

SEQ ID NO: 3070 - DNA, 703 bp, Homo sapiens
ttccagtccagggatcaccggtggagacccattagtctatgccatcctagtcccacccgcctgacacctcatgctcaccagaaggacaccttgggctgaccagagaggagggtttctgtgtgagaagcgatttgtgaatgcatctcataaatgccctgctctcagctgctgaacattctcctgctgaaaggcagggagctaattagcacagccacctcgacagcgtctgttccagtcacccctgcatgcatgctagaacacctttgaacaatggatgacagtctgcagagagcacagagctcccggagaacataaaaatgcaatggaacagaatgaagggatgcaagtcacaatcgtctcaactgcaagttggccaaagtaaacattgccccaaagtgctcccaaagcttgctggcacataaacatgaatgaatgaacaatgtagaattcactcaagaaatttcaaggagagagaggaggagatttacatcacacagcaaacaacctaataaatctgttaaacgccatgcatgtgaataggcgttttcctctttttgaccctttctttccacatagaactcagtgctccttcctcgtcctccgttacagtatttatcgccttccttcttccacgccggggagcagtcgaggcttgtgttcttcagcggacttgccaaatcatcccctccagcatgctgctctc

SEQ ID NO: 3071 - protein, 34 aa, Homo sapiens
MQWNRMKGCKSQSSQLQVGQSKHCPKVLPKLAGT

SEQ ID NO: 3072 - DNA, 748 bp, Homo sapiens
gaaccatgagaaagctttaaatggggatgtaaaatatgatctgtggaagggagagagcagcatgctggaggggatgatttggcaagtccgctgaagaacacaagcctcgactgctccccggcgtggaagaaggaaggcgataaatactgtaacggaggacgaggaaggagcactgagttctatgtggaaagaaagggtcaaaaagaggaaaacgcctattcacatgcatggcgtttaacagatttattaggttgtttgctgtgtgatgtaaatctcctcctctctctccttgaaatttcttgagtgaattctacattgttcattcattcatgtttatgtgccagcaagctttgggagcactgtaaaaataaaaaaggttagaccactgttagacatctgggaaacatctatgttagagaaggactatatattaatttatctcatttatgggaggcaaatactatgattattgaaggtacatctctttctttatggatggagtacatcttatttttctaaaatttgtatttgaacctatttatttctaattgtcaaaaatgtgaagtgagaaacttaaaaactttttagtttctcttgtcccaccattttatgtacttccaggttgtcaaataatttggaattttagacttagataattctctaatgtatattatagatcttctatttcaataattagcttatattttaattaaattgtataactgcattaaaatatacttaactatgt

SEQ ID NO: 3073 - protein, 87 aa, Homo sapiens
SVEGREQHAGGDDLASPLKNTSLDCSPAWKKEGDKYCNGGRGRSTEFYVERKGQKEENAYSHAWRLTDLLGCLLCDVNLLLSLLEIS

SEQ ID NO: 3074 - DNA, 1064 bp, Homo sapiens
ggtcattcagacagaactgtccactaagaagaaatggaatctatggttctgcaggtcagaatggtctgtaccagagatgaagtcatcggtctacagatgaattgagtgaaagcaatcacccagagccaggcaaggtgtcagagctccaacatcaaaaggtggttgactggtgggttggtaagaagaatttaccactgaccgtataggactggaaaaggaaaggtttattaggtagaaagaacgctgtcgaagagtgcagctgcagcggagcacctcagcaagagaggactgagtgcaacacagtggatccttcctcaggggtatttatggaccttaaagccggagctgaagatgatctgtggaagggagagagcagcatgctggaggggatgatttggcaagtccgctgaagaacacaagcctcgactgctccccggcgtggaagaaggaaggcgataaatactgtaacggaggacgaggaaggagcactgagttctatgtggaaagaaagggtcaaaaagaggaaaacgcctattcacatgcatggcgtttaacagatttattaggttgtttgctgtgtgatgtaaatctcctcctctctctccttgaaatttcttgagtgaattctacattgttcattcattcatgtttatgtgccagcaagctttgggagcactgtaaaaataaaaaaggttagaccactgttagacatctgggaaacatctatgttagagaaggactatatattaatttatctcatttatgggaggcaaatactatgattattgaaggtacatctctttctttatggatggagtacatcttatttttctaaaatttgtatttgaacctatttatttctaattgtcaaaaatgtgaagtgagaaacttaaaaactttttagtttctcttgtcccaccattttatgtacttccaggttgtcaaataatttggaattttagacttagataattctctaatgtatattatagatcttctatttcaataattagcttatattttaattaaattgtataactgcattaaaatatacttaactatgt

SEQ ID NO: 3075 - protein, 87 aa, Homo sapiens; identical to SEQ ID NO: 3073

SEQ ID NO: 3076 - DNA, 1621 bp, Homo sapiens
tattttttttagaactctaatatgaaaatctggttgatttcaataattaagcctagaaagaaatgaatatgtaagcatatatgaaaggattaatattactaggtgttattttgtacataaaatgaggcatagacttataaaacattagaatcaaataacatttctggaaatttaggccatattgaaattataatgtttcttttaaaatgtttgttctgcaaacctaattgagccatagagttaaaacccttaatcttccattttcagtttcatagtacttttttctgctttatttttatctgctctaggtattgtattcgtattcaattggttttgtatacattttactgggattgacatgcactagtggattaggccctgcagtaacattttgtgcaaaggtaaacactaatcacatttaaaaaaaaaaatcttctgttaaataattttctctaaatttctcatttcccttgttcaaaagaggctatcatagatataatgatacctcctttaacataacatgccaatcggaaattaatttcagaaatgaaatgactgatatttaaatttattttatccttgctgtaccctatgagttgatttttaagctgttcataatgtaggaaagttgaggatctttaatttcaacatttttttttcattaaatcaaaataagaatctttgcttgactgcattgtcaaacaacttattgctcaagaagttgattaacatctgtagttttattttatttgtaatacctcggagtttgttttacatttttctaacaggcttttttattttttgcagaatccagttcggacctatggttatgcgttccttttttccctcactggatattttggaatctcctttgttctggctttgattaaaatttttggtgcacttattgctgtaacagtgacaacaggaagaaaagcaatgaccattgtactttcgtttatattctttgctaaaccattcacgtttcagtatgtatggtctggtttgttagttgtccttggtatatttcttaatgtttacagcaaaaatatggataaaataagactaccatcactgtatgatttgataaacaaatcagtggaagcaagaaagtcaaggacgctggcacagactgtatagacagtgattgtcctatttaaaatagaattttaagggaacaatcatcaattaattaactttccaaagggactgataaaaaccaaaggatctggaggcattgctatcccatttgtggacagatttcatatgaagttgttttgcggtgtcagccttttcttcagagcatttgtttgactgacttccaaagcaatcaagagagccacgtctagcagactttacaataaaatgtcaatatgaaggactgtaattcctagcagtttattgagaatttcactggaaatggaccatgtgttgcaagactaattggctataattatatcctatcaaagaaatcgatacgtaatagcagattgttttatattcattccattttgatggtgttatttaaattgattctctgttataagagtaaactgatgagttgaagtctggagagaataacattcattataaataaaattattctgtgatcttttttcaa

SEQ ID NO: 3077 - protein, 66 aa, Homo sapiens [sequence omitted]

SEQ ID NO: 3078 - DNA, 2124 bp, Homo sapiens
gaagtggcctgcgggcgccggagttgagagtgctttccggggaggcgaccgccgcggtggaaagtgcaggagtgggcgaggaggaggaggaagaggaggtgatggcgacggaccaggggagggggagatgctccgtctagctcagacgccacgcaggctgccgtcacccttccgggtgacataccggccttggggtacgcgtgccttcggggcctttcctgtgtttgggacccagatctcctctcctccagaaaaccttgacactgcccatcttcctcatccagaaggagcgttcgaggaatggatgaggtcgggatggaagaaacgggtgattcccttttttgaaagagcggaaaccggccgggcggtttccagggaggagcatctgttcctcctcgcccgtttttcgccctcgggctggcgagaactccctcaggtcccaatccgtggactcgcaggggtgaggtgacctcaaggggtcttttacgctgttctcggggtctctggagaactgtcagtcacctggatacctctagactgtatttacagttaactgtttcctcgttccgtgtttattaaataggggcactccaaggacttgacacagcaagcaaaagacatacagaacataacagtccaggaaaccaacaaaaataactctgaaagcattgaatgcagcaaaataacaatggatctcaagttcaacaattccaggaaatatatttctatcactgtgccatccaaaacccaaacaatgtcaccacacatcaagtcagttgacgacgttgtggtacttggcatgaatctcagcaagtttaacaaacttactcagtttttcatatgtgttgctggagtttttgtattttacctaatttatgggtatttacaggaattaatattttcagtggagggttttaagtcctgtggctggtaccttaccttagtgcagtttgccttttactccatatttggcctaatagaacttcagcttattcaggacaaaaggaggaggaaagcgttataatgttgcagatgtgtctgctgccatatgtatgagccttggcctgatatggtttaccctcgctgacagcacaactgcaccaaatttcaacctgacgggtgtggtgcttatttccctggcactatgtgcagatgccgtcattggaaatgttcaagagaaagctatgaaacttcataatgcttctaattctgaaatggtattgtattcgtattcaattggttttgtatacattttactgggattgacatgcactagtggattaggccctgcagtaacattttgtgcaaagaatccagttcggacctatggttatgcgttccttttttccctcactggatattttggaatctcctttgttctggctttgattaaaatttttggtgcacttattgctgtaacagtgacaacaggaagaaaagcaatgaccattgtactttcgtttatattctttgctaaaccattcacgtttcagtatgtatggtctggtttgttagttgtccttggtatatttcttaatgtttacagcaaaaatatggataaaataagactaccatcactgtatgatttgataaacaaatcagtggaagcaagaaagtcaaggacgctggcacagactgtatagacagtgattgtcctatttaaaatagaattttaagggaacaatcatcaattaattaactttccaaagggactgataaaaaccaaaggatctggaggcattgctatcccatttgtggacagatttcatatgaagttgttttgcggtgtcagccttttcttcagagcatttgtttgactgacttccaaagcaatcaagagagccacgtctagcagactttacaataaaatgtcaatatgaaggactgtaattcctagcagtttattgagaatttcactggaaatggaccatgtgttgcaagactaattggctataattatatcctatcaaagaaatcgatacgtaatagcagattgttttatattcattccattttgatggtgttatttaaattgattctctgttataagagtaaactgatgagttgaagtctggagagaataacattcattataaataaaattattctgtgatcttttttcaa

SEQ ID NO: 3079 - protein, 196 aa, Homo sapiens
MSLGLIWFTLADSTTAPNFNLTGVVLISLALCADAVIGNVQEKAMKLHNASNSEMVLYSYSIGFVYILLGLTCTSGLGPAVTFCAKNPVRTYGYAFLFSLTGYFGISFVLALIKIFGALIAVTVTTGRKAMTIVLSFIFFAKPFTFQYVWSGLLVVLGIFLNVYSKNMDKIRLPSLYDLINKSVEARKSRTLAQTV

SEQ ID NO: 3080 - DNA, 6156 bp, Homo sapiens
aggcggaagtggcctgcgggcgccggagttgagagtgctttccggggaggcgaccgccgcggtggaaagtgcaggagtgggcgaggaggaggaggaagaggaggtgatggcgacggaccaggggagggggagatgctccgtctagctcagacgccacgcaggctgccgtcacccttccgggtgacataccggccttggggccatgattgattccggagcgcagttaatcaaggcataatggcatggtaagattcttttatttgtaacgttgagtgtggcaaagtatagttaaaatcacgttttttcaggttaatgacaccgtaatgacttttttttcatattctacctttttttggtgtgggacttttgtccttcaggtcggaaaactcaaaaataaactgaaataattgtgacttcaataggtcattgtaactcaacattatcactaattttaatttttaaatatacattgtatgccggaaatgctacctttttattccattttagcagttgaagttgaatatctgtgttgaatttaggaagaggcctcaggcaattatacacacctgtgatttttaaaatatatatatatatattttagtttcactgattactgtgagcttcaaaagcaaagcacaatgttgatcatttagtctgaaaactaattttaattccatgcttcatttttgctccttgcatcacaaggagtttggcccatttttttttttagatgatggttagtatcagtcattaatgtttgaagtggaagggatatggcagacattccccaatgatcacagttattaggtatcagaggtctttatcagtcacactttctcaccagtgatgttcttattaataaaacagcattctaaatgcaaggctttggtgggcaagttttatgagactgatgcctcaggcagaggaaacaaatttattttcatgttcatttcaaatgttttgtggggagtttcagtagcaatgtcggtattttggcatacatgtagaaaagacagtgctagagagatttcattctgcacatatggcctagatctgcagcacataaagttgccaagaagtgtattagaagtggtaaagtgttggaaaggagctgaataacgttgattaaataaatggtgcttgctaaactgtggtagagtccttcatttaatcttacatttttgttatgtgccagaacatcataggaagatatctcttgccttaaggatttcataggcttttaggagaaacaagtataaaaacgaaaaagctataccattatcatttaggaatttgaaaaatatgtataatatgattgagtccaggacatcaactcgtttttaacttcgaggccttattcatggatgcagcatgatcagacttcacgttgagccatgtgacagatgggtcagaaagggaagaattgattataaacagtctcgtaatctaggcaagagaaaatggctgcctgatggagtagggtccgaaacagatattagatatagttatagaggtagagttaacaggaatcttggcaaaatatagaatgtgaggaaaaggaaagattcttaagatgactcccagatttttagcttgtgtttcatactaggtactgttaagtgagattgggaatataggaacaaacagtagatttgttttgaggggaaaataatcagctttggccattttaaatatgaagtgccagcagagcttatgagtagaggtatcaaagaagcatttagacgtagagctctggatctcaggagagaaggcagcgttggaaattcaggtctgtatttccagctgcacatcaaaggggtgagtcagcttgagcacaccatatcaccctagcaatatttctaaaaagttgaaggatgacagctaacacacttatggactgtcatatgccaggcaattttacatttatttcatatagtcctaaccaaaatcctgtgataggcacatttttaactcctcccacttttgaaggtgcagaacctaaagctcagaaaagttaaacgatttgcccaaggctcctcagctaataagtagtaaagccagatcttgaactcatatctgtcaaaattccaaagcatggggaaagcattatgctatactgctttcttatactattacctataattgtattgagtcattacaatatgcttggcagtttactaaattacaaacatctcagaagaaggtgactttgggaaagcgtgaccttctggagaaatgttttgatgccaataaaagcaggaaagaaagatattttctagaagttttatttattctgtatgtatgtgtaaatatgtaagcattatttgtaaattttccccactctttttctataagattttcagttttgctcataaagtttgccagtaccaccatccatttcaaaaatcgtatccaagcagaaggtgagtgattgcaagctgaagtttgagggtatcaagaggaaggatcagtttatttggttcatctgaatatcaggtcagagtatatgccaggtaccaaggacacagagacaaataagatttgaatcttgcctttcaagttctcttttctaataactggggggattagtgatggtgtcacaaaggaggggatattaaagctgaacttccaaacctgaccttgagaaagaagacctcaggctgaaaggacatcatgaacagaaggcagcggtgttttaaagtccctggtgtatttcaggaatgaaacatgggtggtttagggctttattgagagtggagggagagcaaacttagaaacctatgtaaggccgggtttatttgaatggtgcactatatccatgctcacacatagaaaagagtaaattgttaaggttttcgtctcttctacattcaagcacaggtttgaccaaatatttaggagagataatttaaagcatggttttaaaagaaagtcacatctcaaagataccctgcaagattacataaaaagtcttacaaatgacagtgattgaaacataatgtgggaagcaagaacaaaggaaagtgaagaataaacaagaggaacacagtaaacttcatgaaacaacttttctatttagaaataaggcaggtgccctataaaatgttgtggtggctgcatatttttagttacaagtggtattcagatccttgacccctcctttaattcctaaggatgacctggttaacctctgtaaattagcaaactagaagtgatcatgaagaggcgactctaattttggccattttaagccatcttgtaacagtttaaaaaaacattaccaaaggaaaactcactgtcaaaattattcttatttctcttcgtgccgcagagtttaaatttttgttcccactggaattaaaaacagatgagtcgtttctaagaaaataactttttcttttacataggtttattctatactttgtcataattcttcagtctttcctcagtctttacatggagttcattttttcagtttatataaatccaaagagaaattgatggcttcataattttttttagactgacaaaaaatgacatgttttctccagccttttacatcccagaagaatgtaaattaaaatgatttgttccagaggaagaaaacattttttaacctaagagatgctactgctgaagcatattgtgctttctgtagtctctgataaatctagctttttaaggaccttaggtttggggtttctttgttttgtttttttcatttattttctagagacagggtctggctctgtcgcccaggctggagtgcaggggtgcaatcatagattactgcagcctcaaactcctggactcaagtgatcatcctgcctcagcctcccaagtagctaggactacaggcatgcaccaccatgtccagctaatttttttattttattttattttattttatttggtagagagagggtcttgctatgttgcccaggctggtcttgaactcctggtctcaagcaacctctctgcttcagcctcccaaaatgttgggattacaggcatgagccaccacacctggccttcatttttttagtttattttttaaatgtcattagcaaatatatcttagaattgtcttagtatttaaaggagaattacttattttttactcctctacaagtgaagattgactttaatgttgagaatgttatgcatcaactatatatagacacaaagacatgtttagttctttgatgaaataactagcttttgttgctgtggaaataagtatggtttatattcagtttaatgatgtactaatctttatcagctgtagacaaattgtttaaagattgtaggcatattgtttttggtgatttggaacctagaatacaggaattaatatactaatatccagagagaagcagacatttgtataactttaaagtatgatttggaatattatttggaggattaaactttatcatgtaaatgttttaattgcttatttccttctctaggacttgacacagcaagcaaaagacatacagaacataacagtccaggaaaccaacaaaaataactctgaaagcattgaatgcagcaaaataacaatggatctcaagttcaacaattccaggaaatatatttctatcactgtgccatccaaaacccaaacaatgtcaccacacatcaagtcagttgacgacgttgtggtacttggcatgaatctcagcaagtttaacaaacttactcagtttttcatatgtgttgctggagtttttgtattttacctaatttatgggtatttacaggaattaatattttcagtggagggttttaagtcctgtggctggtaccttaccttagtgcagtttgccttttactccatatttggcctaatagaacttcagcttattcaggacaaaaggaggagaataccaggaaaaacctacatgataatagcttttctaactgtgggtactatggggttatcaaacacttccttgggctacctgaattaccctacccaagtcatcttcaagtgctgcaaattgattcctgttatgctaggaggagtttttattcaaggaaagcgttataatgttgcagatgtgtctgctgccatatgtatgagccttggcctgatatggtttaccctcgctgacagcacaactgcaccaaatttcaacctgacgggtgtggtgcttatttccctggcactatgtgcagatgccgtcattggaaatgttcaagagaaagctatgaaacttcataatgcttctaattctgaaatggtattgtattcgtattcaattggttttgtatacattttactgggattgacatgcactagtggattaggccctgcagtaacattttgtgcaaagaatccagttcggacctatggttatgcgttccttttttccctcactggatattttggaatctcctttgttctggctttgattaaaatttttggtgcacttattgctgtaacagtgacaacaggaagaaaagcaatgaccattgtactttcgtttatattctttgctaaaccattcacgtttcagtatgtatggtctggtttgttagttgtccttggtatatttcttaatgtttacagcaaaaatatggataaaataagactaccatcactgtatgatttgataaacaaatcagtggaagcaagaaagtcaaggacgctggcacagactgtatagacagtgattgtcctatttaaaatagaattttaagggaacaatcatcaattaattaactttccaaagggactgataaaaaccaaaggatctggaggcattgctatcccatttgtggacagatttcatatgaagttgttttgcggtgtcagccttttcttcagagcatttgtttgactgacttccaaagcaatcaagagagccacgtctagcagactttacaataaaatgtcaatatgaaggactgtaattcctagcagtttattgagaatttcactggaaatggaccatgtgttgcaagactaattggctataattatatcctatcaaagaaatcgatacgtaatagcagattgttttatattcattccattttgatggtgttatttaaattgattctctgttataagagtaaactgatgagttgaagtctggagagaataacattcattataaataaaattattctgtgatcttttttcaa

SEQ ID NO: 3081 - protein, 369 aa, Homo sapiens
MDLKFNNSRKYISITVPSKTQTMSPHIKSVDDVVVLGMNLSKFNKLTQFFICVAGVFVFYLIYGYLQELIFSVEGFKSCGWYLTLVQFAFYSIFGLIELQLIQDKRRRIPGKTYMIIAFLTVGTMGLSNTSLGYLNYPTQVIFKCCKLIPVMLGGVFIQGKRYNVADVSAAICMSLGLIWFTLADSTTAPNFNLTGVVLISLALCADAVIGNVQEKAMKLHNASNSEMVLYSYSIGFVYILLGLTCTSGLGPAVTFCAKNPVRTYGYAFLFSLTGYFGISFVLALIKIFGALIAVTVTTGRKAMTIVLSFIFFAKPFTFQYVWSGLLVVLGIFLNVYSKNMDKIRLPSLYDLINKSVEARKSRTLAQTV

SEQ ID NO: 3082 - DNA, 2205 bp, Homo sapiens
agggacacataggcggaagtggcctgcgggcgccggagttgagagtgctttccggggaggcgaccgccgcggtggaaagtgcaggagtgggcgaggaggaggaggaagaggaggtgatggcgacggaccaggggagggggagatgctccgtctagctcagacgccacgcaggctgccgtcacccttccgggtgacataccggccttggggtacgcgtgccttcggggcctttcctgtgtttgggacccagatctcctctcctccagaaaaccttgacactgcccatcttcctcatccagaaggagcgttcgaggaatggatgaggtcgggatggaagaaacgggtgattcccttttttgaaagagcggaaaccggccgggcggtttccagggaggagcatctgttcctcctcgcccgtttttcgccctcgggctggcgagaactccctcaggtcccaatccgtggactcgcaggggccatgattgattccggagcgcagttaatcaaggcataatggcatggacttgacacagcaagcaaaagacatacagaacataacagtccaggaaaccaacaaaaataactctgaaagcattgaatgcagcaaaataacaatggatctcaagttcaacaattccaggaaatatatttctatcactgtgccatccaaaacccaaacaatgtcaccacacatcaagtcagttgacgacgttgtggtacttggcatgaatctcagcaagtttaacaaacttactcagtttttcatatgtgttgctggagtttttgtattttacctaatttatgggtatttacaggaattaatattttcagtggagggttttaagtcctgtggctggtaccttaccttagtgcagtttgccttttactccatatttggcctaatagaacttcagcttattcaggacaaaaggaggagaataccaggaaaaacctacatgataatagcttttctaactgtgggtactatggggttatcaaacacttccttgggctacctgaattaccctacccaagtcatcttcaagtgctgcaaattgattcctgttatgctaggaggagtttttattcaaggaaagcgttataatgttgcagatgtgtctgctgccatatgtatgagccttggcctgatatggtttaccctcgctgacagcacaactgcaccaaatttcaacctgacgggtgtggtgcttatttccctggcactatgtgcagatgccgtcattggaaatgttcaagagaaagctatgaaacttcataatgcttctaattctgaaatggtattgtattcgtattcaattggttttgtatacattttactgggattgacatgcactagtggattaggccctgcagtaacattttgtgcaaagaatccagttcggacctatggttatgcgttccttttttccctcactggatattttggaatctcctttgttctggctttgattaaaatttttggtgcacttattgctgtaacagtgacaacaggaagaaaagcaatgaccattgtactttcgtttatattctttgctaaaccattcacgtttcagtatgtatggtctggtttgttagttgtccttggtatatttcttaatgtttacagcaaaaatatggataaaataagactaccatcactgtatgatttgataaacaaatcagtggaagcaagaaagtcaaggacgctggcacagactgtatagacagtgattgtcctatttaaaatagaattttaagggaacaatcatcaattaattaactttccaaagggactgataaaaaccaaaggatctggaggcattgctatcccatttgtggacagatttcatatgaagttgttttgcggtgtcagccttttcttcagagcatttgtttgactgacttccaaagcaatcaagagagccacgtctagcagactttacaataaaatgtcaatatgaaggactgtaattcctagcagtttattgagaatttcactggaaatggaccatgtgttgcaagactaattggctataattatatcctatcaaagaaatcgatacgtaatagcagattgttttatattcattccattttgatggtgttatttaaattgattctctgttataagagtaaactgatgagttgaagtctggagagaataacattcattataaataaaattattctgtgatcttttttcaa

SEQ ID NO: 3083 - protein, 401 aa, Homo sapiens; identical to SEQ ID NO: 318

SEQ ID NO: 3084 - DNA, 7357 bp, Homo sapiens
gcacgcgcgcagggacacataggcggaagtggcctgcgggcgccggagttgagagtgctttccggggaggcgaccgccgcggtggaaagtgcaggagtgggcgaggaggaggaggaagaggaggtgatggcgacggaccaggggagggggagatgctccgtctagctcagacgccacgcaggctgccgtcacccttccgggtgacataccggccttggggacttgacacagcaagcaaaagacatacagaacataacagtccaggaaaccaacaaaaataactctgaaagcattgaatgcagcaaaataacaatggatctcaagttcaacaattccaggaaatatatttctatcactgtgccatccaaaacccaaacaatgtcaccacacatcaagtcagttgacgacgttgtggtacttggcatgaatctcagcaagtttaacaaacttactcagtttttcatatgtgttgctggagtttttgtattttacctaatttatgggtatttacaggaattaatattttcagtggagggttttaagtcctgtggctggtaccttaccttagtgcagtttgccttttactccatatttggcctaatagaacttcagcttattcaggacaaaaggaggaggtatgtggtttgtttttattttttgatatttctatattagttgaatttttttggcatactgaatatgcatgaaatttatacttctattaacaaaacatgtgataggcacgaactcttagtgtaactaacttaatactaaatacattttattcatttatacactgaaaaaaataaagtcttaaatgcagtattacaaaataaaaaaatattagctttaggctcaacttagtgttatatgttcttacaacatgataaaaaacacaatgtacatacttgatttgtataaattctgctgaaataggtgcagttactgatttgtagtacaactaacatcacagtggtgaaatgaaatatcagtacaggttgagcatcctaatccaaaaatcctaaatccagaaatgctccaaaattagaaaagttttgagtgccaatgtgacacaagtggaaacttccaaacataagtacttaacacaaattttgttttgtgcacaaaatgatataaaatgtgcaccatgaccagctctgggacagctgggatgcagggcaccaagttcttaagctgcacacagcatagtgaccttgggtgcagcccacaaaacctttctttcctcctaggcttcctggcctgtgatgggagtggctgccatgaagacccatgacatgctctagagacattttccccattgtcttggggattaacattcagatccttgttaggcaaatttctgcacccagcttgaatttctcctcaaaaaatgggtttttcttttctactgcatcgtcaggttgcaaattttctgaaccgttttcctctgtttccgttttaaaatggaatgctttcaacagcacccaattaccttttgaaggctttgctgcttagaaatttcttccaccagatacactaaatcatctcaaagttccatagatctctagggcaggggcaaaatgccaccagtctctttgctaaaacataacaagagtcacctttgctctagttcccaacaagttcctcatgtccatctgagaccacctcagtctgaaccttattgttcatatcactatcagcttttttgccaaagccattcaacaagtctctaggtggttccaaactgtcctacattttcctgtcttcttctgagccctccaaactcttccagcctctgcctgatacccagttccaaagttgcttccacatttttgggtctcatttcagcaacatctcactcctggtaccaatttactgttattagtccgttttcatgctgctgataaagacatacccgagactgggaagaaaaagaagtttaattgaacttacagttccacatggcttgggaggcctcagaatcatggcaggagtcaaaagtcacttcttacatggtggtggcaagagaaaatgaggaagatgcaaaagcggaaacccctgataaaaccatcagatcttgtgagacttattcactaccatgagaacaatatgggggaaaccacccccatgattcaaattacctcccactgggtccctcccacaacagatgaaaattatgggagtacaattccagatgagatttgagtggtgacacagcgccaaaccatatcaaaaatgttctataaaattaccttcaggttatgtgtataatgtatatatgaaacataaataaatctcatattaagacctgtgtcccattccccaagataccttactatgcagatgcaaatattccaaaacctgaaaaaaatcgaaatttgaaacactctggtcgccagcattttggatgagggataccaagtctgtatctattgttattctgcttttttagaatgtgaagttatattttgtgggatatgccccagctaacattgccatatgatgtccgatagctgaggttgcgttcttaagcattagagaaacaaatctcattccttttcatcaagaccaaatgtgcttgtttgacaatatcatttcaggtagcaaccatctagatttgagaaatatcttgatatatctttaatggcatctagaacaatatgcaataaaacttagtctctgattataaacagaaagtggttaggaatttgaatataaaatgttcttggttaatgtaagaagcgtgctccttctgtcgtaccctaatgtgtgtatatatcgtgtatctattgggcagtttaaatgtaataacgactgtaatactgacataccttgatacaaatgtttaatcctttagtgaagatttcaaaaattgtgcagctttttttttaatcataaaatggtgttgaagtttgtatcaaggtaactacagttttacatatttaaatctatattacaggtttcttcatgggtctaattttgcctctcaacctgtctttattgccaataaattattgtagcaattattgtaaaaatatttgaaccttagaatatcatcttcattatttttatgttctatcatgattctccatgatagaatcatggaggcaagctgatgaaatccaacttcctcattttaccaatgagaaaacaaagacctagaggagtactgggaatagccataggtgatagaataggtaattaaatatatctgtcaagactaatatataaggaagcttgatgatgatttactacttattacaaactactgggccttctaaggtaagattgcttctaaggtaaaagacactaatactatctttgtaggtgaaaaatgatacaatgatgatgcatgttctgttacatttcagaaagaaacacctccctatcagctaccccgatgagaggggagggggcctcaagccatgtttatcccaacttttaaatcacgtgaccataacatattttaaaataaaataatttgtacttgatttaaatataagtgaaataatttgggagaataatttatgtatttataataaatgtaattatgaattgaaacctttctgaatttatttctgcaaatacacccatatctgaatttatttaatggtactgctactcgttagacctttaattagctaaactctttgctgttgttatttttttcttcttcccacatttatgtgaataccgacatactggaataagtacatcaatactcgttgagaatttggagttagaaacatgggtttgggtcttggcacttgggtcttattacatctgtcaagacctcagagaagtttctataatactctaaattttatcttgaggctcatatgtggtaatgcgtgctaaagtacatcataaactgtaatatcctaaatatactgcttattatttttcatcaaagaataccttgtaacattattattaattagtataagtttctaattaaggagagtgctcagatttgtcttgaagaggtttttaaagttaaaattttctccccggccaggtgcagtggctcacgcctgtaatcctagcactttgggaggccgaggcaggttgatcacctgaggttaggagttcgagaccagcctggccaacatggtgaaaccccgtctctactaaaaatataaaattagctggacatggtggcgggcacttgtaatcctagctactcaggaggtcaggaggctgaggcaggagaatggtttgaacctgggaggcggaggttgcagtgagccaagatggcgccactgcactccagcctgggcaacaagagcgagactccgtctcaaaaaaaaaattttctccccatttctaaggaagcaagcaattgatgtattaaataaaatagaaatagtgagtatcctggaggcaagctgatcaaatctaatttcttcattataccaatgagaaaacaaagacctagaggactgctcagaattttttgagctccttttggagctacttttggatttagttcccctgtcaggctggttttctttctacctgtactgtgctacttttctactcattccttgtaattcttctgacttgaatttttattttctgccaatgatttgccatttatctttgagaaaatctgaccaccttgacttgtatcattttacctggcgaagtggtgctccaccatcactgatgatatcccaatgagggtcaaaccccatggatggcatgaacgcatttacactgatgcatatgggcatgccaagttgtttccacgtggattttcatggttaactactatattagtagttaagtagaaaaaaacccctcagaatcgaatgtaaatgatgcattttaattgactttttccagtaaattattttaccttatatctaaccatatataagatgagaaattttgttgccttgatttcaatgtgaacacaaattctaaaatggaaattacatctaactctccagcattatcagtatgaatagtgcctgattgtgtctgtgttcgtcataccagtagacaagattattagtttagaccattaaatatctagtcaaagtgagcatatgctcacagtaatggctcaaaattctgaagatgctaaattaagaatctcctttaggaactttagatagagccaaagttaaaagacttgaaatcatgagagagtcagatacctcatcttaaaagttgattattataacatagaatatagagagatgatctataagatattataataaaaattacatctagggttttaaatcacatgaacttttcctagagaaaatcttgggttattttagcagaatggatagatgtatttttcctaatgctagatggaaacattaggaaacagaacaacaattcaagagttaaaaattagttttaaaatgttaaggtaccttttaccattatggaggccaacattagctgggcatggtggcgcacacctgtagtcccagctactcaggaggctgaggcaaaagaatttcttgaacccgtgaggcagaggttgcacttagctgagatcatgccactgcactccagcctaggcaacagagcgagaccttatctcaagcaaacaacaacaaaagaagctctttttctctaacttaagatggttaagatggtttttatttgtggctagaactgctgttaaaaaaaaaaaaaaaaccttttgtcaacatttataccttcagtaaaaatctaaactcttttttacataattgagtggcctcgtttatgattgactaaataaaggtaaattgttatttttataaacttttttatacaagagcattacagtttttaaatagtgatattttttactgatatttccagaaatagtaaccagaaattagaaaagtaattagacatttacacaatgtgaacacattatcttttagtagtatgaattgggtcccaaaatgaaggttttaaaaattgtcttttacagaataccaggaaaaacctacatgataatagcttttctaactgtgggtactatggggttatcaaacacttccttgggctacctgaattaccctacccaagtcatcttcaagtgctgcaaattgattcctgttatgctaggaggagtttttattcaaggaaagcgttataatgttgcagatgtgtctgctgccatatgtatgagccttggcctgatatggtttaccctcgctgacagcacaactgcaccaaatttcaacctgacgggtgtggtgcttatttccctggcactatgtgcagatgccgtcattggaaatgttcaagagaaagctatgaaacttcataatgcttctaattctgaaatgaatattactaccagtagttattctggggtgtttatattcccaaataaactaaaaatcccattggtattgtgattggtatggcattgaattataaattaatttagggagaatggcatcttgattatttcagtccaagaataaggtattgtattcgtattcaattggttttgtatacattttactgggattgacatgcactagtggattaggccctgcagtaacattttgtgcaaagaatccagttcggacctatggttatgcgttccttttttccctcactggatattttggaatctcctttgttctggctttgattaaaatttttggtgcacttattgctgtaacagtgacaacaggaagaaaagcaatgaccattgtactttcgtttatattctttgctaaaccattcacgtttcagtatgtatggtctggtttgttagttgtccttggtatatttcttaatgtttacagcaaaaatatggataaaataagactaccatcactgtatgatttgataaacaaatcagtggaagcaagaaagtcaaggacgctggcacagactgtatagacagtgattgtcctatttaaaatagaattttaagggaacaatcatcaattaattaactttccaaagggactgataaaaaccaaaggatctggaggcattgctatcccatttgtggacagatttcatatgaagttgttttgcggtgtcagccttttcttcagagcatttgtttgactgacttccaaagcaatcaagagagccacgtctagcagactttacaataaaatgtcaatatgaaggactgtaattcctagcagtttattgagaatttcactggaaatggaccatgtgttgcaagactaattggctataattatatcctatcaaagaaatcgatacgtaatagcagattgttttatattcattccattttgatggtgttatttaaattgattctctgttataagagtaaactgatgagttgaagtctggagagaataacattcattataaataaaattattctgtgatcttttttcaa

SEQ ID NO: 3085 - protein, 153 aa, Homo sapiens
MKVLKIVFYRIPGKTYMIIAFLTVGTMGLSNTSLGYLNYPTQVIFKCCKLIPVMLGGVFIQGKRYNVADVSAAICMSLGLIWFTLADSTTAPNFNLTGVVLISLALCADAVIGNVQEKAMKLHNASNSEMNITTSSYSGVFIFPNKLKIPLVL

SEQ ID NO: 3086 - DNA, 2206 bp, Homo sapiens
gcacgcgcgcagggacacataggcggaagtggcctgcgggcgccggagttgagagtgctttccggggaggcgaccgccgcggtggaaagtgcaggagtgggcgaggaggaggaggaagaggaggtgatggcgacggaccaggggagggggagatgctccgtctagctcagacgccacgcaggctgccgtcacccttccgggtgacataccggccttggggtacgcgtgccttcggggcctttcctgtgtttgggacccagatctcctctcctccagaaaaccttgacactgcccatcttcctcatccagaaggagcgttcgaggaatggatgaggccatgattgattccggagcgcagttaatcaaggcataatggcatggacttgacacagcaagcaaaagacatacagaacataacagtccaggaaaccaacaaaaataactctgaaagcattgaatgcagcaaaataacaatggatctcaagttcaacaattccaggaaatatatttctatcactgtgccatccaaaacccaaacaatgtcaccacacatcaagtcagttgacgacgttgtggtacttggcatgaatctcagcaagtttaacaaacttactcagtttttcatatgtgttgctggagtttttgtattttacctaatttatgggtatttacaggaattaatattttcagtggagggttttaagtcctgtggctggtaccttaccttagtgcagtttgccttttactccatatttggcctaatagaacttcagcttattcaggacaaaaggaggagaataccaggaaaaacctacatgataatagcttttctaactgtgggtactatggggttatcaaacacttccttgggctacctgaattaccctacccaagtcatcttcaagtgctgcaaattgattcctgttatgctaggaggagtttttattcaaggaaagcgttataatgttgcagatgtgtctgctgccatatgtatgagccttggcctgatatggtttaccctcgctgacagcacaactgcaccaaatttcaacctgacgggtgtggtgcttatttccctggcactatgtgcagatgccgtcattggaaatgttcaagagaaagctatgaaacttcataatgcttctaattctgaaatgaatattactaccagtagttattctggggtgtttatattcccaaataaactaaaaatcccattggtattgtgattggtatggcattgaattataaattaatttagggagaatggcatcttgattatttcagtccaagaataaggtattgtattcgtattcaattggttttgtatacattttactgggattgacatgcactagtggattaggccctgcagtaacattttgtgcaaagaatccagttcggacctatggttatgcgttccttttttccctcactggatattttggaatctcctttgttctggctttgattaaaatttttggtgcacttattgctgtaacagtgacaacaggaagaaaagcaatgaccattgtactttcgtttatattctttgctaaaccattcacgtttcagtatgtatggtctggtttgttagttgtccttggtatatttcttaatgtttacagcaaaaatatggataaaataagactaccatcactgtatgatttgataaacaaatcagtggaagcaagaaagtcaaggacgctggcacagactgtatagacagtgattgtcctatttaaaatagaattttaagggaacaatcatcaattaattaactttccaaagggactgataaaaaccaaaggatctggaggcattgctatcccatttgtggacagatttcatatgaagttgttttgcggtgtcagccttttcttcagagcatttgtttgactgacttccaaagcaatcaagagagccacgtctagcagactttacaataaaatgtcaatatgaaggactgtaattcctagcagtttattgagaatttcactggaaatggaccatgtgttgcaagactaattggctataattatatcctatcaaagaaatcgatacgtaatagcagattgttttatattcattccattttgatggtgttatttaaattgattctctgttataagagtaaactgatgagttgaagtctggagagaataacattcattataaataaaattattctgtgatcttttttcaa

SEQ ID NO: 3087 - protein, 283 aa, Homo sapiens
MDLTQQAKDIQNITVQETNKNNSESIECSKITMDLKFNNSRKYISITVPSKTQTMSPHIKSVDDVVVLGMNLSKFNKLTQFFICVAGVFVFYLIYGYLQELIFSVEGFKSCGWYLTLVQFAFYSIFGLIELQLIQDKRRRIPGKTYMIIAFLTVGTMGLSNTSLGYLNYPTQVIFKCCKLIPVMLGGVFIQGKRYNVADVSAAICMSLGLIWFTLADSTTAPNFNLTGVVLISLALCADAVIGNVQEKAMKLHNASNSEMNITTSSYSGVFIFPNKLKIPLVL

SEQ ID NO: 3088 - DNA, 512 bp, Homo sapiens
agtggcctgcgggcgccggagttgagagtgctttccggggaggcgaccgccgcggtggaaagtgcaggagtgggcgaggaggaggaggaagaggaggacttgacacagcaagcaaaagacatacagaacataacagtccaggaaaccaacaaaaataactctgaaagcattgaatgcagcaaaataacaatggatctcaagttcaacaattccaggaaatatatttctatcactgtgccatccaaaacccaaacaatgtcaccacacatcaagtcagttgacgacgttgtggtacttggcatgaatctcagcaagtttaacaaacttactcagtttttcatatgtgttgctggagtttttgtattttacctaatttatgggtatttacaggaattaatattttcagtggagggttttaagtcctgtggctggtaccttaccttagtgcagtttgccttttactccatatttggcctaatagaacttcagcttattcaggacaaaaggaggag

SEQ ID NO: 3089 - protein, 106 aa, Homo sapiens
MDLKFNNSRKYISITVPSKTQTMSPHIKSVDDVVVLGMNLSKFNKLTQFFICVAGVFVFYLIYGYLQELIFSVEGFKSCGWYLTLVQFAFYSIFGLIELQLIQDKR

SEQ ID NO: 3090 - DNA, 569 bp, Homo sapiens
acataggcggaagtggcctgcgggcgccggagttgagagtgctttccggggaggcgaccgccgcggtggaaagtgcaggagtgggcgaggaggaggaggaagaggaggccatgattgattccggagcgcagttaatcaaggcataatggcatggacttgacacagcaagcaaaagacatacagaacataacagtccaggaaaccaacaaaaataactctgaaagcattgaatgcagcaaaataacaatggatctcaagttcaacaattccaggaaatatatttctatcactgtgccatccaaaacccaaacaatgtcaccacacatcaagtcagttgacgacgttgtggtacttggcatgaatctcagcaagtttaacaaacttactcagtttttcatatgtgttgctggagtttttgtattttacctaatttatgggtatttacaggaattaatattttcagtggagggttttaagtcctgtggctggtaccttaccttagtgcagtttgccttttactccatatttggcctaatagaacttcagcttattcaggacaaaaggaggag

SEQ ID NO: 3091 - protein, 138 aa, Homo sapiens
MDLTQQAKDIQNITVQETNKNNSESIECSKITMDLKFNNSRKYISITVPSKTQTMSPHIKSVDDVVVLGMNLSKFNKLTQFFICVAGVFVFYLIYGYLQELIFSVEGFKSCGWYLTLVQFAFYSIFGLIELQLIQDKR

SEQ ID NO: 3092 - DNA, 1147 bp, Homo sapiens
gctgccccagcggtagggggcctggggcggagaagccgctacagccgcggccgggcgacgctgacatctggcatccctggggtctcagagacacgggtggacagcgacgagggccttgtggccgccgtgtcgcaggacgcgccgccgcccgcgctcaccgccgtccgcgccagccgccccgagccgactgcccttctgcccccaagatgtggcacagcgtcgggctgactctgcttgtgttcgtggccacgctgctgatcgtcctgctgctgatggtgtgcggttggtattttgtatggcatctttttttatcaaaattcaagtttctccgggaactggtgggagacacaggatcccaagagggagatcatgagccttcagggtctgaaactgaagaagacacttcctcctctccacacagaatcagatccgctcgccaaaggagggcacctgctgatgaaggccacagacccctgacatagtcctgtacttgtgaaggatgaaaaggcagttgccagcttctgtcttttactgacttcgctttgaaatttactaatgactgaagaacatttgtattggattttaagtcgaattttaaaaaagatttacatgtaagccatataaaaataaagggaactgaaaccaaattggactattataaatttcatcttaaagataatcttttgtttcaccagctttctacttatacacttattccttggcttttgggcttattttcttgcactggtgcagatctggtaaacattaaaggcttgaaaaaccatattttgttagccctaaaatgtacatttttcttcccattttaacttatctgaaattgggatgcatctcattactgtcaaccaggtgatagtcatgtaacgctcctaccgtgtgcatgtgtgaatttacagcttgtcatcgtgtcatccctttaaccaacatgtgttttgttggtatcaaatgtgtcaggtttaattgacattttaaaatgtcttcaaaaagatcacactatgattcagcattgaaacgaaaagttattgtgtatgcagaaaagcatggaaacagagcagcagggcgtacatttgatattagtgaagcaaatattcgtcgctggagaaatgatcgcaattccatattttcctgc

SEQ ID NO: 3093 - protein, 91 aa, Homo sapiens
MWHSVGLTLLVFVATLLIVLLLMVCGWYFVWHLFLSKFKFLRELVGDTGSQEGDHEPSGSETEEDTSSSPHRIRSARQRRAPADEGHRPLT

SEQ ID NO: 3094 - DNA, 1965 bp, Homo sapiens
cggagaagccgctacagccgcggccgggcgacgctgacatctggcatccctggggtctcagagacacgggtggacagcgacgagggccttgtggccgccgtgtgtacccgtgcttaccctctgtcctccctacaggcgcgcggcgtccgccatggaagcgcatccgaccgctggggtctctgggtgccgcggcctcggctctccggggcgatgagggactagaggcgccctgaggcccgcctgcctcccgcgctctggccaccccggcgggaaaaggatcgggcgggcgggcggtcccacagtgcccgcctttgcgccgccccaccccctgggggcgctgccgagggggcgccagccgcccatgccgccccggcgcccagccgcgcctggcgcccgccgctgaagcgcaggacgcgccgccgcccgcgctcaccgccgtccgcgccagccgccccgagccgactgcccttctgcccccaagatgtggcacagcgtcgggctgactctgcttgtgttcgtggccacgctgctgatcgtcctgctgctgatggtgtgcggttggtattttgtatggcatctttttttatcaaaattcaagtttctccgggaactggtgggagacacaggatcccaagagggagatcatgagccttcagggtctgaaactgaagaagacacttcctcctctccacacagaatcagatccgctcgccaaaggagggcacctgctgatgaaggccacagacccctgacatagtcctgtacttgtgaaggatgaaaaggcagttgccagcttctgtcttttactgacttcgctttgaaatttactaatgactgaagaacatttgtattggattttaagtcgaattttaaaaaagatttacatgtaagccatataaaaataaagggaactgaaaccaaattggactattataaatttcatcttaaagataatcttttgtttcaccagctttctacttatacacttattccttggcttttgggcttattttcttgcactggtgcagatctggtaaacattaaaggcttgaaaaaccatattttgttagccctaaaatgtacatttttcttcccattttaacttatctgaaattgggatgcatctcattactgtcaaccaggtgatagtcatgtaacgctcctaccgtgtgcatgtgtgaatttacagcttgtcatcgtgtcatccctttaaccaacatgtgttttgttggtatcaaatgtgtcaggtttaattgacattttaaaatgtcttcaaaaagatcacactatgattcagcattgaaacgaaaagttattgtgtatgcagaaaagcatggaaacagagcagcagggcgtacatttgatattagtgaagcaaatattcgtcgctggagaaatgatcgcaattccatattttcctgcaaagcaacaacaaaatgttttacgggacctaagaaaggtaggtacccacaagtagatgaagctgtactacgtttcgtcagtgagacacgtgcaaaaggattgcctatcacacgccaagcaatgcaattgaaggcaggagaagttgccaaaaccctaggaattgatgaaacaaaattcaaagccacaagaggctggtgtgaccgattcatgcgtcgagcaggactatcattaaggcatcaaacatcgttttgtcccaagctccccactgccattaaacagaagacagtgttggagcactctttcaagaagtgctgcataaccagtactcttgacaacaccgggagagacgttctgtggaaaaatgcagacatcaatgactgtggtttgaaaagtgattcagaagagttggattcagaatatgaagttataattataacttaaccaatttatttcacacattttctttacatatgcacaagattgatgtgataaaaatctgtttaactcaaagcgctgtttcaataaatataaacattttctgtg

SEQ ID NO: 3095 - protein, 91 aa, Homo sapiens; identical to SEQ ID NO: 3093

SEQ ID NO: 3096 - DNA, 1412 bp, Homo sapiens
tgtaggttggtattttgtatggcatctttttttatcaaaattcaagtttctccgggaactggtgggagacacaggatcccaagagggagatcatgagccttcagggtctgaaactgaagaagacacttcctcctctccacacagaatcagatccgctcgccaaaggagggcacctgctgatgaaggccacagacccctgacatagtcctgtacttgtgaaggatgaaaaggcagttgccagcttctgtcttttactgacttcgctttgaaatttactaatgactgaagaacatttgtattggattttaagtcgaattttaaaaaagatttacatgtaagccatataaaaataaagggaactgaaaccaaattggactattataaatttcatcttaaagataatcttttgtttcaccagctttctacttatacacttattccttggcttttgggcttattttcttgcactggtgcagatctggtaaacattaaaggcttgaaaaaccatattttgttagccctaaaatgtacatttttcttcccattttaacttatctgaaattgggatgcatctcattactgtcaaccaggtgatagtcatgtaacgctcctaccgtgtgcatgtgtgaatttacagcttgtcatcgtgtcatccctttaaccaacatgtgttttgttggtatcaaatgtgtcaggtttaattgacattttaaaatgtcttcaaaaagatcacactatgattcagcattgaaacgaaaagttattgtgtatgcagaaaagcatggaaacagagcagcagggcgtacatttgatattagtgaagcaaatattcgtcgctggagaaatgatcgcaattccatattttcctgcaaagcaacaacaaaatgttttacgggacctaagaaaggtaggtacccacaagtagatgaagctgtactacgtttcgtcagtgagacacgtgcaaaaggattgcctatcacacgccaagcaatgcaattgaaggcaggagaagttgccaaaaccctaggaattgatgaaacaaaattcaaagccacaagaggctggtgtgaccgattcatgcgtcgagcaggactatcattaaggcatcaaacatcgttttgtcccaagctccccactgccattaaacagaagacagtgttggagcactctttcaagaagtgctgcataaccagtactcttgacaacaccgggagagacgttctgtggaaaaatgcagacatcaatgactgtggtttgaaaagtgattcagaagagttggattcagaatatgaagttataattataacttaaccaatttatttcacacattttctttacatatgcacaagattgatgtgataaaaatctgtttaactcaaagcgctgtttcaataaatataaacattttctgt

SEQ ID NO: 3097 - protein, 198 aa, Homo sapiens
MSSKRSHYDSALKRKVIVYAEKHGNRAAGRTFDISEANIRRWRNDRNSIFSCKATTKCFTGPKKGRYPQVDEAVLRFVSETRAKGLPITRQAMQLKAGEVAKTLGIDETKFKATRGWCDRFMRRAGLSLRHQTSFCPKLPTAIKQKTVLEHSFKKCCITSTLDNTGRDVLWKNADINDCGLKSDSEELDSEYEVIIIT

SEQ ID NO: 3098 - DNA, 2771 bp, Homo sapiens
agtgatacatatggtgcatcttaacaattggtagtgtcttaggttaaattaaaaatggtagcttgtaaatttatttttctttttaagatagcagttatttattggggaatttgattctgactcttacaatgttaaacttgtaatcctgtgtgaaacacatgtttttgggggggagggggtaaccaagatttcagggtagtaacttaggaatctaagaactatcttctactttaggaagagtgggattagttactccctttgtataggaggactttatgctcaaggaatgtgttgtggagaaaaacacttcttcacaaacaattcagtgacaagacctcaaaggtaatgcgtattgaggaaaacagtagtgggtgaaaattcccgcttagctgtaaaatgactctcttgccaggtttccgtgtttgtctcaactgaactctgggctgagtgtttaccagggagaagagatgtgaattaaacaaccttcctgtttagtgttacctgctttgtacaagaatgaagtgcaaagccaacttactttattaatccaagttctttttatgtttttcttaacctttattaaggactagtcatcacaaaatatctatttaacctctattttatgatggtgtgttattatgtttgatacctcatacttcttgcttagagttttgtttaacagttcactggctctgtcccaatgtttgtgatgaacacctttttgctatattgtagctcttggagatactaaaagagaattcacagaacataactttagttttatgtgtttgctaggggaagatttcctagcagctgagagcaaggcacagtctctgtcttcatttctttattagatacaattttctatttttatgtgattttgggggcattatttggtactgggaggatatttaaattagatttttcatagtctattgttttgaactatggattctgttttatggtggatacctaaggtttatataatagttgctggaaaacttaaagtagctggtgagcttcctgttatgtcactattaaagaatgatggctgatgtaactctgcccctgaaatctacaagggtcatgcccaaattaatacaggttaacctttgtagaggtatatatgttggcattatttattgacatttatgcttcaagcatgtcttattttatgtaattttaagaaatactctatttaacttgtgaaatatacctaaaagcatactagttagctcttagactctcacttagggagggtaaagaaacatcactgatgccaatatgaagatctataaacaaatcctttgtttagaacttttttctcttcgtgcacctcacaacacacttaccatggtacatatttcttaatgccactaagaaaggcaagatagtgaacgcagaattatttatgtggtatagtgtttgttttcctgttttagtgcttttgtagctaaaacttactggaactgcatcacaactacatttgcagtctcagtgggaggtggactagcctgtggttaattttagagcttaaaagtttataagcattaaaaacacatacatgtattagaatcttgtctaacccctcacaaaggatgatggtgatcagcatgccatcttttgaagattaattctaaaattgaggactctggtaggttgttttatttccttcccaaccagccattcatttccaattgttctgcctttgaaactttttgtgaaaattgcctgtaccaattgcattggttgcgttgctctgatttaaatgccaaaaacactaaatatttgtgtagtgctgttaaatgaggtttttgatatttccatcaaaatgaatataaaattcacttgatggattttgtagtgatgttttcacagttgaaacaaacatattgctgtgcggtggacagccacttcacagacatgcagacccatttctttagagatattaggtttaaaacccattttaattttattttgctgaaggtttggaatatataaagtaatggattcacaaaatatgatatcttaaaacatgttgaaagatttgaaagtggtgcatttttacttttaagagcagcaatctttgaaattagtcaacaatgcagtcttttttaaaagtcagttttctcaagtagtatgttgtaacgtaagatgtaactgatataactagattttgactggtaaacttaaagtgctttttatatttgaggttgactttaaaaagccattgagcagtcctcagaggttatggactctcaagcgactaatggaatagtgttctgttgtgaagtctagaactaaagcaccttgtattgtctgcttctaaagtgtcctatagtttttaacttaaagtgtaaagagtaacattttatcttatgtcaattaaagttacatttttcatttgttggtgtacatgtgctacctgttttatggggaatgtttaacacgatcctccaagttggttctatgcataaccattcaccaaatactgctgctgtgattccttgaaggaaatattctgtggtctgctatgatgcattgccatcttgctgcttgacaataggtttataaataattagaattacgtgttttaatagtacctttgtatatataacaagatgtaaaattaaagatgaggaatgtgtgtaaatgatcattcactgtttttgttttaaaactggtcagtactatgaagcttctgtggtttgtatgatgttttaactttcactttaaactgcatagaataaattaaattgaaaacaacaaaa

SEQ ID NO: 3099 - protein, 49 aa, Homo sapiens [sequence omitted]

SEQ ID NO: 3100 - DNA, 693 bp, Homo sapiens
gtgtctggtggtctcctgactgccaggcaggccagagaaaattaggggtatgttttcatttaacatcattccctgctgactcttgtctctctggaaaattgacagttaggagacaaaaacgttgccatctccagcaaagagcgcttgaacagctgggcatttctagaaaggaatgggcctggaagacctggctaaaacctttgaatcatttcctgccaacatttggccgtgacccattttggaaggtcactcagctattggtctgaagaagccttttttttttctatttggccttctttggaagccaatttatcgtctgagttcttctcctgtaatctgaactacaggttgcaggttctgaactacctgaagccatgcaagtcataacacatcattactgacttctagctctttccttcaagtctctggcattgcagatgttatttctgtcctaagaagagcaagaggagctgcaatatgaaaccagaaaacagacacacttcatttctctctgctgttggtgttttctggggagaccagtggagtcactctgggcaggactgagggggacctgggtatatgaccaagccctggacagttcatgtgaaggagcaggacccagcttccaggtcaggagggaaacatgcctgacctttgtgctgctctgccaggtgaggtgtcctttcctctcct

SEQ ID NO: 3101 - protein, 87 aa, Homo sapiens
VWWSPDCQAGQRKLGVCFHLTSFPADSCLSGKLTVRRQKRCHLQQRALEQLGISRKEWAWKTWLKPLNHFLPTFGRDPFWKVTQLLV

SEQ ID NO: 3102 - DNA, 4536 bp, Homo sapiens
acaacagtgagctcagagacttgagggaggcgctgcgactgacaagcggctctgcccgggaccttctcgctttcatctagcgctgcactcaatggaggggcgggcaccgcagtgcttaatgctgtcttaactagtgtaggaaaacggctcaacccaccgctgccgaaatgaagtataagaatcttatggcaagggccttatatgacaatgtcccagagtgtgccgaggaactggcctttcgcaagggagacatcctgaccgtcatagagcagaacacagggggactggaaggatggtggctgtgctcattacacggtcggcaaggcattgtcccaggcaaccgggtgaagcttctgattggtcccatgcaggagactgcctccagtcacgagcagcctgcctctggactgatgcagcagacctttggccaacagaagctctatcaagtgccaaacccacaggctgctccccgagacaccatctaccaagtgccaccttcctaccaaaatcagggaatttaccaagtccccactggccacggcacccaagaacaagaggtatatcaggtgccaccatcagtgcagagaagcattgggggaaccagtgggccccacgtgggtaaaaaggtgataacccccgtgaggacaggccatggctacgtatacgagtacccatccagataccaaaaggacgtctatgatatccctccttctcataccactcaaggggtatacgacatccctccctcatcagcaaaaggccctgtgttttcagttccagtgggagagataaaacctcaaggggtgtatgacatcccgcctacaaaaggggtatatgccattccgccctctgcttgccgggatgaagcagggcttagggaaaaagactatgacttcccccctcccatgagacaagctggaaggccggacctcagaccggagggggtttatgacattcctccaacctgcaccaagccagcagggaaggaccttcatgtaaaatacaactgtgacattccaggagctgcagaaccggtggctcgaaggcaccagagcctgtccccgaatcacccacccccgcaactcggacagtcagtgggctctcagaacgacgcatatgatgtcccccgaggcgttcagtttcttgagccaccagcagaaaccagtgagaaagcaaacccccaggaaagggatggtgtttatgatgtccctctgcataacccgccagatgctaaaggctctcgggacttggtggatgggatcaaccgattgtctttctccagtacaggcagcacccggagtaacatgtccacgtcttccacctcctccaaggagtcctcactgtcagcctccccagctcaggacaaaaggctcttcctggatccagacacagctattgagagacttcagcggctccagcaggcccttgagatgggtgtctccagcctaatggcactggtcactaccgactggcggtgttacggatatatggaaagacacatcaatgaaatacgcacagcagtggacaaggtggagctgttcctgaaggagtacctccactttgtcaagggagctgttgcaaatgctgcctgcctcccggaactcatcctccacaacaagatgaagcgggagctgcaacgagttgaagactcccaccagatcctgagtcaaaccagccatgacttaaatgagtgcagctggtccctgaatatcttggccatcaacaagccccagaacaagtgtgacgatctggaccggtttgtgatggtggcaaagacggtgcccgatgacgccaagcagctcaccacaaccatcaacaccaacgcagaggccctcttcagacccggccctggcagcttgcatctgaagaatgggccggagagcatcatgaactcaacggagtacccacacggtggctcccagggacagctgctgcatcctggtgaccacaaggcccaggcccacaacaaggcactgcccccaggcctgagcaaggagcaggcccctgactgtagcagcagtgatggttctgagaggagctggatggatgactacgattacgtccacctacagggtaaggaggagtttgagaggcaacagaaagagctattggaaaaagagaatatcatgaaacagaacaagatgcagctggaacatcatcagctgagccagttccagctgttggaacaagagattacaaagcccgtggagaatgacatctcgaagtggaagccctctcagagcctacccaccacaaacagtggcgtgagtgctcaggatcggcagttgctgtgcttctactatgaccaatgtgagacccatttcatttcccttctcaacgccattgacgcactcttcagttgtgtcagctcagcccagcccccgcgaatcttcgtggcacacagcaagtttgtcatcctcagtgcacacaaactggtgttcattggagacacgctgacacggcaggtgactgcccaggacattcgcaacaaagtcatgaactccagcaaccagctctgcgagcagctcaagaccatagtcatggcaaccaagatggccgccctccattaccccagcaccacggccctgcaggaaatggtgcaccaagtgacagacctttctagaaatgcccagctgttcaagcgctctttgctggagatggcaacgttctgagaagaaaaaaaagaggaaggggactgcgttaacggttactaaggaaaactggaaatactgtctggtttttgtaaatgttatctatttttgtagatattttatataaaaatgaaatattttaacattttatgggtcagtcaactttcagaaattcagggagctggagagggaaatctttttttttccccctgagtggttcttatgtatacatagaagtatctgagacataaactgtacagaaaacttgtccacgtgcttttgtatgcccatgtattcatgtttgtttgtagatgtttgtctgatgcatttcattaaaaaaaaaaccatgaattacgaagcaccttagtaagcaccttctaatgctgcattttttttgttgttgttaaaaacataccagctggttataatattgttctccacgtccttgtgatgattctgagcctggcactcccaaatctgggaagcatagtttatttgcaagtgttcaccttccaaatcatgaggcatagcatgacttattcttgtttggaaaactcttttcaaaactgaccatcttaaacacatgatggccaagtgcccaaaagccctcttgcggagcaaatttcagaatatatatgtggatccaagctctgatagttcaggtgctggagggaagagagacctgtgtgtttagaggccaggaccacagttaggattgggttgtttcaatactgagagacagctacaataaaaggagagcaattgcctccctggggctgttcaatcttctgcatttgtgagtggttcagtcatgaggttttccaaaagatgtttttagagttgtaaaaaccatatttgcagcaaagatttacaaaggcgtatcagactatgattgttcaccaaaataggggaatggtttgatccgccagttgcaagtagaggcctttctgactcttaatattcactttggtgctactacccccattacctgagggaaactggccaggtccttgatcatggaactatagagctaccaggacatatcctgctctctaagggaatttattgctatcttgcaccttctttaaaactcacatatgcagacctgacactcaagagtggctagctacacagagtccatctaatttttgcaacttcctgtggccagtgtgtataaccccttccactatctcacagatagtcacagcgtccattccatagtctgtctcctcacatctgttagtattgacacagcacagacaccacaagccatcaggttcttcatggggcaggtgaaatacttctaccccatgggtaaatgtattcacatattaccaagagaagaagcacattatctatgatcttttggcccagttcttatttagcatttttattccagcctacttggaaacatgtttttatttgcaatatatgcctgactgaattaagcttgcttgttttaaacaaccaaatcattggaacagaaaaggatttaaaaaacaagaatgcatgatctcagagtgattaaaaaaaaatcagtggaaataaatgatcatagaaggtgcttttcaaaacaactgctattataattctcaaagtcctactctgccaaaagaagattaaaagtcatacattacattacaaggaaatgttcatgtgggaagagggttgctgaaaatcaacaacgcttgaagttaaaaagtgtgtctttgtagatttcattgtataatgtgtatttcttaggagatggctgacttgattgatctacgctaagtggagacatttcacatttttaaaaccaaatgttcaatctgtattactctttgccgtcttgtatgtagaggctatttttaaatcattaaatttttagatctctgttttcata

SEQ ID NO: 3103 - protein, 834 aa, Homo sapiens
MKYKNLMARALYDNVPECAEELAFRKGDILTVIEQNTGGLEGWWLCSLHGRQGIVPGNRVKLLIGPMQETASSHEQPASGLMQQTFGQQKLYQVPNPQAAPRDTIYQVPPSYQNQGIYQVPTGHGTQEQEVYQVPPSVQRSIGGTSGPHVGKKVITPVRTGHGYVYEYPSRYQKDVYDIPPSHTTQGVYDIPPSSAKGPVFSVPVGEIKPQGVYDIPPTKGVYAIPPSACRDEAGLREKDYDFPPPMRQAGRPDLRPEGVYDIPPTCTKPAGKDLHVKYNCDIPGAAEPVARRHQSLSPNHPPPQLGQSVGSQNDAYDVPRGVQFLEPPAETSEKANPQERDGVYDVPLHNPPDAKGSRDLVDGINRLSFSSTGSTRSNMSTSSTSSKESSLSASPAQDKRLFLDPDTAIERLQRLQQALEMGVSSLMALVTTDWRCYGYMERHINEIRTAVDKVELFLKEYLHFVKGAVANAACLPELILHNKMKRELQRVEDSHQILSQTSHDLNECSWSLNILAINKPQNKCDDLDRFVMVAKTVPDDAKQLTTTINTNAEALFRPGPGSLHLKNGPESIMNSTEYPHGGSQGQLLHPGDHKAQAHNKALPPGLSKEQAPDCSSSDGSERSWMDDYDYVHLQGKEEFERQQKELLEKENIMKQNKMQLEHHQLSQFQLLEQEITKPVENDISKWKPSQSLPTTNSGVSAQDRQLLCFYYDQCETHFISLLNAIDALFSCVSSAQPPRIFVAHSKFVILSAHKLVFIGDTLTRQVTAQDIRNKVMNSSNQLCEQLKTIVMATKMAALHYPSTTALQEMVHQVTDLSRNAQLFKRSLLEMATF

SEQ ID NO: 3104 - DNA, 3016 bp, Homo sapiens
acaacagtgagctcagagacttgagggaggcgctgcgactgacaagcggctctgcccgggaccttctcgctttcatctagcgctgcactcaatggaggggcgggcaccgcagtgcttaatgctgtcttaactagtgtaggaaaacggctcaacccaccgctgccgaaatgaagtataagaatcttatggcaagggccttatatgacaatgtcccagagtgtgccgaggaactggcctttcgcaagggagacatcctgaccgtcatagagcagaacacagggggactggaaggatggtggctgtgctcattacacggtcggcaaggcattgtcccaggcaaccgggtgaagcttctgattggtcccatgcaggagactgcctccagtcacgagcagcctgcctctggactgatgcagcagacctttggccaacagaagctctatcaagtgccaaacccacaggctgctccccgagacaccatctaccaagtgccaccttcctaccaaaatcagggaatttaccaagtccccactggccacggcacccaagaacaagaggtatatcaggtgccaccatcagtgcagagaagcattgggggaaccagtgggccccacgtgggtaaaaaggtgataacccccgtgaggacaggccatggctacgtatacgagtacccatccagataccaaaaggacgtctatgatatccctccttctcataccactcaaggggtatacgacatccctccctcatcagcaaaaggccctgtgttttcagttccagtgggagagataaaacctcaaggggtgtatgacatcccgcctacaaaaggggtatatgccattccgccctctgcttgccgggatgaagcagggcttagggaaaaagactatgacttcccccctcccatgagacaagctggaaggccggacctcagaccggagggggtttatgacattcctccaacctgcaccaagccagcagggaaggaccttcatgtaaaatacaactgtgacattccaggagctgcagaaccggtggctcgaaggcaccagagcctgtccccgaatcacccacccccgcaactcggacagtcagtgggctctcagaacgacgcatatgatgtcccccgaggcgttcagtttcttgagccaccagcagaaaccagtgagaaagcaaacccccaggaaagggatggtgtttatgatgtccctctgcataacccgccagatgctaaaggctctcgggacttggtggatgggatcaaccgattgtctttctccagtacaggcagcacccggagtaacatgtccacgtcttccacctcctccaaggagtcctcactgtcagcctccccagctcaggacaaaaggctcttcctggatccagacacagctattgagagacttcagcggctccagcaggcccttgagatgggtgtctccagcctaatggcactggtcactaccgactggcggtgttacggatatatggaaagacacatcaatgaaatacgcacagcagtggacaaggtggagctgttcctgaaggagtacctccactttgtcaagggagctgttgcaaatgctgcctgcctcccggaactcatcctccacaacaagatgaagcgggagctgcaacgagttgaagactcccaccagatcctgagtcaaaccagccatgacttaaatgagtgcagctggtccctgaatatcttggccatcaacaagccccagaacaagtgtgacgatctggaccggtttgtgatggtggcaaagacggtgcccgatgacgccaagcagctcaccacaaccatcaacaccaacgcagaggccctcttcagacccggccctggcagcttgcatctgaagaatgggccggagagcatcatgaactcaacggagtacccacacggtggctcccagggacagctgctgcatcctggtgaccacaaggcccaggcccacaacaaggcactgcccccaggcctgagcaaggagcaggcccctgactgtagcagcagtgatggttctgagaggagctggatggatgactacgattacgtccacctacagggtaaggaggagtttgagaggcaacagaaagagctattggaaaaagagaatatcatgaaacagaacaagatgcagctggaacatcatcagctgagccagttccagctgttggaacaagagattacaaagcccgtggagaatgacatctcgaagtggaagccctctcagagcctacccaccacaaacagtggcgtgagtgctcaggatcggcagttgctgtgcttctactatgaccaatgtgagacccatttcatttcccttctcaacgccattgacgcactcttcagttgtgtcagctcagcccagcccccgcgaatcttcgtggcacacagcaagtttgtcatcctcagtgcacacaaactggtgttcattggagacacgctgacacggcaggtgactgcccaggacattcgcaacaaagtcatgaactccagcaaccagctctgcgagcagctcaagaccatagtcatggcaaccaagatggccgccctccattaccccagcaccacggccctgcaggaaatggtgcaccaagtgacagacctttctagaaatgcccagctgttcaagcgctctttgctggagatggcaacgttctgagaagaaaaaaaagaggaaggggactgcgttaacggttactaaggaaaactggaaatactgtctggtttttgtaaatgttatctatttttgtagatattttatataaaaatgaaatattttaacattttatgggtcagtcaactttcagaaattcagggagctggagagggaaatctttttttttccccctgagtggttcttatgtatacatagaagtatctgagacataaactgtacagaaaacttgtccacgtgcttttgtatgcccatgtattcatgtttgtttgtagatgtttgtctgatgcatttcattaaaaaaaaaaccatgaattacgaagcacctt

SEQ ID NO: 3105 - protein, 834 aa, Homo sapiens; identical to SEQ ID NO: 3103

SEQ ID NO: 3106 - DNA, 3274 bp, Homo sapiens
tcctctccacagcctcgtgaggtgcacctcacagcatttgctgttcagaggagggaactgaggtctgagaaggaaattcacttgctgaagttaacttgctgcctccagtgagaggcaggattgatatttgagcccacgtctgtctgactccaatgctaatgatttttacatcccggctgaaggatgatattgccaagcccttaaagaagaaggcatatttggacacctcattagcaatttgggcgctaaatcataccctgttggccaggaagaattaaagttgctgcccagggctcccacctcaggtccagggagtagcctcaatactgagggaatctgaattaaggagcttggaagttccccccacctagctgtagtgggcagtttcagagtgggctgatccaggagtcctgaccaggtcagtagggtgatgtctagactccagtaccactgagaatgttgctatgttggctttctctgccacacagaaaagtcttttctttccttttcttttctttctttctttcttttttttttttttttttgagacggaccctccctctgttgaccaggctggagtgcagtggcacaatctcggctcaccacaacctccgcctcctgggttcaagtgattctcctgccttagcctcccgagtagctgggactatgggtgcgcactaccatgcctggctaatttttgtatttttagtagagacaaagtttcactacgttggcaaggctggtctcaaactcctgacctcgtgatctgcccacctcggcctcccaaagtgctgggattataggcgtgagccaccacgcctggcctaagactgtctttccaaatgacttcaaattccttcaaatgggtaacttcatttaaccaggtgggggcacctcccaaaacacaagttacccagctttcaagttgtggctctcatataaggaagtaactttctttgagagtatttacttgtgaaattataaaagtagtaaatttctggaaaatgtctaacatgtattgctagcgtaggccgcagggcattgagaaacgtataccgctgcactgctggcccagctaaccaagggtctccttcacttctttgtcattaatagcctgagtaactaactccactttagttccctcaactgtgaaatggcaagtgatgctagattatctctaatgatctttgctaaaattttatgatccagatatccttatctgattctttctcagaatcactttaacagtttaataaaaacggcctgacatcaagagtttttttttttttaaagaaaagatactcaagcattgattataaatttcaacttgacccttaagtttttgcaaatctttcctactcttcctttaggatccagcccaccatcccatccagaactctacccaactcttcctttcaaagagtaggatttttctgcttcgtttttttactgctttgttcttacttagggttgctggaagcacatggaaggagggaagtagtcaaaacaagacagtgttgtgaggggagagatgagaagtcatgataagtaggtgggtgggtgacccacagggctggcatcagaaggaaacatagcaaaacatgatggatatgaggcttgctgtggggagggggattggcctttgtgagtggcagccgtctgctcccttcccgcttcccttagtgctccattgagctagcagcatgcagctgagaagttgaagttctgaccacatggcctctgctgccgctgctctgccccatcccaggcacctagccagctctgcattaaggaggtgaagtggatgcccaaggaaagaagtgcccccaaggagacttgctgagaccttgaacaagtgacacaatgtgagcagaacttgtcttgacagaaaatgctttgtctctaggtgttccagagagatgggcaagtgtcctatttcttagtgagagcctctaaacaaaccagcttgtgaacctccactgaaaagatctcatctgatgagcattttaataaagtgtcctgagtttggaggcttgccgtctttctcttggataaatatcttcatctcctagacttggaaaaacacattttctcctggggtttcccattggcgtgtcttgagctgctctggtgataaccgtaataatgccaatactgatacgaacagcagaaaacagtaaccccaagaactctacagatgatcatcaaggaccactgtctcttaccatttgctgctttggtttgaaattctcactgcctcgtagatctcattttgagcactatacattcctaaagattgatttctttctatctgacttaaatttaggaatgattaaatcttcatttctcccatgatttgatcctaaaacattttgaaaggaaacagccttgagatctgtgattactaagacatacataacattcttatcacattagaaagcaagaattgactgttgcttgtcttgttcctgttgtcttgtcccctgaattcctgtttatctttgattgtatgtgggacattgtattttcagtacatttgtagaaataatgtgaagcctataaagatgttctctgcctccagagagaattttgtttccttctgccagcctcataggcaagcatacatctgattccatgctttgagctgttctggcaaccctgatgtcttcagcctgtgcaagggtgggtttacttccagttaatccttattttggatacagtccttagggttccaacccaaagtcgggggtggtttggggtccctgccttggtgagccctatagtccaatgttcccccttacccaaagaagctgtagaaaacccagcacagcctcccaggcaccagtttcagatcagcaaaaaatagcaaatgcccccaggcttgaaaagcaatctcacctctattaactcttctcccaaagtttgacctagtaattctttattatccttgaactcttgacactattaagaagatcttttcggctgggcgcagtggctcacgcctgtaatcccagcactttcggaggccgaggcgggcggatcacgaggtcaggagatcgagatcgtcctggctaacacggtaaaaccccgtctctactaaaaatacaaaaaattagctgggcacggtggcgggcgcagtgggcgggtgcctgtagtcccagctactcggaaggctgaggcaggagaatggcgtgaactcaggaggcggagcttgcggtgagccgagatctcaccactgcactccagcctgggcgacagagtaagactctgtctc

SEQ ID NO: 3107 - protein, 102 aa, Homo sapiens
MLLCWLSLPHRKVFSFLFFSFFLSFFFFFLRRTLPLLTRLECSGTISAHHNLRLLGSSDSPALASRVAGTMGAHYHAWLIFVFLVETKFHYVGKAGLKLLTS

SEQ ID NO: 3108 - DNA, 1994 bp, Homo sapiens
acaacagtgagctcagagacttgagggaggcgctgcgactgacaagcggctctgcccgggaccttctcgctttcatctagcgctgcactcaatggaggggcgggcaccgcagtgcttaatgctgtcttaactagtgtaggaaaacggctcaacccaccgctgccgaaatgaagtataagaatcttatggcaagggccttatatgacaatgtcccagagtgtgccgaggaactggcctttcgcaagggagacatcctgaccgtcatagagcagaacacagggggactggaaggatggtggctgtgctcattacacggtcggcaaggcattgtcccaggcaaccgggtgaagcttctgattggtcccatgcaggagactgcctccagtcacgagcagcctgcctctggactgatgcagcagacctttggccaacagaagctctatcaagtgccaaacccacaggctgctccccgagacaccatctaccaagtgccaccttcctaccaaaatcagggaatttaccaagtccccactggccacggcacccaagaacaagaggtatatcaggtgccaccatcagtgcagagaagcattgggggaaccagtgggccccacgtgggtaaaaaggtgttccagagagatgggcaagtgtcctatttcttagtgagagcctctaaacaaaccagcttgtgaacctccactgaaaagatctcatctgatgagcattttaataaagtgtcctgagtttggaggcttgccgtctttctcttggataaatatcttcatctcctagacttggaaaaacacattttctcctggggtttcccattggcgtgtcttgagctgctctggtgataaccgtaataatgccaatactgatacgaacagcagaaaacagtaaccccaagaactctacagatgatcatcaaggaccactgtctcttaccatttgctgctttggtttgaaattctcactgcctcgtagatctcattttgagcactatacattcctaaagattgatttctttctatctgacttaaatttaggaatgattaaatcttcatttctcccatgatttgatcctaaaacattttgaaaggaaacagccttgagatctgtgattactaagacatacataacattcttatcacattagaaagcaagaattgactgttgcttgtcttgttcctgttgtcttgtcccctgaattcctgtttatctttgattgtatgtgggacattgtattttcagtacatttgtagaaataatgtgaagcctataaagatgttctctgcctccagagagaattttgtttccttctgccagcctcataggcaagcatacatctgattccatgctttgagctgttctggcaaccctgatgtcttcagcctgtgcaagggtgggtttacttccagttaatccttattttggatacagtccttagggttccaacccaaagtcgggggtggtttggggtccctgccttggtgagccctatagtccaatgttcccccttacccaaagaagctgtagaaaacccagcacagcctcccaggcaccagtttcagatcagcaaaaaatagcaaatgcccccaggcttgaaaagcaatctcacctctattaactcttctcccaaagtttgacctagtaattctttattatccttgaactcttgacactattaagaagatcttttcggctgggcgcagtggctcacgcctgtaatcccagcactttcggaggccgaggcgggcggatcacgaggtcaggagatcgagatcgtcctggctaacacggtaaaaccccgtctctactaaaaatacaaaaaattagctgggcacggtggcgggcgcagtgggcgggtgcctgtagtcccagctactcggaaggctgaggcaggagaatggcgtgaactcaggaggcggagcttgcggtgagccgagatctcaccactgcactccagcctgggcgacagagtaagactctgtctc

SEQ ID NO: 3109 - protein, 174 aa, Homo sapiens
MKYKNLMARALYDNVPECAEELAFRKGDILTVIEQNTGGLEGWWLCSLHGRQGIVPGNRVKLLIGPMQETASSHEQPASGLMQQTFGQQKLYQVPNPQAAPRDTIYQVPPSYQNQGIYQVPTGHGTQEQEVYQVPPSVQRSIGGTSGPHVGKKVFQRDGQVSYFLVRASKQTSL

SEQ ID NO: 3110 - DNA, 1299 bp, Homo sapiens
acaacagtgagctcagagacttgagggaggcgctgcgactgacaagcggctctgcccgggaccttctcgctttcatctagcgctgcactcaatggaggggcgggcaccgcagtgcttaatgctgtcttaactagtgtaggaaaacggctcaacccaccgctgccgaaatgaagtataagaatcttatggcaagggccttatatgacaatgtcccagagtgtgccgaggaactggcctttcgcaagggagacatcctgaccgtcatagagcagaacacagggggactggaaggatggtggctgtgctcattacacggtcggcaaggcattgtcccaggcaaccgggtgaagcttctgattggtcccatgcaggagactgcctccagtcacgagcagcctgcctctggactgatgcagcagacctttggccaacagaagctctatcaagtgccaaacccacaggctgctccccgagacaccatctaccaagtgccaccttcctaccaaaatcagggaatttaccaagtccccactggccacggcacccaagaacaagaggtatatcaggtgccaccatcagtgcagagaagcattgggggaaccagtgggccccacgtgggtaaaaaggtgttccagagagatgggcaagtgtcctatttcttagtgagagcctctaaacaaaccagcttgtgaacctccactgaaaagatctcatctgatgagcattttaataaagtgtcctgagtttggaggcttgccgtctttctcttggataaatatcttcatctcctagacttggaaaaacacattttctcctggggtttcccattggcgtgtcttgagctgctctggtgataaccgtaataatgccaatactgatacgaacagcagaaaacagtaaccccaagaactctacagatgatcatcaaggaccactgtctcttaccatttgctgctttggtttgaaattctcactgcctcgtagatctcattttgagcactatacattcctaaagattgatttctttctatctgacttaaatttaggaatgattaaatcttcatttctcccatgatttgatcctaaaacattttgaaaggaaacagccttgagatctgtgattactaagacatacataacattcttatcacattagaaagcaagaattgactgttgcttgtcttgttcctgttgtcttgtcccctgaattcctgtttatctttgattgtatgtgggacattgtattttcagtacatttgtagaaataatgtgaagcctataaagatgttctctgcctcc

SEQ ID NO: 3111 - protein, 174 aa, Homo sapiens; identical to SEQ ID NO: 3109

SEQ ID NO: 3112 - DNA, 749 bp, Homo sapiens
acaacagtgagctcagagacttgagggaggcgctgcgactgacaagcggctctgcccgggaccttctcgctttcatctagcgctgcactcaatggaggggcgggcaccgcagtgcttaatgctgtcttaactagtgtaggaaaacggctcaacccaccgctgccgaaatgaagtataagaatcttatggcaagggccttatatgacaatgtcccagagtgtgccgaggaactggcctttcgcaagggagacatcctgaccgtcatagagcagaacacagggggactggaaggatggtggctgtgctcattacacggtcggcaaggcattgtcccaggcaaccgggtgaagcttctgattggtcccatgcaggagactgcctccagtcacgagcagcctgcctctggactgatgcagcagacctttggccaacagaagctctatcaagtgccaaacccacaggctgctccccgagacaccatctaccaagtgccaccttcctaccaaaatcagggaatttaccaagtccccactggccacggcacccaagaacaagaggtatatcaggtgccaccatcagtgcagagaagcattgggggaaccagtgggccccacgtgggtaaaaaggtgttccagagagatgggcaagtgtcctatttcttagtgagagcctctaaacaaaccagcttgtgaacctccactgaaaagatctcatctgatgagcattttaataaagtgtcctgagtttgg

SEQ ID NO: 3113 - protein, 174 aa, Homo sapiens; identical to SEQ ID NO: 3109

SEQ ID NO: 3114 - DNA, 532 bp, Homo sapiens
ccgccgccgcccggcacccgaggagagggcggcgggcgcccctcggggaagatgaaggcggaggggggcgaccactccatgatcaacctgtcggtgcagcaggtcctgagcctctgggcccacgggacggtgctgaggaacctcacggagatgtggtactggatcttcctctgggctctcttctcttctctgtttgtccatggtgctgcaggagtgttgatgtttgtgatgctgcagaggcataggcagggaagagtcatctctgtcattgcagtcagcattggatttctggcttctgtaactggagcgatgattaccagtgcagcagtagcgggcatttacagagtagctgggaagaacatggcccctttggaagcgctggtatggggcgttggacagactgtactgacattaatcatctccttttcaaggatcctcgctacactttgaggtttctgtgggaatgtcttacttcacataaggaaacagatgtacagattccctgaaaacggcattgttaacaagtggaaat

SEQ ID NO: 3115 - protein, 132 aa, Homo sapiens
MKAEGGDHSMINLSVQQVLSLWAHGTVLRNLTEMWYWIFLWALFSSLFVHGAAGVLMFVMLQRHRQGRVISVIAVSIGFLASVTGAMITSAAVAGIYRVAGKNMAPLEALVWGVGQTVLTLIISFSRILATL

SEQ ID NO: 3116 - DNA, 1753 bp, Homo sapiens
cactttttttagagccttgtttaaaggaacgttaactcgagagtactactgatgatgacgcttctcttgtttttaaagtatttacacatcattgttaagtatttttggaatggaacattttaaagttttctccatagaaagcaacatagtggcacttgttgagtaaatgatcataaaaatgacttgcttttaatagcagatgagttgatagtttaactgttgacactttcttaatgtttttgatgttggatgcatttacaatggaagaatttttttgaaagatttggccctctcaccaatacacacattcagacttgagctgcacgcatttagatgaacaaataggaaattcacggtattttttgttttagccatccaaaattcataggattctaccaaaaatattagcccctgactctagttattctgagatgagggaatcaactttatcttgaaagttaactagctaaaatgtctttatttaaatagcaaaaatatagtttacctgacaagtattaaaagtctcactttcaaattgtgttaactctcagaccactgatgaatcttttggtaaatcacaggcagattttaaaagctaaatgaagccttagtgccttgaaagttaagatacttgtgcaaaatggatttagcaagattcaggattggcaccagtgagttggctagatacacatcaccagtgactgggaattcaaagtttagaaagcctaacgaatagtagctactaacttcatatggttcaatgtaaatcagttacttagtcattgactgtgacagatgacagctactttcactatattttcatgatgtggtatttttctctattttttctttttccaagtatgaaatggaaaaaaatgtagttaagaaaattaagtgtgagactttaaaatttagttttgttgtaaactagagattctagtgaacagtgttagttttatactgtagtacagggcacacactttaacctttagaaatatgtttaccatcagggatttatttttactatagaaatactaaatgtactgtgaagcttaaagacaggagaataaatgttggaggggtaatacacaaaaacaaaggcatatttgatgaagtaccctgtgttatgtgaacacaatttccccttctgttaagactataaactatatgagtatgtgtactgcatgtttacataaaacagtttaattttgaaggattattttaaaaactattttttatttcccaattcatgtacaaatctcattatgtatatagcataatttcctggagaacacaaattttgcagtgaattttaagtaattttaattgcagtaagcatcagtttagcctagagatgttgatctttattttaaattatttttcaccattctcattttcttcaaagggcagcaataaacatatgcaagttatttttaattatagaaagtaggtctacaaagataagatctaggttccaattcattgctttaaggaaaagatgcacaattactatcattcagtgtctaatcacaggaccatttctgaggtccacatgtggctctcctctttgtaatatacagggtgaactctttactgatacacacaagacaactgttaaaaagtgaatccagcacttaaatgtcattacacagaatttattggattaaaaatttgtaatatacagtattttaataaagtttctgtattcaatttcatgcacttatatataaataaacctgtctttgaaagcttt

SEQ ID NO: 3117 - protein, 31 aa, Homo sapiens
MLIFILNYFSPFSFSSKGSNKHMQVIFNYRK

SEQ ID NO: 3118 - DNA, 850 bp, Homo sapiens
ttctggttgtaaaagcgcgagttttgttttcccatagtgtggcctacagcagccatggggacacacgtgcccctgcactcagggtcttcaatcaggactgaacttcagacaccagatggcacatgcctgtaatctcagcactttgggagaccgaggcaggcggatcacttgaggtcaggaggtcgagaccagcttggccaacatggtgtactccaacatgaaaacggagcatgcatgtgagctgagtagtgacatgcaacatgcatgtccattgatccttgctgctcattcacatacagtgttcgcgatgccccctggacacagaattccagtggacccaccacgtgtggggattcaggggagactcaaagcaaatacaaggttccatacagatagccagccatgggagtcagaatttgaactcagatctggtctggttctgaagcctctcttctttccagctgtgagacaaaggagcaaatatgagaagcaccttttgctcacttctgcttgccagcagaatttcacaaaagccctggactgtgaagatgtttggaaagatgctttgaagacaaaacctttaacagggttagtgtttatgcctctgtaatctacaaccggatgcgctcttacacccaagccttgatgggattctgctgcgacggaaattctgagcaaatttgatgtgattgtgcaggtactgaacctccacttcctgtctgtaagcagtgggctgaaatcctgggctggagcagtctcataggatctgacaggctgttgccaggctgtaggccttggtctgtagtcctcagtaagacttctgaatacaactaactttaattctttaaaa

SEQ ID NO: 3119 - protein, 135 aa, Homo sapiens [sequence omitted]

SEQ ID NO: 3120 - DNA, 3642 bp, Homo sapiens
tgcatgtgagctgagtagtgacatgcaacatgcatgtccattgatccttgctgctcattcacatacagtgttcgcgatgccccctggacacagaattccagtggacccaccacgtgtggggattcaggggagactcaaagcaaatacaaggttccatacagatagccagccatgggagtcagaatttgaactcagatctggtctggttctgaagcctctcttctttccagctgtgagacaaaggagcaaatatgagaagcaccttttgctcacttctgcttgccagcagaatttcacaaaagccctggactgtgaagatgtttggaaagatgctttgaagacaaaacctttaacagggttagtgtttatgcctctgtaatctacaaccggatgcgctcttacacccaagccttgatgggattctgctgcgacggaaattctgagcaaatttgatgtgattgtgcaggaagaagcaacaggattgtacccacctataacgagaaagcttaacttactgacatattctcattgctgaagactctgtctgaatgaggatttcaatctcaagtctaggatgtgatttcatctggtaaatgtcttatggaaggctgaggagcagcctaatgaggtactgctgagttgggaggaggtgggaggagctgagagggctatctggactcacttccctcaaaatgaaaccttgatattttcaaagcttgtgtccctggagccctcacttgggttagggggagacccctgattttatttattcatgctagggatggtaataccttgttctctaggtcctgggctttctaaagaagattatttttagctctaaagttaaatgacacattgtttgggggaggaggggagatcctttgatggggtcctttaaaagagtgccccacccccaacgctgtcctcttgccttggcaggacctcttggcaggacctgtctgagtactttggacaaagacagtaagcatcattgcttctgtttgcggctagtttttctttctgtttccaggtgaaggggagaggcagacacggaagaagcgcatctgtagctaagaaagaaatacactgaccccatttccagtggttgagcttctctccaagtaggtagatgctggcgatgaagacgtagctgagagagaagaaagctgctagacccaagaggctgagtttggcaaacacaggatacacccaggtacccgtctcaaagtagagccataggatgctgcaggaaataagaagtcgtggtggttatagcaggaggagaaaaacaagccattttctcatcaggattaatgaggtactggtacccaggcaggggaagagaacccatcagggacgtttgtcaacagctgtagtattcccacaaacctaaagaagtgaggcttttctgggtaaatcaacttgattcaataagacatgctgtttgatgggctgggctgggctgttttacctaatccacttaaattcaacattggtgaaaaaatataagagaacatagggccaggcactgtggctcatgcctgtaatcccagcactttgggaggctgaggggggtggatcacctgaggtcaggagttcgagagcagcctggccaacatgatgaaaccccatctccactaaaaatacaaaaaattaactgggcatggtggctcaggcctgtaatcccagctactagggaggcggaggaagaagaatcgcttgaacctgggaggcagaggttgcagtgatccaagatcacgccactgcactctagcctgggcaacaagagtgaaactttgtctcaaaaacaaacaaacaaacaaacaaacaaacatagaaccatcgttagctaaagaactaaagagagtatgtgggaacatgaatgatccctttccctgagaggtatggcctgctgagacattgaacctgctattatggcattgattttgctggctctaagccagagaagtggggtttgcttttttggatctaagaatcaggtgcagctttcccttagctctccaagtctgcggggatgagggagcagagatagagcgttattgccctaacacaatatgcctaggatttaactgtcggccctgattttcactcatgcatatagccataaatagagtgttaggcagtaatgcatggatttgcagggaggctcagatcttgcttatgtgaggataggctgtaagtcatttctggaagccgagagaaggaaaagaaatgctaggagaagagccatgatgtctaagtgaagcctaaaaatgcagtttgctggaaaccaactgcactggaaggtgccaaagtctgaaataactttaaaaaattaaatgtggggaagctgatgcatcagctacagttcatcattggttaggagcacagaatctggaactgggcttctgtgattcaaaccccagctctgccacctagtagctatgttacctccagcaatttcatcaacctttctgtccccatctcctcaatgtgtaaagtgaagatccaaacagcatacaccttctaaggctgttgtaaagattacgggagttaacacatgtaaaagacacagaacagtgcttggcacattgtaatatttgacaagagttcaaaagcttccatctccactgagggatggcacaatgggagtgctctcagaaagccttctttgaagctgctgatctcttgtagcaattaggataggccaggttatgcttcaaaaacaatatttaaatttgaatatcccacgttgtcaaaggaattcagatggaagaatgaaattctgtgcttaaactttcagaaacccaagggtgatctctgtcatttcaaatacttgaagtttgttaaatggtttgtggaagagtcaagggctatattcaggaccgggagtagggtgaagcaagagaggccctagggtgtaaaacttaagggatcatctctgcaacaaaggacacaataaacagtgtgaaaaggcaatccatggaatgggaaacaatatttctaatcatatctctaataaggggttaatatccaaaatatgtaaaatattcctgtaactcaacaataacaaaaaacccaaataactcaattaaaaatggacaaaggacttgaatagaccttttacagagaagatacataaaaggccaacaaatgcatgaaaggatgttcaacatcactaataactagaagaaatgcaaatcaaaatgacagtgagatattgtcttacactcattaggatggatactatattttttttaaaaagacaagataacaagtgttagtaaggacatagagaaattggaacccttgttcattgttggtaggaatggaagatggtacatctgccttggaaaactatatggtggttctccccaaaattaaaatagaattaccatctgatccagcaattccacttctgggtacacacccaaaagaactgaaaacatggctaacatggtgaaaccccatctctactaaatatacaaaaaattagccaggcgtggtggcaggtgcctgtagtcccagctacttgggaggctgagggcaggagaatggcatgaacctgggaggcagagcttgcagtgattggagatcgcgccactgcactccagcctgggcgagagaatgagactctatctc

SEQ ID NO: 3121 - protein, 118 aa, Homo sapiens
MQHACPLILAAHSHTVFAMPPGHRIPVDPPRVGIQGRLKANTRFHTDSQPWESEFELRSGLVLKPLFFPAVRQRSKYEKHLLLTSACQQNFTKALDCEDVWKDALKTKPLTGLVFMPL

SEQ ID NO: 3122 - DNA, 1696 bp, Homo sapiens
gacagcgtgagccgtgccagccctgtctcgccatcccagccgaggagggcagcgcgatggctcttccctgccttgaaatcaaccccattgccagccgctttcgccggcagagcattttccgtggggtccatccggctccaaggcggcctgcgctggccacgtggaaagaaacacgcccactgcctacaggccacgcccttcctcccttcgcgcatgcgccccacccgtcctgaggacctccgaacctgcagggggcgatgaaagtaggcttgcgctccgcttgtagctgcttccgggtcagaggtcagacggtctagcgctgcgtgggccatggtgcagctccgaccgcgagcgtctcgcgccccggcgtcggcggaggcgatggtggacgagggccagctggcctcggaggaggaggaggcggagcacgggctgttgctcgggcagcccagcagcggcgcggccgccgagcccctggaggaagacgaggaaggggacgatgagtttgacgatgaggccccggaggagctgactttcgccagcgcccaggcggaagcgagagaagaggagcggcgagtgcgggagaccgtgcgcagggataaaacgctcctgaaggagaagaggaagcgacgcgaggagctgttcatcgaacagaagaaaagaaaactccttccagacactattttggagaagttaaccacagcttcacagactaacatcaagaaatcgccaggaaaggtgaaagaagttaatttgcaaaagaaaaatgaagactgtgaaaaaggaaatgactccaagaaagttaaagtacaaaaagtacagtctgtcagccagaataaaagctacttggccgtaaggctaaaagaccaagatctgagagattcaaggcaacaagcagcacaagccttcatacataattcattatatgggccaggaaccaacaggactactgtaaataagttcctgtctcttgccaacaagaggttaccagtgaaaagagctgctgtccagtttttgaataatgcttggggaatccaaaaaaaacaaaatgccaagaggtttaaaagacggtggatggtcagaaagatgaaaactaagaagtaaatcaatgctaaatgaagaatctgtacttttgttcttgccacagtctctccttagctgttcactcattgcttgcagctctcgtccaaagtggatcattctttctatggcggcctgacttcctccacacaactggcgtctcaactgacttgaatcaacttctgtaagaaaaacagacaagtattttactaccttatggaatggagtataatgaggacacgaacatacatttcttataccattttgtacatttagtaactattccctaatatttcatctaaatatgcagattgttaaaaattcatttttaatatgaaactgcagctaaaagatatactttatttagctctcaagagtctaggatccagtattcagcatgcagttgagaggggacaacctttcagtgttagagggtacttatgtcagaaaaaaattttagaaaaagtataattccctaaaactacattaagcaacatttaaaaaaaaaaaaaaaaaaaggaaaactgttaataatgccactcaggctgccttaactgacgtagtagagatgtaataaaatgctcctgaaagctaagaaaagctaaatgactacaat

SEQ ID NO: 3123 - protein, 257 aa, Homo sapiens
MVQLRPRASRAPASAEAMVDEGQLASEEEEAEHGLLLGQPSSGAAAEPLEEDEEGDDEFDDEAPEELTFASAQAEAREEERRVRETVRRDKTLLKEKRKRREELFIEQKKRKLLPDTILEKLTTASQTNIKKSPGKVKEVNLQKKNEDCEKGNDSKKVKVQKVQSVSQNKSYLAVRLKDQDLRDSRQQAAQAFIHNSLYGPGTNRTTVNKFLSLANKRLPVKRAAVQFLNNAWGIQKKQNAKRFKRRWMVRKMKTKK

SEQ ID NO: 3124 - DNA, 2323 bp, Homo sapiens
ttaaatgttgcttaatgtagttttagggaattatactttttctaaaatttttttctgacataagtaccctctaacactgaaaggttgtcccctctcaactgcatgctgaatactggatcctagactcttgagagctaaataaagtatatcttttagctgcagtttcatattaaaaatgaatttttaacaatctgcatatttagatgaaatattagggaatagttactaaatgtacaaaatggtataagaaatgtatgttcgtgtcctcattatactccattccataaggtagtaaaatacttgtctgtttttcttacagaagttgattcaagtcagttgagacgccagttgtgtggaggaagtcaggccgccatagaaagaatgatccactttggacgagagctgcaagcaatgagtgaacagctaaggagagactgtggcaagaacactgcaaacaaaaaaatgttgaaggatgcattcagtctactagcatattcagatccctggaacagcccagttggaaatcagcttgacccgattcagagagaacctgtgtgctcagctcttaacagtgcaatattagaaacccacaatctgccaaagcaacctccacttgccctagcaatgggacaggccacacaatgtctaggactgatggctcgatcaggaattggatcctgcgcatttgccacagtggaagactacctacattagctatgcatttcaagagctcacacttatattgtggcatatagtcaacatggaagtagaccagctctgctgatttgaaatttagattttttaaattatgtactggggacaggtttttgtcgctttacattgcttcctagtttacagcatgatgcaaatgattttctaacttagtgttaggagaaattattttccatctttaacctcttagttgtctaagagttaaatattactgaatttcagacgttcaaattgatcatcacaaatcctttaaaacaattacctaaaagaaaccaaaaatcctgccttctttgtgggggaggggggagagaggggaaggaaatggaacaagttgtgtttgtgttagcatgtgggtgatgtaaacttcaaattgggagatgttccgacccccactcccatataagcattcaatcagtgtaacttgcaaaatgcataaacatccgacagtttgaatttatagtgttgatggaagaaatcatttttaatgtgtactgtaaaacttgaaatactcaggagctgagtgaatatgtttgttgctacttacaatcccgacctgttagtcccagtagttttgttttaacatggtctttttcaactttgtttcctgtttaactacagatgacttctgttgtagactcacaagtttaactgttgtattataacagtattacatgtcaacggtgtggttatgacctttatttatataaaaaccaaatatttagtcaatttaccgtgtcttaatttaatctttgtacaccttccatttttaagtgcttaaatgagtactatattgcaataaaatgtagtgatataattaaccagccattaaaaatttacttctacagatacagtgtcaattgagtttatatattaggtacttgcatactttttatgattactatgaaaattagagcaattaaaattaatggtttctacaattaatctgagttctacaacctaaaattgccttcagtttactggcatccctggattagggttagacctgatattgtggctgacacagaaaggcaacaggaaattaacttcattattttcatattcataatatggcatatgagactcaccaggcaagcaaatccccagactggttaaaagtaaaaatttaaaagctgttagctatattttgtgcactgaatctttaatagcaaattgtctacaggctgcagttagagactttgctggaatatccatttctccttttagtccgtgccatttttgccacccctctaacccggggagagtagaagaggtgctgttgctgatgtgggtatggcttgaattcagttaaatatattaaaaagaaaacaattccttcttaaaccactttttcctctaggattgcaaggcacagttctactccagaagaatgaaatgtggttgagcacttcctcaaataggtttatgatttttataatgatcctttaaaatgatctatgaatgatttattagataaattctatacatacaaagtacagattcttcatttagcattgatttacttcttagttttcatctttctgaccatccaccgtcttttaaacctcttggcattttgttttttttggattcc

SEQ ID NO: 3125 - protein, 110 aa, Homo sapiens
MIHFGRELQAMSEQLRRDCGKNTANKKMLKDAFSLLAYSDPWNSPVGNQLDPIQREPVCSALNSAILETHNLPKQPPLALAMGQATQCLGLMARSGIGSCAFATVEDYLH

SEQ ID NO: 3126 - DNA, 4131 bp, Homo sapiens
ggaaacagccgcgagagcagcggccgcggcggccgccagcgcgccttcccctcccgcgctcccgcgtcgcccccgccctcggcgcctcgtccccgggccgcgcgcccgcgctccggccaacgttctctcccggcctcccgggcccgccgcctactcccgcgtctccgagctcctcaaccgccgcggtctccctgggcgcgcggcccgccgcctgcttccggggcgggcggactgggcgcctggtgccggcggccgcagcgacagcgcccccgggaagcagaggaggaaggagagaagaggtggaggtggccgcaggctgagtcgcggccgggatgtccgggcagccgccgccgccgccgccgcagcagcagcaacagcagcagcagctgtcgccgccaccgccggcggccttggccccagtctccggagtcgtcctgccggcgcccccggccgtcagcgccggctcttctccggccggctcgcccggcggcggtgcgggcggcgaaggcttaggggccgcggcggccgccctgctcctccaccctccgccgccgccgcccccggccaccgcggccccgccgcccccgccgccgcccccgcctccccctgcctcagcggctgcccccgccagcgggccgcccgctcccccgggccttgcagcgggccccggcccggctggaggagccccgaccccagctctggtggcgggcagcagcgccgcggcccccttccctcacggggactcggccctgaacgagcaggagaaggagttgcagcggcggctgaagcgtctctacccggccgtggacgaacaagagacgccgctgcctcggtcctggagcccgaaggacaagttcagctacatcggcctctctcagaacaacctgcgggtgcactacaaaggtcatggcaaaaccccaaaagatgccgcgtcagttcgagccacgcatccaataccagcagcctgtgggatttattattttgaagtaaaaattgtcagtaagggaagagatggttacatgggaattggtctttctgctcaaggtgtgaacatgaatagactaccaggttgggataagcattcatatggttaccatggggatgatggacattcgttttgttcttctggaactggacaaccttatggaccaactttcactactggtgatgtcattggctgttgtgttaatcttatcaacaatacctgcttttacaccaagaatggacatagtttaggtattgctttcactgacctaccgccaaatttgtatcctactgtggggcttcaaacaccaggagaagtggtcgatgccaattttgggcaacatcctttcgtgtttgatatagaagactatatgcgggagtggagaaccaaaatccaggcacagatagatcgatttcctatcggagatcgagaaggagaatggcagaccatgatacaaaaaatggtttcatcttatttagtccaccatgggtactgtgccacagcagaggcctttgccagatctacagaccagaccgttctagaagaattagcttccattaagaatagacaaagaattcagaaattggtattagcaggaagaatgggagaagccattgaaacaacacaacagttatacccaagtttacttgaaagaaatcctaatctccttttcacattaaaagtgcgtcagtttatagaaatggtgaatggtacagatagtgaagtacgatgtttgggaggccgaagtccaaagtctcaagacagttatcctgttagtcctcgaccttttagtagtccaagtatgagccccagccatggaatgaatatccacaatttagcatcaggcaaaggaagcaccgcacatttttcaggttttgaaagttgtagtaatggtgtaatatcaaataaagcacatcaatcatattgccatagtaataaacaccagtcatccaacttgaatgtaccagaactaaacagtataaatatgtcaagatcacagcaagttaataacttcaccagtaatgatgtagacatggaaacagatcactactccaatggagttggagaaacttcatccaatggtttcctaaatggtagctctaaacatgaccacgaaatggaagattgtgacaccgaaatggaagttgattcaagtcagttgagacgccagttgtgtggaggaagtcaggccgccatagaaagaatgatccactttggacgagagctgcaagcaatgagtgaacagctaaggagagactgtggcaagaacactgcaaacaaaaaaatgttgaaggatgcattcagtctactagcatattcagatccctggaacagcccagttggaaatcagcttgacccgattcagagagaacctgtgtgctcagctcttaacagtgcaatattagaaacccacaatctgccaaagcaacctccacttgccctagcaatgggacaggccacacaatgtctaggactgatggctcgatcaggaattggatcctgcgcatttgccacagtggaagactacctacattagctatgcatttcaagagctcacacttatattgtggcatatagtcaacatggaagtagaccagctctgctgatttgaaatttagattttttaaattatgtactggggacaggtttttgtcgctttacattgcttcctagtttacagcatgatgcaaatgattttctaacttagtgttaggagaaattattttccatctttaacctcttagttgtctaagagttaaatattactgaatttcagacgttcaaattgatcatcacaaatcctttaaaacaattacctaaaagaaaccaaaaatcctgccttctttgtgggggaggggggagagaggggaaggaaatggaacaagttgtgtttgtgttagcatgtgggtgatgtaaacttcaaattgggagatgttccgacccccactcccatataagcattcaatcagtgtaacttgcaaaatgcataaacatccgacagtttgaatttatagtgttgatggaagaaatcatttttaatgtgtactgtaaaacttgaaatactcaggagctgagtgaatatgtttgttgctacttacaatcccgacctgttagtcccagtagttttgttttaacatggtctttttcaactttgtttcctgtttaactacagatgacttctgttgtagactcacaagtttaactgttgtattataacagtattacatgtcaacggtgtggttatgacctttatttatataaaaaccaaatatttagtcaatttaccgtgtcttaatttaatctttgtacaccttccatttttaagtgcttaaatgagtactatattgcaataaaatgtagtgatataattaaccagccattaaaaatttacttctacagatacagtgtcaattgagtttatatattaggtacttgcatactttttatgattactatgaaaattagagcaattaaaattaatggtttctacaattaatctgagttctacaacctaaaattgccttcagtttactggcatccctggattagggttagacctgatattgtggctgacacagaaaggcaacaggaaattaacttcattattttcatattcataatatggcatatgagactcaccaggcaagcaaatccccagactggttaaaagtaaaaatttaaaagctgttagctatattttgtgcactgaatctttaatagcaaattgtctacaggctgcagttagagactttgctggaatatccatttctccttttagtccgtgccatttttgccacccctctaacccggggagagtagaagaggtgctgttgctgatgtgggtatggcttgaattcagttaaatatattaaaaagaaaacaattccttcttaaaccactttttcctctaggattgcaaggcacagttctactccagaagaatgaaatgtggttgagcacttcctcaaataggtttatgatttttataatgatcctttaaaatgatctatgaatgatttattagataaattctatacatacaaagtacagattcttcatttagcattgatttacttcttagttttcatctttctgaccatccaccgtcttttaaacctcttggcattttgttttttttggattcc

SEQ ID NO: 3127 - protein, 729 aa, Homo sapiens; identical to SEQ ID NO: 320

SEQ ID NO: 3128 - DNA, 1577 bp, Homo sapiens
ttaaatgttgcttaatgtagttttagggaattatactttttctaaaatttttttctgacataagtaccctctaacactgaaaggttgtcccctctcaactgcatgctgaatactggatcctagactcttgagagctaaataaagtatatcttttagctgcagtttcatattaaaaatgaatttttaacaatctgcatatttagatgaaatattagggaatagttactaaatgtacaaaatggtataagaaatgtatgttcgtgtcctcattatactccattccataaggtagtaaaatacttgtctgtttttcttacagaagttgattcaagtcagttgagacgccagttgtgtggaggaagtcaggccgccatagaaagaatgatccactttggacgagagctgcaagcaatgagtgaacagctaaggagagactgtggcaagaacactgcaaacaaaaaaatgttgaaggatgcattcagtctactagcatattcagatccctggaacagcccagttggaaatcagcttgacccgattcagagagaacctgtgtgctcagctcttaacagtgcaatattagaaacccacaatctgccaaagcaacctccacttgccctagcaatgggacaggccacacaatgtctaggactgatggctcgatcaggaattggatcctgcgcatttgccacagtggaagactacctacattagctatgcatttcaagagctcacacttatattgtggcatatagtcaacatggaagtagaccagctctgctgatttgaaatttagattttttaaattatgtactggggacaggtttttgtcgctttacattgcttcctagtttacagcatgatgcaaatgattttctaacttagtgttaggagaaattattttccatctttaacctcttagttgtctaagagttaaatattactgaatttcagacgttcaaattgatcatcacaaatcctttaaaacaattacctaaaagaaaccaaaaatcctgccttctttgtgggggaggggggagagaggggaaggaaatggaacaagttgtgtttgtgttagcatgtgggtgatgtaaacttcaaattgggagatgttccgacccccactcccatataagcattcaatcagtgtaacttgcaaaatgcataaacatccgacagtttgaatttatagtgttgatggaagaaatcatttttaatgtgtactgtaaaacttgaaatactcaggagctgagtgaatatgtttgttgctacttacaatcccgacctgttagtcccagtagttttgttttaacatggtctttttcaactttgtttcctgtttaactacagatgacttctgttgtagactcacaagtttaactgttgtattataacagtattacatgtcaacggtgtggttatgacctttatttatataaaaaccaaatatttagtcaatttaccgtgtcttaatttaatctttgtacaccttccatttttaagtgcttaaatgagtactatattgcaataaaatgtagtgatataattaaccagccattaaaaatttacttctacag

SEQ ID NO: 3129 - protein, 110 aa, Homo sapiens; identical to SEQ ID NO: 3125

SEQ ID NO: 3130 - DNA, 3385 bp, Homo sapiens
ggaaacagccgcgagagcagcggccgcggcggccgccagcgcgccttcccctcccgcgctcccgcgtcgcccccgccctcggcgcctcgtccccgggccgcgcgcccgcgctccggccaacgttctctcccggcctcccgggcccgccgcctactcccgcgtctccgagctcctcaaccgccgcggtctccctgggcgcgcggcccgccgcctgcttccggggcgggcggactgggcgcctggtgccggcggccgcagcgacagcgcccccgggaagcagaggaggaaggagagaagaggtggaggtggccgcaggctgagtcgcggccgggatgtccgggcagccgccgccgccgccgccgcagcagcagcaacagcagcagcagctgtcgccgccaccgccggcggccttggccccagtctccggagtcgtcctgccggcgcccccggccgtcagcgccggctcttctccggccggctcgcccggcggcggtgcgggcggcgaaggcttaggggccgcggcggccgccctgctcctccaccctccgccgccgccgcccccggccaccgcggccccgccgcccccgccgccgcccccgcctccccctgcctcagcggctgcccccgccagcgggccgcccgctcccccgggccttgcagcgggccccggcccggctggaggagccccgaccccagctctggtggcgggcagcagcgccgcggcccccttccctcacggggactcggccctgaacgagcaggagaaggagttgcagcggcggctgaagcgtctctacccggccgtggacgaacaagagacgccgctgcctcggtcctggagcccgaaggacaagttcagctacatcggcctctctcagaacaacctgcgggtgcactacaaaggtcatggcaaaaccccaaaagatgccgcgtcagttcgagccacgcatccaataccagcagcctgtgggatttattattttgaagtaaaaattgtcagtaagggaagagatggttacatgggaattggtctttctgctcaaggtgtgaacatgaatagactaccaggttgggataagcattcatatggttaccatggggatgatggacattcgttttgttcttctggaactggacaaccttatggaccaactttcactactggtgatgtcattggctgttgtgttaatcttatcaacaatacctgcttttacaccaagaatggacatagtttaggtattgctttcactgacctaccgccaaatttgtatcctactgtggggcttcaaacaccaggagaagtggtcgatgccaattttgggcaacatcctttcgtgtttgatatagaagactatatgcgggagtggagaaccaaaatccaggcacagatagatcgatttcctatcggagatcgagaaggagaatggcagaccatgatacaaaaaatggtttcatcttatttagtccaccatgggtactgtgccacagcagaggcctttgccagatctacagaccagaccgttctagaagaattagcttccattaagaatagacaaagaattcagaaattggtattagcaggaagaatgggagaagccattgaaacaacacaacagttatacccaagtttacttgaaagaaatcctaatctccttttcacattaaaagtgcgtcagtttatagaaatggtgaatggtacagatagtgaagtacgatgtttgggaggccgaagtccaaagtctcaagacagttatcctgttagtcctcgaccttttagtagtccaagtatgagccccagccatggaatgaatatccacaatttagcatcaggcaaaggaagcaccgcacatttttcaggttttgaaagttgtagtaatggtgtaatatcaaataaagcacatcaatcatattgccatagtaataaacaccagtcatccaacttgaatgtaccagaactaaacagtataaatatgtcaagatcacagcaagttaataacttcaccagtaatgatgtagacatggaaacagatcactactccaatggagttggagaaacttcatccaatggtttcctaaatggtagctctaaacatgaccacgaaatggaagattgtgacaccgaaatggaagttgattcaagtcagttgagacgccagttgtgtggaggaagtcaggccgccatagaaagaatgatccactttggacgagagctgcaagcaatgagtgaacagctaaggagagactgtggcaagaacactgcaaacaaaaaaatgttgaaggatgcattcagtctactagcatattcagatccctggaacagcccagttggaaatcagcttgacccgattcagagagaacctgtgtgctcagctcttaacagtgcaatattagaaacccacaatctgccaaagcaacctccacttgccctagcaatgggacaggccacacaatgtctaggactgatggctcgatcaggaattggatcctgcgcatttgccacagtggaagactacctacattagctatgcatttcaagagctcacacttatattgtggcatatagtcaacatggaagtagaccagctctgctgatttgaaatttagattttttaaattatgtactggggacaggtttttgtcgctttacattgcttcctagtttacagcatgatgcaaatgattttctaacttagtgttaggagaaattattttccatctttaacctcttagttgtctaagagttaaatattactgaatttcagacgttcaaattgatcatcacaaatcctttaaaacaattacctaaaagaaaccaaaaatcctgccttctttgtgggggaggggggagagaggggaaggaaatggaacaagttgtgtttgtgttagcatgtgggtgatgtaaacttcaaattgggagatgttccgacccccactcccatataagcattcaatcagtgtaacttgcaaaatgcataaacatccgacagtttgaatttatagtgttgatggaagaaatcatttttaatgtgtactgtaaaacttgaaatactcaggagctgagtgaatatgtttgttgctacttacaatcccgacctgttagtcccagtagttttgttttaacatggtctttttcaactttgtttcctgtttaactacagatgacttctgttgtagactcacaagtttaactgttgtattataacagtattacatgtcaacggtgtggttatgacctttatttatataaaaaccaaatatttagtcaatttaccgtgtcttaatttaatctttgtacaccttccatttttaagtgcttaaatgagtactatattgcaataaaatgtagtgatataattaaccagccattaaaaatttacttctacag

SEQ ID NO: 3131 - protein, 729 aa, Homo sapiens; identical to SEQ ID NO: 320

SEQ ID NO: 3132 - DNA, 1717 bp, Homo sapiens
gccgccgccgcccccggccaccgcggccccgccgcccccgccgccgcccccgcctccccctgcctcagcggctgcccccgccagcgggccgcccgctcccccgggccttgcagcgggccccggcccggctggaggagccccgaccccagctctggtggcgggcagcagcgccgcggcccccttccctcacggggactcggccctgaacgagcaggagaaggagttgcagcggcggctgaagcgtctctacccggccgtggacgaacaagagacgccgctgcctcggtcctggagcccgaaggacaagttcagctacatcggcctctctcagaacaacctgcgggtgcactacaaaggtcatggcaaaaccccaaaagatgccgcgtcagttcgagccacgcatccaataccagcagcctgtgggatttattattttgaagtaaaaattgtcagtaagggaagagatggttacatgggaattggtctttctgctcaaggtgtgaacatgaatagactaccaggttgggataagcattcatatggttaccatggggatgatggacattcgttttgttcttctggaactggacaaccttatggaccaactttcactactggtgatgtcattggctgttgtgttaatcttatcaacaatacctgcttttacaccaagaatggacatagtttaggtattgctttcactgacctaccgccaaatttgtatcctactgtggggcttcaaacaccaggagaagtggtcgatgccaattttgggcaacatcctttcgtgtttgatatagaagactatatgcgggagtggagaaccaaaatccaggcacagatagatcgatttcctatcggagatcgagaaggagaatggcagaccatgatacaaaaaatggtttcatcttatttagtccaccatgggtactgtgccacagcagaggcctttgccagatctacagaccagaccgttctagaagaattagcttccattaagaatagacaaagaattcagaaattggtattagcaggaagaatgggagaagccattgaaacaacacaacagttatacccaagtttacttgaaagaaatcctaatctccttttcacattaaaagtgcgtcagtttatagaaatggtgaatggtacagatagtgaagtacgatgtttgggaggccgaagtccaaagtctcaagacagttatcctgttagtcctcgaccttttagtagtccaagtatgagccccagccatggaatgaatatccacaatttagcatcaggcaaaggaagcaccgcacatttttcaggttttgaaagttgtagtaatggtgtaatatcaaataaagcacatcaatcatattgccatagtaataaacaccagtcatccaacttgaatgtaccagaactaaacagtataaatatgtcaagatcacagcaagttaataacttcaccagtaatgatgtagacatggaaacagatcactactccaatggagttggagaaacttcatccaatggtttcctaaatggtagctctaaacatgaccacgaaatggaagattgtgacaccgaaatggaagttgattcaagtcagttgagacgccagttgtgtggaggaagtcaggccgccatagaaagaatgatccactttggacgagagctgcaagcaatgagtgaacagctaaggagagactgtggcaagaacactgcaaac

SEQ ID NO: 3133 - protein, 414 aa, Homo sapiens
MGIGLSAQGVNMNRLPGWDKHSYGYHGDDGHSFCSSGTGQPYGPTFTTGDVIGCCVNLINNTCFYTKNGHSLGIAFTDLPPNLYPTVGLQTPGEVVDANFGQHPFVFDIEDYMREWRTKIQAQIDRFPIGDREGEWQTMIQKMVSSYLVHHGYCATAEAFARSTDQTVLEELASIKNRQRIQKLVLAGRMGEAIETTQQLYPSLLERNPNLLFTLKVRQFIEMVNGTDSEVRCLGGRSPKSQDSYPVSPRPFSSPSMSPSHGMNIHNLASGKGSTAHFSGFESCSNGVISNKAHQSYCHSNKHQSSNLNVPELNSINMSRSQQVNNFTSNDVDMETDHYSNGVGETSSNGFLNGSSKHDHEMEDCDTEMEVDSSQLRRQLCGGSQAAIERMIHFGRELQAMSEQLRRDCGKNTA

SEQ ID NO: 3134 - DNA, 1158 bp, Homo sapiens
ccccgccagcgggccgcccgctcccccgggccttgcagcgggccccggcccggctggaggagccccgaccccagctctggtggcgggcagcagcgccgcggcccccttccctcacggggactcggccctgaacgagcaggagaaggagttgcagcggcggctgaagcgtctctacccggccgtggacgaacaagagacgccgctgcctcggtcctggagcccgaaggacaagttcagctacatcggcctctctcagaacaacctgcgggtgcactacaaaggtcatggcaaaaccccaaaagatgccgcgtcagttcgagccacgcatccaataccagcagcctgtgggatttattattttgaagtaaaaattgtcagtaagggaagagatgggtaagtaaattttggtgagaaaaatcgtttgctagtttttttgttttggttcataatgtttatgatgtaattggaaagttggaatcctggaaattttgctaattggaaaagtggaatctgaatatttcagtataacagattggatctggttatgcttaaatactagctgaagttaaagcttgagttggtgatattaactaagcttttctggtaggtttattattaaaatggagaatttggaattaaggaatgaagggatggtgactcattttccatgacttttcttacactgctttttcgtgaattctgctaagaagttaaatcctctcaaactagtaatcatagtcagttggtgattcataggtattttacagatgttggacttagaattttaggtttcagctgggaaatgtgtatttgtatgctctcaactagaggagattttcaaggtttaggatgtggtttagaaatttccaaatgagaattccatggtagggcctggaaccaaattttatatcattgcttttcagcttgggattggtgtgtggtttgtatgggtatcagaattcacttatgagactattaaaaatatagtaatttttgggccttaccccaaaagttcctaaattaggattttcagaagtagagctttgggcaagataggcattttgagaaagctccacactgaattttggtgcctatccctggttaagcactaattacctagaatcattggatctatcctatagtatttcctgataactt

SEQ ID NO: 3135 - protein, 45 aa, Homo sapiens [sequence omitted]

SEQ ID NO: 3136 - DNA, 1190 bp, Homo sapiens
gcgcgcccggcaggaaagggcggtcctgcgctgtggcccacgctcgctcccgctgtcggactctgggcctggaccgcgcgtggccggcgccaaaagcgagaggcatgagcgcgcgcccgggccagtgaactgctcggggatggactgcggctcggtcggcggccagaggacccagcgcctgcccggccgccagcggcttctcttcttgcccgtgggcctcagcggaagaccgggcggcagcgaaacctcagcacgccgctgcctctctgcgctctccgacggtctgggggcgctgcgccctcgcgccccggcggcccgcggcggcgtgtcacgtgcctcaccgctgctcctcctcctgctagtgccctccccgcgcttggccgccgcagccccgcgccggcagctcggggactgggagcgctcgcgcctcgggtatgccgcacccccggccgggcgcagcagcgcgtggaggtgctcaccgggcgtcgccgctgccgccggcgcccttccccagtaccacggcccggcgcctgcactcgtttcctgcaggagagagctaagcttgtctgctggatccctgcagctggagcgcaaaaggagagatttcacctcttctgggagcaggaaactctacttcgacactcatgccttagtgtgcttactggaagacaatgggtttgctactcaacaagcagaaatcattgtgtctgcattggtcaagatcctggaggccaacatggacatcgtctacaaagatatggtcaccaagatgcagcaggaaatcacttttcagcaagtaatgtctcagattgcgaatgtgaaaaaggatatgattattttggagaagagtgaattttcagccctcagagcagaaaatgagaaaataaaactcgaactacatcagttaaaacaacaagtaatggatgaagtgatcaaagtccgaacagataccaaattagacttcaacctagaaaagagcagagtaaaagaattggaggaaattgggaatctctgaacaatccgtgggctgaatacgaaggaatctgcctggcttcttggatacacacttcatactctcaaggacagccctctttattggaatgcacaaagtatgtggaaaagagataccatgtcttgtcggattcaattttgctcctaacatagtgtggattaaagagtaatcaatagtg

SEQ ID NO: 3137 - protein, 291 aa, Homo sapiens
MDCGSVGGQRTQRLPGRQRLLFLPVGLSGRPGGSETSARRCLSALSDGLGALRPRAPAARGGVSRASPLLLLLLVPSPRLAAAAPRRQLGDWERSRLGYAAPPAGRSSAWRCSPGVAAAAGALPQYHGPAPALVSCRRELSLSAGSLQLERKRRDFTSSGSRKLYFDTHALVCLLEDNGFATQQAEIIVSALVKILEANMDIVYKDMVTKMQQEITFQQVMSQIANVKKDMIILEKSEFSALRAENEKIKLELHQLKQQVMDEVIKVRTDTKLDFNLEKSRVKELEEIGNL

SEQ ID NO: 3138 - DNA, 2239 bp, Homo sapiens
ctttggcacatagaggatttgggggtctccatgttcagggcacaatggctttaataagtgctggaaaatcactgaagctaaaccaagagcaccagatcctctttacctaaataaccagtctttaacatgagctagtccctgtaccatagtattgtttcagctgtagttggttgtcatgttaataagacagctgcacgtctaccttcttttcttttgatttccattgtcttggtaagttattgttagggttatttttaatgtgccttccagccagaaaaatcagctgtctaaagaagcattgcaattgtaatggggactcttacctcttagaatgcaagattttccctcctccctccctcttctccatctctttccctcatgatttgagaactgtaataatcctccactggtggcattacctacctagaaaacctgctgattcttagcatggaactttgcttcagtttgcaggacaaagtctgcttccttccggtcttcatttactttttatacaagggatgcagtcagctctccatgtataagatacctagatgatggatacatatttcataaatgaaatttatgtcattaatgaatatccccttgcccacaaccagctcaggctttcaaaattcgagaatggtcatgccacacagcattctaatctagatggattaattctgttgttcaaaacattctcatacctgcctttatattgaaaacaaattctagatacaactggggttattctggaaaagcacattctcaccttttttttttttttgagacggagtctcgcactgtcgcagggctggagtgcattgttgcagtgagcagagattacaccactgcaacgagactcgggcccagacgagatctgcctgggcgacacagtgagactctgtctcaaaataaataaataagtaaatagaacctcctgagctaccctggcttataaggattcagattactttaggaaattaggcattagcactaggaggggggaagatggctggcaaaacttctagctagcaacctatgtctagcacatgggtaactaaccatagcgagatcctgaacacatatcctctaggtgcaggtggagggaacgatgtccaatacctgaagcagaatctcacatggacggaacgtctgtatttccctctcctgcacgaatcactcatcattcttggagggcttctctgcattcctccttttcttctctcccctcccctgccttttgtcttttctaaagagtctgaactccgatttccatgctctcctgctacattaataagcaaaacctgcttgtgtgtacggttctttactggaaacatgactttttgtttctgtattggttttactgtcatccagttttctagtttaatatctagcaaaactaaatctgaatgtactcgctttttccgttaagtatgccaagcacctcggttgaaaggcttgactcaaaccagaagtcttgctggaattcgtctctgaacacttgaaaaacagaaaccctgagccgcaacaaacatgcctctgtgtgtcgggattgcctttgtctctgcttccatgtggcttttccttttgtagctatgcttagtgacataatcttccctcttctagccttctcctttcaagcctgtctgttaattaaccatgtcagtattggcaagcatttatcttcccccaccctaacatgcaatcttctaagaattttgcaaaattctaaacaaatatagagatggtatatagaattcatatctagaaaactttgattttaatgtgagcttatcaaatttgttctggcttttttggcactaaggcaaaaacatgttaaccagaaataatttattcttcatgtatgtaaaatatttgagaatgtttagccttttattagaattttatttggaaaatatttatctttctacacattttacacttatgttcctttgcttataacccaatttcttaacttttttgttacttaagcaaatatcaattatgttttattatctaataaagtgtaagattcttactatctaaaatatttaattctgtgtgactaatatacttttctgatcattcaaattgaatatgaaaagctagaataactgtattgcaactgttaattccagccaattgtataatgataacactggtgaatttctaagtaaatctaatacttgaaaatttgggtatacatagaaaataaattttaatataatgtacaaagtaa

SEQ ID NO: 3139 - protein, 130 aa, Homo sapiens [sequence omitted]

SEQ ID NO: 3140 - DNA, 2053 bp, Homo sapiens
ctttggcacatagaggatttgggggtctccatgttcagggcacaatggctttaataagtgctggaaaatcactgaagctaaaccaagagcaccagatcctctttacctaaataaccagtctttaacatgagctagtccctgtaccatagtattgtttcagctgtagttggttgtcatgttaataagacagctgcacgtctaccttcttttcttttgatttccattgtcttggtaagttattgttagggttatttttaatgtgccttccagccagaaaaatcagctgtctaaagaagcattgcaattgtaatggggactcttacctcttagaatgcaagattttccctcctccctccctcttctccatctctttccctcatgatttgagaactgtaataatcctccactggtggcattacctacctagaaaacctgctgattcttagcatggaactttgcttcagtttgcaggacaaagtctgcttccttccggtcttcatttactttttatacaagggatgcagtcagctctccatgtataagatacctagatgatggatacatatttcataaatgaaatttatgtcattaatgaatatccccttgcccacaaccagctcaggctttcaaaattcgagaatggtcatgccacacagcattctaatctagatggattaattctgttgttcaaaacattctcatacctgcctttatattgaaaacaaattctagatacaactggggttattctggaaaagcacattctcaccttttttttttttttgagacggagtctcgcactgtcgcagggctggagtgcattgttgcagtgagcagagattacaccactgcaacgagactcgggcccagacgagatctgcctgggcgacacagtgagactctgtctcaaaataaataaataagtaaatagaacctcctgagctaccctggcttataaggattcagattactttaggaaattaggcattagcactaggaggggggaagatggctggcaaaacttctagctagcaacctatgtctagcacatgggtaactaaccatagcgagatcctgaacacatatcctctaggtgcaggtggagggaacgatgtccaatacctgaagcagaatctcacatggacggaacgtctgtatttccctctcctgcacgaatcactcatcattcttggagggcttctctgcattcctccttttcttctctcccctcccctgccttttgtcttttctaaagagtctgaactccgatttccatgctctcctgctacattaataagcaaaacctgcttgtgtgtacggttctttactggaaacatgactttttgtttctgtattggttttactgtcatccagttttctagtttaatatctagcaaaactaaatctgaatgtactcgctttttccgttaagtatgccaagcacctcggttgaaaggcttgactcaaaccagaagtcttgctggaattcgtctctgaacacttgaaaaacagaaaccctgagccgcaacaaacatgcctctgtgtgtcgggattgcctttgtctctgcttccatgtggcttttccttttgtagctatgcttagtgacataatcttccctcttctagccttctcctttcaagcctgtctgttaattaaccatgtcagtattggcaagcatttatcttcccccaccctaacatgcaatcttctaagaattttgcaaaattctaaacaaatatagagatggtatatagaattcatatctagaaaactttgattttaatgtgagcttatcaaatttgttctggcttttttggcactaaggcaaaaacatgttaaccagaaataatttattcttcatgtatgtaaaatatttgagaatgtttagccttttattagaattttatttggaaaatatttatctttctacacattttacacttatgttcctttgcttataacccaatttcttaacttttttgttacttaagcaaatatcaattatgttttattatctaataaagtgtaagattcttactatctaaaatattt

SEQ ID NO: 3141 - protein, 130 aa, Homo sapiens [sequence omitted]

SEQ ID NO: 3142 - DNA, 489 bp, Homo sapiens
cctcaagtaacacatataaagaagcagtattcattgaacgaaaagaagctgctggaattgagaacagaaatagtggcattgcatgcccagcaagatcgggcccttacccagacagacaggaagatcgaaactgaggttgctggcctcaaaaccatgcttgagtcacacaagcttgataatattaaatatttagcagggtctatatttacgtgcctaacagtagctctgggattttatcgcctgtggatctaataaagtgtctatttaaagtgatttctactgttttgccttaagaataccagattgttggctgggtgcggtggctcacacctgtaattccagcactttgggaggctgaggcaggtggattacctgaggtcaggagttcgagaccagcctggccaacacggtgaaaccccgtctctactaaaaaattaaaacattaggcgggcgtggtggcgggcgcctgtagtcccagctactcgggag

SEQ ID NO: 3143 - protein, 32 aa, Homo sapiens
MLESHKLDNIKYLAGSIFTCLTVALGFYRLWI

SEQ ID NO: 3144 - DNA, 1456 bp, Homo sapiens
gcgcgcccggcaggaaagggcggtcctgcgctgtggcccacgctcgctcccgctgtcggactctgggcctggaccgcgcgtggccggcgccaaaagcgagaggcatgagcgcgcgcccgggccagtgaactgctcggggatggactgcggctcggtcggcggccagaggacccagcgcctgcccggccgccagcggcttctcttcttgcccgtgggcctcagcggaagaccgggcggcagcgaaacctcagcacgccgctgcctctctgcgctctccgacggtctgggggcgctgcgccctcgcgccccggcggcccgcggcggcgtgtcacgtgcctcaccgctgctcctcctcctgctagtgccctccccgcgcttggccgccgcagccccgcgccggcagctcggggactgggagcgctcgcgcctcgggtatgccgcacccccggccgggcgcagcagcgcgtggaggtgctcaccgggcgtcgccgctgccgccggcgcccttccccagtaccacggcccggcgcctgcactcgtttcctgcaggagagagctaagcttgtctgctggatccctgcagctggagcgcaaaaggagagatttcacctcttctgggagcaggaaactctacttcgacactcatgccttagtgtgcttactggaagacaatgggtttgctactcaacaagcagaaatcattgtgtctgcattggtcaagatcctggaggccaacatggacatcgtctacaaagatatggtcaccaagatgcagcaggaaatcacttttcagcaagtaatgtctcagattgcgaatgtgaaaaaggatatgattattttggagaagagtgaattttcagccctcagagcagaaaatgagaaaataaaactcgaactacatcagttaaaacaacaagtaatggatgaagtgatcaaagtccgaacagataccaaattagacttcaacctagaaaagagcagagtaaaagaattgtattcattgaacgaaaagaagctgctggaattgagaacagaaatagtggcattgcatgcccagcaagatcgggcccttacccagacagacaggaagatcgaaactgaggttgctggcctcaaaaccatgcttgagtcacacaagcttgataatattaaatatttagcagggtctatatttacgtgcctaacagtagctctgggattttatcgcctgtggatctaataaagtgtctatttaaagtgatttctactgttttgccttaagaataccagattgttggctgggtgcggtggctcacacctgtaattccagcactttgggaggctgaggcaggtggattacctgaggtcaggagttcgagaccagcctggccaacacggtgaaaccccgtctctactaaaaaattaaaacattaggcgggcgtggtggcgggcgcctgtagtcccagctactcgggag

SEQ ID NO: 3145 - protein, 359 aa, Homo sapiens; identical to SEQ ID NO: 322

SEQ ID NO: 3146 - DNA, 1825 bp, Homo sapiens
gcgcgcccggcaggaaagggcggtcctgcgctgtggcccacgctcgctcccgctgtcggactctgggcctggaccgcgcgtggccggcgccaaaagcgagaggcatgagcgcgcgcccgggccagtgaactgctcggggatggactgcggctcggtcggcggccagaggacccagcgcctgcccggccgccagcggcttctcttcttgcccgtgggcctcagcggaagaccgggcggcagcgaaacctcagcacgccgctgcctctctgcgctctccgacggtctgggggcgctgcgccctcgcgccccggcggcccgcggcggcgtgtcacgtgcctcaccgctgctcctcctcctgctagtgccctccccgcgcttggccgccgcagccccgcgccggcagctcggggactgggagcgctcgcgcctcgggtatgccgcacccccggccgggcgcagcagcgcgtggaggtgctcaccgggcgtcgccgctgccgccggcgcccttccccagtaccacggcccggcgcctgcactcgtttcctgcaggagagagctaagcttgtctgctggatccctgcagctggagcgcaaaaggagagatttcacctcttctgggagcaggaaactctacttcgacactcatgccttagtgtgcttactggaagacaatgaatctcactctttcatccaggctggagtgcagtggcacagtcttggcctactgcaacccccacctcccggtttcaagcgatcctcccacctcatcctcctgagtagctgggattacaggcatgcaccaccacacctggataatttttctgtatttttactagagacggggtttcaccatgttggccaggctggtctcaaactgctgacctcaagtgatccacccaccttggcctcctaaagtgctgggattacaggcgtgaaccactgtgtccagttgccaaacctaattatgtttaaacatgaactctttttttaattaaaattttttaaaattttatttacattaaaatggagatgggatcactatgttgcccatgctggttctgaactcctgggctcaaagatcctcccgccttggtctcccagagtgttaggattacaggcgtgagccaccacacccagccagtgaactcttcttaataaaactttaaaatttggcaaaagtttagtttgagtttttaaaaactaggaagacagacgagaaaaaagaaaacagagtcagagctaaacaatgttaacattttgggtttgctactcaacaagcagaaatcattgtgtctgcattggtcaagatcctggaggccaacatggacatcgtctacaaagatatggtcaccaagatgcagcaggaaatcacttttcagcaagtaatgtctcagattgcgaatgtgaaaaaggatatgattattttggagaagagtgaattttcagccctcagagcagaaaatgagaaaataaaactcgaactacatcagttaaaacaacaagtaatggatgaagtgatcaaagtccgaacagataccaaattagacttcaacctagaaaagagcagagtaaaagaattgtattcattgaacgaaaagaagctgctggaattgagaacagaaatagtggcattgcatgcccagcaagatcgggcccttacccagacagacaggaagatcgaaactgaggttgctggcctcaaaaccatgcttgagtcacacaagcttgataatattaaatatttagcagggtctatatttacgtgcctaacagtagctctgggattttatcgcctgtggatctaataaagtgtctatttaaagtg

SEQ ID NO: 3147 - protein, 257 aa, Homo sapiens
MDCGSVGGQRTQRLPGRQRLLFLPVGLSGRPGGSETSARRCLSALSDGLGALRPRAPAARGGVSRASPLLLLLLVPSPRLAAAAPRRQLGDWERSRLGYAAPPAGRSSAWRCSPGVAAAAGALPQYHGPAPALVSCRRELSLSAGSLQLERKRRDFTSSGSRKLYFDTHALVCLLEDNESHSFIQAGVQWHSLGLLQPPPPGFKRSSHLILLSSWDYRHAPPHLDNFSVFLLETGFHHVGQAGLKLLTSSDPPTLAS

SEQ ID NO: 3148 - DNA, 1239 bp, Homo sapiens
gcgcgcccggcaggaaagggcggtcctgcgctgtggcccacgctcgctcccgctgtcggactctgggcctggaccgcgcgtggccggcgccaaaagcgagaggcatgagcgcgcgcccgggccagtgaactgctcggggatggactgcggctcggtcggcggccagaggacccagcgcctgcccggccgccagcggcttctcttcttgcccgtgggcctcagcggaagaccgggcggcagcgaaacctcagcacgccgctgcctctctgcgctctccgacggtctgggggcgctgcgccctcgcgccccggcggcccgcggcggcgtgtcacgtgcctcaccgctgctcctcctcctgctagtgccctccccgcgcttggccgccgcagccccgcgccggcagctcggggactgggagcgctcgcgcctcgggtatgccgcacccccggccgggcgcagcagcgcgtggaggtgctcaccgggcgtcgccgctgccgccggcgcccttccccagtaccacggcccggcgcctgcactcgtttcctgcaggagagagctaagcttgtctgctggatccctgcagctggagcgcaaaaggagagatttcacctcttctgggagcaggaaactctacttcgacactcatgccttagtgtgcttactggaagacaatgggtttgctactcaacaagcagaaatcattgtgtctgcattggtcaagatcctggaggccaacatggacatcgtctacaaagatatggtcaccaagatgcagcaggaaatcacttttcagcaagtaatgtctcagattgcgaatgtgaaaaaggatatgattattttggagaagagtgaattttcagccctcagagcagaaaatgagaaaataaaactcgaactacatcagttaaaacaacaagtaatggatgaagtgatcaaagtccgaacagataccaaattagacttcaacctagaaaagagcagagtaaaagaattgtattcattgaacgaaaagaagctgctggaattgagaacagaaatagtggcattgcatgcccagcaagatcgggcccttacccagacagacaggaagatcgaaactgaggttgctggcctcaaaaccatgcttgagtcacacaagcttgataatattaaatatttagcagggtctatatttacgtgcctaacagtagctctgggattttatcgcctgtggatctaataaagtgtctatttaaagtg

SEQ ID NO: 3149 - protein, 359 aa, Homo sapiens; identical to SEQ ID NO: 322

SEQ ID NO: 3150 - DNA, 870 bp, Homo sapiens
gcgcgcccggcaggaaagggcggtcctgcgctgtggcccacgctcgctcccgctgtcggactctgggcctggaccgcgcgtggccggcgccaaaagcgagaggcatgagcgcgcgcccgggccagtgaactgctcggggatggactgcggctcggtcggcggccagaggacccagcgcctgcccggccgccagcggcttctcttcttgcccgtgggcctcagcggaagaccgggcggcagcgaaacctcagcacgccgctgcctctctgcgctctccgacggtctgggggcgctgcgccctcgcgccccggcggcccgcggcggcgtgtcacgtgcctcaccgctgctcctcctcctgctagtgccctccccgcgcttggccgccgcagccccgcgccggcagctcggggactgggagcgctcgcgcctcgggtatgccgcacccccggccgggcgcagcagcgcgtggaggtgctcaccgggcgtcgccgctgccgccggcgcccttccccagtaccacggcccggcgcctgcactcgtttcctgcaggagagagctaagcttgtctgctggatccctgcagctggagcgcaaaaggagagatttcacctcttctgggagcaggaaactctacttcgacactcatgccttagtgtgcttactggaagacaatgggtttgctactcaacaagcagaaatcattgtgtctgcattggtcaagatcctggaggccaacatggacatcgtctacaaagatatggtcaccaagatgcagcaggaaatcacttttcagcaagtaatgtctcagattgcgaatgtgaaaaaggatatgattattttggagaagagtgaattttcagccctcagagc

SEQ ID NO: 3151 - protein, 242 aa, Homo sapiens
MDCGSVGGQRTQRLPGRQRLLFLPVGLSGRPGGSETSARRCLSALSDGLGALRPRAPAARGGVSRASPLLLLLLVPSPRLAAAAPRRQLGDWERSRLGYAAPPAGRSSAWRCSPGVAAAAGALPQYHGPAPALVSCRRELSLSAGSLQLERKRRDFTSSGSRKLYFDTHALVCLLEDNGFATQQAEIIVSALVKILEANMDIVYKDMVTKMQQEITFQQVMSQIANVKKDMIILEKSEFSAL

SEQ ID NO: 3152 - DNA, 438 bp, Homo sapiens
cagcttgagctgagctttcactcaccgtccaccactgctgtttgctgccatcgcagacttgccactgacttccacccctccagatccagcagggtgtctgctgctctcctgatccagcgagatggattccctacaggactcatgagcagatctcataatttctgggcatgttccacaccttggagtaggaatcagttagggttgttcttggctgcaactaacaaactactagcagtggcttaagcacggaagaacttaatgatctcacaggtgacctgggtagggaagggccctggtctactctacagctcttctagactctctcaccttggagtccaaacgcatggccttcctttggaacaccttctctctctcccacttcgggctcagctcctttgcagtgaaagattggaaagaataaacatctcttactcaatg

SEQ ID NO: 3153 - protein, 59 aa, Homo sapiens
MISQVTWVGKGPGLLYSSSRLSHLGVQTHGLPLEHLLSLPLRAQLLCSERLERINISYS

SEQ ID NO: 3154 - DNA, 1290 bp, Homo sapiens
cgtaggcagaaaaatagtatcattcatgttgtactcttttatattcattcagtttttttcttaaacctacattatagttctttctggttctagttattttataaatatgatacagctatagcaagttatgacctaacttgttcacagtcactatttatgtaaagaaatgattcattcatttattcattgtgaatttttttaaaactactgcatggtgctgtgggaatggaagtgaataagagctaccggaaggcagttattttcttcctggtcaggcaggggaaagaagaaactctctgaaataatgaatacgaatagaatggggttctaacagtgttctaacagtgaaggaattcagaagagtgacgctgagtaggagtgatcaggaaagactttgaggaggagggatcacttgagttgagctctgctgactagattgcatttctgtgggaagagatggatggagcatgaggaaggccatgtgtgtgtctgggacataacaagccaatgcacgcatactggagcatagtgaaagagtctattttgaagcttcaaacttagtgctgctgcagaccaggaacaagagagaaagagtggatttcagcctgcacggatggtcttgaaacacaaatggtttttggtctaggcgttttacactgagattctccactgccaccctttctactcaagcaaaatcttcgtgaaaagatctgctgcaaggaactgatagcttatggttctccattgtgatgaaagcacatggtacagttttccaaagaaattagaccattttcttcgtgagaaagaaatcgacgtgctgttttcatagggtatttctcacttctctgtgaaaggaagaaagaacacgcctgagcccaagagccctcaggagccctccagagcctgtgggaagtctccatggtgaagtataggctgaggctacctgtgaacagtacgcagtgaatgttatctgatgcacaaaggaaaataataatacaaaacccataacctattcattgtattgttgcggtagatcgagctacatgctgcacagcaaaagaccttctttgcacttctttcaagcagaattattgctgtatattcactctgaactgagagatcattgcaaaaaaaaaaaagaagaagaagaagagaagaaaagaaaaaagaaataggttaagcaaattttgtggtggtgcttatgtgtgcacagacatgcatgaggcctccgcatcttccaaacttggaaagcatattttaacagcacaaatatatctacatgtttgatct

SEQ ID NO: 3155 - protein, 43 aa, Homo sapiens
MLHSKRPSLHFFQAELLLYIHSELRDHCKKKKEEEEEKKRKKK

SEQ ID NO: 3156 - DNA, 886 bp, Homo sapiens
tttatgtgatgctttctctggtctatctaacaaaatgtcttaatgttaaaaatgctgggtgccctccttttttttcagcactggtgtagacttccccccatctttatatttgtgggaaatggatgttcagattgatgacgtgctctaaagacagagaggggaaatttacaaaacacaaatggagaggaatgtgaattttacaaaagtatttatggagttctctaaataatgaactccctcaggacacttagcacaccaagtaatgtaaaaagttaggcttacacgtagattgtcagacacacagcttttgtatattgtaagctacacctgtatccctgtaatggtccccaggagtatcacgctgcatgtaattgggcattagtggaagcagttcacgtaaaagactataatttgtattacttttacaccattgcaacactttttattgttcctcagtccttgatttgttttctaatgtctctagtgtgtttaacactttctcttgttatgatatgcaccatacatgtgcatgtaatataattcacatatataacatgaaaacatctgattcccacatctaacagtcagacttccgttttcctcttttccaaaatccaggtggtcagctgggtgcagtggcttgagtgtgtatttccagcactttgtgaagccaaagtgggaggattgcttagggcaggagtttgagactagcctgggcaacatagtgaggcctcatctctacattttttttttttaatcagccaggcatggtgatgtgtgcctgtggtcccggctactcagaaggctgaagtgggaggatcacctggttccaggaggctgaggctgcagtgagctctgattgtaccactgcactctagcctgggca

SEQ ID NO: 3157 - protein, 30 aa, Homo sapiens
MLKMLGALLFFQHWCRLPPIFIFVGNGCSD

SEQ ID NO: 3158 - DNA, 2882 bp, Homo sapiens
atgcaagaacaaagagcacagcaaagctggacaaacacagcaatccaggcaggggatttccaactcaactctggtatataagctgcatgcaaagtcctttttctgtctctggtttctggccccttgtctgcagagatggctcccaatgcttcctgcctctgtgtgcatgtccgttccgaggaatgggatttaatgacctttgatgccaacccatatgacagcgtgaaaaaaatcaaagaacatgtccggtctaagaccaaggttcctgtgcaggaccaggttcttttgctgggctccaagatcttaaagccacggagaagcctctcatcttatggcattgacaaagagaagaccatccaccttaccctgaaagtggtgaagcccagtgatgaggagctgcccttgtttcttgtggagtcaggtgatgaggcaaagaggcacctcctccaggtgcgaaggtccagctcagtggcacaagtgaaagcaatgatcgagactaagacgggtataatccctgagacccagattgtgacttgcaatggaaagagactggaagatgggaagatgatggcagattacggcatcagaaagggcaacttactcttcctggcatgttattgtattggagggtgaccaccctgggcatggggtgttggcaggggtcaaaaagcttatttcttttaatctcttactcaacgaacacatcttctgatgatttcccaaaattaatgagaatgagatgagtagagtaagatttgggtgggatgggtaggatgaagtatattgcccaactctatgtttctttgattctaacacaattaattaagtgacatgatttttactaatgtattactgagactagtaaataaatttttaaggcaaaatagagcattcaaagccagcttggaatttaattctgtcttgataccttgttatttatgcaaaaactcctatctcctttcctttatgacaagagagtaagttttaggttgggatccatgttctactgatttctgtatttctgtctttgttaagtccagtgctttatttatatcactcaataatggttgaaccaaattgaatttctacttatagagcatagtgaaatgatattttataaaatgaattagttgctctgacatgatcacaatcaaattactaaacattttagaaactaaattaaactccttcccccctcttctcctttaaagctatttgtatgaaatgaagtctggcaccatgcccccttttattctctatgtctcacacccaactaaaatagttattatttctggggatgatggtgggcaaggaaaggtattttccacagggatctagcaattctgtttaactagtggggattcctaggggtagatggacattgggagcgaacaaactttctaaagctgggggactgtggaccaccctctctcctacctgccttagggtctagcaggtcttctccaggatgagggcgccagtctgggtgagggtgggtgaggagctggcttctgggttgacctcaatattctgctcaggttctgctgattgagcattttcctctcttctttttttcatgaggagatccctgttcctgtcttgagaacttgagtcccttcctccatcttcctccctccatttactcctctctctgactctctctcttgctctctctctcatgactcactactgatcacctgtgagtttttttcacgggctgagacgtgcccgccttcttccacactcatcctagttccttgtttctttaaaacttgctcaagaaccaactcctgcaggggggtttccagtcttaaccccactcagcaaaattcaccaccatttatgggctttcctcatcacatttatgggtgaaatgccccggggagggcactggtcatctggccaggtctgcactaagttggactgatttctgagaatagagtccatggtcgctttttctggatgtaccctctcctgcagggtagggactatgattttcttgtcaacttgagacttctgattgcagagaccaagaggtcttccatggtcttccatcagatagggaggaagctaaaggcgagcatcacgtccatcattttccctgcgcgtggagttgtgaggggtaggttttccttccctaaacctgagtatatagaggatttagggattttccctcaagaactaaacatttcctcacgggaggaaaacatatcccccattggactccttaggacaaatcttgcagattatcatacaaaaatgaacagcctgaagtctaaactgactcactaaggggtatttccatccttgggttctggcttaatactttctcccctccccaactactcactgcccagcctggcctctccccagactccgcagcagcctcctcgctgcccccttcactttcttattcctgagggtgtagatgagcgggttgagagcaggtgtgaccacggtgtagaagagcgatacgaacttgccccgtgcctggttgtagcgctgcgcgggctgcaggtaggtgtagatggccgagccgtagaacaggcagacggctgtcaggtgggacccacacgtgcccaccgccctcctccggcctccgctgaaccgcatgcaacagacagctcgggccacggcaccgtaggaggccaggatgacggcaaacggcagcagcaggatgaccacgcgggcggcgaacatctggttctcggtagtgtctccgtcgcctccgcaggccagcttgagcaacgccggcagctcacagatgaagtggtccagcaggcggggcgcgcacagcggccgctcagccaggagcgcggtttgcgcaaccgagttggtgaggccgcttagccaggaggcgctggccagcgtgcgacataggc

SEQ ID NO: 3159 - protein, 165 aa, Homo sapiens
MAPNASCLCVHVRSEEWDLMTFDANPYDSVKKIKEHVRSKTKVPVQDQVLLLGSKILKPRRSLSSYGIDKEKTIHLTLKVVKPSDEELPLFLVESGDEAKRHLLQVRRSSSVAQVKAMIETKTGIIPETQIVTCNGKRLEDGKMMADYGIRKGNLLFLACYCIGG

SEQ ID NO: 3160 - DNA, 900 bp, Homo sapiens
atgcaagaacaaagagcacagcaaagctggacaaacacagcaatccaggcaggggatttccaactcaactctggtatataagctgcatgcaaagtcctttttctgtctctggtttctggccccttgtctgcagagatggctcccaatgcttcctgcctctgtgtgcatgtccgttccgaggaatgggatttaatgacctttgatgccaacccatatgacagcgtgaaaaaaatcaaagaacatgtccggtctaagaccaaggttcctgtgcaggaccaggttcttttgctgggctccaagatcttaaagccacggagaagcctctcatcttatggcattgacaaagagaagaccatccaccttaccctgaaagtggtgaagcccagtgatgaggagctgcccttgtttcttgtggagtcaggtgatgaggcaaagaggcacctcctccaggtgcgaaggtccagctcagtggcacaagtgaaagcaatgatcgagactaagacgggtataatccctgagacccagattgtgacttgcaatggaaagagactggaagatgggaagatgatggcagattacggcatcagaaagggcaacttactcttcctggcatgttattgtattggagggtgaccaccctgggcatggggtgttggcaggggtcaaaaagcttatttcttttaatctcttactcaacgaacacatcttctgatgatttcccaaaattaatgagaatgagatgagtagagtaagatttgggtgggatgggtaggatgaagtatattgcccaactctatgtttctttgattctaacacaattaattaagtgacatgatttttactaatgtattactgagactagtaaataaatttttaaggcaaaatagagcattcaaagcc

SEQ ID NO: 3161 - protein, 165 aa, Homo sapiens; identical to SEQ ID NO: 3159

SEQ ID NO: 3162 - DNA, 3712 bp, Homo sapiens
cgttcctttcctcctcgaggttgcatcccccctcccctccccgcccctccgactgtcgctcccacctcggcgctcgcttccctccccgcccccttcctgcctccccagctcccgcccgcccccccaccccccgctgccgcgcgccgcccgtgacgtcagagccccctcccagccccacatctccctcctgctcctcctcctcccctccgtcggtcagtcagtccgcgaggagagtccgcggtggcggcgacggtggcgagagccgcgggggccgtaggaagccaaccttccctgcttctccggggccctcgccccctcctccccacaaaatcagggatggaggcgcctccccggcaccctcttagcagccctccccaggaaaagtgtcccccctgagctcctaacgctccccaacagctacccctgccccccacgccatggggcccggggccccttttgcccgggtggggtggccactgccgcttctggttgtgatggcggcaggggtggctccggtgtgggcctcccactccccccatctcccgcggcctcactcgcgggtccccccgcacccctcctcagaacggcgcgcagtgtacatcggggcactgtttcccatgagcgggggctggccagggggccaggcctgccagcccgcggtggagatggcgctggaggacgtgaatagccgcagggacatcctgccggactatgagctcaagctcatccaccacgacagcaagtgtgatccaggccaagccaccaagtacctatatgagctgctctacaacgaccctatcaagatcatccttatgcctggctgcagctctgtctccacgctggtggctgaggctgctaggatgtggaacctcattgtgctttcctatggctccagctcaccagccctgtcaaaccggcagcgtttccccactttcttccgaacgcacccatcagccacactccacaaccctacccgcgtgaaactctttgaaaagtggggctggaagaagattgctaccatccagcagaccactgaggtcttcacttcgactctggacgacctggaggaacgagtgaaggaggctggaattgagattactttccgccagagtttcttctcagatccagctgtgcccgtcaaaaacctgaagcgccaggatgcccgaatcatcgtgggacttttctatgagactgaagcccggaaagttttttgtgaggtgtacaaggagcgtctctttgggaagaagtacgtctggttcctcattgggtggtatgctgacaattggttcaagatctacgacccttctatcaactgcacagtggatgagatgactgaggcggtggagggccacatcacaactgagattgtcatgctgaatcctgccaatacccgcagcatttccaacatgacatcccaggaatttgtggagaaactaaccaagcgactgaaaagacaccctgaggagacaggaggcttccaggaggcaccgctggcctatgatgccatctgggccttggcactggccctgaacaagacatctggaggaggcggccgttctggtgtgcgcctggaggacttcaactacaacaaccagaccattaccgaccaaatctaccgggcaatgaactcttcgtcctttgagggtgtctctggccatgtggtgtttgatgccagcggctctcggatggcatggacgcttatcgagcagcttcagggtggcagctacaagaagattggctactatgacagcaccaaggatgatctttcctggtccaaaacagataaatggattggagggtcccccccagctgaccagaccctggtcatcaagacattccgcttcctgtcacagaaactctttatctccgtctcagttctctccagcctgggcattgtcctagctgttgtctgtctgtcctttaacatctacaactcacatgtccgttatatccagaactcacagcccaacctgaacaacctgactgctgtgggctgctcactggctttagctgctgtcttccccctggggctcgatggttaccacattgggaggaaccagtttcctttcgtctgccaggcccgcctctggctcctgggcctgggctttagtctgggctacggttccatgttcaccaagatttggtgggtccacacggtcttcacaaagaaggaagaaaagaaggagtggaggaagactctggaaccctggaagctgtatgccacagtgggcctgctggtgggcatggatgtcctcactctcgccatctggcagatcgtggaccctctgcaccggaccattgagacatttgccaaggaggaacctaaggaagatattgacgtctctattctgccccagctggagcattgcagctccaggaagatgaatacatggcttggcattttctatggttacaaggggctgctgctgctgctgggaatcttccttgcttatgagaccaagagtgtgtccactgagaagatcaatgatcaccgggctgtgggcatggctatctacaatgtggcagtcctgtgcctcatcactgctcctgtcaccatgattctgtccagccagcaggatgcagcctttgcctttgcctctcttgccatagttttctcctcctatatcactcttgttgtgctctttgtgcccaagatgcgcaggctgatcacccgaggggaatggcagtcggaggcgcaggacaccatgaagacagggtcatcgaccaacaacaacgaggaggagaagtcccggctgttggagaaggagaaccgtgaactggaaaagatcattgctgagaaagaggagcgtgtctctgaactgcgccatcaactccagtctcggcagcagctccgctcccggcgccacccaccgacacccccagaaccctctgggggcctgcccaggggaccccctgagccccccgaccggcttagctgtgatgggagtcgagtgcatttgctttataagtgagggtgcatgtccgttccgaggaatgggatttaatgacctttgatgccaacccatatgacagcgtgaaaaaaatcaaagaacatgtccggtctaagaccaaggttcctgtgcaggaccaggttcttttgctgggctccaagatcttaaagccacggagaagcctctcatcttatggcattgacaaagagaagaccatccaccttaccctgaaagtggtgaagcccagtgatgaggagctgcccttgtttcttgtggagtcaggtgatgaggcaaagaggcacctcctccaggtgcgaaggtccagctcagtggcacaagtgaaagcaatgatcgagactaagacgggtataatccctgagacccagattgtgacttgcaatggaaagagactggaagatgggaagatgatggcagattacggcatcagaaagggcaacttactcttcctggcatgttattgtattggagggtgaccaccctgggcatggggtgttggcaggggtcaaaaagcttatttcttttaatctcttactcaacgaacacatcttctgatgatttcccaaaattaatgagaatgagatgagtagagtaagatttgggtgggatgggtaggatgaagtatattgcccaactctatgtttctttgattctaacacaattaattaagtgacatgatttttactaatgtattactgagactagtaaataaatttttaaggcaaaatagagcattcaaagcc

SEQ ID NO: 3163 - protein, 844 aa, Homo sapiens; identical to SEQ ID NO: 332

SEQ ID NO: 3164 - DNA, 1465 bp, Homo sapiens
caacttatcagaaaattcattcaatataccttacgagatcatccaatagataagagacaactctagaacagcattcagaacatagtggcactcaataaatttcccctgaatgaatgaattaatgaattagtgcatattttaatcagcctcctttgccctcacccaggaagtcagaggcaccagtgtgagtatccatctgctgtccagtacattcatggattcctcactctcactagacaatgtttgaccaggaagaacagggaatgagaaggagctgctggatggtgatgagccttggaaagggaggctgggcgagcagagacagaagagaaacacctacctgctgtgacctcacaaacacccaggctgagttttgataagacaggttgaatcacactggagtgacagcctcatccctccaggtacaaacaagaacaggccatggttaaccaaagctccacaccgggcttcctccttctgggcttctctgaacacccagggctggaaaggactctcttcgtggttgtcctcacttcctacctcctaaccctagtgggcaacacactcatcatcctgctgtctgcgctggaccccaagctccactctccaatgtactttttcctctccaacctctccttcttggacctctgtttcaccacgagttgtgttccccaaatgctggtcaacctctggggcccaaagaagaccatcagcttcctggactgctctgtccagatcttcatcttcctgtccctggggacaactgagtgcatcctcttgacagtgatggcttttgatcgctacgtggctgtctgccagcccctccactatgccaccatcatccacccccgcctgtgctggcagctggcatctgtggcctgggtcattgggctagtggagtcagtggtccagacaccatccaccctgcacctgcccttctgccccgatcggcaggtggatgattttgtctgtgaggtcccagctctaattcgactctcctgtgaagacacctcctacaatgagatccaggtggctgttgccagtgtcttcatcttggttgtgcctctcagcctcatccttgtctcttacggagccattacctgggcagtgctgaggattaactctgcaaaagggcggaggaaagcttttgggacctgctcctcccatctcactgtggtcaccctcttctacagctcagtcattgctgtctacctccagcccaaaaatccctatgcccaagagaggggcaagttctttggtctcttctatgcagtgggcactccttcacttaaccctctcatatacaccctgaggaacaaggaggtaaccagggcattcaggagattgctggggaaggaaatggggctcacacaaagctgagggagagctgcttaatgtgctttaaaagagaggagattctatgtgcttttatcagaaagtttgagttccctgcccctctgccttc

SEQ ID NO: 3165 - protein, 312 aa, Homo sapiens; identical to SEQ ID NO: 328

SEQ ID NO: 3166 - DNA, 1923 bp, Homo sapiens
tttctcaatctatatttgaggatgatcctgaatttggatccttttcaaagggaaagttcaccaggaaactgtctgcatagactccctcccatgggaagtaaactctggatcttgtctgagcctgcagacctgagactccctcaatgtgtctttccctctaggtcctgtgcctcatcactgctcctgtcaccatgattctgtccagccagcaggatgcagcctttgcctttgcctctcttgccatagttttctcctcctatatcactcttgttgtgctctttgtgcccaagatgcgcaggctgatcacccgaggggaatggcagtcggaggcgcaggacaccatgaagacagggtcatcgaccaacaacaacgaggaggagaagtcccggctgttggagaaggagaaccgtgaactggaaaagatcattgctgagaaagaggagcgtgtctctgaactgcgccatcaactccagtctcggcagcagctccgctcccggcgccacccaccgacacccccagaaccctctgggggcctgcccaggggaccccctgagccccccgaccggcttagctgtgatgggagtcgagtgcatttgctttataagtgagggtagggtgagggaggacaggccagtagggggagggaaagggagaggggaagggcaggggactcaggaagcagggggtccccatccccagctgggaagaacatgctatccaatctcatctcttgtaaatacatgtccccctgtgagttctgggctgatttgggtctctcatacctctgggaaacagacctttttctctcttactgcttcatgtaattttgtatcacctcttcacaatttagttcgtacctggcttgaagctgctcactgctcacacgctgcctcctcagcagcctcactgcatctttctcttcccatgcaacaccctcttctagttaccacggcaacccctgcagctcctctgcctttgtgctctgttcctgtccagcaggggtctcccaacaagtgctctttccaccccaaaggggcctctccttttctccactgtcataatctctttccatcttacttgcccttctatactttctcacatgtggctccccctgaattttgcttcctttgggagctcattcttttcgccaaggctcacatgctccttgcctctgctctgtgcactcacgctcagcacacatgcatcctcccctctcctgcgtgtgcccactgaacatgctcatgtgtacacacgcttttcccgtatgctttcttcatgttcagtcacatgtgctctcgggtgccctgcattcacagctacgtgtgcccctctcatggtcatgggtctgcccttgagcgtgtttgggtaggcatgtgcaatttgtctagcatgctgagtcatgtctttcctatttgcacacgtccatgtttatccatgtactttccctgtgtaccctccatgtaccttgtgtactttcttcccttaaatcatggtattcttctgacagagccatatgtaccctaccctgcacattgttatgcacttttccccaattcatgtttggtggggccatccacaccctctccttgtcacagaatctccatttctgctcagattccccccatctccattgcattcatgtactaccctcagtctacactcacaatcatcttctcccaagactgctcccttttgttttgtgtttttttgaggggaattaaggaaaaataagtgggggcaggtttggagagctgcttccagtggatagttgatgagaatcctgaccaaaggaaggcacccttgactgttgggatagacagatggacctatggggtgggaggtggtgtccctttcacactgtggtgtctcttggggaaggatctccccgaatctcaataaaccagtgaacagtgtgactcggca

SEQ ID NO: 3167 - protein, 138 aa, Homo sapiens [sequence omitted]

SEQ ID NO: 3168 - DNA, 4287 bp, Homo sapiens
cgttcctttcctcctcgaggttgcatcccccctcccctccccgcccctccgactgtcgctcccacctcggcgctcgcttccctccccgcccccttcctgcctccccagctcccgcccgcccccccaccccccgctgccgcgcgccgcccgtgacgtcagagccccctcccagccccacatctccctcctgctcctcctcctcccctccgtcggtcagtcagtccgcgaggagagtccgcggtggcggcgacggtggcgagagccgcgggggccgtaggaagccaaccttccctgcttctccggggccctcgccccctcctccccacaaaatcagggatggaggcgcctccccggcaccctcttagcagccctccccaggaaaagtgtcccccctgagctcctaacgctccccaacagctacccctgccccccacgccatggggcccggggccccttttgcccgggtggggtggccactgccgcttctggttgtgatggcggcaggggtggctccggtgtgggcctcccactccccccatctcccgcggcctcactcgcgggtccccccgcacccctcctcagaacggcgcgcagtgtacatcggggcactgtttcccatgagcgggggctggccagggggccaggcctgccagcccgcggtggagatggcgctggaggacgtgaatagccgcagggacatcctgccggactatgagctcaagctcatccaccacgacagcaagtgtgatccaggccaagccaccaagtacctatatgagctgctctacaacgaccctatcaagatcatccttatgcctggctgcagctctgtctccacgctggtggctgaggctgctaggatgtggaacctcattgtgctttcctatggctccagctcaccagccctgtcaaaccggcagcgtttccccactttcttccgaacgcacccatcagccacactccacaaccctacccgcgtgaaactctttgaaaagtggggctggaagaagattgctaccatccagcagaccactgaggtcttcacttcgactctggacgacctggaggaacgagtgaaggaggctggaattgagattactttccgccagagtttcttctcagatccagctgtgcccgtcaaaaacctgaagcgccaggatgcccgaatcatcgtgggacttttctatgagactgaagcccggaaagttttttgtgaggtgtacaaggagcgtctctttgggaagaagtacgtctggttcctcattgggtggtatgctgacaattggttcaagatctacgacccttctatcaactgcacagtggatgagatgactgaggcggtggagggccacatcacaactgagattgtcatgctgaatcctgccaatacccgcagcatttccaacatgacatcccaggaatttgtggagaaactaaccaagcgactgaaaagacaccctgaggagacaggaggcttccaggaggcaccgctggcctatgatgccatctgggccttggcactggccctgaacaagacatctggaggaggcggccgttctggtgtgcgcctggaggacttcaactacaacaaccagaccattaccgaccaaatctaccgggcaatgaactcttcgtcctttgagggtgtctctggccatgtggtgtttgatgccagcggctctcggatggcatggacgcttatcgagcagcttcagggtggcagctacaagaagattggctactatgacagcaccaaggatgatctttcctggtccaaaacagataaatggattggagggtcccccccagctgaccagaccctggtcatcaagacattccgcttcctgtcacagaaactctttatctccgtctcagttctctccagcctgggcattgtcctagctgttgtctgtctgtcctttaacatctacaactcacatgtccgttatatccagaactcacagcccaacctgaacaacctgactgctgtgggctgctcactggctttagctgctgtcttccccctggggctcgatggttaccacattgggaggaaccagtttcctttcgtctgccaggcccgcctctggctcctgggcctgggctttagtctgggctacggttccatgttcaccaagatttggtgggtccacacggtcttcacaaagaaggaagaaaagaaggagtggaggaagactctggaaccctggaagctgtatgccacagtgggcctgctggtgggcatggatgtcctcactctcgccatctggcagatcgtggaccctctgcaccggaccattgagacatttgccaaggaggaacctaaggaagatattgacgtctctattctgccccagctggagcattgcagctccaggaagatgaatacatggcttggcattttctatggttacaaggggctgctgctgctgctgggaatcttccttgcttatgagaccaagagtgtgtccactgagaagatcaatgatcaccgggctgtgggcatggctatctacaatgtggcagtcctgtgcctcatcactgctcctgtcaccatgattctgtccagccagcaggatgcagcctttgcctttgcctctcttgccatagttttctcctcctatatcactcttgttgtgctctttgtgcccaagatgcgcaggctgatcacccgaggggaatggcagtcggaggcgcaggacaccatgaagacagggtcatcgaccaacaacaacgaggaggagaagtcccggctgttggagaaggagaaccgtgaactggaaaagatcattgctgagaaagaggagcgtgtctctgaactgcgccatcaactccagtctcggcagcagctccgctcccggcgccacccaccgacacccccagaaccctctgggggcctgcccaggggaccccctgagccccccgaccggcttagctgtgatgggagtcgagtgcatttgctttataagtgagggtagggtgagggaggacaggccagtagggggagggaaagggagaggggaagggcaggggactcaggaagcagggggtccccatccccagctgggaagaacatgctatccaatctcatctcttgtaaatacatgtccccctgtgagttctgggctgatttgggtctctcatacctctgggaaacagacctttttctctcttactgcttcatgtaattttgtatcacctcttcacaatttagttcgtacctggcttgaagctgctcactgctcacacgctgcctcctcagcagcctcactgcatctttctcttcccatgcaacaccctcttctagttaccacggcaacccctgcagctcctctgcctttgtgctctgttcctgtccagcaggggtctcccaacaagtgctctttccaccccaaaggggcctctccttttctccactgtcataatctctttccatcttacttgcccttctatactttctcacatgtggctccccctgaattttgcttcctttgggagctcattcttttcgccaaggctcacatgctccttgcctctgctctgtgcactcacgctcagcacacatgcatcctcccctctcctgcgtgtgcccactgaacatgctcatgtgtacacacgcttttcccgtatgctttcttcatgttcagtcacatgtgctctcgggtgccctgcattcacagctacgtgtgcccctctcatggtcatgggtctgcccttgagcgtgtttgggtaggcatgtgcaatttgtctagcatgctgagtcatgtctttcctatttgcacacgtccatgtttatccatgtactttccctgtgtaccctccatgtaccttgtgtactttcttcccttaaatcatggtattcttctgacagagccatatgtaccctaccctgcacattgttatgcacttttccccaattcatgtttggtggggccatccacaccctctccttgtcacagaatctccatttctgctcagattccccccatctccattgcattcatgtactaccctcagtctacactcacaatcatcttctcccaagactgctcccttttgttttgtgtttttttgaggggaattaaggaaaaataagtgggggcaggtttggagagctgcttccagtggatagttgatgagaatcctgaccaaaggaaggcacccttgactgttgggatagacagatggacctatggggtgggaggtggtgtccctttcacactgtggtgtctcttggggaaggatctccccgaatctcaataaaccagtgaacagtgtgactcggca

SEQ ID NO: 3169 - protein, 844 aa, Homo sapiens; identical to SEQ ID NO: 332

SEQ ID NO: 3170 - DNA, 4386 bp, Homo sapiens
ccctctcttccccccgccctgccttcccttgcaccctccttcttccctccgcccgggagctctccctggtccccggcgccgcctccttccctcccggctccccgctccccgctcccgtggctgccgccgccccggggaagaagagacaggggtggggtttgggggaagcgagagaggaggggagagaccctggccaggctggagcctggattcgaggggaggagggacgggaggaggagaaaggtggaggagaagggaggggggagcggggaggagcggccgggcctggggccttgaggcccggggagagccggggagccgggcccgcgcgccgagatgttgctgctgctgctactggcgccactcttcctccgccccccgggcgcgggcggggcgcagacccccaacgccacctcagaaggttgccagatcatacacccgccctgggaagggggcatcaggtaccggggcctgactcgggaccaggtgaaggctatcaacttcctgccagtggactatgagattgagtatgtgtgccggggggagcgcgaggtggtggggcccaaggtccgcaagtgcctggccaacggctcctggacagatatggacacacccagccgctgtgtccgaatctgctccaagtcttatttgaccctggaaaatgggaaggttttcctgacgggtggggacctcccagctctggacggagcccgggtggatttccggtgtgaccccgacttccatctggtgggcagctcccggagcatctgtagtcagggccagtggagcacccccaagccccactgccaggtgaatcgaacgccacactcagaacggcgcgcagtgtacatcggggcactgtttcccatgagcgggggctggccagggggccaggcctgccagcccgcggtggagatggcgctggaggacgtgaatagccgcagggacatcctgccggactatgagctcaagctcatccaccacgacagcaagtgtgatccaggccaagccaccaagtacctatatgagctgctctacaacgaccctatcaagatcatccttatgcctggctgcagctctgtctccacgctggtggctgaggctgctaggatgtggaacctcattgtgctttcctatggctccagctcaccagccctgtcaaaccggcagcgtttccccactttcttccgaacgcacccatcagccacactccacaaccctacccgcgtgaaactctttgaaaagtggggctggaagaagattgctaccatccagcagaccactgaggtcttcacttcgactctggacgacctggaggaacgagtgaaggaggctggaattgagattactttccgccagagtttcttctcagatccagctgtgcccgtcaaaaacctgaagcgccaggatgcccgaatcatcgtgggacttttctatgagactgaagcccggaaagttttttgtgaggtgtacaaggagcgtctctttgggaagaagtacgtctggttcctcattgggtggtatgctgacaattggttcaagatctacgacccttctatcaactgcacagtggatgagatgactgaggcggtggagggccacatcacaactgagattgtcatgctgaatcctgccaatacccgcagcatttccaacatgacatcccaggaatttgtggagaaactaaccaagcgactgaaaagacaccctgaggagacaggaggcttccaggaggcaccgctggcctatgatgccatctgggccttggcactggccctgaacaagacatctggaggaggcggccgttctggtgtgcgcctggaggacttcaactacaacaaccagaccattaccgaccaaatctaccgggcaatgaactcttcgtcctttgagggtgtctctggccatgtggtgtttgatgccagcggctctcggatggcatggacgcttatcgagcagcttcagggtggcagctacaagaagattggctactatgacagcaccaaggatgatctttcctggtccaaaacagataaatggattgttatatccagaactcacagcccaacctgaacaacctgactgctgtgggctgctcactggctttagctgctgtcttccccctggggctcgatggttaccacattgggaggaaccagtttcctttcgtctgccaggcccgcctctggctcctgggcctgggctttagtctgggctacggttccatgttcaccaagatttggtgggtccacacggtcttcacaaagaaggaagaaaagaaggagtggaggaagactctggaaccctggaagctgtatgccacagtgggcctgctggtgggcatggatgtcctcactctcgccatctggcagatcgtggaccctctgcaccggaccattgagacatttgccaaggaggaacctaaggaagatattgacgtctctattctgccccagctggagcattgcagctccaggaagatgaatacatggcttggcattttctatggttacaaggggctgctgctgctgctgggaatcttccttgcttatgagaccaagagtgtgtccactgagaagatcaatgatcaccgggctgtgggcatggctatctacaatgtggcagtcctgtgcctcatcactgctcctgtcaccatgattctgtccagccagcaggatgcagcctttgcctttgcctctcttgccatagttttctcctcctatatcactcttgttgtgctctttgtgcccaagatgcgcaggctgatcacccgaggggaatggcagtcggaggcgcaggacaccatgaagacagggtcatcgaccaacaacaacgaggaggagaagtcccggctgttggagaaggagaaccgtgaactggaaaagatcattgctgagaaagaggagcgtgtctctgaactgcgccatcaactccagtctcggcagcagctccgctcccggcgccacccaccgacacccccagaaccctctgggggcctgcccaggggaccccctgagccccccgaccggcttagctgtgatgggagtcgagtgcatttgctttataagtgagggtagggtgagggaggacaggccagtagggggagggaaagggagaggggaagggcaggggactcaggaagcagggggtccccatccccagctgggaagaacatgctatccaatctcatctcttgtaaatacatgtccccctgtgagttctgggctgatttgggtctctcatacctctgggaaacagacctttttctctcttactgcttcatgtaattttgtatcacctcttcacaatttagttcgtacctggcttgaagctgctcactgctcacacgctgcctcctcagcagcctcactgcatctttctcttcccatgcaacaccctcttctagttaccacggcaacccctgcagctcctctgcctttgtgctctgttcctgtccagcaggggtctcccaacaagtgctctttccaccccaaaggggcctctccttttctccactgtcataatctctttccatcttacttgcccttctatactttctcacatgtggctccccctgaattttgcttcctttgggagctcattcttttcgccaaggctcacatgctccttgcctctgctctgtgcactcacgctcagcacacatgcatcctcccctctcctgcgtgtgcccactgaacatgctcatgtgtacacacgcttttcccgtatgctttcttcatgttcagtcacatgtgctctcgggtgccctgcattcacagctacgtgtgcccctctcatggtcatgggtctgcccttgagcgtgtttgggtaggcatgtgcaatttgtctagcatgctgagtcatgtctttcctatttgcacacgtccatgtttatccatgtactttccctgtgtaccctccatgtaccttgtgtactttcttcccttaaatcatggtattcttctgacagagccatatgtaccctaccctgcacattgttatgcacttttccccaattcatgtttggtggggccatccacaccctctccttgtcacagaatctccatttctgctcagattccccccatctccattgcattcatgtactaccctcagtctacactcacaatcatcttctcccaagactgctcccttttgttttgtgtttttttgaggggaattaaggaaaaataagtgggggcaggtttggagagctgcttccagtggatagttgatgagaatcctgaccaaaggaaggcacccttgactgttgggatagacagatggacctatggggtgggaggtggtgtccctttcacactgtggtgtctcttggggaaggatctccccgaatctcaataaaccagtgaacagtgtgactcggca

SEQ ID NO: 3171 - protein, 578 aa, Homo sapiens
MLLLLLLAPLFLRPPGAGGAQTPNATSEGCQIIHPPWEGGIRYRGLTRDQVKAINFLPVDYEIEYVCRGEREVVGPKVRKCLANGSWTDMDTPSRCVRICSKSYLTLENGKVFLTGGDLPALDGARVDFRCDPDFHLVGSSRSICSQGQWSTPKPHCQVNRTPHSERRAVYIGALFPMSGGWPGGQACQPAVEMALEDVNSRRDILPDYELKLIHHDSKCDPGQATKYLYELLYNDPIKIILMPGCSSVSTLVAEAARMWNLIVLSYGSSSPALSNRQRFPTFFRTHPSATLHNPTRVKLFEKWGWKKIATIQQTTEVFTSTLDDLEERVKEAGIEITFRQSFFSDPAVPVKNLKRQDARIIVGLFYETEARKVFCEVYKERLFGKKYVWFLIGWYADNWFKIYDPSINCTVDEMTEAVEGHITTEIVMLNPANTRSISNMTSQEFVEKLTKRLKRHPEETGGFQEAPLAYDAIWALALALNKTSGGGGRSGVRLEDFNYNNQTITDQIYRAMNSSSFEGVSGHVVFDASGSRMAWTLIEQLQGGSYKKIGYYDSTKDDLSWSKTDKWIVISRTHSPT

SEQ ID NO: 3172 - DNA, 4537 bp, Homo sapiens
ccctctcttccccccgccctgccttcccttgcaccctccttcttccctccgcccgggagctctccctggtccccggcgccgcctccttccctcccggctccccgctccccgctcccgtggctgccgccgccccggggaagaagagacaggggtggggtttgggggaagcgagagaggaggggagagaccctggccaggctggagcctggattcgaggggaggagggacgggaggaggagaaaggtggaggagaagggaggggggagcggggaggagcggccgggcctggggccttgaggcccggggagagccggggagccgggcccgcgcgccgagatgttgctgctgctgctactggcgccactcttcctccgccccccgggcgcgggcggggcgcagacccccaacgccacctcagaaggttgccagatcatacacccgccctgggaagggggcatcaggtaccggggcctgactcgggaccaggtgaaggctatcaacttcctgccagtggactatgagattgagtatgtgtgccggggggagcgcgaggtggtggggcccaaggtccgcaagtgcctggccaacggctcctggacagatatggacacacccagccgctgtgtccgaatctgctccaagtcttatttgaccctggaaaatgggaaggttttcctgacgggtggggacctcccagctctggacggagcccgggtggatttccggtgtgaccccgacttccatctggtgggcagctcccggagcatctgtagtcagggccagtggagcacccccaagccccactgccaggtgaatcgaacgccacactcagaacggcgcgcagtgtacatcggggcactgtttcccatgagcgggggctggccagggggccaggcctgccagcccgcggtggagatggcgctggaggacgtgaatagccgcagggacatcctgccggactatgagctcaagctcatccaccacgacagcaagtgtgatccaggccaagccaccaagtacctatatgagctgctctacaacgaccctatcaagatcatccttatgcctggctgcagctctgtctccacgctggtggctgaggctgctaggatgtggaacctcattgtgctttcctatggctccagctcaccagccctgtcaaaccggcagcgtttccccactttcttccgaacgcacccatcagccacactccacaaccctacccgcgtgaaactctttgaaaagtggggctggaagaagattgctaccatccagcagaccactgaggtcttcacttcgactctggacgacctggaggaacgagtgaaggaggctggaattgagattactttccgccagagtttcttctcagatccagctgtgcccgtcaaaaacctgaagcgccaggatgcccgaatcatcgtgggacttttctatgagactgaagcccggaaagttttttgtgaggtgtacaaggagcgtctctttgggaagaagtacgtctggttcctcattgggtggtatgctgacaattggttcaagatctacgacccttctatcaactgcacagtggatgagatgactgaggcggtggagggccacatcacaactgagattgtcatgctgaatcctgccaatacccgcagcatttccaacatgacatcccaggaatttgtggagaaactaaccaagcgactgaaaagacaccctgaggagacaggaggcttccaggaggcaccgctggcctatgatgccatctgggccttggcactggccctgaacaagacatctggaggaggcggccgttctggtgtgcgcctggaggacttcaactacaacaaccagaccattaccgaccaaatctaccgggcaatgaactcttcgtcctttgagggtgtctctggccatgtggtgtttgatgccagcggctctcggatggcatggacgcttatcgagcagcttcagggtggcagctacaagaagattggctactatgacagcaccaaggatgatctttcctggtccaaaacagataaatggattggagggtcccccccagctgaccagaccctggtcatcaagacattccgcttcctgtcacagaaactctttatctccgtctcagttctctccagcctgggcattgtcctagctgttgtctgtctgtcctttaacatctacaactcacatgtccgttatatccagaactcacagcccaacctgaacaacctgactgctgtgggctgctcactggctttagctgctgtcttccccctggggctcgatggttaccacattgggaggaaccagtttcctttcgtctgccaggcccgcctctggctcctgggcctgggctttagtctgggctacggttccatgttcaccaagatttggtgggtccacacggtcttcacaaagaaggaagaaaagaaggagtggaggaagactctggaaccctggaagctgtatgccacagtgggcctgctggtgggcatggatgtcctcactctcgccatctggcagatcgtggaccctctgcaccggaccattgagacatttgccaaggaggaacctaaggaagatattgacgtctctattctgccccagctggagcattgcagctccaggaagatgaatacatggcttggcattttctatggttacaaggggctgctgctgctgctgggaatcttccttgcttatgagaccaagagtgtgtccactgagaagatcaatgatcaccgggctgtgggcatggctatctacaatgtggcagtcctgtgcctcatcactgctcctgtcaccatgattctgtccagccagcaggatgcagcctttgcctttgcctctcttgccatagttttctcctcctatatcactcttgttgtgctctttgtgcccaagatgcgcaggctgatcacccgaggggaatggcagtcggaggcgcaggacaccatgaagacagggtcatcgaccaacaacaacgaggaggagaagtcccggctgttggagaaggagaaccgtgaactggaaaagatcattgctgagaaagaggagcgtgtctctgaactgcgccatcaactccagtctcggcagcagctccgctcccggcgccacccaccgacacccccagaaccctctgggggcctgcccaggggaccccctgagccccccgaccggcttagctgtgatgggagtcgagtgcatttgctttataagtgagggtagggtgagggaggacaggccagtagggggagggaaagggagaggggaagggcaggggactcaggaagcagggggtccccatccccagctgggaagaacatgctatccaatctcatctcttgtaaatacatgtccccctgtgagttctgggctgatttgggtctctcatacctctgggaaacagacctttttctctcttactgcttcatgtaattttgtatcacctcttcacaatttagttcgtacctggcttgaagctgctcactgctcacacgctgcctcctcagcagcctcactgcatctttctcttcccatgcaacaccctcttctagttaccacggcaacccctgcagctcctctgcctttgtgctctgttcctgtccagcaggggtctcccaacaagtgctctttccaccccaaaggggcctctccttttctccactgtcataatctctttccatcttacttgcccttctatactttctcacatgtggctccccctgaattttgcttcctttgggagctcattcttttcgccaaggctcacatgctccttgcctctgctctgtgcactcacgctcagcacacatgcatcctcccctctcctgcgtgtgcccactgaacatgctcatgtgtacacacgcttttcccgtatgctttcttcatgttcagtcacatgtgctctcgggtgccctgcattcacagctacgtgtgcccctctcatggtcatgggtctgcccttgagcgtgtttgggtaggcatgtgcaatttgtctagcatgctgagtcatgtctttcctatttgcacacgtccatgtttatccatgtactttccctgtgtaccctccatgtaccttgtgtactttcttcccttaaatcatggtattcttctgacagagccatatgtaccctaccctgcacattgttatgcacttttccccaattcatgtttggtggggccatccacaccctctccttgtcacagaatctccatttctgctcagattccccccatctccattgcattcatgtactaccctcagtctacactcacaatcatcttctcccaagactgctcccttttgttttgtgtttttttgaggggaattaaggaaaaataagtgggggcaggtttggagagctgcttccagtggatagttgatgagaatcctgaccaaaggaaggcacccttgactgttgggatagacagatggacctatggggtgggaggtggtgtccctttcacactgtggtgtctcttggggaaggatctccccgaatctcaataaaccagtgaacagtgtgactcggca

SEQ ID NO: 3173 - protein, 961 aa, Homo sapiens; identical to SEQ ID NO: 330

SEQ ID NO: 3174 - DNA, 4351 bp, Homo sapiens
ccctctcttccccccgccctgccttcccttgcaccctccttcttccctccgcccgggagctctccctggtccccggcgccgcctccttccctcccggctccccgctccccgctcccgtggctgccgccgccccggggaagaagagacaggggtggggtttgggggaagcgagagaggaggggagagaccctggccaggctggagcctggattcgaggggaggagggacgggaggaggagaaaggtggaggagaagggaggggggagcggggaggagcggccgggcctggggccttgaggcccggggagagccggggagccgggcccgcgcgccgagatgttgctgctgctgctactggcgccactcttcctccgccccccgggcgcgggcggggcgcagacccccaacgccacctcagaaggttgccagatcatacacccgccctgggaagggggcatcaggtaccggggcctgactcgggaccaggtgaaggctatcaacttcctgccagtggactatgagattgagtatgtgtgccggggggagcgcgaggtggtggggcccaaggtccgcaagtgcctggccaacggctcctggacagatatggacacacccagccgctgtgtgaatcgaacgccacactcagaacggcgcgcagtgtacatcggggcactgtttcccatgagcgggggctggccagggggccaggcctgccagcccgcggtggagatggcgctggaggacgtgaatagccgcagggacatcctgccggactatgagctcaagctcatccaccacgacagcaagtgtgatccaggccaagccaccaagtacctatatgagctgctctacaacgaccctatcaagatcatccttatgcctggctgcagctctgtctccacgctggtggctgaggctgctaggatgtggaacctcattgtgctttcctatggctccagctcaccagccctgtcaaaccggcagcgtttccccactttcttccgaacgcacccatcagccacactccacaaccctacccgcgtgaaactctttgaaaagtggggctggaagaagattgctaccatccagcagaccactgaggtcttcacttcgactctggacgacctggaggaacgagtgaaggaggctggaattgagattactttccgccagagtttcttctcagatccagctgtgcccgtcaaaaacctgaagcgccaggatgcccgaatcatcgtgggacttttctatgagactgaagcccggaaagttttttgtgaggtgtacaaggagcgtctctttgggaagaagtacgtctggttcctcattgggtggtatgctgacaattggttcaagatctacgacccttctatcaactgcacagtggatgagatgactgaggcggtggagggccacatcacaactgagattgtcatgctgaatcctgccaatacccgcagcatttccaacatgacatcccaggaatttgtggagaaactaaccaagcgactgaaaagacaccctgaggagacaggaggcttccaggaggcaccgctggcctatgatgccatctgggccttggcactggccctgaacaagacatctggaggaggcggccgttctggtgtgcgcctggaggacttcaactacaacaaccagaccattaccgaccaaatctaccgggcaatgaactcttcgtcctttgagggtgtctctggccatgtggtgtttgatgccagcggctctcggatggcatggacgcttatcgagcagcttcagggtggcagctacaagaagattggctactatgacagcaccaaggatgatctttcctggtccaaaacagataaatggattggagggtcccccccagctgaccagaccctggtcatcaagacattccgcttcctgtcacagaaactctttatctccgtctcagttctctccagcctgggcattgtcctagctgttgtctgtctgtcctttaacatctacaactcacatgtccgttatatccagaactcacagcccaacctgaacaacctgactgctgtgggctgctcactggctttagctgctgtcttccccctggggctcgatggttaccacattgggaggaaccagtttcctttcgtctgccaggcccgcctctggctcctgggcctgggctttagtctgggctacggttccatgttcaccaagatttggtgggtccacacggtcttcacaaagaaggaagaaaagaaggagtggaggaagactctggaaccctggaagctgtatgccacagtgggcctgctggtgggcatggatgtcctcactctcgccatctggcagatcgtggaccctctgcaccggaccattgagacatttgccaaggaggaacctaaggaagatattgacgtctctattctgccccagctggagcattgcagctccaggaagatgaatacatggcttggcattttctatggttacaaggggctgctgctgctgctgggaatcttccttgcttatgagaccaagagtgtgtccactgagaagatcaatgatcaccgggctgtgggcatggctatctacaatgtggcagtcctgtgcctcatcactgctcctgtcaccatgattctgtccagccagcaggatgcagcctttgcctttgcctctcttgccatagttttctcctcctatatcactcttgttgtgctctttgtgcccaagatgcgcaggctgatcacccgaggggaatggcagtcggaggcgcaggacaccatgaagacagggtcatcgaccaacaacaacgaggaggagaagtcccggctgttggagaaggagaaccgtgaactggaaaagatcattgctgagaaagaggagcgtgtctctgaactgcgccatcaactccagtctcggcagcagctccgctcccggcgccacccaccgacacccccagaaccctctgggggcctgcccaggggaccccctgagccccccgaccggcttagctgtgatgggagtcgagtgcatttgctttataagtgagggtagggtgagggaggacaggccagtagggggagggaaagggagaggggaagggcaggggactcaggaagcagggggtccccatccccagctgggaagaacatgctatccaatctcatctcttgtaaatacatgtccccctgtgagttctgggctgatttgggtctctcatacctctgggaaacagacctttttctctcttactgcttcatgtaattttgtatcacctcttcacaatttagttcgtacctggcttgaagctgctcactgctcacacgctgcctcctcagcagcctcactgcatctttctcttcccatgcaacaccctcttctagttaccacggcaacccctgcagctcctctgcctttgtgctctgttcctgtccagcaggggtctcccaacaagtgctctttccaccccaaaggggcctctccttttctccactgtcataatctctttccatcttacttgcccttctatactttctcacatgtggctccccctgaattttgcttcctttgggagctcattcttttcgccaaggctcacatgctccttgcctctgctctgtgcactcacgctcagcacacatgcatcctcccctctcctgcgtgtgcccactgaacatgctcatgtgtacacacgcttttcccgtatgctttcttcatgttcagtcacatgtgctctcgggtgccctgcattcacagctacgtgtgcccctctcatggtcatgggtctgcccttgagcgtgtttgggtaggcatgtgcaatttgtctagcatgctgagtcatgtctttcctatttgcacacgtccatgtttatccatgtactttccctgtgtaccctccatgtaccttgtgtactttcttcccttaaatcatggtattcttctgacagagccatatgtaccctaccctgcacattgttatgcacttttccccaattcatgtttggtggggccatccacaccctctccttgtcacagaatctccatttctgctcagattccccccatctccattgcattcatgtactaccctcagtctacactcacaatcatcttctcccaagactgctcccttttgttttgtgtttttttgaggggaattaaggaaaaataagtgggggcaggtttggagagctgcttccagtggatagttgatgagaatcctgaccaaaggaaggcacccttgactgttgggatagacagatggacctatggggtgggaggtggtgtccctttcacactgtggtgtctcttggggaaggatctccccgaatctcaataaaccagtgaacagtgtgactcggca

SEQ ID NO: 3175 - protein, 899 aa, Homo sapiens
MLLLLLLAPLFLRPPGAGGAQTPNATSEGCQIIHPPWEGGIRYRGLTRDQVKAINFLPVDYEIEYVCRGEREVVGPKVRKCLANGSWTDMDTPSRCVNRTPHSERRAVYIGALFPMSGGWPGGQACQPAVEMALEDVNSRRDILPDYELKLIHHDSKCDPGQATKYLYELLYNDPIKIILMPGCSSVSTLVAEAARMWNLIVLSYGSSSPALSNRQRFPTFFRTHPSATLHNPTRVKLFEKWGWKKIATIQQTTEVFTSTLDDLEERVKEAGIEITFRQSFFSDPAVPVKNLKRQDARIIVGLFYETEARKVFCEVYKERLFGKKYVWFLIGWYADNWFKIYDPSINCTVDEMTEAVEGHITTEIVMLNPANTRSISNMTSQEFVEKLTKRLKRHPEETGGFQEAPLAYDAIWALALALNKTSGGGGRSGVRLEDFNYNNQTITDQIYRAMNSSSFEGVSGHVVFDASGSRMAWTLIEQLQGGSYKKIGYYDSTKDDLSWSKTDKWIGGSPPADQTLVIKTFRFLSQKLFISVSVLSSLGIVLAVVCLSFNIYNSHVRYIQNSQPNLNNLTAVGCSLALAAVFPLGLDGYHIGRNQFPFVCQARLWLLGLGFSLGYGSMFTKIWWVHTVFTKKEEKKEWRKTLEPWKLYATVGLLVGMDVLTLAIWQIVDPLHRTIETFAKEEPKEDIDVSILPQLEHCSSRKMNTWLGIFYGYKGLLLLLGIFLAYETKSVSTEKINDHRAVGMAIYNVAVLCLITAPVTMILSSQQDAAFAFASLAIVFSSYITLVVLFVPKMRRLITRGEWQSEAQDTMKTGSSTNNNEEEKSRLLEKENRELEKIIAEKEERVSELRHQLQSRQQLRSRRHPPTPPEPSGGLPRGPPEPPDRLSCDGSRVHLLYK

SEQ ID NO: 3176 - DNA, 4406 bp, Homo sapiens
ccctctcttccccccgccctgccttcccttgcaccctccttcttccctccgcccgggagctctccctggtccccggcgccgcctccttccctcccggctccccgctccccgctcccgtggctgccgccgccccggggaagaagagacaggggtggggtttgggggaagcgagagaggaggggagagaccctggccaggctggagcctggattcgaggggaggagggacgggaggaggagaaaggtggaggagaagggaggggggagcggggaggagcggccgggcctggggccttgaggcccggggagagccggggagccgggcccgcgcgccgagatgttgctgctgctgctactggcgccactcttcctccgccccccgggcgcgggcggggcgcagacccccaacgccacctcagaaggttgccagatcatacacccgccctgggaagggggcatcaggtaccggggcctgactcgggaccaggtgaaggctatcaacttcctgccagtggactatgagattgagtatgtgtgccggggggagcgcgaggtggtggggcccaaggtccgcaagtgcctggccaacggctcctggacagatatggacacacccagccgctgtgtccgaatctgctccaagtcttatttgaccctggaaaatgggaaggttttcctgacgggtggggacctcccagctctggacggagcccgggtggatttccggtgtgaccccgacttccatctgtgaatcgaacgccacactcagaacggcgcgcagtgtacatcggggcactgtttcccatgagcgggggctggccagggggccaggcctgccagcccgcggtggagatggcgctggaggacgtgaatagccgcagggacatcctgccggactatgagctcaagctcatccaccacgacagcaagtgtgatccaggccaagccaccaagtacctatatgagctgctctacaacgaccctatcaagatcatccttatgcctggctgcagctctgtctccacgctggtggctgaggctgctaggatgtggaacctcattgtgctttcctatggctccagctcaccagccctgtcaaaccggcagcgtttccccactttcttccgaacgcacccatcagccacactccacaaccctacccgcgtgaaactctttgaaaagtggggctggaagaagattgctaccatccagcagaccactgaggtcttcacttcgactctggacgacctggaggaacgagtgaaggaggctggaattgagattactttccgccagagtttcttctcagatccagctgtgcccgtcaaaaacctgaagcgccaggatgcccgaatcatcgtgggacttttctatgagactgaagcccggaaagttttttgtgaggtgtacaaggagcgtctctttgggaagaagtacgtctggttcctcattgggtggtatgctgacaattggttcaagatctacgacccttctatcaactgcacagtggatgagatgactgaggcggtggagggccacatcacaactgagattgtcatgctgaatcctgccaatacccgcagcatttccaacatgacatcccaggaatttgtggagaaactaaccaagcgactgaaaagacaccctgaggagacaggaggcttccaggaggcaccgctggcctatgatgccatctgggccttggcactggccctgaacaagacatctggaggaggcggccgttctggtgtgcgcctggaggacttcaactacaacaaccagaccattaccgaccaaatctaccgggcaatgaactcttcgtcctttgagggtgtctctggccatgtggtgtttgatgccagcggctctcggatggcatggacgcttatcgagcagcttcagggtggcagctacaagaagattggctactatgacagcaccaaggatgatctttcctggtccaaaacagataaatggattggagggtcccccccagctgaccagaccctggtcatcaagacattccgcttcctgtcacagaaactctttatctccgtctcagttctctccagcctgggcattgtcctagctgttgtctgtctgtcctttaacatctacaactcacatgtccgttatatccagaactcacagcccaacctgaacaacctgactgctgtgggctgctcactggctttagctgctgtcttccccctggggctcgatggttaccacattgggaggaaccagtttcctttcgtctgccaggcccgcctctggctcctgggcctgggctttagtctgggctacggttccatgttcaccaagatttggtgggtccacacggtcttcacaaagaaggaagaaaagaaggagtggaggaagactctggaaccctggaagctgtatgccacagtgggcctgctggtgggcatggatgtcctcactctcgccatctggcagatcgtggaccctctgcaccggaccattgagacatttgccaaggaggaacctaaggaagatattgacgtctctattctgccccagctggagcattgcagctccaggaagatgaatacatggcttggcattttctatggttacaaggggctgctgctgctgctgggaatcttccttgcttatgagaccaagagtgtgtccactgagaagatcaatgatcaccgggctgtgggcatggctatctacaatgtggcagtcctgtgcctcatcactgctcctgtcaccatgattctgtccagccagcaggatgcagcctttgcctttgcctctcttgccatagttttctcctcctatatcactcttgttgtgctctttgtgcccaagatgcgcaggctgatcacccgaggggaatggcagtcggaggcgcaggacaccatgaagacagggtcatcgaccaacaacaacgaggaggagaagtcccggctgttggagaaggagaaccgtgaactggaaaagatcattgctgagaaagaggagcgtgtctctgaactgcgccatcaactccagtctcggcagcagctccgctcccggcgccacccaccgacacccccagaaccctctgggggcctgcccaggggaccccctgagccccccgaccggcttagctgtgatgggagtcgagtgcatttgctttataagtgagggtagggtgagggaggacaggccagtagggggagggaaagggagaggggaagggcaggggactcaggaagcagggggtccccatccccagctgggaagaacatgctatccaatctcatctcttgtaaatacatgtccccctgtgagttctgggctgatttgggtctctcatacctctgggaaacagacctttttctctcttactgcttcatgtaattttgtatcacctcttcacaatttagttcgtacctggcttgaagctgctcactgctcacacgctgcctcctcagcagcctcactgcatctttctcttcccatgcaacaccctcttctagttaccacggcaacccctgcagctcctctgcctttgtgctctgttcctgtccagcaggggtctcccaacaagtgctctttccaccccaaaggggcctctccttttctccactgtcataatctctttccatcttacttgcccttctatactttctcacatgtggctccccctgaattttgcttcctttgggagctcattcttttcgccaaggctcacatgctccttgcctctgctctgtgcactcacgctcagcacacatgcatcctcccctctcctgcgtgtgcccactgaacatgctcatgtgtacacacgcttttcccgtatgctttcttcatgttcagtcacatgtgctctcgggtgccctgcattcacagctacgtgtgcccctctcatggtcatgggtctgcccttgagcgtgtttgggtaggcatgtgcaatttgtctagcatgctgagtcatgtctttcctatttgcacacgtccatgtttatccatgtactttccctgtgtaccctccatgtaccttgtgtactttcttcccttaaatcatggtattcttctgacagagccatatgtaccctaccctgcacattgttatgcacttttccccaattcatgtttggtggggccatccacaccctctccttgtcacagaataatcatcttctcccaagactgctcccttttgttttgtgtttttttgaggggaattaaggaaaaataagtgggggcaggtttggagagctgcttccagtggatagttgatgagaatcctgaccaaaggaaggcacccttgactgttgggatagacagatggacctatggggtgggaggtggtgtccctttcacactgtggtgtctcttggggaaggatctccccgaatctcaataaaccagtgaacagtgtgactcggc

SEQ ID NO: 3177 - protein, 784 aa, Homo sapiens
MSGGWPGGQACQPAVEMALEDVNSRRDILPDYELKLIHHDSKCDPGQATKYLYELLYNDPIKIILMPGCSSVSTLVAEAARMWNLIVLSYGSSSPALSNRQRFPTFFRTHPSATLHNPTRVKLFEKWGWKKIATIQQTTEVFTSTLDDLEERVKEAGIEITFRQSFFSDPAVPVKNLKRQDARIIVGLFYETEARKVFCEVYKERLFGKKYVWFLIGWYADNWFKIYDPSINCTVDEMTEAVEGHITTEIVMLNPANTRSISNMTSQEFVEKLTKRLKRHPEETGGFQEAPLAYDAIWALALALNKTSGGGGRSGVRLEDFNYNNQTITDQIYRAMNSSSFEGVSGHVVFDASGSRMAWTLIEQLQGGSYKKIGYYDSTKDDLSWSKTDKWIGGSPPADQTLVIKTFRFLSQKLFISVSVLSSLGIVLAVVCLSFNIYNSHVRYIQNSQPNLNNLTAVGCSLALAAVFPLGLDGYHIGRNQFPFVCQARLWLLGLGFSLGYGSMFTKIWWVHTVFTKKEEKKEWRKTLEPWKLYATVGLLVGMDVLTLAIWQIVDPLHRTIETFAKEEPKEDIDVSILPQLEHCSSRKMNTWLGIFYGYKGLLLLLGIFLAYETKSVSTEKINDHRAVGMAIYNVAVLCLITAPVTMILSSQQDAAFAFASLAIVFSSYITLVVLFVPKMRRLITRGEWQSEAQDTMKTGSSTNNNEEEKSRLLEKENRELEKIIAEKEERVSELRHQLQSRQQLRSRRHPPTPPEPSGGLPRGPPEPPDRLSCDGSRVHLLYK

SEQ ID NO: 3178 - DNA, 579 bp, Homo sapiens
cattatcttttagatcccccttggccttattagcattgttcgattcatggtcacaaattgcaaacctaccctctgcctggaaagccaccttcccacctgtagggtaagggtgaggcatgtgtggcccagactggcctatttctagatattcaacaagcccttgcctgactgacagcagcttgccaccattgctttcctgtgtgaatcccaggaaaaagtgatgtggtctgggcaagttgggtggacataagggataggggacacagggtgaggtttgctaggtcagaggggttggattggagaggagggccccctttccatttcagagtaggtgaagggcagagaggggatggggattgagtgaggagcattgtggtccttgttgctcaagtgactctctcctgccatcctaggcattttctatggttacaaggggctgctgctgctgctgggaatcttccttgcttatgagaccaagagtgtgtccactgagaagatcaatgatcaccgggctgtgggcatggctatctacaatgtggcagtcctgtgcctcatcactgctcctgtcaccatgattct

SEQ ID NO: 3179 - protein, 50 aa, Homo sapiens
MVTRGCCCCWESSLLMRPRVCPLRRSMITGLWAWLSTMWQSCASSLLLSP

SEQ ID NO: 3180 - DNA, 750 bp, Homo sapiens
gcacaaagtgctttgggggcaaagaagggaacacagttcactgctggcgtgattgggtggacctcactgaagaggtggcatttgaatactgaaggacaaataggattttatcagctagagaaatagaggaaggctacttcaggggcatagggagcatcgtgtggctagaaaatacatgaaagagagtagatgaagagaaagtgagtagttcagcatggctggagcgtggggtaggtgtggggctgggagatgagcctagctggacaggtggatgggagcatgttgtgaagggtctgtgtcatatccagaagtgttcaggctataacttatagatattggggagtggttggaggtttttggccactaaagccaggaggttttagcaagatcaccctggtggtgtggaagtagagggtggatgggaggaattgttcaaggtggggagactgctctcctcctgccgctccccgtcctgctcacattttcgcatcctccctgtgccaccatgagctccctgcccgtgctccctgcccactctcccttagggttctgcccatccttactgcagtcccggctactactctaccctgttctgcctgtgccctctcttcctttctaggcccgcctctggctcctgggcctgggctttagtctgggctacggttccatgttcaccaagatttggtgggtccacacggtcttcacaaagaaggaagaaaagaaggagtggaggaagactctggaaccctg

SEQ ID NO: 3181 - protein, 66 aa, Homo sapiens
MGGIVQGGETALLLPLPVLLTFSHPPCATMSSLPVLPAHSPLGFCPSLLQSRLLLYPVLPVPSLPF

SEQ ID NO: 3182 - DNA, 563 bp, Homo sapiens
atgataatatggatgcttgtatactcaagcacacctttacaggagcactgtgtctgggcagaattgcatttcattttcttggtgatttatgttagtgttttagagttgcttaatattcactcatgattgatatgcaattagcttggatcctgttgctttttttaatgattctttttttagaattttatgtggagaaggggcttttgaaatcatttagccccagacagctggttaatgacagacttggagcgaggaggcgcattctctgatttgagagggctggggcagccctgcagctgaggggcagaaaccaggaaaatgagactcagagtggtttaatgacttgtctcaggtcatgcagctactcagcagtccagctggaattgaatcctagttaaatctggctccaaactgctctgctcatcacttcccatggaaaaccatgaagcctgactaaaaagtttgtacttttatctgctaacactgtttagctactggcaattgctgagcaaaggagaaataagatttaggaagttgactctggtggtgtgttgtgatgaaag

SEQ ID NO: 3183 - protein, 48 aa, Homo sapiens [sequence omitted]

SEQ ID NO: 3184 - DNA, 3551 bp, Homo sapiens
agtgggcgcagggcccagctgggggaagcggggctgggggagaggaggaaccgcggggatggaatcggggagcgctgaggcggccgatgccgggagcgtggatgttgctgctgctgctactggcgccactcttcctccgccccccgggcgcgggcggggcgcagacccccaacgccacctcagaaggttgccagatcatacacccgccctgggaagggggcatcaggtaccggggcctgactcgggaccaggtgaaggctatcaacttcctgccagtggactatgagattgagtatgtgtgccggggggagcgcgaggtggtggggcccaaggtccgcaagtgcctggccaacggctcctggacagatatggacacacccagccgctgtgtccgaatctgctccaagtcttatttgaccctggaaaatgggaaggttttcctgacgggtggggacctcccagctctggacggagcccgggtggatttccggtgtgaccccgacttccatctggtgggcagctcccggagcatctgtagtcagggccagtggagcacccccaagccccactgccagggtgaggggaacagctgcctgcatgcagctgatgaggacgcttgtgtgaggatgggagtggggtgggaatggataatgggaaagaatggagagctataaaaatgtgggggaggacactggaaaggggagatgaaagtccctttttcctccatcacctgcctcaaacttcctcttgcagtccccggtatcctctgtaggttgggggcttccttcctttaccttttaaaaaaatcttcctgctcccgattcttagacctcacgttttctcttttcctttatgaatctcacctctctcaccttcttcaggtttaaatactccaattttccctttctctaaacttagaaatttccatgcatcaccctcttctagaattcatccctcaccattccttatataattgatttattgtaaagactcagaaataaatcaaacattctactaagaaaaattgagaaggggagctctgggggtggaaacatattagggtaaaagacttaaaattggaggcagcattatcagaagatgaagaacaactcagggatggggtgggaagaagacaggtccttttctgtacttcctagacaacctccattattccctaagggaatcagtgttgtgtctgtctacttttttttttttttttttgccacgtaattttacaaactctcccttttctaggcacccgaactctctgccatcttctctcctgggatgcagtcatcccatttgtatgcctcatacttcctctaccctggtagattctttcaagatccttgggctttactttcctcacataactcagttattctgcttctagtttaccattttattctggaaattgagagtcccatccaggggtggacttatgacactactgaaacttagacttcaaggttcctcacctacagggccctcttcctgtgctctaataatatagagggctcgatggatatgtgttcatatggtaacaggcttttgtaaaaattgcagaaataagattttaacagcaattgcttaaagccaattgtatgtgtaattttttttcttaaagactcccaattttgtaatattcaggcaccacagaaccaagatctgccccaaacttagctattggcattcccgtctcaaattctgttgtcctatgaaaaatcgaagaagaaaataagtcctgacccccttacccccagacccaccttgttcttatccccaggcaccctcccctcagaaacgcaggcttctgctctccccggtcttcagcatggacaggtgtgggagggggctggggatcaggccagggaagctgggcgccagtggtaactcttctctgatccccgtctttcctgctgccagtgaatcgaacgccacactcaggtgagatgagaaacccttaccgcgcgcactgcaatgccctccccttcactctgcaccctccacccccctgaaattctgcccttaggctacggggcgtcgtcctttcgcaccttccccaacccaccccagtttgcggccacccccttccctccctacctgtttcctgcctccagtcccggttttccacgaggctgcggtctctccttgtccctgcttggctacacttccctgggctccacctcctcccagactgagcctcgccggtgtcaggcagagcccagcagagggcggcagggtgctgggagaccctgagctcccaccacgttttcccctgtggggttccttgcgaccttcgctggaaccttttccagcctgctgcctcctaggatttcacctaatggactttctcagcctgtcccacccatcccaaccctggccaggcctctcgcgctcttccccacatcttttccttccgtgtaccccttccctcgtcttttctcaattccatgtcctgtctccctttcttaggcttctgtctacccagccccaggctcccttccacgaccccaccactccctcaaaccagcctcccttccgtacccaactcgttccctccaaaaccgtttcctctcccccacatcctcagtgcttcactgtatcgactcatactcccacttcagacctcaggcgccagccccgtttctctcccgtcccactcgcatccttcccttcctaccctggttcctccgtgcttcagcctcccgcggctccctccgcccaccccgccctcctggcacgccccgtccccatttctcctcccctcgggtccccttaagtgagatccctcccttcctctttcgttcctttcctcctcgaggttgcatcccccctcccctccccgcccctccgactgtcgctcccacctcggcgctcgcttccctccccgcccccttcctgcctccccagctcccgcccgcccccccaccccccgctgccgcgcgccgcccgtgacgtcagagccccctcccagccccacatctccctcctgctcctcctcctcccctccgtcggtcagtcagtccgcgaggagagtccgcggtggcggcgacggtggcgagagccgcgggggccgtaggaagccaaccttccctgcttctccggggccctcgccccctcctccccacaaaatcagggatggaggcgcctccccggcaccctcttagcagccctccccaggaaaagtgtcccccctgagctcctaacgctccccaacagctacccctgccccccacgccatggggcccggggccccttttgcccgggtggggtggccactgccgcttctggttgtgatggcggcaggggtggctccggtgtgggcctcccactccccccatctcccgcggcctcactcgcgggtccccccgcacccctcctcagaacggcgcgcagtgtacatcggggcactgtttcccatgagcgggggctggccagggggccaggcctgccagcccgcggtggagatggcgctggaggacgtgaatagccgcagggacatcctgccggactatgagctcaagctcatccaccacgacagcaaggta

SEQ ID NO: 3185 - protein, 195 aa, Homo sapiens [sequence omitted]

SEQ ID NO: 3186 - DNA, 3786 bp, Homo sapiens
ccctctcttccccccgccctgccttcccttgcaccctccttcttccctccgcccgggagctctccctggtccccggcgccgcctccttccctcccggctccccgctccccgctcccgtggctgccgccgccccggggaagaagagacaggggtggggtttgggggaagcgagagaggaggggagagaccctggccaggctggagcctggattcgaggggaggagggacgggaggaggagaaaggtggaggagaagggaggggggagcggggaggagcggccgggcctggggccttgaggcccggggagagccggggagccgggcccgcgcgccgagatgttgctgctgctgctactggcgccactcttcctccgccccccgggcgcgggcggggcgcagacccccaacgccacctcagaaggttgccagatcatacacccgccctgggaagggggcatcaggtaccggggcctgactcgggaccaggtgaaggctatcaacttcctgccagtggactatgagattgagtatgtgtgccggggggagcgcgaggtggtggggcccaaggtccgcaagtgcctggccaacggctcctggacagatatggacacacccagccgctgtgtccgaatctgctccaagtcttatttgaccctggaaaatgggaaggttttcctgacgggtggggacctcccagctctggacggagcccgggtggatttccggtgtgaccccgacttccatctggtgggcagctcccggagcatctgtagtcagggccagtggagcacccccaagccccactgccagggtgaggggaacagctgcctgcatgcagctgatgaggacgcttgtgtgaggatgggagtggggtgggaatggataatgggaaagaatggagagctataaaaatgtgggggaggacactggaaaggggagatgaaagtccctttttcctccatcacctgcctcaaacttcctcttgcagtccccggtatcctctgtaggttgggggcttccttcctttaccttttaaaaaaatcttcctgctcccgattcttagacctcacgttttctcttttcctttatgaatctcacctctctcaccttcttcaggtttaaatactccaattttccctttctctaaacttagaaatttccatgcatcaccctcttctagaattcatccctcaccattccttatataattgatttattgtaaagactcagaaataaatcaaacattctactaagaaaaattgagaaggggagctctgggggtggaaacatattagggtaaaagacttaaaattggaggcagcattatcagaagatgaagaacaactcagggatggggtgggaagaagacaggtccttttctgtacttcctagacaacctccattattccctaagggaatcagtgttgtgtctgtctacttttttttttttttttttgccacgtaattttacaaactctcccttttctaggcacccgaactctctgccatcttctctcctgggatgcagtcatcccatttgtatgcctcatacttcctctaccctggtagattctttcaagatccttgggctttactttcctcacataactcagttattctgcttctagtttaccattttattctggaaattgagagtcccatccaggggtggacttatgacactactgaaacttagacttcaaggttcctcacctacagggccctcttcctgtgctctaataatatagagggctcgatggatatgtgttcatatggtaacaggcttttgtaaaaattgcagaaataagattttaacagcaattgcttaaagccaattgtatgtgtaattttttttcttaaagactcccaattttgtaatattcaggcaccacagaaccaagatctgccccaaacttagctattggcattcccgtctcaaattctgttgtcctatgaaaaatcgaagaagaaaataagtcctgacccccttacccccagacccaccttgttcttatccccaggcaccctcccctcagaaacgcaggcttctgctctccccggtcttcagcatggacaggtgtgggagggggctggggatcaggccagggaagctgggcgccagtggtaactcttctctgatccccgtctttcctgctgccagtgaatcgaacgccacactcaggtgagatgagaaacccttaccgcgcgcactgcaatgccctccccttcactctgcaccctccacccccctgaaattctgcccttaggctacggggcgtcgtcctttcgcaccttccccaacccaccccagtttgcggccacccccttccctccctacctgtttcctgcctccagtcccggttttccacgaggctgcggtctctccttgtccctgcttggctacacttccctgggctccacctcctcccagactgagcctcgccggtgtcaggcagagcccagcagagggcggcagggtgctgggagaccctgagctcccaccacgttttcccctgtggggttccttgcgaccttcgctggaaccttttccagcctgctgcctcctaggatttcacctaatggactttctcagcctgtcccacccatcccaaccctggccaggcctctcgcgctcttccccacatcttttccttccgtgtaccccttccctcgtcttttctcaattccatgtcctgtctccctttcttaggcttctgtctacccagccccaggctcccttccacgaccccaccactccctcaaaccagcctcccttccgtacccaactcgttccctccaaaaccgtttcctctcccccacatcctcagtgcttcactgtatcgactcatactcccacttcagacctcaggcgccagccccgtttctctcccgtcccactcgcatccttcccttcctaccctggttcctccgtgcttcagcctcccgcggctccctccgcccaccccgccctcctggcacgccccgtccccatttctcctcccctcgggtccccttaagtgagatccctcccttcctctttcgttcctttcctcctcgaggttgcatcccccctcccctccccgcccctccgactgtcgctcccacctcggcgctcgcttccctccccgcccccttcctgcctccccagctcccgcccgcccccccaccccccgctgccgcgcgccgcccgtgacgtcagagccccctcccagccccacatctccctcctgctcctcctcctcccctccgtcggtcagtcagtccgcgaggagagtccgcggtggcggcgacggtggcgagagccgcgggggccgtaggaagccaaccttccctgcttctccggggccctcgccccctcctccccacaaaatcagggatggaggcgcctccccggcaccctcttagcagccctccccaggaaaagtgtcccccctgagctcctaacgctccccaacagctacccctgccccccacgccatggggcccggggccccttttgcccgggtggggtggccactgccgcttctggttgtgatggcggcaggggtggctccggtgtgggcctcccactccccccatctcccgcggcctcactcgcgggtccccccgcacccctcctcagaacggcgcgcagtgtacatcggggcactgtttcccatgagcgggggctggccagggggccaggcctgccagcccgcggtggagatggcgctggaggacgtgaatagccgcagggacatcctgccggactatgagctcaagctcatccaccacgacagcaaggta

SEQ ID NO: 3187 - protein, 190 aa, Homo sapiens [sequence omitted]

SEQ ID NO: 3188 - DNA, 971 bp, Homo sapiens
gggagagcacgacgtgcgcgcaccctctccccttgtccactgctgccgcctccttcttctgccgctcctggtgctgcttgtgtgctcgtttggagcggacctggtacctcttttgtgaagcggcagctgaggagactccggcgctcgccatggccgaagaaaagcccaaggaaggagtcaagactgagaacaacgatcatattaatttgaaggtggcggggcaggatggttctgtggtgcagtttaagattaagaggcatacaccacttagtaaactaatgaaagcctattgtgaacgacagttggaaatggaggatgaagatacaattgatgtgttccaacagcagacgggaggtgtctactgaaaagggaacctgcttctttactccagaactctgttctttaaagaccaagattacattctcaattagaaaactgcaatttgcttccaccacatcctgactactaccgtatagttttctctattctttcatttcccccttccccattcctttactgtacataaagtaactggtatatgtgcacaagcatattactttttttttttaaaactaaacagccaatggtatgttttgattgacatcaagtggagacggggcggaaaaatactgattctgtgaaaataccccctttctccattagtggcatgctcattcagctcttatctttatattccagtaagttattttgctctcactgttttaacaacaacaacaaaaaaacaacaacataaaaatccttgcataccttgttcaattggagaattttaatgtttttcatttatcattgtaaaaccaaggacaattttataacttttttgtacttagctgttacatgcagagcaatctgtctttaagtagggataaattactctaaaacaaaaaagaatcctagatagttttcccttcaagtcaagcgtcttgttgtttaaataaacttcttgtttaaaa

SEQ ID NO: 3189 - protein, 71 aa, Homo sapiens
MAEEKPKEGVKTENNDHINLKVAGQDGSVVQFKIKRHTPLSKLMKAYCERQLEMEDEDTIDVFQQQTGGVY

SEQ ID NO: 3190 - DNA, 2037 bp, Homo sapiens
tcagtctgtagcccttttgtgtgagtgcctggcaagggtgacgtggggctgtttctgcgggcacagctgcagcaattaccggagtggaggcagggcccaggcagcactgccctccaagatcttcccttgggcttttcagcagtaaggggacatgcaccccaagggcctccacttggcctgaccttgctgcgggggctctctgtccccaggaacagtagagatggcaagcttatcaagaccctctctgcccagctgcctctgctccttcctcctcctcctcctcctccaagtgtcttccagctatgcagggcagttcagagtgataggaccaagacaccctatccgggctctggtcggggatgaagtggaattgccatgtcgcatatctcctgggaagaacgctacaggcatggaggtggggtggtaccgcccccccttctctagggtggttcatctctacagaaatggcaaggaccaagatggagaccaggcacctgaatatcggggccggacagagctgctgaaagatgctattggtgagggaaaggtgactctcaggatccggaatgtaaggttctcagatgaaggaggtttcacctgcttcttccgagatcattcttaccaagaggaggcagcaatggaattgaaagtagaagtgtctcactctgtcacccaggattggttgcagtggcacgatcatggctcattgcagcctccacctcccaggctcaagtgatcctcctgactcagcctcttgaatagctgagaccacaggcttgtgtcaccatgcccagatcctttctactgggtgagccctggagtgctggttctcctcgcggtgctgcctgtgctcctcctgcagatcactgttggcctcatcttcctctgcctgcagtacagactgagaggaaaacttcgagcagagatagagaatctccaccggacttttgatccccactttctgagggtgccctgctggaagataaccctgtttgtaattgtgccggttcttggacccttggttgccttgatcatctgctacaactggctacatcgaagactagcagggcaattccttgaagagctactcttccacctggaagccctctctggctaaggacaggcaggtgcccctctctccatcagaggacacctgtactggagagcaacacaggatggtctctgccatgaactggaggccaggaatctcctcactgaaaattacagtatggtaactttgcaaatggtggttgtttcttccaagactccagccctgattgcgcaaaactgaaaggcatgtgaagggaaggaagaggaagagtgcaaaacattgaagagagagctgagtgagctgaagagtgaggatatgagtagccccaacccaaacctggagatggggagaaacctacagaatactagccagagctcctccttgtcttggcagcctactagggacctggggaagcaaaaacgaaagctgggcaacatgcctgctttagaatgttttccttctacttacacatcttccacaggtctcagaatctttccttcctctcatccttttctcctatcttcatatctatcagagtatccactgtttattcaacaactactacttgatggtcagacacaaacaaacaagctaggtgctaattaataaagatacgagttttggccgggtgcggtggctcacgcctgtaatcccagcactttgggaggccgaggcgggcgaatcacgaggtcaggagttcaagaccagcctggccaacatggtgaaaccccatctctactaaaaatacaaacaattaactgagcatagtggtgggcacctataataccagctactccggaggctgaggcaggagaatcgcttgaacccaggaggcagaggttgcagtgagctgagatcgtgccactgcactctagccggagtgacagagtaagactctgtctcaaaaataaataaataaataaataaataaataaataaataaataaataaaaaataataatacaagttttcataagcacacttct

SEQ ID NO: 3191 - protein, 171 aa, Homo sapiens
MASLSRPSLPSCLCSFLLLLLLQVSSSYAGQFRVIGPRHPIRALVGDEVELPCRISPGKNATGMEVGWYRPPFSRVVHLYRNGKDQDGDQAPEYRGRTELLKDAIGEGKVTLRIRNVRFSDEGGFTCFFRDHSYQEEAAMELKVEVSHSVTQDWLQWHDHGSLQPPPPRLK

SEQ ID NO: 3192 - DNA, 2080 bp, Homo sapiens
tcagtctgtagcccttttgtgtgagtgcctggcaagggtgacgtggggctgtttctgcgggcacagctgcagcaattaccggagtggaggcagggcccaggcagcactgccctccaagatcttcccttgggcttttcagcagtaaggggacatgcaccccaagggcctccacttggcctgaccttgctgcgggggctctctgtccccaggaacagtagagatggcaagcttatcaagaccctctctgcccagctgcctctgctccttcctcctcctcctcctcctccaagtgtcttccagctatgcagggcagttcagagtgataggaccaagacaccctatccgggctctggtcggggatgaagtggaattgccatgtcgcatatctcctgggaagaacgctacaggcatggaggtggggtggtaccgcccccccttctctagggtggttcatctctacagaaatggcaaggaccaagatggagaccaggcacctgaatatcggggccggacagagctgctgaaagatgctattggtgagggaaaggtgactctcaggatccggaatgtaaggttctcagatgaaggaggtttcacctgcttcttccgagatcattcttaccaagaggaggcagcaatggaattgaaagtagaagatcctttctactgggtgagccctggagtgctggttctcctcgcggtgctgcctgtgctcctcctgcagatcactgttggcctcatcttcctctgcctgcagtacagactgagaggaaaacttcgagcagagatagagaatctccaccggacttttgagtcctttggtgttctaggaccccaggttaaggaaccaaaaaagacagggcaattccttgaagagctacgaaatcccttctgagtgatgtcacatcttggcaggggtggaggagagcctggttgcccagggatttgtccttggggacatctcatccatcaagttgcacactcactggcatctttgctatggggacattccaatttgcactttcaggaacactctgaattccaagtagaattgatttcccttcttctgtcatctaccttttctcttcattttcccatttttattacccttctttccatttctctctccagtcttccacctggaagccctctctggctaaggacaggcaggtgcccctctctccatcagaggacacctgtactggagagcaacacaggatggtctctgccatgaactggaggccaggaatctcctcactgaaaattacagtatggtaactttgcaaatggtggttgtttcttccaagactccagccctgattgcgcaaaactgaaaggcatgtgaagggaaggaagaggaagagtgcaaaacattgaagagagagctgagtgagctgaagagtgaggatatgagtagccccaacccaaacctggagatggggagaaacctacagaatactagccagagctcctccttgtcttggcagcctactagggacctggggaagcaaaaacgaaagctgggcaacatgcctgctttagaatgttttccttctacttacacatcttccacaggtctcagaatctttccttcctctcatccttttctcctatcttcatatctatcagagtatccactgtttattcaacaactactacttgatggtcagacacaaacaaacaagctaggtgctaattaataaagatacgagttttggccgggtgcggtggctcacgcctgtaatcccagcactttgggaggccgaggcgggcgaatcacgaggtcaggagttcaagaccagcctggccaacatggtgaaaccccatctctactaaaaatacaaacaattaactgagcatagtggtgggcacctataataccagctactccggaggctgaggcaggagaatcgcttgaacccaggaggcagaggttgcagtgagctgagatcgtgccactgcactctagccggagtgacagagtaagactctgtctcaaaaataaataaataaataaataaataaataaataaataaataaataaaaaataataatacaagttttcataagcacacttct

SEQ ID NO: 3193 - protein, 224 aa, Homo sapiens; identical to SEQ ID NO: 338

SEQ ID NO: 3194 - DNA, 1761 bp, Homo sapiens
tcagtctgtagcccttttgtgtgagtgcctggcaagggtgacgtggggctgtttctgcgggcacagctgcagcaattaccggagtggaggcagggcccaggcagcactgccctccaagatcttcccttgggcttttcagcagtaaggggacatgcaccccaagggcctccacttggcctgaccttgctgcgggggctctctgtccccaggaacagtagagatggcaagcttatcaagaccctctctgcccagctgcctctgctccttcctcctcctcctcctcctccaagtgtcttccagctatgcagggcagttcagagtgataggaccaagacaccctatccgggctctggtcggggatgaagtggaattgccatgtcgcatatctcctgggaagaacgctacaggcatggaggtggggtggtaccgcccccccttctctagggtggttcatctctacagaaatggcaaggaccaagatggagaccaggcacctgaatatcggggccggacagagctgctgaaagatgctattggtgagggaaaggtgactctcaggatccggaatgtaaggttctcagatgaaggaggtttcacctgcttcttccgagatcattcttaccaagaggaggcagcaatggaattgaaagtagaagatcctttctactgggtgagccctggagtgctggttctcctcgcggtgctgcctgtgctcctcctgcagatcactgttggcctcatcttcctctgcctgcagtacagactgagaggaaaacttcgagcagagatagagaatctccaccggacttttgtcttccacctggaagccctctctggctaaggacaggcaggtgcccctctctccatcagaggacacctgtactggagagcaacacaggatggtctctgccatgaactggaggccaggaatctcctcactgaaaattacagtatggtaactttgcaaatggtggttgtttcttccaagactccagccctgattgcgcaaaactgaaaggcatgtgaagggaaggaagaggaagagtgcaaaacattgaagagagagctgagtgagctgaagagtgaggatatgagtagccccaacccaaacctggagatggggagaaacctacagaatactagccagagctcctccttgtcttggcagcctactagggacctggggaagcaaaaacgaaagctgggcaacatgcctgctttagaatgttttccttctacttacacatcttccacaggtctcagaatctttccttcctctcatccttttctcctatcttcatatctatcagagtatccactgtttattcaacaactactacttgatggtcagacacaaacaaacaagctaggtgctaattaataaagatacgagttttggccgggtgcggtggctcacgcctgtaatcccagcactttgggaggccgaggcgggcgaatcacgaggtcaggagttcaagaccagcctggccaacatggtgaaaccccatctctactaaaaatacaaacaattaactgagcatagtggtgggcacctataataccagctactccggaggctgaggcaggagaatcgcttgaacccaggaggcagaggttgcagtgagctgagatcgtgccactgcactctagccggagtgacagagtaagactctgtctcaaaaataaataaataaataaataaataaataaataaataaataaataaaaaataataatacaagttttcataagcacacttct

SEQ ID NO: 3195 - protein, 206 aa, Homo sapiens; identical to SEQ ID NO: 340

SEQ ID NO: 3196 - DNA, 1899 bp, Homo sapiens
tcagtctgtagcccttttgtgtgagtgcctggcaagggtgacgtggggctgtttctgcgggcacagctgcagcaattaccggagtggaggcagggcccaggcagcactgccctccaagatcttcccttgggcttttcagcagtaaggggacatgcaccccaagggcctccacttggcctgaccttgctgcgggggctctctgtccccaggaacagtagagatggcaagcttatcaagaccctctctgcccagctgcctctgctccttcctcctcctcctcctcctccaagtgtcttccagctatgcagggcagttcagagtgataggaccaagacaccctatccgggctctggtcggggatgaagtggaattgccatgtcgcatatctcctgggaagaacgctacaggcatggaggtggggtggtaccgcccccccttctctagggtggttcatctctacagaaatggcaaggaccaagatggagaccaggcacctgaatatcggggccggacagagctgctgaaagatgctattggtgagggaaaggtgactctcaggatccggaatgtaaggttctcagatgaaggaggtttcacctgcttcttccgagatcattcttaccaagaggaggcagcaatggaattgaaagtagaagatcctttctactgggtgagccctggagtgctggttctcctcgcggtgctgcctgtgctcctcctgcagatcactgttggcctcatcttcctctgcctgcagtacagactgagaggaaaacttcgagcagagatagagaatctccaccggacttttgatccccactttctgagggtgccctgctggaagataaccctgtttgtaattgtgccggttcttggacccttggttgccttgatcatctgctacaactggctacatcgaagactagcagggcaattccttgaagagctactcttccacctggaagccctctctggctaaggacaggcaggtgcccctctctccatcagaggacacctgtactggagagcaacacaggatggtctctgccatgaactggaggccaggaatctcctcactgaaaattacagtatggtaactttgcaaatggtggttgtttcttccaagactccagccctgattgcgcaaaactgaaaggcatgtgaagggaaggaagaggaagagtgcaaaacattgaagagagagctgagtgagctgaagagtgaggatatgagtagccccaacccaaacctggagatggggagaaacctacagaatactagccagagctcctccttgtcttggcagcctactagggacctggggaagcaaaaacgaaagctgggcaacatgcctgctttagaatgttttccttctacttacacatcttccacaggtctcagaatctttccttcctctcatccttttctcctatcttcatatctatcagagtatccactgtttattcaacaactactacttgatggtcagacacaaacaaacaagctaggtgctaattaataaagatacgagttttggccgggtgcggtggctcacgcctgtaatcccagcactttgggaggccgaggcgggcgaatcacgaggtcaggagttcaagaccagcctggccaacatggtgaaaccccatctctactaaaaatacaaacaattaactgagcatagtggtgggcacctataataccagctactccggaggctgaggcaggagaatcgcttgaacccaggaggcagaggttgcagtgagctgagatcgtgccactgcactctagccggagtgacagagtaagactctgtctcaaaaataaataaataaataaataaataaataaataaataaataaataaaaaataataatacaagttttcataagcacacttct

SEQ ID NO: 3197 - protein, 252 aa, Homo sapiens; identical to SEQ ID NO: 342

SEQ ID NO: 3198 - DNA, 2287 bp, Homo sapiens
tcagtctgtagcccttttgtgtgagtgcctggcaagggtgacgtggggctgtttctgcgggcacagctgcagcaattaccggagtggaggcagggcccaggcagcactgccctccaagatcttcccttgggcttttcagcagtaaggggacatgcaccccaagggcctccacttggcctgaccttgctgcgggggctctctgtccccaggaacagtagagatggcaagcttatcaagaccctctctgcccagctgcctctgctccttcctcctcctcctcctcctccaagtgtcttccagctatgcagggcagttcagagtgataggaccaagacaccctatccgggctctggtcggggatgaagtggaattgccatgtcgcatatctcctgggaagaacgctacaggcatggaggtggggtggtaccgcccccccttctctagggtggttcatctctacagaaatggcaaggaccaagatggagaccaggcacctgaatatcggggccggacagagctgctgaaagatgctattggtgagggaaaggtgactctcaggatccggaatgtaaggttctcagatgaaggaggtttcacctgcttcttccgagatcattcttaccaagaggaggcagcaatggaattgaaagtagaagtgtctcactctgtcacccaggattggttgcagtggcacgatcatggctcattgcagcctccacctcccaggctcaagtgatcctcctgactcagcctcttgaatagctgagaccacaggcttgtgtcaccatgcccagatcctttctactgggtgagccctggagtgctggttctcctcgcggtgctgcctgtgctcctcctgcagatcactgttggcctcatcttcctctgcctgcagtacagactgagaggaaaacttcgagcagagatagagaatctccaccggacttttgatccccactttctgagggtgccctgctggaagataaccctgtttgtaattgtgccggttcttggacccttggttgccttgatcatctgctacaactggctacatcgaagactagcagggcaattccttgaagagctacgaaatcccttctgagtgatgtcacatcttggcaggggtggaggagagcctggttgcccagggatttgtccttggggacatctcatccatcaagttgcacactcactggcatctttgctatggggacattccaatttgcactttcaggaacactctgaattccaagtagaattgatttcccttcttctgtcatctaccttttctcttcattttcccatttttattacccttctttccatttctctctccagtcttccacctggaagccctctctggctaaggacaggcaggtgcccctctctccatcagaggacacctgtactggagagcaacacaggatggtctctgccatgaactggaggccaggaatctcctcactgaaaattacagtatggtaactttgcaaatggtggttgtttcttccaagactccagccctgattgcgcaaaactgaaaggcatgtgaagggaaggaagaggaagagtgcaaaacattgaagagagagctgagtgagctgaagagtgaggatatgagtagccccaacccaaacctggagatggggagaaacctacagaatactagccagagctcctccttgtcttggcagcctactagggacctggggaagcaaaaacgaaagctgggcaacatgcctgctttagaatgttttccttctacttacacatcttccacaggtctcagaatctttccttcctctcatccttttctcctatcttcatatctatcagagtatccactgtttattcaacaactactacttgatggtcagacacaaacaaacaagctaggtgctaattaataaagatacgagttttggccgggtgcggtggctcacgcctgtaatcccagcactttgggaggccgaggcgggcgaatcacgaggtcaggagttcaagaccagcctggccaacatggtgaaaccccatctctactaaaaatacaaacaattaactgagcatagtggtgggcacctataataccagctactccggaggctgaggcaggagaatcgcttgaacccaggaggcagaggttgcagtgagctgagatcgtgccactgcactctagccggagtgacagagtaagactctgtctcaaaaataaataaataaataaataaataaataaataaataaataaataaaaaataataatacaagttttcataagcacacttct

SEQ ID NO: 3199 - protein, 171 aa, Homo sapiens; identical to SEQ ID NO: 3191

SEQ ID NO: 3200 - DNA, 2149 bp, Homo sapiens
tcagtctgtagcccttttgtgtgagtgcctggcaagggtgacgtggggctgtttctgcgggcacagctgcagcaattaccggagtggaggcagggcccaggcagcactgccctccaagatcttcccttgggcttttcagcagtaaggggacatgcaccccaagggcctccacttggcctgaccttgctgcgggggctctctgtccccaggaacagtagagatggcaagcttatcaagaccctctctgcccagctgcctctgctccttcctcctcctcctcctcctccaagtgtcttccagctatgcagggcagttcagagtgataggaccaagacaccctatccgggctctggtcggggatgaagtggaattgccatgtcgcatatctcctgggaagaacgctacaggcatggaggtggggtggtaccgcccccccttctctagggtggttcatctctacagaaatggcaaggaccaagatggagaccaggcacctgaatatcggggccggacagagctgctgaaagatgctattggtgagggaaaggtgactctcaggatccggaatgtaaggttctcagatgaaggaggtttcacctgcttcttccgagatcattcttaccaagaggaggcagcaatggaattgaaagtagaagatcctttctactgggtgagccctggagtgctggttctcctcgcggtgctgcctgtgctcctcctgcagatcactgttggcctcatcttcctctgcctgcagtacagactgagaggaaaacttcgagcagagatagagaatctccaccggacttttgatccccactttctgagggtgccctgctggaagataaccctgtttgtaattgtgccggttcttggacccttggttgccttgatcatctgctacaactggctacatcgaagactagcagggcaattccttgaagagctacgaaatcccttctgagtgatgtcacatcttggcaggggtggaggagagcctggttgcccagggatttgtccttggggacatctcatccatcaagttgcacactcactggcatctttgctatggggacattccaatttgcactttcaggaacactctgaattccaagtagaattgatttcccttcttctgtcatctaccttttctcttcattttcccatttttattacccttctttccatttctctctccagtcttccacctggaagccctctctggctaaggacaggcaggtgcccctctctccatcagaggacacctgtactggagagcaacacaggatggtctctgccatgaactggaggccaggaatctcctcactgaaaattacagtatggtaactttgcaaatggtggttgtttcttccaagactccagccctgattgcgcaaaactgaaaggcatgtgaagggaaggaagaggaagagtgcaaaacattgaagagagagctgagtgagctgaagagtgaggatatgagtagccccaacccaaacctggagatggggagaaacctacagaatactagccagagctcctccttgtcttggcagcctactagggacctggggaagcaaaaacgaaagctgggcaacatgcctgctttagaatgttttccttctacttacacatcttccacaggtctcagaatctttccttcctctcatccttttctcctatcttcatatctatcagagtatccactgtttattcaacaactactacttgatggtcagacacaaacaaacaagctaggtgctaattaataaagatacgagttttggccgggtgcggtggctcacgcctgtaatcccagcactttgggaggccgaggcgggcgaatcacgaggtcaggagttcaagaccagcctggccaacatggtgaaaccccatctctactaaaaatacaaacaattaactgagcatagtggtgggcacctataataccagctactccggaggctgaggcaggagaatcgcttgaacccaggaggcagaggttgcagtgagctgagatcgtgccactgcactctagccggagtgacagagtaagactctgtctcaaaaataaataaataaataaataaataaataaataaataaataaataaaaaataataatacaagttttcataagcacacttct

SEQ ID NO: 3201 - protein, 247 aa, Homo sapiens; identical to SEQ ID NO: 344

SEQ ID NO: 3202 - DNA, 2032 bp, Homo sapiens
tcagtctgtagcccttttgtgtgagtgcctggcaagggtgacgtggggctgtttctgcgggcacagctgcagcaattaccggagtggaggcagggcccaggcagcactgccctccaagatcttcccttgggcttttcagcagtaaggggacatgcaccccaagggcctccacttggcctgaccttgctgcgggggctctctgtccccaggaacagtagagatggcaagcttatcaagaccctctctgcccagctgcctctgctccttcctcctcctcctcctcctccaagtgtcttccagctatgcagggcagttcagagtgataggaccaagacaccctatccgggctctggtcggggatgaagtggaattgccatgtcgcatatctcctgggaagaacgctacaggcatggaggtggggtggtaccgcccccccttctctagggtggttcatctctacagaaatggcaaggaccaagatggagaccaggcacctgaatatcggggccggacagagctgctgaaagatgctattggtgagggaaaggtgactctcaggatccggaatgtaaggttctcagatgaaggaggtttcacctgcttcttccgagatcattcttaccaagaggaggcagcaatggaattgaaagtagaagatcctttctactgggtgagccctggagtgctggttctcctcgcggtgctgcctgtgctcctcctgcagatcactgttggcctcatcttcctctgcctgcagtacagactgagaggaaaacttcgagcagagatagagaatctccaccggacttttgggcaattccttgaagagctacgaaatcccttctgagtgatgtcacatcttggcaggggtggaggagagcctggttgcccagggatttgtccttggggacatctcatccatcaagttgcacactcactggcatctttgctatggggacattccaatttgcactttcaggaacactctgaattccaagtagaattgatttcccttcttctgtcatctaccttttctcttcattttcccatttttattacccttctttccatttctctctccagtcttccacctggaagccctctctggctaaggacaggcaggtgcccctctctccatcagaggacacctgtactggagagcaacacaggatggtctctgccatgaactggaggccaggaatctcctcactgaaaattacagtatggtaactttgcaaatggtggttgtttcttccaagactccagccctgattgcgcaaaactgaaaggcatgtgaagggaaggaagaggaagagtgcaaaacattgaagagagagctgagtgagctgaagagtgaggatatgagtagccccaacccaaacctggagatggggagaaacctacagaatactagccagagctcctccttgtcttggcagcctactagggacctggggaagcaaaaacgaaagctgggcaacatgcctgctttagaatgttttccttctacttacacatcttccacaggtctcagaatctttccttcctctcatccttttctcctatcttcatatctatcagagtatccactgtttattcaacaactactacttgatggtcagacacaaacaaacaagctaggtgctaattaataaagatacgagttttggccgggtgcggtggctcacgcctgtaatcccagcactttgggaggccgaggcgggcgaatcacgaggtcaggagttcaagaccagcctggccaacatggtgaaaccccatctctactaaaaatacaaacaattaactgagcatagtggtgggcacctataataccagctactccggaggctgaggcaggagaatcgcttgaacccaggaggcagaggttgcagtgagctgagatcgtgccactgcactctagccggagtgacagagtaagactctgtctcaaaaataaataaataaataaataaataaataaataaataaataaataaaaaataataatacaagttttcataagcacacttct

SEQ ID NO: 3203 - protein, 208 aa, Homo sapiens; identical to SEQ ID NO: 350

SEQ ID NO: 3204 - DNA, 1782 bp, Homo sapiens
tcagtctgtagcccttttgtgtgagtgcctggcaagggtgacgtggggctgtttctgcgggcacagctgcagcaattaccggagtggaggcagggcccaggcagcactgccctccaagatcttcccttgggcttttcagcagtaaggggacatgcaccccaagggcctccacttggcctgaccttgctgcgggggctctctgtccccaggaacagtagagatggcaagcttatcaagaccctctctgcccagctgcctctgctccttcctcctcctcctcctcctccaagtgtcttccagctatgcagggcagttcagagtgataggaccaagacaccctatccgggctctggtcggggatgaagtggaattgccatgtcgcatatctcctgggaagaacgctacaggcatggaggtggggtggtaccgcccccccttctctagggtggttcatctctacagaaatggcaaggaccaagatggagaccaggcacctgaatatcggggccggacagagctgctgaaagatgctattggtgagggaaaggtgactctcaggatccggaatgtaaggttctcagatgaaggaggtttcacctgcttcttccgagatcattcttaccaagaggaggcagcaatggaattgaaagtagaagatcctttctactgggtgagccctggagtgctggttctcctcgcggtgctgcctgtgctcctcctgcagatcactgttggcctcatcttcctctgcctgcagtacagactgagaggaaaacttcgagcagagatagagaatctccaccggacttttgggcaattccttgaagagctactcttccacctggaagccctctctggctaaggacaggcaggtgcccctctctccatcagaggacacctgtactggagagcaacacaggatggtctctgccatgaactggaggccaggaatctcctcactgaaaattacagtatggtaactttgcaaatggtggttgtttcttccaagactccagccctgattgcgcaaaactgaaaggcatgtgaagggaaggaagaggaagagtgcaaaacattgaagagagagctgagtgagctgaagagtgaggatatgagtagccccaacccaaacctggagatggggagaaacctacagaatactagccagagctcctccttgtcttggcagcctactagggacctggggaagcaaaaacgaaagctgggcaacatgcctgctttagaatgttttccttctacttacacatcttccacaggtctcagaatctttccttcctctcatccttttctcctatcttcatatctatcagagtatccactgtttattcaacaactactacttgatggtcagacacaaacaaacaagctaggtgctaattaataaagatacgagttttggccgggtgcggtggctcacgcctgtaatcccagcactttgggaggccgaggcgggcgaatcacgaggtcaggagttcaagaccagcctggccaacatggtgaaaccccatctctactaaaaatacaaacaattaactgagcatagtggtgggcacctataataccagctactccggaggctgaggcaggagaatcgcttgaacccaggaggcagaggttgcagtgagctgagatcgtgccactgcactctagccggagtgacagagtaagactctgtctcaaaaataaataaataaataaataaataaataaataaataaataaataaaaaataataatacaagttttcataagcacacttct

SEQ ID NO: 3205 - protein, 213 aa, Homo sapiens; identical to SEQ ID NO: 346

SEQ ID NO: 3206 - DNA, 1830 bp, Homo sapiens
tcagtctgtagcccttttgtgtgagtgcctggcaagggtgacgtggggctgtttctgcgggcacagctgcagcaattaccggagtggaggcagggcccaggcagcactgccctccaagatcttcccttgggcttttcagcagtaaggggacatgcaccccaagggcctccacttggcctgaccttgctgcgggggctctctgtccccaggaacagtagagatggcaagcttatcaagaccctctctgcccagctgcctctgctccttcctcctcctcctcctcctccaagtgtcttccagctatgcagggcagttcagagtgataggaccaagacaccctatccgggctctggtcggggatgaagtggaattgccatgtcgcatatctcctgggaagaacgctacaggcatggaggtggggtggtaccgcccccccttctctagggtggttcatctctacagaaatggcaaggaccaagatggagaccaggcacctgaatatcggggccggacagagctgctgaaagatgctattggtgagggaaaggtgactctcaggatccggaatgtaaggttctcagatgaaggaggtttcacctgcttcttccgagatcattcttaccaagaggaggcagcaatggaattgaaagtagaagatcctttctactgggtgagccctggagtgctggttctcctcgcggtgctgcctgtgctcctcctgcagatcactgttggcctcatcttcctctgcctgcagtacagactgagaggaaaacttcgagcagagatagagaatctccaccggacttttgagtcctttggtgttctaggaccccaggttaaggaaccaaaaaagacagggcaattccttgaagagctactcttccacctggaagccctctctggctaaggacaggcaggtgcccctctctccatcagaggacacctgtactggagagcaacacaggatggtctctgccatgaactggaggccaggaatctcctcactgaaaattacagtatggtaactttgcaaatggtggttgtttcttccaagactccagccctgattgcgcaaaactgaaaggcatgtgaagggaaggaagaggaagagtgcaaaacattgaagagagagctgagtgagctgaagagtgaggatatgagtagccccaacccaaacctggagatggggagaaacctacagaatactagccagagctcctccttgtcttggcagcctactagggacctggggaagcaaaaacgaaagctgggcaacatgcctgctttagaatgttttccttctacttacacatcttccacaggtctcagaatctttccttcctctcatccttttctcctatcttcatatctatcagagtatccactgtttattcaacaactactacttgatggtcagacacaaacaaacaagctaggtgctaattaataaagatacgagttttggccgggtgcggtggctcacgcctgtaatcccagcactttgggaggccgaggcgggcgaatcacgaggtcaggagttcaagaccagcctggccaacatggtgaaaccccatctctactaaaaatacaaacaattaactgagcatagtggtgggcacctataataccagctactccggaggctgaggcaggagaatcgcttgaacccaggaggcagaggttgcagtgagctgagatcgtgccactgcactctagccggagtgacagagtaagactctgtctcaaaaataaataaataaataaataaataaataaataaataaataaataaaaaataataatacaagttttcataagcacacttct

SEQ ID NO: 3207 - protein, 229 aa, Homo sapiens; identical to SEQ ID NO: 348

SEQ ID NO: 3208 - DNA, 1916 bp, Homo sapiens
taaggaggcagtacttttctcatccaagttcatggactttctgaattttgtccccagagtcctttggtgttctaggaccccaggttaaggaaccaaaaaagacaggtgggtggggcatgagggggaacacatgttaaccctgtttgttctggtgaacaattcagatccccactttctgagggtgccctgctggaagataaccctgtttgtaattgtgccggttcttggacccttggttgccttgatcatctgctacaactggctacatcgaagactagcagggcaattccttgaagagctacgtaagttctcttctctctgttataagcagagaataaaaagccaggaaagggagacagaagcaacaagaggaagaggcgggctattgagggatcacattcccagaggaaaggaggagctggagagcctgggtggagggaagactcctcctgggaggtagagggcaaagaagccagctgttagagacacatttacaggtggcagagaagctggaggcactcctatctgccacctgatccattcctccttcactgcccctaagcaggaatccaaccctagctggtctcattgcccattccacagcaactgcccagtgcctcacctctcagatcaaccattgaggcaggaatggagacaagatgaccccaagggcttttcttctccctagttcaatggttttatgatacaaactactgacatacgtttttcaagttattttctccttcttctaggaaatcccttctgagtgatgtcacatcttggcaggggtggaggagagcctggttgcccagggatttgtccttggggacatctcatccatcaagttgcacactcactggcatctttgctatggggacattccaatttgcactttcaggaacactctgaattccaagtagaattgatttcccttcttctgtcatctaccttttctcttcattttcccatttttattacccttctttccatttctctctccagtcttccacctggaagccctctctggctaaggacaggcaggtgcccctctctccatcagaggacacctgtactggagagcaacacaggatggtctctgccatgaactggaggccaggaatctcctcactgaaaattacagtatggtaactttgcaaatggtggttgtttcttccaagactccagccctgattgcgcaaaactgaaaggcatgtgaagggaaggaagaggaagagtgcaaaacattgaagagagagctgagtgagctgaagagtgaggatatgagtagccccaacccaaacctggagatggggagaaacctacagaatactagccagagctcctccttgtcttggcagcctactagggacctggggaagcaaaaacgaaagctgggcaacatgcctgctttagaatgttttccttctacttacacatcttccacaggtctcagaatctttccttcctctcatccttttctcctatcttcatatctatcagagtatccactgtttattcaacaactactacttgatggtcagacacaaacaaacaagctaggtgctaattaataaagatacgagttttggccgggtgcggtggctcacgcctgtaatcccagcactttgggaggccgaggcgggcgaatcacgaggtcaggagttcaagaccagcctggccaacatggtgaaaccccatctctactaaaaatacaaacaattaactgagcatagtggtgggcacctataataccagctactccggaggctgaggcaggagaatcgcttgaacccaggaggcagaggttgcagtgagctgagatcgtgccactgcactctagccggagtgacagagtaagactctgtctcaaaaataaataaataaataaataaataaataaataaataaataaataa

SEQ ID NO: 3209 - protein, 109 aa, Homo sapiens
MLTLFVLVNNSDPHFLRVPCWKITLFVIVPVLGPLVALIICYNWLHRRLAGQFLEELRKFSSLCYKQRIKSQERETEATRGRGGLLRDHIPRGKEELESLGGGKTPPGR

SEQ ID NO: 3210 - DNA, 1981 bp, Homo sapiens
tccccgggagaccctgtgcccctaaatcgcggtccactgcgcgcgtcaggtttctagaagcagggtagaacagacggcagacacctagcccaggctggtgttgttactaaacaatggcagctggtgagccaagggtgaccagggccctgaactcggtggcccagctttgagggaagcaaaattgttctcaattgtggaagaggagaatttggacagcagaacaaaaaaggaagacagcctcttggagcagatacatttgtcacaggaagccacatcaaaccctggggcctttgctgggcctctccatctgcccagttactgggaggtagatagccccaggaaggaatccagtcaggcctgggcaccaggccaggagtggataaagctagaaagagacaccacagaagagaagatgtttgaacagctgaagccaatcgaacctagagattgctggagggaggcacgggtgaagaagaagccagtcacctttgaggatgtggcagtgaatttcacccaggaagagtgggactgtctagatgccagccagagggtcctttaccaggatgttatgtcggaaacctttaagaatctaacatctgtggccagaatctttctgcataagccagagctaatcaccaagcttgagcaagaagaggaacagtggagagagtttgtccatctcccaaacacagaaggcctttcagaaggcaagaagaaagagcttcgagaacaacatcccagtctgagagatgaggggactagtgatgacaaggtcttccttgcatgcagaggggccggccagtgccccctatctgccccagctgggactatggacaggacccgggtgcttcaagcatcccaggctgggccaccctttttttgctacacctgtggcaaatgtttcagcaggcgctcctacctctatagccaccagtttgttcacaatcccaagctgactaacagctgcagtcagtgtgggaagttgtttcggagccccaagtccctcagctatcacagacgcatgcatcttggggagaggcccttctgttgcacgctctgtgacaagacctactgtgatgcttctggactaagtcgtcaccgccgcgtccatctgggttaccggccccattcatgctctgtgtgtgggaagagcttccgggaccagtctgagctcaaacgccaccagaagatacaccaaaaccaggagccagtggatggaaaccaggagtgtactttgaggattccaggcacccaggctgaattccagacacccatcgccagaagccagaggtccatccaggggcttttggatgtgaaccatgcaccagtggccaggtcccaggaacccatatttagaactgagggtcctatggcccagaaccaggcatctgtacttaagaaccaagcacctgtgaccaggacccaggcacccatcactggaaccctctgtcaggatgccagatccaactctcatccagtgaagccctcaagactcaatgtcttctgttgcccccattgttctttgacttttagcaagaaatcctatctctccagacaccagaaggcccacctcacagagccgcccaactactgcttccattgcagcaagtctttcagctcattttccaggctggtcagacaccagcagacccactggaagcagaagagctacctttgccctatctgtgacctctcctttggggagaaagagggccttatggatcactggaggggctataaaggcaaggacctgtgccagagcagccaccataaatgccgggtgatcctgggccagtggcttggcttctctcatgatgtccccactatggctggggaggaatggaagcatggaggtgatcaatctccccccaggatccatacccccaggagaagaggcctaagagagaaggcctgcaaaggagacaaaacaaaggaggcagtgagcatcttgaaacataaataaatggcctttctgactgag

SEQ ID NO: 3211 - protein, 516 aa, Homo sapiens
MFEQLKPIEPRDCWREARVKKKPVTFEDVAVNFTQEEWDCLDASQRVLYQDVMSETFKNLTSVARIFLHKPELITKLEQEEEQWREFVHLPNTEGLSEGKKKELREQHPSLRDEGTSDDKVFLACRGAGQCPLSAPAGTMDRTRVLQASQAGPPFFCYTCGKCFSRRSYLYSHQFVHNPKLTNSCSQCGKLFRSPKSLSYHRRMHLGERPFCCTLCDKTYCDASGLSRHRRVHLGYRPHSCSVCGKSFRDQSELKRHQKIHQNQEPVDGNQECTLRIPGTQAEFQTPIARSQRSIQGLLDVNHAPVARSQEPIFRTEGPMAQNQASVLKNQAPVTRTQAPITGTLCQDARSNSHPVKPSRLNVFCCPHCSLTFSKKSYLSRHQKAHLTEPPNYCFHCSKSFSSFSRLVRHQQTHWKQKSYLCPICDLSFGEKEGLMDHWRGYKGKDLCQSSHHKCRVILGQWLGFSHDVPTMAGEEWKHGGDQSPPRIHTPRRRGLREKACKGDKTKEAVSILKHK

SEQ ID NO: 3212 - DNA, 808 bp, Homo sapiens
ccgccgcgtccatctgggttaccggccccattcatgctctgtgtgtgggaagagcttccgggaccagtctgagctcaaacgccaccagaagatacaccaaaaccaggagccagtggatggaaaccaggagtgtactttgaggattccaggcacccaggctgaattccagacacccatcgccagaagccagaggtccatccaggggcttttggatgtgaaccatgcaccagtggccaggtcccaggaacccatatttagaactgagggtcctatggcccagaaccaggcatctgtacttaagaaccaagcacctgtgaccaggacccaggcacccatcactggaaccctctgtcaggatgccagatccaactctcatccagtgaagccctcaagactcaatgtcttctgttgcccccattgttctttgacttttacaagtctttcagctcattttccaggctggtcagacaccagcagacccactggaagcagaagagctacctttgccctatctgtgacctctcctttggggagaaagagggccttatggatcactggaggggctataaaggcaaggacctgtgccagagcagccaccataaatgccgggtgatcctgggccagtggcttggcttctctcatgatgtccccactatggctggggaggaatggaagcatggaggtgatcaatctccccccaggatccatacccccaggagaagaggcctaagagagaaggcctgcaaaggagacaaaacaaaggaggcagtgagcatcttgaaacataaataaatggcctttctgactg

SEQ ID NO: 3213 - protein, 113 aa, Homo sapiens
MAQNQASVLKNQAPVTRTQAPITGTLCQDARSNSHPVKPSRLNVFCCPHCSLTFTSLSAHFPGWSDTSRPTGSRRATFALSVTSPLGRKRALWITGGAIKARTCARAATINAG

SEQ ID NO: 3214 - DNA, 1783 bp, Homo sapiens
gactacattgcccagtaacctcctgggctccgctgtgtttttctattctggggtgtaaggggcagctggaccactccagctgggactgctaggaaggttgcgggtccacccggccgagccgaacgagggaaatggtcctcacccggccactcgccggttgaaaaggggccgccctggcagggaagcggccgccgcggcgcggtgcagcgcagcggcgagaaggagtgcgttatcgtcttgcgctactgctgaatgtccgtcccggaggaggaggagaggcttttgccgctgacccagagatggccccgagcgagcaaattcctactgtccggctgcgcggctaccgtggccgagctagcaacctttcccctggatctcacaaaaactcgactccaaatgcaaggagaagcagctcttgctcggttgggagacggtgcaagagaatctgccccctataggggaatggtgcgcacagctctagggatcattgaagaggaaggctttctaaagctttggcaaggagtgacacccgccatttacagacacgtagtgtattctggaggtcgaatggtcacatatgaacatctccgagaggttgtgtttggcaaaagtgaagatgagcattatcccctttggaaatcagtcattggagggatgatggctggtgttattggccagtttttagccaatccaactgacctagtgaaggttcagatgcaaatggaaggaaaaaggaaactggaaggaaaaccattgcgatttcgtggtgtacatcatgcatttgcaaaaatcttagctgaaggaggaatacgagggctttgggcaggctgggtacccaatatacaaagagcagcactggtgaatatgggagatttaaccacttatgatacagtgaaacactacttggtattgaatacaccacttgaggacaatatcatgactcacggtttatcaagtttatgttctggactggtagcttctattctgggaacaccagccgatgtcatcaaaagcagaataatgaatcaaccacgagataaacaaggaaggggacttttgtataaatcatcgactgactgcttgattcaggctgttcaaggtgaaggattcatgagtctatataaaggctttttaccatcttggctgagaatgaccccttggtcaatggtgttctggcttacttatgaaaaaatcagagagatgagtggagtcagtccattttaaacccctaaagatgcaacccttaaagatacagtgttcagtattattgaaatatgggcatctgcaacacataccccctattatttctacctctttaggaagacacctattccacagagactgatttatagggggcagcactttatttttttctggaaacccaagttctctttgactcctctttttgtccaaaagtgatctggtcggatctcacaaggccatccaatgagaccccgcacagcattttctaaagaagaatcgaagcctgaccactttcaccttgggcaagaaggtttggcctttgagttgctattctatgctgaagagcctgcttagaggaggagtaccaggagggagccagcatttcagatctgaagtagacgataggaatgtggaagaacacatacatagtgcttaagaaatacatttaacctgttatgtcagtatttatcaatgaagtttgataattcacttttctgtcattgttaaagcgtacatactgtaaattaaagggaggtgaatggaaattaatgaataaacattttgagtttccctagtgttg

SEQ ID NO: 3215 - protein, 323 aa, Homo sapiens; identical to SEQ ID NO: 352

SEQ ID NO: 3216 - DNA, 1323 bp, Homo sapiens
gactacattgcccagtaacctcctgggctccgctgtgtttttctattctggggtgtaaggggcagctggaccactccagctgggactgctaggaaggttgcgggtccacccggccgagccgaacgagggaaatggtcctcacccggccactcgccggttgaaaaggggccgccctggcagggaagcggccgccgcggcgcggtgcagcgcagcggcgagaaggagtgcgttatcgtcttgcgctactgctgaatgtccgtcccggaggaggaggagaggcttttgccgctgacccagagatggccccgagcgagcaaattcctactgtccggctgcgcggctaccgtggccgagctagcaacctttcccctggatctcacaaaaactcgactccaaatgcaaggagaagcagctcttgctcggttgggagacggtgcaagagaatctgccccctataggggaatggtgcgcacagctctagggatcattgaagaggaaggctttctaaagctttggcaaggagtgacacccgccatttacagacacgtagtgtattctggaggtcgaatggtcacatatgaacatctccgagaggttgtgtttggcaaaagtgaagatgagcattatcccctttggaaatcagtcattggagggatgatggctggtgttattggccagtttttagccaatccaactgacctagtgaaggttcagatgcaaatggaaggaaaaaggaaactggaaggaaaaccattgcgatttcgtggtgtacatcatgcatttgcaaaaatcttagctgaaggaggaatacgagggctttgggcaggctgggtacccaatatacaaagagcagcactggtgaatatgggagatttaaccacttatgatacagtgaaacactacttggtattgaatacaccacttgaggacaatatcatgactcacggtttatcaagtgatctggtcggatctcacaaggccatccaatgagaccccgcacagcattttctaaagaagaatcgaagcctgaccactttcaccttgggcaagaaggtttggcctttgagttgctattctatgctgaagagcctgcttagaggaggagtaccaggagggagccagcatttcagatctgaagtagacgataggaatgtggaagaacacatacatagtgcttaagaaatacatttaacctgttatgtcagtatttatcaatgaagtttgataattcacttttctgtcattgttaaagcgtacatactgtaaattaaagggaggtgaatggaaattaatgaataaacattttgagtttccctagtgttg

SEQ ID NO: 3217 - protein, 245 aa, Homo sapiens
MSVPEEEERLLPLTQRWPRASKFLLSGCAATVAELATFPLDLTKTRLQMQGEAALARLGDGARESAPYRGMVRTALGIIEEEGFLKLWQGVTPAIYRHVVYSGGRMVTYEHLREVVFGKSEDEHYPLWKSVIGGMMAGVIGQFLANPTDLVKVQMQMEGKRKLEGKPLRFRGVHHAFAKILAEGGIRGLWAGWVPNIQRAALVNMGDLTTYDTVKHYLVLNTPLEDNIMTHGLSSDLVGSHKAIQ

SEQ ID NO: 3218 - DNA, 2961 bp, Homo sapiens
gactacattgcccagtaacctcctgggctccgctgtgtttttctattctggggtgtaaggggcagctggaccactccagctgggactgctaggaaggttgcgggtccacccggccgagccgaacgagggaaatggtcctcacccggccactcgccggttgaaaaggggccgccctggcagggaagcggccgccgcggcgcggtgcagcgcagcggcgagaaggagtgcgttatcgtcttgcgctactgctgaatgtccgtcccggaggaggaggagaggcttttgccgctgacccagagatggccccgagcgagcaaattcctactgtccggctgcgcggctaccgtggccgagctagcaacctttcccctggatctcacaaaaactcgactccaaatgcaaggagaagcagctcttgctcggttgggagacggtgcaagagaatctgccccctataggggaatggtgcgcacagctctagggatcattgaagaggaaggctttctaaagctttggcaaggagtgacacccgccatttacagacacgtagtgtattctggaggtcgaatggtcacatatgaacatctccgagaggttgtgtttggcaaaagtgaagatgagcattatcccctttggaaatcagtcattggagggatgatggctggtgttattggccagtttttagccaatccaactgacctagtgaaggttcagatgcaaatggaaggaaaaaggaaactggaaggaaaaccattgcgatttcgtggtgtacatcatgcatttgcaaaaatcttagctgaaggaggaatacgagggctttgggcaggctgggtacccaatatacaaagagcagcactggtgaatatgggagatttaaccacttatgatacagtgaaacactacttggtattgaatacaccacttgaggacaatatcatgactcacggtttatcaagtttatgttctggactggtagcttctattctgggaacaccagccgatgtcatcaaaagcagaataatgaatcaaccacgagataaacaaggaaggggacttttgtataaatcatcgactgactgcttgattcaggctgttcaaggtgaaggattcatgagtctatataaaggctttttaccatcttggctgagaatgaccccttggtcaatggtgttctggcttacttatgaaaaaatcagagagatgagtggagtcagtccattttaaacccctaaagatgcaacccttaaagatacagtgttcagtattattgaaatatgggcatctgcaacacataccccctattatttctacctctttaggaagacacctattccacagagactgatttatagggggcagcactttatttttttctggaaacccaagttctctttgactcctctttttgtccaaaagtgatctggtcggatctcacaaggccatccaatgagaccccgcacagcattttctaaagaagaatcgaagcctgaccactttcaccttgggcaagaaggtttggcctttgagttgctattctatgctgaagagcctgcttagaggaggagtaccaggagggagccagcatttcagatctgaagtagacgataggaatgtggaagaacacatacatagtgcttaagaaatacatttaacctgttatgtcagtatttatcaatgaagtttgataattcacttttctgtcattgttaaagcgtacatactgtaaattaaagggaggtgaatggaaattaatgaataaacattttgagtttccctagtgttgaaggaaggtgtactttttcttgtcagaaagataaaaaaaatcaagttgagatgatgtttgaatttcaagaaaagaggctgctttctgtcagtgccctctcattagatctgtgttaattagttagcactccactgcacatgctaatgacttcctctgacagccacacaccgaatcttgatgaaaaaagagaagagcatttgccttgttacatagtctgttacaagccagatatgttgctagctctcaagagttgtaatatattaagaactacaacttatttgattaaaactcagctgtatagatccttttataaagcaccttttgttaaacatcagcctttcattggtattttaaaagcaaggcagatagatatgaagtcagccaactctgacatgcgtcctttcttatctcccttacctgacactaggggctctagagaggcagagagagcactcacaaatcacactaaaactgccagcggcctgactcttactcagtttagcaaaaattcttgcctaaaaagtgataagtaaaaatctgtttatggtatacagttatgtctcgaatctttgaatcaaatccatgttcttattttagaaaggtaagagttcttcaaattcagctacataccaccggctctcccaacctcagacggtgggcatttctggatggatggctgcggttatggataaaggctgtaactgttaacacagaaaaacatgaaaagctcaggcccaagaaaggccttggagccagccaaacagaatttgttctaatggacatggatgatgttgaacagaaaaaagtttacaagtgctttgtggttgcactaatgtatactcactgccattttaagagggggaagtacattttaaaatatatttgaatgtcatgtactgatatgcagtagcttattgtttttctagttgcagagaatgtgaagtttaatctcttaaaatatttagatggtctactttttcattgaatttgtcaatatgtaattgcgttgtaaaatattatatatatatatatatatatatatatatatatatgcttaacttcccaagtgttctgcattgaaccacttagggaaaattttgtttgtttttatgttttgtaatttttaaaattaagtaaagactggatcaaaataattgcatccaacctggaccgtgaac

SEQ ID NO: 3219 - protein, 323 aa, Homo sapiens; identical to SEQ ID NO: 352

SEQ ID NO: 3220 - DNA, 3759 bp, Homo sapiens
tttgtataggtttaagaaagaaaaagtgaatagctgattatcatttttcttcacttaagaactttaaacacagaatttaaatttttcatattttttgaaaattaacatatatttattacagtgccaaatctcatgagtccctgtctcataatctaagaccaggctactctgaaagaggacagagttcactgcctaatccaacactggctgtagtgtaaatgcaacacaggtgatttttgccccagttccaaggctacctaactagctatgtgggccttagtcacccttaaaggaagatggttgcaactatgccagttagaacatttttctgctctgcttccacagtggcactcacaagaggaggacttgattttatagcttgtgtacaggagaatataaagttggcttcaaaggaggtaggataggtttggcatttttctcctcataatgtttcctgaagcatgaaaggatccttgatcagaagagtgctcagttctaatttctaaaatttgctggcttaatatttttaaagattcaattctccatatgagtaagttagcgtgtatcatcaaaaactatctagaactgtgtgcagagactgttactggttttccaagttgtatatttttgagtatcttaaaatatttcatcaactttctaaaacatcaagaaaagctctctatacaaataccatggttgattttaattattttgttttccatccttttaaaaatattttctgctttgcatcccattattattttgagtttcttttcatttgtagtttgttgttcattgtgttgttttacagctaagattcatttcatacgtttgatgcttagctgaaaaattacaataaattctccaatgaaattatgtatctttatttaatgaaaatgcctgctgcgtaccaaggtatgtactagggcatctggggtaagtaaaaacaaacacatagagcctgcctggagaagctcatggtctgatggaaagataagcaagaagagttaatttctaatcaatatgataaaaaggtcagagagcagtttctgaaaaacatgtttttgagttgagtcctgaaagacaaggagatgttagtaaagcagagaagggagaattcattctagaaagatcagacagtgtgtgggaagggcagagtctgaaaagagcatgccccatttggagaagcatcaagaagcccacgtgttagaagcaccggccccatgagacaaagacacagctagagagattgactaggccatgtcggaatgtcctcttattttatacatacataagcatatagatacatatagccaaagttacctttttaatgatcttttttacccagtgtattctggaggtcgaatggtcacatatgaacatctccgagaggttgtgtttggcaaaagtgaagatgagcattatcccctttggaaatcagtcattggagggatgatggctggtgttattggccagtttttagccaatccaactgacctagtgaaggttcagatgcaaatggaaggaaaaaggaaactggaaggaaaaccattgcgatttcgtggtgtacatcatgcatttgcaaaaatcttagctgaaggaggaatacgagggctttgggcaggctgggtacccaatatacaaagagcagcactggtgaatatgggagatttaaccacttatgatacagtgaaacactacttggtattgaatacaccacttgaggacaatatcatgactcacggtttatcaagtttatgttctggactggtagcttctattctgggaacaccagccgatgtcatcaaaagcagaataatgaatcaaccacgagataaacaaggaaggggacttttgtataaatcatcgactgactgcttgattcaggctgttcaaggtgaaggattcatgagtctatataaaggctttttaccatcttggctgagaatgaccccttggtcaatggtgttctggcttacttatgaaaaaatcagagagatgagtggagtcagtccattttaaacccctaaagatgcaacccttaaagatacagtgttcagtattattgaaatatgggcatctgcaacacataccccctattatttctacctctttaggaagacacctattccacagagactgatttatagggggcagcactttatttttttctggaaacccaagttctctttgactcctctttttgtccaaaagtgatctggtcggatctcacaaggccatccaatgagaccccgcacagcattttctaaagaagaatcgaagcctgaccactttcaccttgggcaagaaggtttggcctttgagttgctattctatgctgaagagcctgcttagaggaggagtaccaggagggagccagcatttcagatctgaagtagacgataggaatgtggaagaacacatacatagtgcttaagaaatacatttaacctgttatgtcagtatttatcaatgaagtttgataattcacttttctgtcattgttaaagcgtacatactgtaaattaaagggaggtgaatggaaattaatgaataaacattttgagtttccctagtgttgaaggaaggtgtactttttcttgtcagaaagataaaaaaaatcaagttgagatgatgtttgaatttcaagaaaagaggctgctttctgtcagtgccctctcattagatctgtgttaattagttagcactccactgcacatgctaatgacttcctctgacagccacacaccgaatcttgatgaaaaaagagaagagcatttgccttgttacatagtctgttacaagccagatatgttgctagctctcaagagttgtaatatattaagaactacaacttatttgattaaaactcagctgtatagatccttttataaagcaccttttgttaaacatcagcctttcattggtattttaaaagcaaggcagatagatatgaagtcagccaactctgacatgcgtcctttcttatctcccttacctgacactaggggctctagagaggcagagagagcactcacaaatcacactaaaactgccagcggcctgactcttactcagtttagcaaaaattcttgcctaaaaagtgataagtaaaaatctgtttatggtatacagttatgtctcgaatctttgaatcaaatccatgttcttattttagaaaggtaagagttcttcaaattcagctacataccaccggctctcccaacctcagacggtgggcatttctggatggatggctgcggttatggataaaggctgtaactgttaacacagaaaaacatgaaaagctcaggcccaagaaaggccttggagccagccaaacagaatttgttctaatggacatggatgatgttgaacagaaaaaagtttacaagtgctttgtggttgcactaatgtatactcactgccattttaagagggggaagtacattttaaaatatatttgaatgtcatgtactgatatgcagtagcttattgtttttctagttgcagagaatgtgaagtttaatctcttaaaatatttagatggtctactttttcattgaatttgtcaatatgtaattgcgttgtaaaatattatatatatatatatatatatatatatatatatatgcttaacttcccaagtgttctgcattgaaccacttagggaaaattttgtttgtttttatgttttgtaatttttaaaattaagtaaagactggatcaaaataattgcatccaacctggaccgtgaac

SEQ ID NO: 3221 - protein, 253 aa, Homo sapiens
MSECPLILYIHKHIDTYSQSYLFNDLFYPVYSGGRMVTYEHLREVVFGKSEDEHYPLWKSVIGGMMAGVIGQFLANPTDLVKVQMQMEGKRKLEGKPLRFRGVHHAFAKILAEGGIRGLWAGWVPNIQRAALVNMGDLTTYDTVKHYLVLNTPLEDNIMTHGLSSLCSGLVASILGTPADVIKSRIMNQPRDKQGRGLLYKSSTDCLIQAVQGEGFMSLYKGFLPSWLRMTPWSMVFWLTYEKIREMSGVSPF

SEQ ID NO: 3222 - DNA, 1910 bp, Homo sapiens
tgaaattaatggcaactttaaaaagaatttccttctgcaattaggaaatcagtcattggagggatgatggctggtgttattggccagtttttagccaatccaactgacctagtgaaggttcagatgcaaatggaaggaaaaaggaaactggaaggaaaaccattgcgatttcgtggtgtacatcatgcatttgcaaaaatcttagctgaaggaggaatacgagggctttgggcaggctgggtacccaatatacaaagagcagcactggtgaatatgggagatttaaccacttatgatacagtgaaacactacttggtattgaatacaccacttgaggacaatatcatgactcacggtttatcaagtgatctggtcggatctcacaaggccatccaatgagaccccgcacagcattttctaaagaagaatcgaagcctgaccactttcaccttgggcaagaaggtttggcctttgagttgctattctatgctgaagagcctgcttagaggaggagtaccaggagggagccagcatttcagatctgaagtagacgataggaatgtggaagaacacatacatagtgcttaagaaatacatttaacctgttatgtcagtatttatcaatgaagtttgataattcacttttctgtcattgttaaagcgtacatactgtaaattaaagggaggtgaatggaaattaatgaataaacattttgagtttccctagtgttgaaggaaggtgtactttttcttgtcagaaagataaaaaaaatcaagttgagatgatgtttgaatttcaagaaaagaggctgctttctgtcagtgccctctcattagatctgtgttaattagttagcactccactgcacatgctaatgacttcctctgacagccacacaccgaatcttgatgaaaaaagagaagagcatttgccttgttacatagtctgttacaagccagatatgttgctagctctcaagagttgtaatatattaagaactacaacttatttgattaaaactcagctgtatagatccttttataaagcaccttttgttaaacatcagcctttcattggtattttaaaagcaaggcagatagatatgaagtcagccaactctgacatgcgtcctttcttatctcccttacctgacactaggggctctagagaggcagagagagcactcacaaatcacactaaaactgccagcggcctgactcttactcagtttagcaaaaattcttgcctaaaaagtgataagtaaaaatctgtttatggtatacagttatgtctcgaatctttgaatcaaatccatgttcttattttagaaaggtaagagttcttcaaattcagctacataccaccggctctcccaacctcagacggtgggcatttctggatggatggctgcggttatggataaaggctgtaactgttaacacagaaaaacatgaaaagctcaggcccaagaaaggccttggagccagccaaacagaatttgttctaatggacatggatgatgttgaacagaaaaaagtttacaagtgctttgtggttgcactaatgtatactcactgccattttaagagggggaagtacattttaaaatatatttgaatgtcatgtactgatatgcagtagcttattgtttttctagttgcagagaatgtgaagtttaatctcttaaaatatttagatggtctactttttcattgaatttgtcaatatgtaattgcgttgtaaaatattatatatatatatatatatatatatatatatatatgcttaacttcccaagtgttctgcattgaaccacttagggaaaattttgtttgtttttatgttttgtaatttttaaaattaagtaaagactggatcaaaataattgcatccaacctggaccgtgaac

SEQ ID NO: 3223 - protein, 111 aa, Homo sapiens
MMAGVIGQFLANPTDLVKVQMQMEGKRKLEGKPLRFRGVHHAFAKILAEGGIRGLWAGWVPNIQRAALVNMGDLTTYDTVKHYLVLNTPLEDNIMTHGLSSDLVGSHKAIQ

SEQ ID NO: 3224 - DNA, 269 bp, Homo sapiens
gcccaaggagcttgttgggacgttcaggagaccccgaggtgggaggttttggacacaacctgcatctcctcagagcgccttcgactctggaggccgccgtgtgacggcctgacacagggctgcgggagaacatactatttcatatcaaatcagattctccacgttacctactcaagtcataagcgtctgaagaaagtgctctgtaaattctcagcagaatatgcttttaacaattctttaaaaacaataaagtcataataaaaatcttg

SEQ ID NO: 3225 - protein, 85 aa, Homo sapiens
AQGACWDVQETPRWEVLDTTCISSERLRLWRPPCDGLTQGCGRTYYFISNQILHVTYSSHKRLKKVLCKFSAEYAFNNSLKTIKS

SEQ ID NO: 3226 - DNA, 379 bp, Homo sapiens
ccagccgaggcctggggttggcctaacgcctaagggcccaaggagcttgttgggacgttcaggagaccccgaggtgggaggttttggacacaacctgcatctcctcagagcgccttcgactctggaggccgccgtgtgacggcctgacacagggctgcggtgaggaccgaccagagagggatttccttttcgtcctcccaactaccagggattgagcactgggggccaggcaagggagaacatactatttcatatcaaatcagattctccacgttacctactcaagtcataagcgtctgaagaaagtgctctgtaaattctcagcagaatatgcttttaacaattctttaaaaacaataaagtcataataaaaatcttg

SEQ ID NO: 3227 - protein, 50 aa, Homo sapiens
HRAAVRTDQRGISFSSSQLPGIEHWGPGKGEHTISYQIRFSTLPTQVISV

SEQ ID NO: 3228 - DNA, 377 bp, Homo sapiens
aggcccccggcgccggcattccgggcgtcgagcacatcttgacggcgcggcgcggcccccacttccggaaattaagggccgcgcctcagggcctcgaaatcctccgcgccgcctgaaggcgagtcccagccaaactaggttcaaaggacccagtggaggggaagaatgccggcgaggccttttctcggcaactcccccgtcgagggtcctccgggactcccgccacggactgggagaacatactatttcatatcaaatcagattctccacgttacctactcaagtcataagcgtctgaagaaagtgctctgtaaattctcagcagaatatgcttttaacaattctttaaaaacaataaagtcataataaaaatcttg

SEQ ID NO: 3229 - protein, 66 aa, Homo sapiens
MPARPFLGNSPVEGPPGLPPRTGRTYYFISNQILHVTYSSHKRLKKVLCKFSAEYAFNNSLKTIKS

SEQ ID NO: 3230 - DNA, 942 bp, Homo sapiens
gaccccttggtcaatggtgttctggcttacttatgaaaaaatcagagagatgagtggagtcagtccattttaaacccctaaagatgcaacccttaaagatacagtgttcagtattattgaaatatgggcatctgcaacacataccccctattatttctacctctttaggaagacacctattccacagagactgatttatagggggcagcactttatttttttctggaaacccaagttctctttgactcctctttttgtccaaaagtgatctggtcggatctcacaaggccatccaatgagaccccgcacagcattttctaaagaagaatcgaagcctgaccactttcaccttgggcaagaagaaaggtaagagttcttcaaattcagctacataccaccggctctcccaacctcagacggtgggcatttctggatggatggctgcggttatggataaaggctgtaactgttaacacagaaaaacatgaaaagctcaggcccaagaaaggccttggagccagccaaacagaatttgttctaatggacatggatgatgttgaacagaaaaaagtttacaagtgctttgtggttgcactaatgtatactcactgccattttaagagggggaagtacattttaaaatatatttgaatgtcatgtactgatatgcagtagcttattgtttttctagttgcagagaatgtgaagtttaatctcttaaaatatttagatggtctactttttcattgaatttgtcaatatgtaattgcgttgtaaaatattatatatatatatatatatatatatatatatatatgcttaacttcccaagtgttctgcattgaaccacttagggaaaattttgtttgtttttatgttttgtaatttttaaaattaagtaaagactggatcaaaataattgcatccaacctggaccgtgaa

SEQ ID NO: 3231 - protein, 36 aa, Homo sapiens
MDMDDVEQKKVYKCFVVALMYTHCHFKRGKYILKYI

SEQ ID NO: 3232 - DNA, 6832 bp, Homo sapiens
atgtgctcgacgcccggaatgccggcgccgggggcctcgctggccctgcgggtgtccttcgtggacgtgcatcccgatgtgatcccggtgcagctgtgggggctggtgggcgagcggcggggcgagtacctgcggctgagccgggaaatccaggaagcggcggccacgcgcggccagtgggcgctgggcagcgcctcggcctcgcccggcgagctgtgcctggtgcaggtcgggcttttgtggcaccgctgccgcgtggtcagccggcaggcacaggagagccgtgtcttcctgctggacgagggccgcaccatcacggccggagcaggctcgctggcgcctgggcgcagagagttcttcaatttgccctcggaagtgctgggctgcgtgctagcgggcctggtgccggcaggctgcggcgcgggctcaggcgagccgccgcagcactggcccgccgacgccgtggacttccttagcaaccttcagggcaaggaggtgcacgggtgcgtcctggacgtgctgctgctccatcgcctggtcctcctggaggtgcctgatgtgttccaacagatgcgggagctgggcctggctcggcgggtgcccgacagcctcttccgttcgctgctggagcgctatctcacagcggccactgctagcgtgggctccggggtcccggttctctcgcgagtcccgctcaagcaaaagcagcctggtctggattacttctatccccagctgcagctgggcgtgacggaggccgtggtcataacccaagtgtgccatccccaccgcattcactgccagctccgcagcgtctcgcaggagatccaccgcctctccgagagcatggcccaggtataccggggttccacggggacaggggatgagaactctaccagtgccacctgggaggagagggaggagagcccagataagccgggctctccgtgtgcatcctgtggcctggatggacattggtacagagcactgttgcttgagacttttcggccccagcgctgtgcccaggtgcttcatgtggactatggaaggaaggagttagtgagttgcagcagccttcggtacttgctgcctgaatattttcgaatgccggtggtgacctacccttgtgctttgtatggactctgggacggtgggagaggctggtctcggtcacaggtcggtgacctgaagacactgatactaggcaaggcagtgaatgcaaagattgaattttattgctcctttgagcatgtgtattatgtcagcctgtatggagaagatgggattaatctgaaccgtgtgtttggagtacagtcgtgttgcttggctgaccgagtccttcagagccaggcaacagaggaggaggaaccagaaacatctcagtctcagtctcctgctgaagaagtagatgaagagatttcactcccagccttaagatctatcaggttaaagatgaatgccttctacgatgcgcaggtagagtttgttaaaaatccttctgagttttggattaggttgaggaaacacaatgtcaccttcagtaagctgatgaggagaatgtgtggtttctattcctctgccagtaagctggatggtgtagttttgaaacctgaacctgatgacctttgctgtgtcaagtggaaagaaaatggttattatagggccatagtcaccaaattggatgacaagagtgtggatgtattcttagttgaccgaggcaattcggaaaatgtggactggtatgacgtaaggatgctgcttcctcagtttaggcagctaccaatattggctgtgaagtgcaccctggctgatatttggcctttgggaaaaacttggagccaggaggcagtttccttttttaaaaagactgtgctccacaaagaattagtcatccatattcttgataaacaggatcatcaatatgttattgagattcttgacgaatcaagaacaggggaagaaaacattagtaaggtaattgcccaagctggatatgccaagtatcaggaatttgaaacaaaggaaaatatcctggtaaatgcccactccccagggcatgtttcaaaccactttactacggagagtaacaaaataccttttgccaagactggagaaggagagcagaaagccaagagagagaataaaaccacatctgtttcaaaagctttgagtgacacaacagttgtaacaaatggttcaactgaactagttgtgcaggaaaaagtgaaaagagcatctgtttattttcctcttatgcagaattgcttggaaattaagccaggctcctctagtaaaggagagctggaagttggaagtacagtagaagtcagagtgtcttatgttgaaaaccctggctatttctggtgtcagctgaccaggaacatacaaggacttaaaactctaatgtctgatattcagtactattgcaaaaatacagctgctcctcaccagagaaacacccttgcttgtttggctaagcgaacagtaaacagacagtggtccagagcacttattagtgggatacagtctgtggagcatgtcaatgtaacatttgtagattatggagacagagaaatggtatctgtgaagaatatttattcaattagtgaagaatttctgaaggttaaggcacaggcttttaggtgcagtctttataatttaattcaaccagttggccagaatccctttgtttgggatgtaaaggcaatacaagctttcaatgaatttatagataatgcatggcaaaaaaatctagaattaaaatgtacaatatttgctctggcttcaattaatgaagaactgtttaacattgtggatttgctaaccccctttcagagtgcatgccatttcttggtagaaaagagacttgcaagaccagtaaaacttcagaagcctttggagtcctctgttcagctacattcctacttctattctacacatgatatgaaaattggaagtgaagaattagtttatataacgcatattgatgacccttggacattttattgccagctggcaagaaatgcaaatattttagaacagttgtcatgtagtattacacaattaagtaaagttttgctgaatttaaaaacatctcccttgaaccctggaaccttgtgccttgccaagtatactgatggaaactggtataggggcatagtaatagagaaagagccaaagaaagtcttctttgttgattttgggaatatttatgtagtaacaagtgatgatctgcttccaatacctagtgatgcatatgatgtcttacttttgcccatgcaagctgtcagatgttcattatctgatattcctgatcatataccagaagaagtggtggtgtggtttcaggagactattttagataagtcattgaaggctttagttgtagcaaaagatccagatggaacactgattatagaactatatggtgacaatattcaaattagtgctagtattaataagaagttggggctacttagttacaaagatagaataagaaaaaaagaaagtgaagtcctctgttctacaactgaaactcttgaagaaaaaaatgagaatatgaagttgccatgtacagagtatttaagtaaatcagtagggtacaagttacctaataaagaaattttggaagagtcatataaacctcagatcaactcatcatacaaggaactcaaacttttacaaagtttaacaaaaacaaacttagtcactcaatatcaagactctgtgggaaataaaaatagtcaagtgtttccattaacaacagaaaagaaagaagaaatttctgctgagacacccttgaaaacagcaagagtagaagctactctttcagagagaaaaataggagattcatgtgacaaagatttgcctctgaaattttgtgagttcccacagaagactataatgcctggatttaaaacaactgtatatgtttctcatataaatgacctttcagacttttatgttcaactaatagaagatgaagctgaaattagtcatctttcagagagattaaacagtgttaaaacaaggcccgaatattatgtaggtccacctttgcaaagaggagatatgatatgtgctgttttcccagaagataatttatggtatcgtgctgtgatcaaggagcaacaacccaatgaccttctctctgtgcagtttatagattatggcaatgtttctgtggttcatactaacaaaataggtaggcttgaccttgttaatgcaatattgccggggttgtgcattcattgctccttgcagggatttgaggttcctgacaataaaaattctaagaaaatgatgcattacttttcccaacggaccagcgaggctgcaataagatgtgaatttgttaaatttcaagacagatgggaagttattcttgctgatgaacatgggatcatagcagatgatatgattagcaggtatgctctcagtgaaaaatctcaagtagaactttctacccaagtaattaaaagtgccagttcaaagtctgttaacaaatcagacattgacacttcagtatttcttaactggtataatccagaaaaaaaaatgataagagcttatgccactgtgatagatggacctgagtacttttggtgtcagtttgctgatacggagaaacttcagtgtttagaagtagaagtacagactgctggagaacaggtagcagacaggagaaattgtatcccatgtccttatattggagatccttgtatagtaagatacagagaagatggacattattatagggcacttatcactaatatttgtgaagattatcttgtatctgtcaggcttgtggactttggaaacattgaagactgtgtggacccaaaagcactctgggccattccttctgaacttctgtcggttcccatgcaagcctttccatgttgcctctcagggtttaacatttcagaaggattatgttctcaagagggaaatgactatttctatgaaataataacagaagatgtgttggaaataacaatactagaaatcagaagggatgtttgtgatatccctttagcaattgttgacttgaaaagcaaaggtaaaagtattaatgagaaaatggagaaatattctaagactggtattaaaagtgctcttccctatgaaaatattgactcagagataaagcagactcttgggtcctacaatcttgatgtaggacttaagaaattaagtaataaagctgtacaaaataaaatatatatggaacaacagacagatgagcttgctgaaataactgaaaaagatgtaaacattattggaaccaaaccaagtaacttccgtgaccctaaaactgataacatttgtgaagggtttgaaaacccctgcaaagataaaattgatactgaggaactggaaggtgaattagagtgccatctggttgacaaagcagagtttgatgataaatacctgattacaggatttaacacattactaccacatgctaatgaaacaaaggagatactagaactgaattcacttgaggtgccgctttctcctgatgatgaatcaaaagaattcttagaactggaatctattgagttacagaattctctggtggtggatgaagaaaaaggggagctaagcccggtgccaccgaatgtgccactctcccaagagtgtgtcacaaaaggcgccatggagctatttacactgcagcttcctctcagctgtgaagctgagaaacagccagaactagaactacctacagcccagctgcctttagatgacaagatggatcctttgtctttaggagttagtcagaaagcacaggaatccatgtgtactgaggacatgagaaagtcaagttgtgtagaatcttttgatgaccagcgcaggatgtcattgcatctacatggagcagattgtgatcctaaaacacagaatgaaatgaatatatgtgaagaagaatttgtagagtataaaaacagggatgccatttcggcattgatgcctttgttctctgaggaagaaagcagtgatggaagcaagcacaataatggtttaccagatcatatctcagctcaactacagaacacctacactctgaaagcctttactgttggatctaaatgtgttgtgtggtcaagtctaagaaacacatggtctaaatgtgagattttagaaacagctgaagaaggaacaagggttttgaacctttcaaatggtatggaggagatagtgaaccctgagaatgtctggaatggcatacccaaattggataagagtccacctgagaaaaggggtttggaggtgatggagatttaaccgtggatctatagctgtggccaatcagtcagaagctgcccttgaacaagtggcatcttacgcagaccaacagagtatttgagaaaattgaaaacatgtaaccacaagaagttgtcattttcaaaaacttctatataggtggaaaacaaattaggtctcaggttgatggtggggtgtgtttatagtgatcctgttatatatacagatctgggatctttcgtctttattgtcttacgtttctaattagttgggaggatttattttgctaaacagtttactaacacattacatttcaaaaactattttggtacctttcaaatacagtgtttaaattaaaatagaaaaataagggctcatgacaagtacattatttgattctacttaggatagctttttagcaggatctccttcagaatttttgtcttgactttgaatctttgcctgtttgtctaaacatttgactaacattctgtttgaatttggaagtattctaatacaagatttgaataaagtttatccttaaataaagtttatccttaat

SEQ ID NO: 3233 - protein, 2096 aa, Homo sapiens; identical to SEQ ID NO: 354

SEQ ID NO: 3234 - DNA, 8721 bp, Homo sapiens
atgtgctcgacgcccggaatgccggcgccgggggcctcgctggccctgcgggtgtccttcgtggacgtgcatcccgatgtgatcccggtgcagctgtgggggctggtgggcgagcggcggggcgagtacctgcggctgagccgggaaatccaggaagcggcggccacgcgcggccagtgggcgctgggcagcgcctcggcctcgcccggcgagctgtgcctggtgcaggtcgggcttttgtggcaccgctgccgcgtggtcagccggcaggcacaggagagccgtgtcttcctgctggacgagggccgcaccatcacggccggagcaggctcgctggcgcctgggcgcagagagttcttcaatttgccctcggaagtgctgggctgcgtgctagcgggcctggtgccggcaggctgcggcgcgggctcaggcgagccgccgcagcactggcccgccgacgccgtggacttccttagcaaccttcagggcaaggaggtgcacgggtgcgtcctggacgtgctgctgctccatcgcctggtcctcctggaggtgcctgatgtgttccaacagatgcgggagctgggcctggctcggcgggtgcccgacagcctcttccgttcgctgctggagcgctatctcacagcggccactgctagcgtgggctccggggtcccggttctctcgcgagtcccgctcaagcaaaagcagcctggtctggattacttctatccccagctgcagctgggcgtgacggaggccgtggtcataacccaagtgtgccatccccaccgcattcactgccagctccgcagcgtctcgcaggagatccaccgcctctccgagagcatggcccaggtataccggggttccacggggacaggggatgagaactctaccagtgccacctgggaggagagggaggagagcccagataagccgggctctccgtgtgcatcctgtggcctggatggacattggtacagagcactgttgcttgagacttttcggccccagcgctgtgcccaggtgcttcatgtggactatggaaggaaggagttagtgagttgcagcagccttcggtacttgctgcctgaatattttcgaatgccggtggtgacctacccttgtgctttgtatggactctgggacggtgggagaggctggtctcggtcacaggtcggtgacctgaagacactgatactaggcaaggcagtgaatgcaaagattgaattttattgctcctttgagcatgtgtattatgtcagcctgtatggagaagatgggattaatctgaaccgtgtgtttggagtacagtcgtgttgcttggctgaccgagtccttcagagccaggcaacagaggaggaggaaccagaaacatctcagtctcagtctcctgctgaagaagtagatgaagagatttcactcccagccttaagatctatcaggttaaagatgaatgccttctacgatgcgcaggtagagtttgttaaaaatccttctgagttttggattaggttgaggaaacacaatgtcaccttcagtaagctgatgaggagaatgtgtggtttctattcctctgccagtaagctggatggtgtagttttgaaacctgaacctgatgacctttgctgtgtcaagtggaaagaaaatggttattatagggccatagtcaccaaattggatgacaagagtgtggatgtattcttagttgaccgaggcaattcggaaaatgtggactggtatgacgtaaggatgctgcttcctcagtttaggcagctaccaatattggctgtgaagtgcaccctggctgatatttggcctttgggaaaaacttggagccaggaggcagtttccttttttaaaaagactgtgctccacaaagaattagtcatccatattcttgataaacaggatcatcaatatgttattgagattcttgacgaatcaagaacaggggaagaaaacattagtaaggtaattgcccaagctggatatgccaagtatcaggaatttgaaacaaaggaaaatatcctggtaaatgcccactccccagggcatgtttcaaaccactttactacggagagtaacaaaataccttttgccaagactggagaaggagagcagaaagccaagagagagaataaaaccacatctgtttcaaaagctttgagtgacacaacagttgtaacaaatggttcaactgaactagttgtgcaggaaaaagtgaaaagagcatctgtttattttcctcttatgcagaattgcttggaaattaagccaggctcctctagtaaaggagagctggaagttggaagtacagtagaagtcagagtgtcttatgttgaaaaccctggctatttctggtgtcagctgaccaggaacatacaaggacttaaaactctaatgtctgatattcagtactattgcaaaaatacagctgctcctcaccagagaaacacccttgcttgtttggctaagcgaacagtaaacagacagtggtccagagcacttattagtgggatacagtctgtggagcatgtcaatgtaacatttgtagattatggagacagagaaatggtatctgtgaagaatatttattcaattagtgaagaatttctgaaggttaaggcacaggcttttaggtgcagtctttataatttaattcaaccagttggccagaatccctttgtttgggatgtaaaggcaatacaagctttcaatgaatttatagataatgcatggcaaaaaaatctagaattaaaatgtacaatatttgctctggcttcaattaatgaagaactgtttaacattgtggatttgctaaccccctttcagagtgcatgccatttcttggtagaaaagagacttgcaagaccagtaaaacttcagaagcctttggagtcctctgttcagctacattcctacttctattctacacatgatatgaaaattggaagtgaagaattagtttatataacgcatattgatgacccttggacattttattgccagctggcaagaaatgcaaatattttagaacagttgtcatgtagtattacacaattaagtaaagttttgctgaatttaaaaacatctcccttgaaccctggaaccttgtgccttgccaagtatactgatggaaactggtataggggcatagtaatagagaaagagccaaagaaagtcttctttgttgattttgggaatatttatgtagtaacaagtgatgatctgcttccaatacctagtgatgcatatgatgtcttacttttgcccatgcaagctgtcagatgttcattatctgatattcctgatcatataccagaagaagtggtggtgtggtttcaggagactattttagataagtcattgaaggctttagttgtagcaaaagatccagatggaacactgattatagaactatatggtgacaatattcaaattagtgctagtattaataagaagttggggctacttagttacaaagatagaataagaaaaaaagaaagtgaagtcctctgttctacaactgaaactcttgaagaaaaaaatgagaatatgaagttgccatgtacagagtatttaagtaaatcagtagggtacaagttacctaataaagaaattttggaagagtcatataaacctcagatcaactcatcatacaaggaactcaaacttttacaaagtttaacaaaaacaaacttagtcactcaatatcaagactctgtgggaaataaaaatagtcaagtgtttccattaacaacagaaaagaaagaagaaatttctgctgagacacccttgaaaacagcaagagtagaagctactctttcagagagaaaaataggagattcatgtgacaaagatttgcctctgaaattttgtgagttcccacagaagactataatgcctggatttaaaacaactgtatatgtttctcatataaatgacctttcagacttttatgttcaactaatagaagatgaagctgaaattagtcatctttcagagagattaaacagtgttaaaacaaggcccgaatattatgtaggtccacctttgcaaagaggagatatgatatgtgctgttttcccagaagataatttatggtatcgtgctgtgatcaaggagcaacaacccaatgaccttctctctgtgcagtttatagattatggcaatgtttctgtggttcatactaacaaaataggtaggcttgaccttgttaatgcaatattgccggggttgtgcattcattgctccttgcagggatttgaggttcctgacaataaaaattctaagaaaatgatgcattacttttcccaacggaccagcgaggctgcaataagatgtgaatttgttaaatttcaagacagatgggaagttattcttgctgatgaacatgggatcatagcagatgatatgattagcaggtatgctctcagtgaaaaatctcaagtagaactttctacccaagtaattaaaagtgccagttcaaagtctgttaacaaatcagacattgacacttcagtatttcttaactggtataatccagaaaaaaaaatgataagagcttatgccactgtgatagatggacctgagtacttttggtgtcagtttgctgatacggagaaacttcagtgtttagaagtagaagtacagactgctggagaacaggtagcagacaggagaaattgtatcccatgtccttatattggagatccttgtatagtaagatacagagaagatggacattattatagggcacttatcactaatatttgtgaagattatcttgtatctgtcaggcttgtggactttggaaacattgaagactgtgtggacccaaaagcactctgggccattccttctgaacttctgtcggttcccatgcaagcctttccatgttgcctctcagggtttaacatttcagaaggattatgttctcaagagggaaatgactatttctatgaaataataacagaagatgtgttggaaataacaatactagaaatcagaagggatgtttgtgatatccctttagcaattgttgacttgaaaagcaaaggtaaaagtattaatgagaaaatggagaaatattctaagactggtattaaaagtgctcttccctatgaaaatattgactcagagataaagcagactcttgggtcctacaatcttgatgtaggacttaagaaattaagtaataaagctgtacaaaataaaatatatatggaacaacagacagatgagcttgctgaaataactgaaaaagatgtaaacattattggaaccaaaccaagtaacttccgtgaccctaaaactgataacatttgtgaagggtttgaaaacccctgcaaagataaaattgatactgaggaactggaaggtgaattagagtgccatctggttgacaaagcagagtttgatgataaatacctgattacaggatttaacacattactaccacatgctaatgaaacaaaggagatactagaactgaattcacttgaggtgccgctttctcctgatgatgaatcaaaagaattcttagaactggaatctattgagttacagaattctctggtggtggatgaagaaaaaggggagctaagcccggtgccaccgaatgtgccactctcccaagagtgtgtcacaaaaggcgccatggagctatttacactgcagcttcctctcagctgtgaagctgagaaacagccagaactagaactacctacagcccagctgcctttagatgacaagatggatcctttgtctttaggagttagtcagaaagcacaggaatccatgtgtactgaggacatgagaaagtcaagttgtgtagaatcttttgatgaccagcgcaggatgtcattgcatctacatggagcagattgtgatcctaaaacacagaatgaaatgaatatatgtgaagaagaatttgtagagtataaaaacagggatgccatttcggcattgatgcctttgttctctgaggaagaaagcagtgatggaagcaagcacaataatggtttaccagatcatatctcagctcaactacagaacacctacactctgaaagcctttactgttggatctaaatgtgttgtgtggtcaagtctaagaaacacatggtctaaatgtgagattttagaaacagctgaagaaggaacaagggttttgaacctttcaaatggtatggaggagatagtgaaccctgagaatgtctggaatggcatacccaaattggataagagtccacctgagaaaaggggtttggaggtgatggagatttaaccgtggatctatagctgtggccaatcagtcagaagctgcccttgaacaagtggcatcttacgcagaccaacagagtatttgagaaaattgaaaacatgtaaccacaagaagttgtcattttcaaaaacttctatataggtggaaaacaaattaggtctcaggttgatggtggggtgtgtttatagtgatcctgttatatatacagatctgggatctttcgtctttattgtcttacgtttctaattagttgggaggatttattttgctaaacagtttactaacacattacatttcaaaaactattttggtacctttcaaatacagtgtttaaattaaaatagaaaaataagggctcatgacaagtacattatttgattctacttaggatagctttttagcaggatctccttcagaatttttgtcttgactttgaatctttgcctgtttgtctaaacatttgactaacattctgtttgaatttggaagtattctaatacaagatttgaataaagtttatccttaaataaagtttatccttaatatgatggtctcattttattaaaaaggaaatagaactcttaaatatacttggttccatctctcctctgtaatggaggattggggaaagcatagtaatattaaatgttagctcttatgtattagtcacttagcttatactttaaatgcattttttcactttattcatcaactttgaagtgcatatcaatattatccatattttataggtgagaaaattgaagcttcataaagaggttaaataacttgcctaaggtcagatagctgatgagtctcagaggcttgatcaaacccagacctacctaactttgaagcccatgactttttaaacatgattttgcaaagcatagatcttagcttttagaaacagatctgagctatatgctgcttaacagatatgtgacatgggcaaattatgtaatattttgaactttgatcttcatctgtaaagtggtgataataaaacctttcttgcagtgtttttttaagatgagaaataattgatataaagtccctgaaaaggagtaggcatttgataaatgtgtctttctttaccctgaaaaatactcagtgtgcactatgttaggttatttctttttaaccttaacttattagatattttcaatagttattttctcctttcagcatcagcatgcgccaccaacaaaagactgtaaaaaacaaacaaacaaaaaagtgttgaatgggacatccatacagttggaatgcttatttctaaaatgaatagggaaaaggtttgctaaatgagactggggtaaaggtgtatctctgtgaagcattatcagactctgaagcctaatggaaatagaattatgaaccttaaaaacccattataatttccgtaagtagaagggagagaggtttgcattaaaagtaattgaggtagatgagtatattacttattcctggaataatgaatagacaagtttggcttactcatatagataatataatgtgaattgccagaagcaaagctcagagaagatgcattaggatcagattataggaagccttcaatttcaagctgagtttaactccctattttaaaaaatttaatctgaatggctacagaagtaaaatttctcagaatgagtgactttgcacctgacaccactaagataggactagggtaccaaatgagtggtataaatttttatgtcccctgggaaataaaatcattttccatgattcccatatttataagtataaattcttaagctatatttttacctccatttaatcgtgttattctgttttactactacatatagaattgaaaacattaaataaaattaactggaatatgaagaagctaaatgtaattctgaatgttttattatccttcacagcctttgtgtgagtaactaatgtattctaactggaatccctgctatatgctgtaatacctgtggaacctttctttagcaagtagaatgccttaaagaattaaagaaagtgtcaaaaaattaccaatttaatccactgcctttgcctcatctctaatattcttaacccttctctactccttttagtcatcatttgaaattgtgtagtaccaccaatcctgtgctgaaacaatggcttttgcttgttctaatttttcttaccgtgaccaaaagtcaaagagaagagctgccaaattctacctagaatatcatgttgctataattaaactccactgcccatagtagataataaaaggcaagaaattgttttttactctatgtttagggagtcttgtatcattgcaacaggttttcactgggattttgcctgttttaatctacttgtctgtcaaagtaatgtaaaaacagtttttaacttcgacactgaaaaggaatcatctttaaaattaaaatttaggctgatatg

SEQ ID NO: 3235 - protein, 2096 aa, Homo sapiens; identical to SEQ ID NO: 354

SEQ ID NO: 3236 - DNA, 4085 bp, Homo sapiens
ttaattcaaccagttggccagaatccctttgtttgggatgtaaaggcaatacaagctttcaatgaatttatagataatgcatggcaaaaaaatctagaattaaaatgtacaatatttgctctggcttcaattaatgaagaactgtttaacattgtggatttgctaaccccctttcagagtgcatgccatttcttggtagaaaagagacttgcaagaccagtaaaacttcagaagcctttggagtcctctgttcagctacattcctacttctattctacacatgatatgaaaattggaagtgaagaattagtttatataacgcatattgatgacccttggacattttattgccagctggcaagaaatgcaaatattttagaacagttgtcatgtagtattacacaattaagtaaagttttgctgaatttaaaaacatctcccttgaaccctggaaccttgtgccttgccaagtatactgatggaaactggtataggggcatagtaatagagaaagagccaaagaaagtcttctttgttgattttgggaatatttatgtagtaacaagtgatgatctgcttccaatacctagtgatgcatatgatgtcttacttttgcccatgcaagctgtcagatgttcattatctgatattcctgatcatataccagaagaagtggtggtgtggtttcaggagactattttagataagtcattgaaggctttagttgtagcaaaagatccagatggaacactgattatagaactatatggtgacaatattcaaattagtgctagtattaataagaagttggggctacttagttacaaagatagaataagaaaaaaagaaagtgaagtcctctgttctacaactgaaactcttgaagaaaaaaatgagaatatgaagttgccatgtacagagtatttaagtaaatcagtagggtacaagttacctaataaagaaattttggaagagtcatataaacctcagatcaactcatcatacaaggaactcaaacttttacaaagtttaacaaaaacaaacttagtcactcaatatcaagactctgtgggaaataaaaatagtcaagtgtttccattaacaacagaaaagaaagaagaaatttctgctgagacacccttgaaaacagcaagagtagaagctactctttcagagagaaaaataggagattcatgtgacaaagatttgcctctgaaattttgtgagttcccacagaagactataatgcctggatttaaaacaactgtatatgtttctcatataaatgacctttcagacttttatgttcaactaatagaagatgaagctgaaattagtcatctttcagagagattaaacagtgttaaaacaaggcccgaatattatgtaggtccacctttgcaaagaggagatatgatatgtgctgttttcccagaagataatttatggtatcgtgctgtgatcaaggagcaacaacccaatgaccttctctctgtgcagtttatagattatggcaatgtttctgtggttcatactaacaaaataggtaggcttgaccttgttaatgcaatattgccggggttgtgcattcattgctccttgcagggatttgaggttcctgacaataaaaattctaagaaaatgatgcattacttttcccaacggaccagcgaggctgcaataagatgtgaatttgttaaatttcaagacagatgggaagttattcttgctgatgaacatgggatcatagcagatgatatgattagcaggtatgctctcagtgaaaaatctcaagtagaactttctacccaagtaattaaaagtgccagttcaaagtctgttaacaaatcagacattgacacttcagtatttcttaactggtataatccagaaaaaaaaatgataagagcttatgccactgtgatagatggacctgagtacttttggtgtcagtttgctgatacggagaaacttcagtgtttagaagtagaagtacagactgctggagaacaggtagcagacaggagaaattgtatcccatgtccttatattggagatccttgtatagtaagatacagagaagatggacattattatagggcacttatcactaatatttgtgaagattatcttgtatctgtcaggcttgtggactttggaaacattgaagactgtgtggacccaaaagcactctgggccattccttctgaacttctgtcggttcccatgcaagcctttccatgttgcctctcagggtttaacatttcagaaggattatgttctcaagagggaaatgactatttctatgaaataataacagaagatgtgttggaaataacaatactagaaatcagaagggatgtttgtgatatccctttagcaattgttgacttgaaaagcaaaggtaaaagtattaatgagaaaatggagaaatattctaagactggtattaaaagtgctcttccctatgaaaatattgactcagagataaagcagactcttgggtcctacaatcttgatgtaggacttaagaaattaagtaataaagctgtacaaaataaaatatatatggaacaacagacagatgagcttgctgaaataactgaaaaagatgtaaacattattggaaccaaaccaagtaacttccgtgaccctaaaactgataacatttgtgaagggtttgaaaacccctgcaaagataaaattgatactgaggaactggaaggtgaattagagtgccatctggttgacaaagcagagtttgatgataaatacctgattacaggatttaacacattactaccacatgctaatgaaacaaaggagatactagaactgaattcacttgaggtgccgctttctcctgatgatgaatcaaaagaattcttagaactggaatctattgagttacagaattctctggtggtggatgaagaaaaaggggagctaagcccggtgccaccgaatgtgccactctcccaagagtgtgtcacaaaaggcgccatggagctatttacactgcagcttcctctcagctgtgaagctgagaaacagccagaactagaactacctacagcccagctgcctttagatgacaagatggatcctttgtctttaggagttagtcagaaagcacaggaatccatgtgtactgaggacatgagaaagtcaagttgtgtagaatcttttgatgaccagcgcaggatgtcattgcatctacatggagcagattgtgatcctaaaacacagaatgaaatgaatatatgtgaagaagaatttgtagagtataaaaacagggatgccatttcggcattgatgcctttgttctctgaggaagaaagcagtgatggaagcaagcacaataatggtttaccagatcatatctcagctcaactacagaacacctacactctgaaagcctttactgttggatctaaatgtgttgtgtggtcaagtctaagaaacacatggtctaaatgtgagattttagaaacagctgaagaaggaacaaggaaaaggggtttggaggtgatggagatttaaccgtggatctatagctgtggccaatcagtcagaagctgcccttgaacaagtggcatcttacgcagaccaacagagtatttgagaaaattgaaaacatgtaaccacaagaagttgtcattttcaaaaacttctatataggtggaaaacaaattaggtctcaggttgatggtggggtgtgtttatagtgatcctgttatatatacagatctgggatctttcgtctttattgtcttacgtttctaattagttgggaggatttattttgctaaacagtttactaacacattacatttcaaaaactattttggtacctttcaaatacagtgtttaaattaaaatagaaaaataagggctcatgacaagtacattatttgattctacttaggatagctttttagcaggatctccttcagaatttttgtcttgactttgaatctttgcctgtttgtctaaacatttgactaacattctgtttgaatttggaagtattctaatacaagatttgaataaagtttatccttaaataaagtttatccttaata

SEQ ID NO: 3237 - protein, 1085 aa, Homo sapiens
MKIGSEELVYITHIDDPWTFYCQLARNANILEQLSCSITQLSKVLLNLKTSPLNPGTLCLAKYTDGNWYRGIVIEKEPKKVFFVDFGNIYVVTSDDLLPIPSDAYDVLLLPMQAVRCSLSDIPDHIPEEVVVWFQETILDKSLKALVVAKDPDGTLIIELYGDNIQISASINKKLGLLSYKDRIRKKESEVLCSTTETLEEKNENMKLPCTEYLSKSVGYKLPNKEILEESYKPQINSSYKELKLLQSLTKTNLVTQYQDSVGNKNSQVFPLTTEKKEEISAETPLKTARVEATLSERKIGDSCDKDLPLKFCEFPQKTIMPGFKTTVYVSHINDLSDFYVQLIEDEAEISHLSERLNSVKTRPEYYVGPPLQRGDMICAVFPEDNLWYRAVIKEQQPNDLLSVQFIDYGNVSVVHTNKIGRLDLVNAILPGLCIHCSLQGFEVPDNKNSKKMMHYFSQRTSEAAIRCEFVKFQDRWEVILADEHGIIADDMISRYALSEKSQVELSTQVIKSASSKSVNKSDIDTSVFLNWYNPEKKMIRAYATVIDGPEYFWCQFADTEKLQCLEVEVQTAGEQVADRRNCIPCPYIGDPCIVRYREDGHYYRALITNICEDYLVSVRLVDFGNIEDCVDPKALWAIPSELLSVPMQAFPCCLSGFNISEGLCSQEGNDYFYEIITEDVLEITILEIRRDVCDIPLAIVDLKSKGKSINEKMEKYSKTGIKSALPYENIDSEIKQTLGSYNLDVGLKKLSNKAVQNKIYMEQQTDELAEITEKDVNIIGTKPSNFRDPKTDNICEGFENPCKDKIDTEELEGELECHLVDKAEFDDKYLITGFNTLLPHANETKEILELNSLEVPLSPDDESKEFLELESIELQNSLVVDEEKGELSPVPPNVPLSQECVTKGAMELFTLQLPLSCEAEKQPELELPTAQLPLDDKMDPLSLGVSQKAQESMCTEDMRKSSCVESFDDQRRMSLHLHGADCDPKTQNEMNICEEEFVEYKNRDAISALMPLFSEEESSDGSKHNNGLPDHISAQLQNTYTLKAFTVGSKCVVWSSLRNTWSKCEILETAEEGTRKRGLEVMEI

SEQ ID NO: 3238 - DNA, 1952 bp, Homo sapiens
gagggtcggggccacaaggccgcgctaggcggacccaggacacagcccgcgcgcagcccacccgcccgccgcctgccagagctgctcggcccgcagccagggggacagcggctggtcggaggctcgcagtgctgtcggcgagaagcagtcgggtttggagcgcttgggtcgcgttggtgcgcggtggaacgcgcccagggaccccagttcccgcgagcagctccgcgccgcgcctgagagactaagctgaaactgctgctcagctcccaagatggtgccacccaaattgcatgtgcttttctgcctctgcggctgcctggctgtggtttatccttttgactggcaatacataaatcctgttgcccatatgaaatcatcagcatgggtcaacaaaatacaagtactgatggctgctgcaagctttggccaaactaaaatcccccggggaaatgggccttattccgttggttgtacagacttaatgtttgatcacactaataagggcaccttcttgcgtttatattatccatcccaagataatgatcgccttgacaccctttggatcccaaataaagaatatttttggggtcttagcaaatttcttggaacacactggcttatgggcaacattttgaggttactctttggttcaatgacaactcctgcaaactggaattcccctctgaggcctggtgaaaaatatccacttgttgttttttctcatggtcttggggcattcaggacactttattctgctattggcattgacctggcatctcatgggtttatagttgctgctgtagaacacagagatagatctgcatctgcaacttactatttcaaggaccaatctgctgcagaaataggggacaagtcttggctctaccttagaaccctgaaacaagaggaggagacacatatacgaaatgagcaggtacggcaaagagcaaaagaatgttcccaagctctcagtctgattcttgacattgatcatggaaagccagtgaagaatgcattagatttaaagtttgatatggaacaactgaaggactctattgatagggaaaaaatagcagtaattggacattcttttggtggagcaacggttattcagactcttagtgaagatcagagattcagatgtggtattgccctggatgcatggatgtttccactgggtgatgaagtatattccagaattcctcagcccctcttttttatcaactctgaatatttccaatatcctgctaatatcataaaaatgaaaaaatgctactcacctgataaagaaagaaagatgattacaatcaggggttcagtccaccagaattttgctgacttcacttttgcaactggcaaaataattggacacatgctcaaattaaagggagacatagattcaaatgtagctattgatcttagcaacaaagcttcattagcattcttacaaaagcatttaggacttcataaagattttgatcagtgggactgcttgattgaaggagatgatgagaatcttattccagggaccaacattaacacaaccaatcaacacatcatgttacagaactcttcaggaatagagaaatacaattaggattaaaataggttttttaaaagtcttgtttcaaaactgtctaaaattatgtgtgtgtgtgtgtgtgtgtgtgtgtgtgtgagagagagagagagagagagagagagagagagagagaattttaatgtattttcccaaaggactcatattttaaaatgtaggctatactgtaatcgtgattgaagcttggactaagaattttttccctttagatgtaaagaaagaatacagtatacaatattcatatcagcctaaattttaattttaaagatgattccttttcagtgtcgaagttaaaaactgtttttacattactttgacagacaagtagattaaaacaggcaaaatcccagtg

SEQ ID NO: 3239 - protein, 441 aa, Homo sapiens
MVPPKLHVLFCLCGCLAVVYPFDWQYINPVAHMKSSAWVNKIQVLMAAASFGQTKIPRGNGPYSVGCTDLMFDHTNKGTFLRLYYPSQDNDRLDTLWIPNKEYFWGLSKFLGTHWLMGNILRLLFGSMTTPANWNSPLRPGEKYPLVVFSHGLGAFRTLYSAIGIDLASHGFIVAAVEHRDRSASATYYFKDQSAAEIGDKSWLYLRTLKQEEETHIRNEQVRQRAKECSQALSLILDIDHGKPVKNALDLKFDMEQLKDSIDREKIAVIGHSFGGATVIQTLSEDQRFRCGIALDAWMFPLGDEVYSRIPQPLFFINSEYFQYPANIIKMKKCYSPDKERKMITIRGSVHQNFADFTFATGKIIGHMLKLKGDIDSNVAIDLSNKASLAFLQKHLGLHKDFDQWDCLIEGDDENLIPGTNINTTNQHIMLQNSSGIEKYN

SEQ ID NO: 3240 - DNA, 1840 bp, Homo sapiens
gagggtcggggccacaaggccgcgctaggcggacccaggacacagcccgcgcgcagcccacccgcccgccgcctgccagagctgctcggcccgcagccagggggacagcggctggtcggaggctcgcagtgctgtcggcgagaagcagtcgggtttggagcgcttgggtcgcgttggtgcgcggtggaacgcgcccagggaccccagttcccgcgagcagctccgcgccgcgcctgagagactaagctgaaactgctgctcagctcccaagatggtgccacccaaattgcatgtgcttttctgcctctgcggctgcctggctgtggtttatccttttgactggcaatacataaatcctgttgcccatatgaaatcatcagcatgggtcaacaaaatacaagtactgatggctgctgcaagctttggccaaactaaaatcccccggggaaatgggccttattccgttggttgtacagacttaatgtttgatcacactaataagggcaccttcttgcgtttatattatccatcccaagataatgatcgccttgacaccctttggatcccaaataaagaatatttttggggtcttagcaaatttcttggaacacactggcttatgggcaacattttgaggttactctttggttcaatgacaactcctgcaaactggaattcccctctgaggcctggtgaaaaatatccacttgttgttttttctcatggtcttggggcattcaggacactttattctgctattggcattgacctggcatctcatgggtttatagttgctgctgtagaacacagagatagatctgcatctgcaacttactatttcaaggaccaatctgctgcagaaataggggacaagtcttggctctaccttagaaccctgaaacaagaggaggagacacatatacgaaatgagcaggtacggcaaagagcaaaagaatgttcccaagctctcagtctgattcttgacattgatcatggaaagccagtgaagaatgcattagatttaaagtttgatatggaacaactgaaggactctattgatagggaaaaaatagcagtaattggacattcttttggtggagcaacggttattcagactcttagtgaagatcagagattcagatgtggtattgccctggatgcatggatgtttccactgggtgatgaagtatattccagaattcctcagcccctcttttttatcaactctgaatatttccaatatcctgctaatatcataaaaatgaaaaaatgctactcacctgataaagaaagaaagatgattacaatcaggggttcagtccaccagaattttgctgacttcacttttgcaactggcaaaataattggacacatgctcaaattaaagggagacatagattcaaatgtagctattgatcttagcaacaaagcttcattagcattcttacaaaagcatttaggacttcataaagattttgatcagtgggactgcttgattgaaggagatgatgagaatcttattccagggaccaacattaacacaaccaatcaacacatcatgttacagaactcttcaggaatagagaaatacaattaggattaaaataggttttttaaaagtcttgtttcaaaactgtctaaaattatgtgtgtgtgtgtgtgtgtgtgtgtgtgtgtgagagagagagagagagagagagagagagagagagagaattttaatgtattttcccaaaggactcatattttaaaatgtaggctatactgtaatcgtgattgaagcttggactaagaattttttccctttagatgtaaagaaagaatacagtatacaatattc

SEQ ID NO: 3241 - protein, 441 aa, Homo sapiens; identical to SEQ ID NO: 3239

SEQ ID NO: 3242 - DNA, 1615 bp, Homo sapiens
gagggtcggggccacaaggccgcgctaggcggacccaggacacagcccgcgcgcagcccacccgcccgccgcctgccagagctgctcggcccgcagccagggggacagcggctggtcggaggctcgcagtgctgtcggcgagaagcagtcgggtttggagcgcttgggtcgcgttggtgcgcggtggaacgcgcccagggaccccagttcccgcgagcagctccgcgccgcgcctgagagactaagctgaaactgctgctcagctcccaagatggtgccacccaaattgcatgtgcttttctgcctctgcggctgcctggctgtggtttatccttttgactggcaatacataaatcctgttgcccatatgaaatcatcagcatgggtcaacaaaatacaagtactgatggctgctgcaagctttggccaaactaaaatcccccggggaaatgggccttattccgttggttgtacagacttaatgtttgatcacactaataagggcaccttcttgcgtttatattatccatcccaagataatgatcgccttgacaccctttggatcccaaataaagaatatttttggggtcttagcaaatttcttggaacacactggcttatgggcaacattttgaggttactctttggttcaatgacaactcctgcaaactggaattcccctctgaggcctggtgaaaaatatccacttgttgttttttctcatggtcttggggcattcaggacactttattctgctattggcattgacctggcatctcatgggtttatagttgctgctgtagaacacagagatagatctgcatctgcaacttactatttcaaggaccaatctgctgcagaaataggggacaagtcttggctctaccttagaaccctgaaacaagaggaggagacacatatacgaaatgagcaggtacggcaaagagcaaaagaatgttcccaagctctcagtctgattcttgacattgatcatggaaagccagtgaagaatgcattagatttaaagtttgatatggaacaactgaaggactctattgatagggaaaaaatagcagtaattggacattcttttggtggagcaacggttattcagactcttagtgaagatcagagattcagatgtggtattgccctggatgcatggatgtttccactgggtgatgaagtatattccagaattcctcagcccctcttttttatcaactctgaatatttccaatatcctgctaatatcataaaaatgaaaaaatgctactcacctgataaagaaagaaagatgattacaatcaggggttcagtccaccagaattttgctgacttcacttttgcaactggcaaaataattggacacatgctcaaattaaagggagacatagattcaaatgtagctattgatcttagcaacaaagcttcattagcattcttacaaaagcatttaggacttcataaagattttgatcagtgggactgcttgattgaaggagatgatgagaatcttattccagggaccaacattaacacaaccaatcaacacatcatgttacagaactcttcaggaatagagaaatacaattaggattaaaataggtttttt

SEQ ID NO: 3243 - protein, 441 aa, Homo sapiens; identical to SEQ ID NO: 3239

SEQ ID NO: 3244 - DNA, 1522 bp, Homo sapiens
ggaaaaccggcctgactggggggtgaattcagcagggagtaaatctgatcggcatcaggtctgcggaaaggagctggtgagcacgacaccacccaggcattgcctggctctctccgcggcgggctaagttaaccgcgggtccaggagactaagctgaaactgctgctcagctcccaagatggtgccacccaaattgcatgtgcttttctgcctctgcggctgcctggctgtggtttatccttttgactggcaatacataaatcctgttgcccatatgaaatcatcagcatgggtcaacaaaatacaagtactgatggctgctgcaagctttggccaaactaaaatcccccggggaaatgggccttattccgttggttgtacagacttaatgtttgatcacactaataagggcaccttcttgcgtttatattatccatcccaagataatgatcgccttgacaccctttggatcccaaataaagaatatttttggggtcttagcaaatttcttggaacacactggcttatgggcaacattttgaggttactctttggttcaatgacaactcctgcaaactggaattcccctctgaggcctggtgaaaaatatccacttgttgttttttctcatggtcttggggcattcaggacactttattctgctattggcattgacctggcatctcatgggtttatagttgctgctgtagaacacagagatagatctgcatctgcaacttactatttcaaggaccaatctgctgcagaaataggggacaagtcttggctctaccttagaaccctgaaacaagaggaggagacacatatacgaaatgagcaggtacggcaaagagcaaaagaatgttcccaagctctcagtctgattcttgacattgatcatggaaagccagtgaagaatgcattagatttaaagtttgatatggaacaactgaaggactctattgatagggaaaaaatagcagtaattggacattcttttggtggagcaacggttattcagactcttagtgaagatcagagattcagatgtggtattgccctggatgcatggatgtttccactgggtgatgaagtatattccagaattcctcagcccctcttttttatcaactctgaatatttccaatatcctgctaatatcataaaaatgaaaaaatgctactcacctgataaagaaagaaagatgattacaatcaggggttcagtccaccagaattttgctgacttcacttttgcaactggcaaaataattggacacatgctcaaattaaagggagacatagattcaaatgtagctattgatcttagcaacaaagcttcattagcattcttacaaaagcatttaggacttcataaagattttgatcagtgggactgcttgattgaaggagatgatgagaatcttattccagggaccaacattaacacaaccaatcaacacatcatgttacagaactcttcaggaatagagaaatacaattaggattaaaataggtttttt

SEQ ID NO: 3245 - protein, 441 aa, Homo sapiens; identical to SEQ ID NO: 3239

SEQ ID NO: 3246 - DNA, 1420 bp, Homo sapiens
atgcaactttttaccatcgtcccttattacaagctctttgaggttgagaacagctgccacatccttactccctcctcagctctccaattttgcttccagccagtctataccttacttttcagccacaaagatattgctactcagagtgtgggctgttctcacatttcaatgcactcacctggagggcttaccacaacaaagatggccggacccctgcccagagtttcagattctttgttttctgccatggaattggccaaaatgtcagacatgacaaagcttcaccaagctgtggctgcaggagactacagcttagtgaagaagattttgaagaaaggtctctgtgacccaaactacaaagatgtagactggaatgaccggaccccacttcactgggctgcaatcaaagggcaaatggaggtgatacggctcctgatagaatatggagccaggccctgcctggttactagtgtgggctggaccccagctcattttgcagcagaagcaggccatctgaatatactcaaaactctccatgcattgcacgctgccatcgacgcccctgacttctttggagacacaccgaagaggattgcacagatctatggacagaaagcctgtgtggcatttctggaaaaggcagagcccgagtgccaggaccaccgttgcgctgcccagcagaaggggctgcctctggatgagcgtgatgaagactgggatgccaagaaaagggagctggagctgtctcttccttccctaaatcaaaacatgaataaaaagaataagaaaagtcgaggccccaccaggcccagcaataccaaggggaggagagtatgagaactcaaccttatgttttctggcaaggaactttccctggtgccagaaatgaggctgttaggcatggtggcctttccatgactttactcatagacccttacccacctggcttctgcccatggacctgtcattaggtgctgtccacatgggctgttgtttcctggctagcacctactgtgtacaataattaccgggaaaggacaaaacctgcttgcattttgtcatcagtggtttgcacagtcagcatcttttgacccctgccccccaacaataatagaatttcaggagacaaggaaactctggcatgaattaacttcatccctgataacgatcgagagataatgtaaaataatgaacatgtgattataggtctactttttcaactgtaaatttgggaaaattaaattcagatcagataattccaataaaaaattgcatccaaattgagatgcaaaatacacattagatttcaaacacttagtacaaaaatataaaatgtctccttaataatacttaatattgattccacattgaaatgataatattttggatattgcgttgaataagatatattaccaaaatg

SEQ ID NO: 3247 - protein, 278 aa, Homo sapiens
MQLFTIVPYYKLFEVENSCHILTPSSALQFCFQPVYTLLFSHKDIATQSVGCSHISMHSPGGLTTTKMAGPLPRVSDSLFSAMELAKMSDMTKLHQAVAAGDYSLVKKILKKGLCDPNYKDVDWNDRTPLHWAAIKGQMEVIRLLIEYGARPCLVTSVGWTPAHFAAEAGHLNILKTLHALHAAIDAPDFFGDTPKRIAQIYGQKACVAFLEKAEPECQDHRCAAQQKGLPLDERDEDWDAKKRELELSLPSLNQNMNKKNKKSRGPTRPSNTKGRRV

SEQ ID NO: 3248 - DNA, 2578 bp, Homo sapiens
aagggcaaatggaggtgatacggctcctgatagaatatggagccaggccctgcctggttactagtgtgggctggaccccagctcattttgcagcagaagcaggccatctgaatatactcaaaactctccatgcattgcacgctgccatcgacgcccctgacttctttggagacacaccgaagaggattgcacagatctatggacagaaagcctgtgtggcatttctggaaaagggaatagaattttgactctatataaatcaagaaacgcctgacttctttagtagtttgtatttgcaagatctaagatcatggtaaacattaggtcctaaaatcttggggaaggacaacatgtccttcctctgacttgttagcaatcaaattgagtaggttttaaatgtctgttaattggaagggtttgttatttcattttcagccaaaggagagaggtgcattttaagtatcagaattagatcagctttgagtttgtactaaatttggaatgtaatagattttcataaattacgtgtgcctttttggaaatgtcaactgtctttatgtctgcttgtaaaagtttcaaaatatgtttttctctcaaaaaggcaacgttatttcatttgcttgaatattatgataggaacgcttactgatattacttgatagttttatatagccttggaactttaacatataatatagcagtattaatcatgatagttgtacttctttgaaacattaaatttgaggaaactaatctatgtaattgtctccacttcttcacctctcacccacgcttcagacttcttccctgatccccatactgaatcagctgtcactcaagtcattagggagctcctcacgctaaatcaattgcctcttctcaattcacatcttacctccacttaattcggtatttaatattcctgaaactcttctcccttgttttatctgatgctattctcttttagtttttcttctacttctctgataattccttatgacttttaaaatgtgctttttctaagaataaatcttatgatatgttcttgcgtgccttttaaatgctgacattccttagggtcctgcccttggctgtcctctactgactctctctaagtaatcccagcccctccctagtgaccagggatcaacatgaaatatgatcccagcataactgaaatgcaggaggggtgcttgcctccaaatagtggggagtgctattaccaagaaaagtaggcagacagtgttgagccagcaaaaacaataaaggtcagtcacatcacgtgtgagtcatttctacttattatcagctcccactaagaacttccctgacagagcgtttagggagaagaatcctgaattaaggggggattaacctggatcttgaaagctagctggctaatgaaggagggagaaaaactgttgatttagagtgaaggcaccaacttggaaatgtgcataggttgtgtgtatatgtgagaaggtgagggatagtggagtgcagggatgagtggcctggctaggcagagcattcacactagagaggaatggagcataaggtcaggtgacggggtgggtgaccacagtgaactaggcaagcagaagagtgtgagctcatcaggggagtcacaagctgaaacagatgcattagcaatttatttgtgtagtagaggagttggcagtggtactgcgtgggattgaagactgctagactttaggcaaggggatcacttaaggaatttcttattgattcacattttgagtaagttggctcctgggctaggtgatgaagataaaggatataagagaacttcaaaagaagcctagaccatatgtgatcattttctgaatatcctagggaatgttgtgaaacaattcagcttttgattcagccccccaagtgataaacctctcatttagcaaatatttttgagttctactatgtgtatgtcattgagttagacactaaaaacaacctaaaataaaccagatacagtgctggacatcaagaaggttaactgtgtgggagacgaaataacttgtttacataaataacactaatacaagacagagagtgactaggcagaggaaagacatggtgtggtctgaagattgaaaggtcacttccagcttagggtgagggactagtgagtttgctgtcctttgaatgaactgtgcttttaataatggtttgcacttaaaatgctatttgccttccctataccattatctatcctcttaaattccatttgtcctcatattggttcaaaagtgacttttccaagtacctttaagcaagtcacatactcaccattggcctcatacaaaactgtatatgtgtgtatttcccattgtctatgtgtgtataatgctctatttatttatccatccatgtatccatttacaattatatgtatttttacagaatccatacatacgtataatacatatgtgattgtgagtgattctcattttgttccttatatgtttctgtacttttaaattttatacaaggaacacacatcacttttatgattatgaaaaataaaactaaaaataaacgaaaacagtctcgcaat

SEQ ID NO: 3249 - protein, 79 aa, Homo sapiens
MEVIRLLIEYGARPCLVTSVGWTPAHFAAEAGHLNILKTLHALHAAIDAPDFFGDTPKRIAQIYGQKACVAFLEKGIEF

SEQ ID NO: 3250 - DNA, 791 bp, Homo sapiens
gggaaggatctgctgcagaactctctccttggtgctggtatgatctccctgtttacagaagaggaaacttgagaagttaagcaacctgccaaaggtcttagagcctgaaagattagcccatcgaccaaatccagccaggctttacagccagcacaaacatcggtcaggtggcctagggcaagtcattcaacctctcagaacttcagtttgtgatgtcagttggggataatgatacttgccttgcagggaaggaagagacagctccagctcccttttcttggcatcccagtcttcatcacgctcatccagaggcagccccttctgctgggcagcgcaacggtggtcctggcactcgggctctgccctaggaaagaagagagagccttctgaacttggatcaggaggacctgttccagcctgggaatcggcctttattcacaggttctgcacaccgcagttcagttgagaaggaaggaggccaagtttgagcatttccaagcatacacttagggaaggtctcagacactaaagaaactacttggaggtggagaaaaattgtgggacccgagtgagatgttaacagactcaaagatagtcactcagcttgaagaaaatgctcctgattcttgaagtgctcacatttatagagcaacctgcagattattgcgagactgttttcgtttatttttagttttatttttcataatcataaaagtgatgtgtgttccttgtataaaatttaaaagtacagaaacatataaggaacaaaatgagaatcactcacaatcaca

SEQ ID NO: 3251 - protein, 53 aa, Homo sapiens
MILALQGRKRQLQLPFLGIPVFITLIQRQPLLLGSATVVLALGLCPRKEERAF

SEQ ID NO: 3252 - DNA, 438 bp, Homo sapiens
tgcagctgttctcttagttacattggcagattgtgtgttgtcaatgttgactattgcttagggaaccacagtatatcagtgcatggcctctgcctggccctttcgcacaattgtaactgtagcggtctgcaaagatatgaaaggaacatctgtgagatagatactgaagactgcaaatctgcgtcctgcaaaaatggaacaactagtacacatttaaggggatatttcttccgcaagtgtgtcccaggatttaaagaatttgtcagtgtggccatctcgtcttgtgttttctttttggggaggttttgactacgaattcaatcactttacctatggatcaacaggtacccagagtatgctcttctcatgacaaatggcaaaatcccaatgagtgaaaatatttgatgtctaataaagcctcagcttacaactggtaca

SEQ ID NO: 3253 - protein, 102 aa, Homo sapiens
CSCSLSYIGRLCVVNVDYCLGNHSISVHGLCLALSHNCNCSGLQRYERNICEIDTEDCKSASCKNGTTSTHLRGYFFRKCVPGFKEFVSVAISSCVFFLGRF

SEQ ID NO: 3254 - DNA, 5191 bp, Homo sapiens
agaaccctcgcgccctgcgtcgtgctggcacttttaccggccgggccttagagcgcagcctgtagccgggcgccatctttgacgctggcagtcttggttttctgctagtgctgctgctgctgggaggacgacggacggcagcggccaagcgagaagaaagacgtggcagcaagcgggagtcggggatagtgtcatcggttcgggtcccactactttggagcttgtctcaaactccacatacagaaagccaccgaccttattccggtatcctacacccattccccaccctcattacactcccacccctggccctcagcgtgggagtcaagagcaacagggacacttccgtactccttgtaggattggtgaaaccgtaatgacgaacacccctaaactcccataattggtgcggattcctgtggggaaggcctatactgttgacatcttccaggccatctcaaggttctggaccttgagaaggaggctgtggaactagagatagtgatgctttttaggatttggggatattccctgcccaaaaaattcctggaaaattgactagtattaagtctatggaagatggattttttttcatgatcctttgactctcaagttcatctttaaatgaactcttttttttgttttgtttttgaggagataactaaccctagctgtctccagtctgacaaaggttatttgaatggacttaatctcccagtagttgggagatgttttaaaaacacatgctgtgtttgaattgtggctgagaggttttcttggcaatgtgaggaggaaaattttttctgcttcattattattaattcatggattgagtgttggttcgacctacaggcgtaatagattggaactcagtgaagacacagacgttcctgttgagagcaatcagctaatgattacagtttaaagacaatttctgtgatcaagttgtcatttggaagattaaacccatttcacgaggacttggagcctggtccttgctttgaggaagcagtggcttgtttcaagaagccacttctgatctaagaatctacccagcatgcctaatcaaggagaagactgctatttttttttctattctacatgtaccaaaggtgacagctgcccattccgtcactgtgaagctgcactaggcaatgaaactgtttgcacattatggcaagaagggcgctgttttcgacgggtgtgcaggtttcggcacatggagattgataaaaaacgcagtgaaattccttgttattgggaaaatcagccaacaggatgtcaaaaattaaactgcgctttccatcacaatagaggacgatatgttgatggccttttcctacctccgagcaaaagtgtgttgcccactgtgcctgagtcaccagaagaggaagtgaaggctagccaactttcagttcagcagaacaaattgtctgtccagtccaatccttcccctcagctgcggagcgttatgaaagtagaaagttccgaaaatgttcctagccccaagcatccaccagttgtaattaatgctgcagatgatgatgaagatgatgatgatcagttttctgaggaaggtgatgaaaccaaaacacctaccctgcaaccaactcctgaagttcacaatggattacgagtgacttctgtccggaaacctgcagtcaatataaagcaaggtgaatgtttgcattttggaataaaaactcttgaggaaattaagtcaaagaaaatgaaggaaaaatctgaggagcaaggtgagggttcttcaggagtttccagtcttttactccaccctgagcctgttccaggtcctgaaaaagaaaatgtcaggactgtggtgaggacagtaactctctccaccaaacaaggagaagaacccttggttagattgggccttactgagacactggggaaacgaaaattttcgacaggcggtgacagtgatcctccattaaagcgcagcctggcacagaggctagggaagaaagttgaagctccagaaactaacactgacgaaacaccaaagaaagctcaagtttccaagtctcttaaggagcgattaggcatgtcagctgatccaaataatgaggacgcaacagataaagttaataaagttggtgagatccatgtgaagacattagaagaaatgcttcttgaaagagccagtcagaaacatggggaatcgcaaactaaactcaagacagaaggaccttcaaaaactgatgattctacttcaggagcaagaagctcctccactatccgtatcaaaaccttctctgaggtcctggctgaagaagaacataggcagcaggaagcagagagacaaaaaagcaaaaaggatacaacttgcatcaagctaaagactgatagtgaaattaaaaaaacagtagttttgccacccattgttgccagcaaaggacaatcagaggagcctgcaggtaaaacaaagtccatgcaggaggtgcacatgaagacggtggaagaaattaaactggagaaggcactgagggtgcagcagagctctgagagcagcaccagctccccgtctcaacatgaggccactccaggggcaaggttgctactgcgaatcaccaaaagaacatggaggaaagaagagaagaaacttcaggaaggaaatgaagttgattttctgagccgtgttagaatggaagctacagaggcttcagttgagaccacaggagttgacatcactaaaattcaagtcaagagatgtgagatcatgagagagacgcgcatgcagaaacagcaggagagggaaaaatcagtcttgacacctcttcagggagatgtagcctcttgcaatacccaagtggcagagaaaccagtgctcactgctgtgccaggaatcacatggcacctgaccaagcagcttcccacaaagtcatcccagaaggtggaggtagaaacctcagggattgcagactcattattgaatgtgaaatggtcagcacagaccttggaaaaaaggggtgaagctaaacccacagtgaacgtgaagcaatctgtggttaaagttgtgtcatcccccaaattggccccaaaacgtaaggcagtggagatgcaccctgctgtcactgccgctgtgaagccactcagctccagcagcgtcctacaggaacccccagccaaaaaggcagctgtggatgctgttgtcctgcttgtctctgaggacaaatcagtcactgtgcctgaaacagaaaatcctagagacagtcttgtgctgcctctaacccagtcctcttcagattcctcacccccggaggtgtctggcccttcctcatcccaaatgagcatgaaaactcgccgactcagctctgcctcaacaggaaagcccccactctctgtggaggatgattttgagaaactaacatgggagatttcaggaggcaaattggaagctgagattgacctggatcctgggaaagatgaagatgaccttccgcttgagctatgagaaatgattgatagctgaaggtggtagtgaggacactttaaaaaaaaatcgccaaaaaactggacttagtttcatctattgtaacatttacctgagatgatcatttctttagtctagaatttgccccaaatcagaagtatacctctgaattatctgtatgtgtcctggattccttggggtcagatttttaaagttactttataaccattttgtccatttgatgccattgtttatcatcttttgagaaaaaagttctgtcatacccttctctccacaaaaaagagactgagagggagatcaagtgaaagggtgcaagcaaacttagtgactccttgaggtgtttgtcagttttggcttttttctcctttgttgtattctttatgtattgtcttgatgtacttaatattacctgagtttgaaatggatgaagacagctgctaccattaaggaccaaattttatgctaccactaaacaaaaatacccactcagtctgtgttagattgtatgtctttttaaaggtatttagagattcaactaagctttaaagagggctgagcagctcaggaagcctgtaatgtgggcataactctttggacctgatcttgatgcttctgctgctctgttggcctctgaagagcaatatctaatttattattactgtaattttttaaaaggctttaaagtgcctcaggggtcccctgaaactaattttctatttctgggattccctggattcattatatgagatggtgacatgattagaggaattcttttttagtatgaaaattgtcccttttcttcttcagtacttgcctccttgctggcattgaattaacacagggacaaaatatggttaattttttatttctaattctcccaacaaacccctgttgcccagtatttatgtggtggcctttaaccacctgagggaaaaaatgagcttattcaagctgccaatatttatctatgggctgtagcagtacactgaattgtactgtgccagggatattgagatgctctgggggtatattgtatacctgccagttttcttcatttctgaattgagttttcttttcttgatgttggtttccttcatatcacctcaaggtttagatttgtgaaggaataagcatgatggaaataatagtcttgaaaggagatatgttgtatataatcaggaggaagaggaaggaaggacttacccattttgatattttgctgtaggtggccagttttgtttctcatagggaaatctgacccccacctgtcatgttggctcctaaggaactgctgttgtaagcggctcatcaagagttgaacttcacgtagccttgttgggaatatggaaaaggaagaaagccacaggactgcccattcagtcttgttaagattgggatgattctgcacaagcaaaaatgacttgaaatttatgtatcgacacacctctaccaatccatcttcagctgactgaatgttgtatgatagcccttctccaaagcaggggtagaatgttcaggtttcaccacggattttctacttatttcgcttttggaatcagcttacagattccaggtcccttttgtagatattctttattcttttgcttttttaaaaaataaactggtattagtcaatgtttcgtgttccgcattatttgaaccatttgcccttacagaaagagaaatacttgtttgtgttttaaataaaactgatgt

SEQ ID NO: 3255 - protein, 805 aa, Homo sapiens; identical to SEQ ID NO: 360

SEQ ID NO: 3256 - DNA, 4583 bp, Homo sapiens
gcacttttaccggccgggccttagagcgcagcctgtagccgggcgccatctttgacgctggcagtcttggttttctgctagtgctgctgctgctgggaggacgacggacggcagcggccaagcgagaagaaagacgtggcagcaagcgggagtcggggatagtgtcatcggttcggtgatgctttttaggatttggggatattccctgcccaaaaaattcctggaaaattgactagtattaagtgcgtaatagattggaactcagtgaagacacagacgttcctgttgagagcaatcagctaatgattacagtttaaagacaatttctgtgatcaagttgtcatttggaagattaaacccatttcacgaggacttggagcctggtccttgctttgaggaagcagtggcttgtttcaagaagccacttctgatctaagaatctacccagcatgcctaatcaaggagaagactgctatttttttttctattctacatgtaccaaaggtgacagctgcccattccgtcactgtgaagctgcactaggcaatgaaactgtttgcacattatggcaagaagggcgctgttttcgacgggtgtgcaggtttcggcacatggagattgataaaaaacgcagtgaaattccttgttattgggaaaatcagccaacaggatgtcaaaaattaaactgcgctttccatcacaatagaggacgatatgttgatggccttttcctacctccgagcaaaagtgtgttgcccactgtgcctgagtcaccagaagaggaagtgaaggctagccaactttcagttcagcagaacaaattgtctgtccagtccaatccttcccctcagctgcggagcgttatgaaagtagaaagttccgaaaatgttcctagccccaagcatccaccagttgtaattaatgctgcagatgatgatgaagatgatgatgatcagttttctgaggaaggtgatgaaaccaaaacacctaccctgcaaccaactcctgaagttcacaatggattacgagtgacttctgtccggaaacctgcagtcaatataaagcaaggtgaatgtttgcattttggaataaaaactcttgaggaaattaagtcaaagaaaatgaaggaaaaatctgaggagcaaggtgagggttcttcaggagtttccagtcttttactccaccctgagcctgttccaggtcctgaaaaagaaaatgtcaggactgtggtgaggacagtaactctctccaccaaacaaggagaagaacccttggttagattgggccttactgagacactggggaaacgaaaattttcgacaggcggtgacagtgatcctccattaaagcgcagcctggcacagaggctagggaagaaagttgaagctccagaaactaacactgacgaaacaccaaagaaagctcaagtttccaagtctcttaaggagcgattaggcatgtcagctgatccaaataatgaggacgcaacagataaagttaataaagttggtgagatccatgtgaagacattagaagaaatgcttcttgaaagagccagtcagaaacatggggaatcgcaaactaaactcaagacagaaggaccttcaaaaactgatgattctacttcaggagcaagaagctcctccactatccgtatcaaaaccttctctgaggtcctggctgaagaagaacataggcagcaggaagcagagagacaaaaaagcaaaaaggatacaacttgcatcaagctaaagactgatagtgaaattaaaaaaacagtagttttgccacccattgttgccagcaaaggacaatcagaggagcctgcaggtaaaacaaagtccatgcaggaggtgcacatgaagacggtggaagaaattaaactggagaaggcactgagggtgcagcagagctctgagagcagcaccagctccccgtctcaacatgaggccactccaggggcaaggttgctactgcgaatcaccaaaagaacatggaggaaagaagagaagaaacttcaggaaggaaatgaagttgattttctgagccgtgttagaatggaagctacagaggcttcagttgagaccacaggagttgacatcactaaaattcaagtcaagagatgtgagatcatgagagagacgcgcatgcagaaacagcaggagagggaaaaatcagtcttgacacctcttcagggagatgtagcctcttgcaatacccaagtggcagagaaaccagtgctcactgctgtgccaggaatcacatggcacctgaccaagcagcttcccacaaagtcatcccagaaggtggaggtagaaacctcagggattgcagactcattattgaatgtgaaatggtcagcacagaccttggaaaaaaggggtgaagctaaacccacagtgaacgtgaagcaatctgtggttaaagttgtgtcatcccccaaattggccccaaaacgtaaggcagtggagatgcaccctgctgtcactgccgctgtgaagccactcagctccagcagcgtcctacaggaacccccagccaaaaaggcagctgtggatgctgttgtcctgcttgtctctgaggacaaatcagtcactgtgcctgaaacagaaaatcctagagacagtcttgtgctgcctctaacccagtcctcttcagattcctcacccccggaggtgtctggcccttcctcatcccaaatgagcatgaaaactcgccgactcagctctgcctcaacaggaaagcccccactctctgtggaggatgattttgagaaactaacatgggagatttcaggaggcaaattggaagctgagattgacctggatcctgggaaagatgaagatgaccttccgcttgagctatgagaaatgattgatagctgaaggtggtagtgaggacactttaaaaaaaaatcgccaaaaaactggacttagtttcatctattgtaacatttacctgagatgatcatttctttagtctagaatttgccccaaatcagaagtatacctctgaattatctgtatgtgtcctggattccttggggtcagatttttaaagttactttataaccattttgtccatttgatgccattgtttatcatcttttgagaaaaaagttctgtcatacccttctctccacaaaaaagagactgagagggagatcaagtgaaagggtgcaagcaaacttagtgactccttgaggtgtttgtcagttttggcttttttctcctttgttgtattctttatgtattgtcttgatgtacttaatattacctgagtttgaaatggatgaagacagctgctaccattaaggaccaaattttatgctaccactaaacaaaaatacccactcagtctgtgttagattgtatgtctttttaaaggtatttagagattcaactaagctttaaagagggctgagcagctcaggaagcctgtaatgtgggcataactctttggacctgatcttgatgcttctgctgctctgttggcctctgaagagcaatatctaatttattattactgtaattttttaaaaggctttaaagtgcctcaggggtcccctgaaactaattttctatttctgggattccctggattcattatatgagatggtgacatgattagaggaattcttttttagtatgaaaattgtcccttttcttcttcagtacttgcctccttgctggcattgaattaacacagggacaaaatatggttaattttttatttctaattctcccaacaaacccctgttgcccagtatttatgtggtggcctttaaccacctgagggaaaaaatgagcttattcaagctgccaatatttatctatgggctgtagcagtacactgaattgtactgtgccagggatattgagatgctctgggggtatattgtatacctgccagttttcttcatttctgaattgagttttcttttcttgatgttggtttccttcatatcacctcaaggtttagatttgtgaaggaataagcatgatggaaataatagtcttgaaaggagatatgttgtatataatcaggaggaagaggaaggaaggacttacccattttgatattttgctgtaggtggccagttttgtttctcatagggaaatctgacccccacctgtcatgttggctcctaaggaactgctgttgtaagcggctcatcaagagttgaacttcacgtagccttgttgggaatatggaaaaggaagaaagccacaggactgcccattcagtcttgttaagattgggatgattctgcacaagcaaaaatgacttgaaatttatgtatcgacacacctctaccaatccatcttcagctgactgaatgttgtatgatagcccttctccaaagcaggggtagaatgttcaggtttcaccacggattttctacttatttcgcttttggaatcagcttacagattccaggtcccttttgtagatattctttattcttttgcttttttaaaaaataaactggtattagtcaatgtttcgtgttccgcattatttgaaccatttgcccttacagaaagagaaatacttgtttgtgttttaaataaaactgatgt

SEQ ID NO: 3257 - protein, 805 aa, Homo sapiens; identical to SEQ ID NO: 360

SEQ ID NO: 3258 - DNA, 2032 bp, Homo sapiens
accggccgggccttagagcgcagcctgtagccgggcgccatctttgacgctggcagtcttggttttctgctagtgctgctgctgctgggaggacgacggacggcagcggccaagcgagaagaaagacgtggcagcaagcgggagtcggggatagtgtcatcggttcgggtcccactactttggagcttgtctcaaactccacatacagaaagccaccgaccttattccgattatattgttcagctatggaagatggattttttttcatgatcctttgactctcaagttcatctttaaatgaactcttttttttgttttgtttttgaggagataactaaccctagctgtctccagtctgacaaaggttatttgaatggacttaatctcccagtagttgggagatgttttaaaaacacatgctgtgtttgaattgtggctgagaggttttcttggcaatgtgaggaggaaaattttttctgcttcattattattaattcatggattgagtgttggttcgacctacaggcgtaatagattggaactcagtgaagacacagacgttcctgttgagagcaatcagctaatgattacagtttaaagacaatttctgtgatcaagttgtcatttggaagattaaacccatttcacgaggacttggagcctggtccttgctttgaggaagcagtggcttgtttcaagaagccacttctgatctaagaatctacccagcatgcctaatcaaggagaagactgctatttttttttctattctacatgtaccaaaggtgacagctgcccattccgtcactgtgaagctgcactaggcaatgaaactgtttgcacattatggcaagaagggcgctgttttcgacgggtgtgcaggtttcggcacatggagattgataaaaaacgcagtgaaattccttgttattgggaaaatcagccaacaggatgtcaaaaattaaactgcgctttccatcacaatagaggacgatatgttgatggccttttcctacctccgagcaaaagtgtgttgcccactgtgcctgagtcaccagaagaggaagtgaaggctagccaactttcagttcagcagaacaaattgtctgtccagtccaatccttcccctcagctgcggagcgttatgaaagtagaaagttccgaaaatgttcctagccccaagcatccaccagttgtaattaatgctgcagatgatgatgaagatgatgatgatcagttttctgaggaaggtgatgaaaccaaaacacctaccctgcaaccaactcctgaagttcacaatggattacgagtgacttctgtccggaaacctgcagtcaatataaagcaaggtgaatgtttgcattttggaataaaaactcttgaggaaattaagtcaaagaaaatgaaggaaaaatctgaggagcaaggtgagggttcttcaggagtttccagtcttttactccaccctgagcctgttccaggtcctgaaaaagaaaatgtcaggactgtggtgaggacagtaactctctccaccaaacaaggagaagaacccttggttagattgggccttactgagacactggggaaacgaaaattttcgacaggcggtgacagtgatcctccattaaagcgcagcctggcacagaggctagggaagaaagttgaagctccagaaactaacactgacgaaacaccaaagaaagctcaagtttccaagtctcttaaggagcgattaggcatgtcagctgatccaaataatgaggacgcaacagataaagttaataaagttggtgagatccatgtgaagacattagaagaaatgcttcttgaaagagccagtcagaaacatggggaatcgcaaactaaactcaagacagaaggaccttcaaaaactgatgattctacttcaggagcaagaagctcctccactatccgtatcaaaaccttctctgaggtcctggctgaagaagaacataggcagcaggaagcagagagacaaaaaagcaaaaaggatacaacttgcatcaagcta

SEQ ID NO: 3259 - protein, 433 aa, Homo sapiens
MPNQGEDCYFFFYSTCTKGDSCPFRHCEAALGNETVCTLWQEGRCFRRVCRFRHMEIDKKRSEIPCYWENQPTGCQKLNCAFHHNRGRYVDGLFLPPSKSVLPTVPESPEEEVKASQLSVQQNKLSVQSNPSPQLRSVMKVESSENVPSPKHPPVVINAADDDEDDDDQFSEEGDETKTPTLQPTPEVHNGLRVTSVRKPAVNIKQGECLHFGIKTLEEIKSKKMKEKSEEQGEGSSGVSSLLLHPEPVPGPEKENVRTVVRTVTLSTKQGEEPLVRLGLTETLGKRKFSTGGDSDPPLKRSLAQRLGKKVEAPETNTDETPKKAQVSKSLKERLGMSADPNNEDATDKVNKVGEIHVKTLEEMLLERASQKHGESQTKLKTEGPSKTDDSTSGARSSSTIRIKTFSEVLAEEEHRQQEAERQKSKKDTTCIK

SEQ ID NO: 3260 - DNA, 4763 bp, Homo sapiens
cggccgggccttagagcgcagcctgtagccgggcgccatctttgacgctggcagtcttggttttctgctagtgctgctgctgctgggaggacgacggacggcagcggccaagcgagaagaaagacgtggcagcaagcgggagtcggggatagtgtcatcggttcgggtcccactactttggagcttgtctcaaactccacatacagaaagccaccgaccttattccggtatcctacacccattccccaccctcattacactcccacccctggccctcagcgtgggagtcaagagcaacagggacacttccgtactccttgtaggattggtgaaaccgtaatgacgaacacccctaaactcccataattggatttggggatattccctgcccaaaaaattcctggaaaattgactagtattaagtgcgtaatagattggaactcagtgaagacacagacgttcctgttgagagcaatcagctaatgattacagtttaaagacaatttctgtgatcaagttgtcatttggaagattaaacccatttcacgaggacttggagcctggtccttgctttgaggaagcagtggcttgtttcaagaagccacttctgatctaagaatctacccagcatgcctaatcaaggagaagactgctatttttttttctattctacatgtaccaaaggtgacagctgcccattccgtcactgtgaagctgcactaggcaatgaaactgtttgcacattatggcaagaagggcgctgttttcgacgggtgtgcaggtttcggcacatggagattgataaaaaacgcagtgaaattccttgttattgggaaaatcagccaacaggatgtcaaaaattaaactgcgctttccatcacaatagaggacgatatgttgatggccttttcctacctccgagcaaaagtgtgttgcccactgtgcctgagtcaccagaagaggaagtgaaggctagccaactttcagttcagcagaacaaattgtctgtccagtccaatccttcccctcagctgcggagcgttatgaaagtagaaagttccgaaaatgttcctagccccaagcatccaccagttgtaattaatgctgcagatgatgatgaagatgatgatgatcagttttctgaggaaggtgatgaaaccaaaacacctaccctgcaaccaactcctgaagttcacaatggattacgagtgacttctgtccggaaacctgcagtcaatataaagcaaggtgaatgtttgcattttggaataaaaactcttgaggaaattaagtcaaagaaaatgaaggaaaaatctgaggagcaaggtgagggttcttcaggagtttccagtcttttactccaccctgagcctgttccaggtcctgaaaaagaaaatgtcaggactgtggtgaggacagtaactctctccaccaaacaaggagaagaacccttggttagattgggccttactgagacactggggaaacgaaaattttcgacaggcggtgacagtgatcctccattaaagcgcagcctggcacagaggctagggaagaaagttgaagctccagaaactaacactgacgaaacaccaaagaaagctcaagtttccaagtctcttaaggagcgattaggcatgtcagctgatccaaataatgaggacgcaacagataaagttaataaagttggtgagatccatgtgaagacattagaagaaatgcttcttgaaagagccagtcagaaacatggggaatcgcaaactaaactcaagacagaaggaccttcaaaaactgatgattctacttcaggagcaagaagctcctccactatccgtatcaaaaccttctctgaggtcctggctgaagaagaacataggcagcaggaagcagagagacaaaaaagcaaaaaggatacaacttgcatcaagctaaagactgatagtgaaattaaaaaaacagtagttttgccacccattgttgccagcaaaggacaatcagaggagcctgcaggtaaaacaaagtccatgcaggaggtgcacatgaagacggtggaagaaattaaactggagaaggcactgagggtgcagcagagctctgagagcagcaccagctccccgtctcaacatgaggccactccaggggcaaggttgctactgcgaatcaccaaaagaacatggaggaaagaagagaagaaacttcaggaaggaaatgaagttgattttctgagccgtgttagaatggaagctacagaggcttcagttgagaccacaggagttgacatcactaaaattcaagtcaagagatgtgagatcatgagagagacgcgcatgcagaaacagcaggagagggaaaaatcagtcttgacacctcttcagggagatgtagcctcttgcaatacccaagtggcagagaaaccagtgctcactgctgtgccaggaatcacatggcacctgaccaagcagcttcccacaaagtcatcccagaaggtggaggtagaaacctcagggattgcagactcattattgaatgtgaaatggtcagcacagaccttggaaaaaaggggtgaagctaaacccacagtgaacgtgaagcaatctgtggttaaagttgtgtcatcccccaaattggccccaaaacgtaaggcagtggagatgcaccctgctgtcactgccgctgtgaagccactcagctccagcagcgtcctacaggaacccccagccaaaaaggcagctgtggatgctgttgtcctgcttgtctctgaggacaaatcagtcactgtgcctgaaacagaaaatcctagagacagtcttgtgctgcctctaacccagtcctcttcagattcctcacccccggaggtgtctggcccttcctcatcccaaatgagcatgaaaactcgccgactcagctctgcctcaacaggaaagcccccactctctgtggaggatgattttgagaaactaacatgggagatttcaggaggcaaattggaagctgagattgacctggatcctgggaaagatgaagatgaccttccgcttgagctatgagaaatgattgatagctgaaggtggtagtgaggacactttaaaaaaaaatcgccaaaaaactggacttagtttcatctattgtaacatttacctgagatgatcatttctttagtctagaatttgccccaaatcagaagtatacctctgaattatctgtatgtgtcctggattccttggggtcagatttttaaagttactttataaccattttgtccatttgatgccattgtttatcatcttttgagaaaaaagttctgtcatacccttctctccacaaaaaagagactgagagggagatcaagtgaaagggtgcaagcaaacttagtgactccttgaggtgtttgtcagttttggcttttttctcctttgttgtattctttatgtattgtcttgatgtacttaatattacctgagtttgaaatggatgaagacagctgctaccattaaggaccaaattttatgctaccactaaacaaaaatacccactcagtctgtgttagattgtatgtctttttaaaggtatttagagattcaactaagctttaaagagggctgagcagctcaggaagcctgtaatgtgggcataactctttggacctgatcttgatgcttctgctgctctgttggcctctgaagagcaatatctaatttattattactgtaattttttaaaaggctttaaagtgcctcaggggtcccctgaaactaattttctatttctgggattccctggattcattatatgagatggtgacatgattagaggaattcttttttagtatgaaaattgtcccttttcttcttcagtacttgcctccttgctggcattgaattaacacagggacaaaatatggttaattttttatttctaattctcccaacaaacccctgttgcccagtatttatgtggtggcctttaaccacctgagggaaaaaatgagcttattcaagctgccaatatttatctatgggctgtagcagtacactgaattgtactgtgccagggatattgagatgctctgggggtatattgtatacctgccagttttcttcatttctgaattgagttttcttttcttgatgttggtttccttcatatcacctcaaggtttagatttgtgaaggaataagcatgatggaaataatagtcttgaaaggagatatgttgtatataatcaggaggaagaggaaggaaggacttacccattttgatattttgctgtaggtggccagttttgtttctcatagggaaatctgacccccacctgtcatgttggctcctaaggaactgctgttgtaagcggctcatcaagagttgaacttcacgtagccttgttgggaatatggaaaaggaagaaagccacaggactgcccattcagtcttgttaagattgggatgattctgcacaagcaaaaatgacttgaaatttatgtatcgacacacctctaccaatccatcttcagctgactgaatgttgtatgatagcccttctccaaagcaggggtagaatgttcaggtttcaccacggattttctacttatttcgcttttggaatcagcttacagattccaggtcccttttgtagatattctttattcttttgcttttttaaaaaataaactggtattagtcaatgtttcgtgttccgcattatttgaaccatttgcccttacagaaagagaaatacttgtttgtgttttaaataaaactgatgt

SEQ ID NO: 3261 - protein, 805 aa, Homo sapiens; identical to SEQ ID NO: 360

SEQ ID NO: 3262 - DNA, 5045 bp, Homo sapiens
cggccgggccttagagcgcagcctgtagccgggcgccatctttgacgctggcagtcttggttttctgctagtgctgctgctgctgggaggacgacggacggcagcggccaagcgagaagaaagacgtggcagcaagcgggagtcggggatagtgtcatcggttcgggtcccactactttggagcttgtctcaaactccacatacagaaagccaccgaccttattccggtatcctacacccattccccaccctcattacactcccacccctggccctcagcgtgggagtcaagagcaacagggacacttccgtactccttgtaggattggtgaaaccgtaatgacgaacacccctaaactcccataattggatttggggatattccctgcccaaaaaattcctggaaaattgactagtattaagtctatggaagatggattttttttcatgatcctttgactctcaagttcatctttaaatgaactcttttttttgttttgtttttgaggagataactaaccctagctgtctccagtctgacaaaggttatttgaatggacttaatctcccagtagttgggagatgttttaaaaacacatgctgtgtttgaattgtggctgagaggttttcttggcaatgtgaggaggaaaattttttctgcttcattattattaattcatggattgagtgttggttcgacctacaggcgtaatagattggaactcagtgaagacacagacgttcctgttgagagcaatcagctaatgattacagtttaaagacaatttctgtgatcaagttgtcatttggaagattaaacccatttcacgaggacttggagcctggtccttgctttgaggaagcagtggcttgtttcaagaagccacttctgatctaagaatctacccagcatgcctaatcaaggagaagactgctatttttttttctattctacatgtaccaaaggtgacagctgcccattccgtcactgtgaagctgcactaggcaatgaaactgtttgcacattatggcaagaagggcgctgttttcgacgggtgtgcaggtttcggcacatggagattgataaaaaacgcagtgaaattccttgttattgggaaaatcagccaacaggatgtcaaaaattaaactgcgctttccatcacaatagaggacgatatgttgatggccttttcctacctccgagcaaaagtgtgttgcccactgtgcctgagtcaccagaagaggaagtgaaggctagccaactttcagttcagcagaacaaattgtctgtccagtccaatccttcccctcagctgcggagcgttatgaaagtagaaagttccgaaaatgttcctagccccaagcatccaccagttgtaattaatgctgcagatgatgatgaagatgatgatgatcagttttctgaggaaggtgatgaaaccaaaacacctaccctgcaaccaactcctgaagttcacaatggattacgagtgacttctgtccggaaacctgcagtcaatataaagcaaggtgaatgtttgcattttggaataaaaactcttgaggaaattaagtcaaagaaaatgaaggaaaaatctgaggagcaaggtgagggttcttcaggagtttccagtcttttactccaccctgagcctgttccaggtcctgaaaaagaaaatgtcaggactgtggtgaggacagtaactctctccaccaaacaaggagaagaacccttggttagattgggccttactgagacactggggaaacgaaaattttcgacaggcggtgacagtgatcctccattaaagcgcagcctggcacagaggctagggaagaaagttgaagctccagaaactaacactgacgaaacaccaaagaaagctcaagtttccaagtctcttaaggagcgattaggcatgtcagctgatccaaataatgaggacgcaacagataaagttaataaagttggtgagatccatgtgaagacattagaagaaatgcttcttgaaagagccagtcagaaacatggggaatcgcaaactaaactcaagacagaaggaccttcaaaaactgatgattctacttcaggagcaagaagctcctccactatccgtatcaaaaccttctctgaggtcctggctgaagaagaacataggcagcaggaagcagagagacaaaaaagcaaaaaggatacaacttgcatcaagctaaagactgatagtgaaattaaaaaaacagtagttttgccacccattgttgccagcaaaggacaatcagaggagcctgcaggtaaaacaaagtccatgcaggaggtgcacatgaagacggtggaagaaattaaactggagaaggcactgagggtgcagcagagctctgagagcagcaccagctccccgtctcaacatgaggccactccaggggcaaggttgctactgcgaatcaccaaaagaacatggaggaaagaagagaagaaacttcaggaaggaaatgaagttgattttctgagccgtgttagaatggaagctacagaggcttcagttgagaccacaggagttgacatcactaaaattcaagtcaagagatgtgagatcatgagagagacgcgcatgcagaaacagcaggagagggaaaaatcagtcttgacacctcttcagggagatgtagcctcttgcaatacccaagtggcagagaaaccagtgctcactgctgtgccaggaatcacatggcacctgaccaagcagcttcccacaaagtcatcccagaaggtggaggtagaaacctcagggattgcagactcattattgaatgtgaaatggtcagcacagaccttggaaaaaaggggtgaagctaaacccacagtgaacgtgaagcaatctgtggttaaagttgtgtcatcccccaaattggccccaaaacgtaaggcagtggagatgcaccctgctgtcactgccgctgtgaagccactcagctccagcagcgtcctacaggaacccccagccaaaaaggcagctgtggatgctgttgtcctgcttgtctctgaggacaaatcagtcactgtgcctgaaacagaaaatcctagagacagtcttgtgctgcctctaacccagtcctcttcagattcctcacccccggaggtgtctggcccttcctcatcccaaatgagcatgaaaactcgccgactcagctctgcctcaacaggaaagcccccactctctgtggaggatgattttgagaaactaacatgggagatttcaggaggcaaattggaagctgagattgacctggatcctgggaaagatgaagatgaccttccgcttgagctatgagaaatgattgatagctgaaggtggtagtgaggacactttaaaaaaaaatcgccaaaaaactggacttagtttcatctattgtaacatttacctgagatgatcatttctttagtctagaatttgccccaaatcagaagtatacctctgaattatctgtatgtgtcctggattccttggggtcagatttttaaagttactttataaccattttgtccatttgatgccattgtttatcatcttttgagaaaaaagttctgtcatacccttctctccacaaaaaagagactgagagggagatcaagtgaaagggtgcaagcaaacttagtgactccttgaggtgtttgtcagttttggcttttttctcctttgttgtattctttatgtattgtcttgatgtacttaatattacctgagtttgaaatggatgaagacagctgctaccattaaggaccaaattttatgctaccactaaacaaaaatacccactcagtctgtgttagattgtatgtctttttaaaggtatttagagattcaactaagctttaaagagggctgagcagctcaggaagcctgtaatgtgggcataactctttggacctgatcttgatgcttctgctgctctgttggcctctgaagagcaatatctaatttattattactgtaattttttaaaaggctttaaagtgcctcaggggtcccctgaaactaattttctatttctgggattccctggattcattatatgagatggtgacatgattagaggaattcttttttagtatgaaaattgtcccttttcttcttcagtacttgcctccttgctggcattgaattaacacagggacaaaatatggttaattttttatttctaattctcccaacaaacccctgttgcccagtatttatgtggtggcctttaaccacctgagggaaaaaatgagcttattcaagctgccaatatttatctatgggctgtagcagtacactgaattgtactgtgccagggatattgagatgctctgggggtatattgtatacctgccagttttcttcatttctgaattgagttttcttttcttgatgttggtttccttcatatcacctcaaggtttagatttgtgaaggaataagcatgatggaaataatagtcttgaaaggagatatgttgtatataatcaggaggaagaggaaggaaggacttacccattttgatattttgctgtaggtggccagttttgtttctcatagggaaatctgacccccacctgtcatgttggctcctaaggaactgctgttgtaagcggctcatcaagagttgaacttcacgtagccttgttgggaatatggaaaaggaagaaagccacaggactgcccattcagtcttgttaagattgggatgattctgcacaagcaaaaatgacttgaaatttatgtatcgacacacctctaccaatccatcttcagctgactgaatgttgtatgatagcccttctccaaagcaggggtagaatgttcaggtttcaccacggattttctacttatttcgcttttggaatcagcttacagattccaggtcccttttgtagatattctttattcttttgcttttttaaaaaataaactggtattagtcaatgtttcgtgttccgcattatttgaaccatttgcccttacagaaagagaaatacttgtttgtgttttaaataaaactgatgt

SEQ ID NO: 3263 - protein, 805 aa, Homo sapiens; identical to SEQ ID NO: 360

SEQ ID NO: 3264 - DNA, 1614 bp, Homo sapiens
gtcttggttttctgctagtgctgctgctgctgggaggacgacggacggcagcggccaagcgagaagaaagacgtggcagcaagcgggagtcggggatagtgtcatcggcgtaatagattggaactcagtgaagacacagacgttcctgttgagagcaatcagctaatgattacagtttaaagacaatttctgtgatcaagttgtcatttggaagattaaacccatttcacgaggacttggagcctggtccttgctttgaggaagcagtggcttgtttcaagaagccacttctgatctaagaatctacccagcatgcctaatcaaggagaagactgctatttttttttctattctacatgtaccaaaggtgacagctgcccattccgtcactgtgaagctgcactaggcaatgaaactgtttgcacattatggcaagaagggcgctgttttcgacgggtgtgcaggtttcggcacatggagattgataaaaaacgcagtgaaattccttgttattgggaaaatcagccaacaggatgtcaaaaattaaactgcgctttccatcacaatagaggacgatatgttgatggccttttcctacctccgagcaaaagtgtgttgcccactgtgcctgagtcaccagaagaggaagtgaaggctagccaactttcagttcagcagaacaaattgtctgtccagtccaatccttcccctcagctgcggagcgttatgaaagtagaaagttccgaaaatgttcctagccccaagcatccaccagttgtaattaatgctgcagatgatgatgaagatgatgatgatcagttttctgaggaaggtgatgaaaccaaaacacctaccctgcaaccaactcctgaagttcacaatggattacgagtgacttctgtccggaaacctgcagtcaatataaagcaaggtgaatgtttgcattttggaataaaaactcttgaggaaattaagtcaaagaaaatgaaggaaaaatctgaggagcaaggtgagggttcttcaggagtttccagtcttttactccaccctgagcctgttccaggtcctgaaaaagaaaatgtcaggactgtggtgaggacagtaactctctccaccaaacaaggagaagaacccttggttagattgggccttactgagacactggggaaacgaaaattttcgacaggcggtgacagtgatcctccattaaagcgcagcctggcacagaggctagggaagaaagttgaagctccagaaactaacactgacgaaacaccaaagaaagctcaagtttccaagtctcttaaggagcgattaggcatgtcagctgatccaaataatgaggacgcaacagataaagttaataaagttggtgagatccatgtgaagacattagaagaaatgcttcttgaaagagccagtcagaaacatggggaatcgcaaactaaactcaagacagaaggaccttcaaaaactgatgattctacttcaggagcaagaagctcctccactatccgtatcaaaaccttctctgaggtcctggctgaagaagaacataggcagcaggaagcagagagacaaaaaagcaaaaaggatacaacttgcatcaagcta

SEQ ID NO: 3265 - protein, 433 aa, Homo sapiens; identical to SEQ ID NO: 3259

SEQ ID NO: 3266 - DNA, 1556 bp, Homo sapiens
tagtgctgctgctgctgggaggacgacggacggcagcggccaagcgagaagaaagacgtggcagcaagcgggagtcggggatagtgtcatcggttcgggtcccactactttggagagtttaaagacaatttctgtgatcaagttgtcatttggaagattaaacccatttcacgaggacttggagcctggtccttgctttgaggaagcagtggcttgtttcaagaagccacttctgatctaagaatctacccagcatgcctaatcaaggagaagactgctatttttttttctattctacatgtaccaaaggtgacagctgcccattccgtcactgtgaagctgcactaggcaatgaaactgtttgcacattatggcaagaagggcgctgttttcgacgggtgtgcaggtttcggcacatggagattgataaaaaacgcagtgaaattccttgttattgggaaaatcagccaacaggatgtcaaaaattaaactgcgctttccatcacaatagaggacgatatgttgatggccttttcctacctccgagcaaaagtgtgttgcccactgtgcctgagtcaccagaagaggaagtgaaggctagccaactttcagttcagcagaacaaattgtctgtccagtccaatccttcccctcagctgcggagcgttatgaaagtagaaagttccgaaaatgttcctagccccaagcatccaccagttgtaattaatgctgcagatgatgatgaagatgatgatgatcagttttctgaggaaggtgatgaaaccaaaacacctaccctgcaaccaactcctgaagttcacaatggattacgagtgacttctgtccggaaacctgcagtcaatataaagcaaggtgaatgtttgcattttggaataaaaactcttgaggaaattaagtcaaagaaaatgaaggaaaaatctgaggagcaaggtgagggttcttcaggagtttccagtcttttactccaccctgagcctgttccaggtcctgaaaaagaaaatgtcaggactgtggtgaggacagtaactctctccaccaaacaaggagaagaacccttggttagattgggccttactgagacactggggaaacgaaaattttcgacaggcggtgacagtgatcctccattaaagcgcagcctggcacagaggctagggaagaaagttgaagctccagaaactaacactgacgaaacaccaaagaaagctcaagtttccaagtctcttaaggagcgattaggcatgtcagctgatccaaataatgaggacgcaacagataaagttaataaagttggtgagatccatgtgaagacattagaagaaatgcttcttgaaagagccagtcagaaacatggggaatcgcaaactaaactcaagacagaaggaccttcaaaaactgatgattctacttcaggagcaagaagctcctccactatccgtatcaaaaccttctctgaggtcctggctgaagaagaacataggcagcaggaagcagagagacaaaaaagcaaaaaggatacaacttgcatcaagcta

SEQ ID NO: 3267 - protein, 433 aa, Homo sapiens; identical to SEQ ID NO: 3259

SEQ ID NO: 3268 - DNA, 1517 bp, Homo sapiens
ttatattgttcagctatggaagatggattttttttcatgatcctttgactctcaagttcatctttaaatgaactcttttttttgttttgtttttgaggagataactaaccctagctgtctccagtctgacaaaggttatttgaatggacttaatctcccagtagttgggagatgttttaaaaacacatgctgtgtttgaattgtggctgagaggttttcttggcaatgtgaggaggaaaattttttctgcttcattattattaattcatggattgagtgttggttcgacctacaggcgtaatagattggaactcagtgaagacacagacgttcctgttgagagcaatcagctaatgattacagtttaaagacaatttctgtgatcaagttgtcatttggaagattaaacccatttcacgaggacttggagcctggtccttgctttgaggaagcagtggcttgtttcaagaagccacttctgatctaagaatctacccagcatgcctaatcaaggagaagactgctatttttttttctattctacatgtaccaaaggtgacagctgcccattccgtcactgtgaagctgcactaggcaatgaaactgtttgcacattatggcaagaagggcgctgttttcgacgggtgtgcaggtttcggcacatggagattgataaaaaacgcagtgaaattccttgttattgggaaaatcagccaacaggatgtcaaaaattaaactgcgctttccatcacaatagaggacgatatgttgatggccttttcctacctccgagcaaaagtgtgttgcccactgtgcctgagtcaccagaagaggaagtgaaggctagccaactttcagttcagcagaacaaattgtctgtccagtccaatccttcccctcagctgcggagcgttatgaaagtagaaagttccgaaaatgttcctagccccaagcatccaccagttgtaattaatgctgcagatgatgatgaagatgatgatgatcagttttctgaggaaggtgatgaaaccaaaacacctaccctgcaaccaactcctgaagttcacaatggattacgagtgacttctgtccggaaacctgcagtcaatataaagcaaggtgaatgtttgcattttggaataaaaactcttgaggaaattaagtcaaagaaaatgaaggaaaaatctgaggagcaaggaactgctgttgtaagcggctcatcaagagttgaacttcacgtagccttgttgggaatatggaaaaggaagaaagccacaggactgcccattcagtcttgttaagattgggatgattctgcacaagcaaaaatgacttgaaatttatgtatcgacacacctctaccaatccatcttcagctgactgaatgttgtatgatagcccttctccaaagcaggggtagaatgttcaggtttcaccacggattttctacttatttcgcttttggaatcagcttacagattccaggtcccttttgtagatattctttattcttttgc

SEQ ID NO: 3269 - protein, 266 aa, Homo sapiens
MPNQGEDCYFFFYSTCTKGDSCPFRHCEAALGNETVCTLWQEGRCFRRVCRFRHMEIDKKRSEIPCYWENQPTGCQKLNCAFHHNRGRYVDGLFLPPSKSVLPTVPESPEEEVKASQLSVQQNKLSVQSNPSPQLRSVMKVESSENVPSPKHPPVVINAADDDEDDDDQFSEEGDETKTPTLQPTPEVHNGLRVTSVRKPAVNIKQGECLHFGIKTLEEIKSKKMKEKSEEQGTAVVSGSSRVELHVALLGIWKRKKATGLPIQSC

SEQ ID NO: 3270 - DNA, 4121 bp, Homo sapiens
caacagcagttccttaggagccaacatgacaggtgggggtcagatttccctatgagaaacaaaactggccacctacagcaaaatatcaaaatgggtaagtccttccttcctcttcctcctgattatatacaacatatctcctttcaagactattatttccatcatgcttattccttcacaaatctaaaccttgaggtgatatgaaggaaaccaacatcaagaaaagaaaactcaattcagaaatgaagaaaactggcaggtatacaatatacccccagagcatctcaatatccctggcacagtacaattcagtgtactgctacagcccatagataaatattggcagcttgaataagctcattttttccctcaggtggttaaaggccaccacataaatactgggcaacaggggtttgttgggagaattagaaataaaaaattaaccatattttgtccctgtgttaattcaatgccagcaaggaggcaagtactgaagaagaaaagggacaattttcatactaaaaaagaattcctctaatcatgtcaccatctcatataatgaatccagggaatcccagaaatagaaaattagtttcaggggacccctgaggcactttaaagccttttaaaaaattacagtaataataaattagatattgctcttcagaggccaacagagcagcagaagcatcaagatcaggtccaaagagttatgcccacattacaggcttcctgagctgctcagccctctttaaagcttagttgaatctctaaatacctttaaaaagacatacaatctaacacagactgagtgggtatttttgtttagtggtagcataaaatttggtccttaatggtagcagctgtcttcatccatttcaaactcaggtaatattaagtacatcaagacaatacataaagaatacaacaaaggagaaaaaagccaaaactgacaaacacctcaaggagtcactaagtttgcttgcaccctttcacttgatctccctctcagtctcttttttgtggagagaagggtatgacagaacttttttctcaaaagatgataaacaatggcatcaaatggacaaaatggttataaagtaactttaaaaatctgaccccaaggaatccaggacacatacagataattcagaggtatacttctgatttggggcaaattctagactaaagaaatgatcatctcaggtaaatgttacaatagatgaaactaagtccagttttttggcgatttttttttaaagtgtcctcactaccaccttcagctatcaatcatttctcatagctcaagcggaaggtcatcttcatctttcccaggatccaggtcaatctcagcttccaatttgcctcctgaaatctcccatgttagtttctcaaaatcatcctccacagagagtgggggctttcctgttgaggcagagctgagtcggcgagttttcatgctcatttgggatgaggaagggccagacacctccgggggtgaggaatctgaagaggactgggttagaggcagcacaagactgtctctaggattttctgtttcaggcacagtgactgatttgtcctcagagacaagcaggacaacagcatccacagctgcctttttggctgggggttcctgtaggacgctgctggagctgagtggcttcacagcggcagtgacagcagggtgcatctccactgccttacgttttggggccaatttgggggatgacacaactttaaccacagattgcttcacgttcactgtgggtttagcttcaccccttttttccaaggtctgtgctgaccatttcacattcaataatgagtctgcaatccctgaggtttctacctccaccttctgggatgactttgtgggaagctgcttggtcaggtgccatgtgattcctggcacagcagtgagcactggtttctctgccacttgggtattgcaagaggctacatctccctgaagaggtgtcaagactgatttttccctctcctgctgtttctgcatgcgcgtctctctcatgatctcacatctcttgacttgaattttagtgatgtcaactcctgtggtctcaactgaagcctctgtagcttccattctaacacggctcagaaaatcaacttcatttccttcctgaagtttcttctcttctttcctccatgttcttttggtgattcgcagtagcaaccttgcccctggagtggcctcatgttgagacggggagctggtgctgctctcagagctctgctgcaccctcagtgccttctccagtttaatttcttccaccgtcttcatgtgcacctcctgcatggactttgttttacctgcaggctcctctgattgtcctttgctggcaacaatgggtggcaaaactactgtttttttaatttcactatcagtctttagcttgatgcaagttgtatcctttttgcttttttgtctctctgcttcctgctgcctatgttcttcttcagccaggacctcagagaaggttttgatacggatagtggaggagcttcttgctcctgaagtagaatcatcagtttttgaaggtccttctgtcttgagtttagtttgcgattccccatgtttctgactggctctttcaagaagcatttcttctaatgtcttcacatggatctcaccaactttattaactttatctgttgcgtcctcattatttggatcagctgacatgcctaatcgctccttaagagacttggaaacttgagctttctttggtgtttcgtcagtgttagtttctggagcttcaactttcttccctagcctctgtgccaggctgcgctttaatggaggatcactgtcaccgcctgtcgaaaattttcgtttccccagtgtctcagtaaggcccaatctaaccaagggttcttctccttgtttggtggagagagttactgtcctcaccacagtcctgacattttctttttcaggacctggaacaggctcagggtggagtaaaagactggaaactcctgaagaaccctcaccttgctcctcagatttttccttcattttctttgacttaatttcctcaagagtttttattccaaaatgcaaacattcaccttgctttatattgactgcaggtttccggacagaagtcactcgtaatccattgtgaacttcaggagttggttgcagggtaggtgttttggtttcatcaccttcctcagaaaactgatcatcatcatcttcatcatcatctgcagcattaattacaactggtggatgcttggggctaggaacattttcggaactttctactttcataacgctccgcagctgaggggaaggattggactggacagacaatttgttctgctgaactgaaagttggctagccttcacttcctcttctggtgactcaggcacagtgggcaacacacttttgctcggaggtaggaaaaggccatcaacatatcgtcctctattgtgatggaaagcgcagtttaatttttgacatcctgttggctgattttcccaataacaaggaatttcactgcgttttttatcaatctccatgtgccgaaacctgcacacccgtcgaaaacagcgcccttcttgccataatgtgcaaacagtttcattgcctagtgcagcttcacagtgacggaatgggcagctgtcacctttggtacatgtagaatagaaaaaaaaatagcagtcttctccttgattaggcatgctgggtagattcttagatcagaagtggcttcttgaaacaagccactgcttcctcaaagcaaggaccaggctccaagtcctcgtgaaatgggtttaatcttccaaatgacaacttgatcacagaaattgtctttaaactgtaatcattagctgattgctctcaacaggaacgtctgtgtcttcactgagttccaatctattacgcctgtaggtcgaaccaacactcaatccatgaattaataataatgaagcagaaaaaattttcctcctcacattgccaagaaaacctctcagccacaattcaaacacagcatgtgtttttaaaacatctcccaactactgggagattaagtccattcaaataacctttgtcagactggagacagctagggttagttatctcctc

SEQ ID NO: 3271 - protein, 171 aa, Homo sapiens
MLIWDEEGPDTSGGEESEEDWVRGSTRLSLGFSVSGTVTDLSSETSRTTASTAAFLAGGSCRTLLELSGFTAAVTAGCISTALRFGANLGDDTTLTTDCFTFTVGLASPLFSKVCADHFTFNNESAIPEVSTSTFWDDFVGSCLVRCHVIPGTAVSTGFSATWVLQEATSP

SEQ ID NO: 3272 - DNA, 5444 bp, Homo sapiens
agaaacaaagtgatacacgctaggcatgtccagacattaaccgtaatcagaagcctcctagggttgcaagcctccttggctaatggttgggctttgtgcctcactcttctcttacacctggggagtcaagtctggatcctctgctccatatttatttagcaaataaaacactgatctcaaacagcaacggaacctgtgtacttgaggtgttttttgaaaactaatcagaagaggaatgcttatctcccaagaaaattgaaaccatctgtaaaagaatcttggctgtgctgtgttttgattagattgaagcttggtgtaaagagaaaacacaaaagaccgcagaatatttacaacatttgaattcctgtttctccatcaaagcacattgtcatcaaagctactttgggtatagaaaaaaggtcaattccaattcccaggaatccttaaccacaactttacttggaaatttccggtaatacttaaaacaccattttgcagcaattctttatgataaactgtaaaatacagctacccgaaaatgactgacaaatcaatcgtcattctgagcctgatggtttttcacagctctttcataaatggaaaaacatgtagacggcaattggtggaagaatggcatccacaaccctcatcatatgtggtaaattggacactaacagaaaacatctgcttggacttctacagagattgctggtttttgggtgtaaacactaaaatagatacttcaggcaatcaagctgttccccagatttgccctttgcaaattcaattaggagatatccttgtaatttcttctgaaccatctcttcaatttccagaaataaatttgatgaatgtttctgaaacatctttcgttggctgtgtgcaaaataccacaacggaagatcagttactttttggctgcagactaaaaggaatgcacactgttaattctaagtggctgagtgttgggacacattattttatcacagttatggcaagtggtccatcaccttgtccactgggacttcgactaaatgtgacagtgaaacagcagttctgccaggaatctctgagttcagaattttgctctggtcatggtaaatgtcttagtgaagcttggagcaagacatatagctgccattgccagcctccattttctggaaaatactgccaggaacttgatgcatgttcttttaaaccatgtaaaaataatggcagttgcattaataaaagagaaaattgggatgagcaagcatatgaatgtgtctgtcacccaccatttacaggaaagaattgctcagaaataattggccagtgtcaaccacatgtctgtttccatggaaactgcagcaatattacttcaaatagtttcatttgtgaatgtgatgagcaattttcaggtccattctgtgaggtgtcagcaaaaccttgtgtttctctgcttttttggaaaagaggaatttgcccaaatagcagttctgcttatacttatgaatgcccaaaaggatcttccagccaaaatggtgaaactgatgtcagtgagttttcattagtaccatgtcagaatggtactgactgcatcaaaatatcaaatgatgttatgtgcatctgttcaccaatatttacagatttgctttgtaagagcattcaaacatcatgtgagtcatttcctttgaggaataatgctacatgtaagaaatgtgagaaagattatccttgcagctgtatatcaggatttactgaaaaaaactgtgagaaagcaattgaccactgtaaactgctcagcatcaactgtctgaatgaagaatggtgtttcaatataattggaagattcaaatatgtatgcattccagggtgcacaaaaaatccatgttggtttttgaagaatgtttacctaattcatcaacacctctgctactgtggagtcaccttccatggtatttgccaagataaaggtcctgctcaatttgaatatgtgtggcaattgggatttgcaggatctgaaggcgaaaagtgccaaggggttattgatgcctatttctttctggctgcaaactgcactgaagatgcaacctatgtgaacgatcctgaagataataattcttcatgttggttcccacatgaaggcacaaaagagatttgtgcaaatggatgcagttgtttgagtgaagaagacagtcaggaatatcggtatctatgttttctcagatgggctggcaacatgtatctggaaaatacaactgatgatcaagaaaatgagtgtcaacatgaagctgtttgtaaagatgaaattaatagacccagaagaatcctcaacacggtgataccacaccaaattcagcaacatatagaaaggtttatacagcatgaccaggtgggatttatcgtaagaatataagtttgatttagtggcttaaaatcaattaatgtaatttaatgtatcaatagaataaataaagaagaaaatgcatgataatgtagatggagaaaaaaattgtattacagaatctcacaacactttatgaaacaaacactcaacaaataaagaataaaagggaacttccacaatctgataagagaagttaaaaaaaaataagaagaatgaagaaacataactaacattatactttacggtgaaaggctgaaagactggaattttaaatcaaaacaatgagataacactttacacccagcaattctacttctagtatatactcaaaaaattgaaaatatatgttctttacaaaaatttatatgtgaatgtttacagttttgttcgaaagagtcaaaaagttgaaacaacccaaatgaccatcaactgatgaatggatatataaaatttgttatatccatacaatgaaatgttattcagcaatagacaaagatgaattactgatatgtgcttcaatacgaataaacattgaaaacattttgataaggaaaagtagtaagccacaaaagacacatagaatagtgctcaacaaatacttgtttaatgaaacaatgattttcagaagcttttttatttactaagaaaattatccttcgttttgtgatgttatttccttttttctgattttgtgattctcttttgtttgccattattttttgatatccagagaatcttggataaattacaaaatttttgtaatttatcaacactttaatgagttcttgatattgtctcataattaatactaacaatggagcccaacaaatgttgcagatacaagtattttatataaaattaagtttctctatatcagttgcaatatctagaaattatatgtgtgataccacctgttataatgtcaaaagatatgcaaaatgtttagaattaaaaaaaagatgctctaattctccattaaaaagaccctctatataccactaagctcaatgaaaaagagaaaattatatatacactgaataaatggaaatataatgcatggagttaaatattaggccttaaattagctaaaatattaattcttcccaaattaattcacacatttaatgcaatagtaaaaatattgcaagttattttagaaactaattatcatgttatatatatttatgaataatattttctaaattatgaagtcatctttgaaaaggaagactaatggggtgggatctgatgaaccatatgacatgacagactacataacacatatgggtgcctttaaaggaaaaaaaataataatgggtcaacagagagctctgacaacaacccgagtatatacgggaactcaatatatgagaaatttggctataatctcatttgaacatacagggttctttagtaaatggtattgaggaaatggctcataataagaccttaaatgaaactggattacaaccttataccttatatagaagtagactctaaatgtgtatagggatctaaaagtttaaggtaaaatgacgatataaatgaaagaaatgtagaaaaatatctttgtgatttcgggatggagaaatttttcaattaaactcaatttataaggcaaaataatgatagtattataatgatagacactaataatgttgatgatgttaacggacacaaagttaatgaatagcgtataaacattttcttttaaagtgtattttaaatgggtgcagattaaaattcattatataaatgatgtattgcaaacaggtctgcatattaccacatttttttgccctgaaatcttcaaaaaatttttctgggggtttataaaatgtttaatgagccaaagactaaatcataccagccatattgttacttaagaccaggaaagatttgctaagtctgggatgttaatttcttaataccatgcccagactgtgaagtgttcatgactcccacctgtttttgaagcctcaaatttatgtctaagtcaccaatccctacttgctaccagaaatatcataacagaatgaaatatattcattcatacatttattatttattgaatctcctctaactggaagatatttttcaaaatgttatgacaatgagacatgatacctgtccccaggtaatgtactatacataggtaagattatacactcttcagaacacatctcatggttcttctgtttcatttagaaagtgaacacatttttaaagtactaaagtaattatttttttcactttctgaacatacaagttgcttgattatagcagtgtgtcttctggctttctttctggaagttttaaatttaacctgtttcctttacaggctattttaggagattcacattttctgtgtaatgttaaatatatccaaaacataattttcagttataagtaagagttctgtttcaaagtgtagaatctaaaagtccataagaaaatcaggtgaagtttcaaaaactatttctgtagagtcaggaggcttgtaaaaatagagctttatgtgaatatggcacaaaagtatagtataatttgaccaggattttcttaaattatttctgatcccaaaagtctaataattatttattctaagactattgtaatttctgccgtgatgtccgtgattttattaacaagttgaatagttggttttaggtttatttatttattttggctatactatgcaaacttttctgccttcaagtaaaagttttatgtgggtatatttttacctttaaagcaaaaaagatatcgaactgcatatgaaagtgtcatattgaatgtatttttgggttggggccagtcttgaaaccactagatcaagtgtctaaatctttttgtctaaggcacttacatacactgatatattttctctctttattatgctctagaaaaccaaataatcttggttcttaaatccttatagtaaaatgatatagaaatcattcatttaagcaattctagagtacatatcattgtattacccatacacataccaaaattattataacaaacttcattaaatgaagcatttttgaat

SEQ ID NO: 3273 - protein, 619 aa, Homo sapiens
MTDKSIVILSLMVFHSSFINGKTCRRQLVEEWHPQPSSYVVNWTLTENICLDFYRDCWFLGVNTKIDTSGNQAVPQICPLQIQLGDILVISSEPSLQFPEINLMNVSETSFVGCVQNTTTEDQLLFGCRLKGMHTVNSKWLSVGTHYFITVMASGPSPCPLGLRLNVTVKQQFCQESLSSEFCSGHGKCLSEAWSKTYSCHCQPPFSGKYCQELDACSFKPCKNNGSCINKRENWDEQAYECVCHPPFTGKNCSEIIGQCQPHVCFHGNCSNITSNSFICECDEQFSGPFCEVSAKPCVSLLFWKRGICPNSSSAYTYECPKGSSSQNGETDVSEFSLVPCQNGTDCIKISNDVMCICSPIFTDLLCKSIQTSCESFPLRNNATCKKCEKDYPCSCISGFTEKNCEKAIDHCKLLSINCLNEEWCFNIIGRFKYVCIPGCTKNPCWFLKNVYLIHQHLCYCGVTFHGICQDKGPAQFEYVWQLGFAGSEGEKCQGVIDAYFFLAANCTEDATYVNDPEDNNSSCWFPHEGTKEICANGCSCLSEEDSQEYRYLCFLRWAGNMYLENTTDDQENECQHEAVCKDEINRPRRILNTVIPHQIQQHIERFIQHDQVGFIVRI

SEQ ID NO: 3274 - DNA, 2230 bp, Homo sapiens
caaaattcatatgttgcaacatttacccttagtgtgactatatttggagatagggcttttaggaggtgttttttgaaaactaatcagaagaggaatgcttatctcccaagaaaattgaaaccatctgtaaaagaatcttggctgtgctgtgttttgattagattgaagcttggtgtaaagagaaaacacaaaagaccgcagaatatttacaacatttgaattcctgtttctccatcaaagcacattgtcatcaaagctactttgggtatagaaaaaaggtcaattccaattcccaggaatccttaaccacaactttacttggaaatttccggtaatacttaaaacaccattttgcagcaattctttatgataaactgtaaaatacagctacccgaaaatgactgacaaatcaatcgtcattctgagcctgatggtttttcacagctctttcataaatggaaaaacatgtagacggcaattggtggaagaatggcatccacaaccctcatcatatgtggtaaattggacactaacagaaaacatctgcttggacttctacagagattgctggtttttgggtgtaaacactaaaatagatacttcaggcaatcaagctgttccccagatttgccctttgcaaattcaattaggagatatccttgtaatttcttctgaaccatctcttcaatttccagaaataaatttgatgaatgtttctgaaacatctttcgttggctgtgtgcaaaataccacaacggaagatcagttactttttggctgcagactaaaaggaatgcacactgttaattctaagtggctgagtgttgggacacattattttatcacagttatggcaagtggtccatcaccttgtccactgggacttcgactaaatgtgacagtgaaacagcagttctgccaggaatctctgagttcagaattttgctctggtcatggtaaatgtcttagtgaagcttggagcaagacatatagctgccattgccagcctccattttctggaaaatactgccaggaacttgatgcatgttcttttaaaccatgtaaaaataatggcagttgcattaataaaagagaaaattgggatgagcaagcatatgaatgtgtctgtcacccaccatttacaggaaagaattgctcagaaataattggccagtgtcaaccacatgtctgtttccatggaaactgcagcaatattacttcaaatagtttcatttgtgaatgtgatgagcaattttcaggtccattctgtgaggtgtcagcaaaaccttgtgtttctctgcttttttggaaaagaggaatttgcccaaatagcagttctgcttatacttatgaatgcccaaaaggatcttccagccaaaatggtgaaactgatgtcagtgagttttcattagtaccatgtcagaatggtactgactgcatcaaaatatcaaatgatgttatgtgcatctgttcaccaatatttacagatttgctttgtaagagcattcaaacatcatgtgagtcatttcctttgaggaataatgctacatgtaagaaatgtgagaaagattatccttgcagctgtatatcaggatttactgaaaaaaactgtgagaaagcaattgaccactgtaaactgctcagcatcaactgtctgaatgaagaatggtgtttcaatataattggaagattcaaatatgtatgcattccagggtgcacaaaaaatccatgttggtttttgaagaatgtttacctaattcatcaacacctctgctactgtggagtcaccttccatggtatttgccaagataaaggtcctgctcaatttgaatatgtgtggcaattgggatttgcaggatctgaaggcgaaaagtgccaaggggttattgatgcctatttctttctggctgcaaactgcactgaagatgcaacctatgtgaacgatcctgaagataataattcttcatgttggttcccacatgaaggcacaaaagagatttgtgcaaatggatgcagttgtttgagtgaagaagacagtcaggaatatcggtatctatgttttctcagatgggctggcaacatgtatctggaaaatacaactgatgatcaagaaaatgagtgtcaacatgaagctgtttgtaaagatgaaattaatagacccaggtatttatgtatcatttgagcagataatatcacatatcaaaaagttataattaaattgatagtcatc

SEQ ID NO: 3275 - protein, 594 aa, Homo sapiens; identical to SEQ ID NO: 368

SEQ ID NO: 3276 - DNA, 5922 bp, Homo sapiens
actgcgcgccggcgcgcacacccgagacagagctttactatctcgctccctctcgcgcctccctcctcgctgggcattcaaacagctttccgacatcaccagccaaggatttttttccccgctctccttagtcgccgtccgtccatcagtacctgcaggggggaggaggaggagggaggaaagcggaaagaggaaaaagcataagcttgagccttccgatccgaccacgaatactcctgtaataaacccaccgccccaacaaatctgccatagcagccgccgccgccgccggtcacttctcgtctcagcgctttctttgcttcttggtttgttgggggtagcttttatgaaacaaatctttgctattaagccacttacattttggggggttccttagagtctcccttgggggggcttctccctccctttagcccccctcggtttggaggttggattcagttggatacggcgcaaggttctgggctcctgctggcttttttttcctctctctcatcgacccccctttggttcccaccccccaccttttgcttttcgtatgtatgcatttttaaaaataaatcctgattttggaagctgagccggggaaaatgggcaacggtgattgggaccgaaggggagtctctccgtcactgttgctgggacgcgtgcctgtgctggtgtcttagagcaagagcctccctgagctttcggagtggaaggccaaatgacataggatgaaggctgttcgtaacctgctgatttatatattttccacctatctcctggttatgtttggatttaatgctgcccaagacttctggtgttcaactttggtgaagggagtcatttatggatcgtattctgtaagtgaaatgtttcctaaaaactttacaaactgcacttggacgctggaaaatccagatccaaccaaatatagcatttacctgaaattttccaaaaaggaccttagctgctctaacttttcactcctggcttatcagtttgatcatttttcccatgaaaaaataaaggatcttttaagaaagaatcattctataatgcaactctgcaattccaagaatgctttcgtttttctacagtatgataaaaattttattcaaatacgtcgagtatttccaactaatttcccaggattacagaaaaaaggggaagaagatcagaaatctttttttgagtttttggtattgaacaaggtcagcccaagccagtttggttgccatgtattatgtacttggttggagagctgcttaaaatcagaaaatgggagaacagaatcatgtgggatcatgtatacaaaatgcacctgccctcagcatttgggagagtgggggatcgacgaccagtcgctgattttgttaaataacgtggtgttacccctgaatgagcagacagagggctgcctgacccaggagctgcaaaccacccaagtctgcaatcttaccagggaggccaagcgaccacccaaagaagaatttggaatgatgggagatcatacaattaaaagtcagcgacctcgatctgttcatgaaaaaagggtccctcaggaacaagctgatgctgctaaatttatggcacaaactggtgaatctggtgtggaagagtggtcccagtggagcacatgttcggttacttgtggtcaagggtcgcaggtgcgaaccagaacttgtgtatcaccttacgggacacactgcagcggcccattaagagaatcaagggtttgcaataacactgccctctgtccagtacacggagtatgggaggaatggtcaccatggagtttatgttcatttacatgtggtcgaggccaaagaacaagaacaaggtcatgcacacctcctcagtatggaggaaggccgtgtgaaggacctgaaacacatcataagccttgtaatattgctctttgcccagttgatggacagtggcaagagtggagttcgtggagccagtgctcagtaacgtgctcgaatgggactcagcagagaagccggcagtgcactgcagctgcccatggaggctccgaatgcagagggccatgggcagaaagcagagagtgctataaccctgaatgtacagccaatggtcaatggaatcagtggggtcattggagtggttgttccaagtcctgtgatggcggctgggaaaggcgaataaggacctgtcagggtgcagtgataacagggcagcaatgtgaaggaacgggcgaagaagtgagaagatgcaatgagcagcgatgccctgcaccttatgaaatatgccctgaggattatctgatgtcgatggtgtggaaaagaactccagcaggcgacttggcattcaatcaatgtcccctgaatgccacaggcaccactagcagacgctgctctctcagtcttcatggagtggccttctgggaacagccgagctttgcaagatgcatatcaaatgagtacagacacttgcagcattcaattaaagagcaccttgctaaggggcagcgaatgctggcaggtgatggaatgtcccaggtgaccaagacactgttggatttaactcagagaaaaaatttctatgcaggcgatcttctgatgtctgtggagatcctgagaaatgtgacagacacatttaaaagggcaagttacatccctgcatctgatggtgtccagaacttctttcaaatagttagcaaccttctagatgaagaaaacaaggaaaaatgggaagatgcacaacagatttatccagggtcaatagagttaatgcaggtgattgaagattttatacacattgttggaatggggatgatggactttcagaattcatacttaatgactggaaatgtagtggctagtattcagaagcttcctgcagcctctgttctaacagacatcaactttccaatgaaaggacggaagggaatggttgactgggcaagaaactcagaagatagggtagtaattccaaaaagcattttcactccggtgtcatcaaaagaattagatgaatcatctgtatttgttcttggcgcagtcctatacaaaaacttagatctaattttgcccactttgagaaattatactgtcattaattccaaaatcatcgtggtcacaataaggcctgaacccaaaacaaccgattcgtttctggagatagaactagctcatttggctaatggtactttgaatccctattgtgtattgtgggatgactccaaaacgaacgagtctttgggaacgtggtccacccagggatgtaaaactgtgcttaccgatgcatcccatacgaaatgcttatgtgatcgtctctctaccttcgccattttggctcagcaacctagagaaataatcatggaatcctctggcacaccttcagttaccctaatagtaggcagtggtctttcttgcttggccttgattaccctagcagttgtctatgcagcattatggaggtacatacgctctgagagatccataatactaattaacttctgcctgtctatcatctcatccaatatcctcatactggttggacagactcagacacataataagagtatctgcacaaccaccactgcatttttgcactttttcttcctggcttcattctgttgggttttgactgaggcgtggcaatcatatatggctgtaactggaaaaattaggacacggcttataagaaaacgctttttgtgccttggatggggtttaccagcattagtagtggccacatcagtaggcttcaccagaacaaaaggatatggcactgatcactactgctggctctctcttgaaggaggactactctatgcttttgtgggacctgcagccgctgttgtcctggtcaacatggtgattggcattttggtatttaataaacttgtttccagagatggaatcctagataaaaagctcaaacacagagccggtcagatgagtgagcctcatagcggtttgacgctcaaatgtgccaagtgtggagtagtttcaacaacagctttgtcagccaccaccgccagtaacgccatggcgtctctttggagctcctgtgtggtgttgccccttctggctttgacgtggatgtctgcggttctggccatgacagataaacgctccatattgtttcaaatactttttgctgtgtttgattcattgcaaggctttgttatagtcatggtccactgcattcttcggagagaggttcaggatgcatttagatgccgattgagaaactgtcaggatcccatcaatgcagattcttcgagttcgtttcctaatgggcatgctcaaatcatgacagactttgaaaaggatgtagacattgcctgtcgatcagttcttcataaggatattggtccttgccgagcagccacaataacaggaacactttctaggatttctctaaatgatgatgaagaagaaaagggaacaaaccctgaagggctaagctattcaacattgcctggaaatgtcatttccaaagtcatcatccagcaacccacaggtttgcacatgcccatgagtatgaatgagcttagcaatccatgtttgaaaaaagaaaatagtgaattgcggagaactgtgtacttatgtacggatgataatttgagaggggctgacatggacatagtccatcctcaagaaagaatgatggaaagtgactatattgtgatgcccagaagttctgtaaataaccagccttcaatgaaagaagaaagcaaaatgaatattggcatggaaaccttgccgcatgaaaggctattgcactacaaagtaaaccctgaattcaatatgaatccccctgtaatggaccagttcaatatgaacttagagcaacatctcgcaccccaggaacatatgcagaatttgccctttgaacctcgcacagctgtgaagaatttcatggcctctgagttggatgataatgcaggactatcaagaagtgaaactggatcaacgatatcaatgagttctttagagagaagaaaatcacgatattcagaccttgactttgagaaggtcatgcatacaaggaagaggcatatggaactatttcaagaactaaatcagaaatttcaaactttggacagatttcgggatataccaaatacaagcagtatggaaaaccccgcaccaaacaagaatccatgggacactttcaaaaaccccagtgaatacccgcattacaccacaatcaatgtcttagacacagaggcaaaggatgctttggaactgaggccagcagagtgggagaagtgtctgaatttgcctctggatgtgcaagagggtgactttcaaacagaagtttaaaaaaatcaaaatggactaaggtagagacaaaactttattgcactgacacttaagacttgggaagcctgacatttctatctggacagtgtgactatcttatgtcaggaccttcatgtgccaaacgtcagtggtgttttcatatggtaacttctcactagtcaggctagtggagagatgaccaggtgtacagttctgaccatcctgtgttgtaagtacccgtggaatggatttgtaaggtaatctttatagataaacctcaagcaacgattcatgttgtaaccgcttcatatggtttagttttcaaaaaacttcaccatgaagcacaatgtatatatttatgcagtttttaaagtttataacagtctgtttggccattactacactttttactttataatataaaagcaaagtttttgtcattaaatgaatgtttgttgagctacattcttcattgctttaaatgcaataaagtaataatctcacttttatatgaataatatatttcacatctttattattgcagttttctctagaaagctctgagaagctttctctgctgcagctgtgtataaaatatttaaaatgttgtatggtgtaaataaacttttgtctacatatc

SEQ ID NO: 3277 - protein, 1522 aa, Homo sapiens
MKAVRNLLIYIFSTYLLVMFGFNAAQDFWCSTLVKGVIYGSYSVSEMFPKNFTNCTWTLENPDPTKYSIYLKFSKKDLSCSNFSLLAYQFDHFSHEKIKDLLRKNHSIMQLCNSKNAFVFLQYDKNFIQIRRVFPTNFPGLQKKGEEDQKSFFEFLVLNKVSPSQFGCHVLCTWLESCLKSENGRTESCGIMYTKCTCPQHLGEWGIDDQSLILLNNVVLPLNEQTEGCLTQELQTTQVCNLTREAKRPPKEEFGMMGDHTIKSQRPRSVHEKRVPQEQADAAKFMAQTGESGVEEWSQWSTCSVTCGQGSQVRTRTCVSPYGTHCSGPLRESRVCNNTALCPVHGVWEEWSPWSLCSFTCGRGQRTRTRSCTPPQYGGRPCEGPETHHKPCNIALCPVDGQWQEWSSWSQCSVTCSNGTQQRSRQCTAAAHGGSECRGPWAESRECYNPECTANGQWNQWGHWSGCSKSCDGGWERRIRTCQGAVITGQQCEGTGEEVRRCNEQRCPAPYEICPEDYLMSMVWKRTPAGDLAFNQCPLNATGTTSRRCSLSLHGVAFWEQPSFARCISNEYRHLQHSIKEHLAKGQRMLAGDGMSQVTKTLLDLTQRKNFYAGDLLMSVEILRNVTDTFKRASYIPASDGVQNFFQIVSNLLDEENKEKWEDAQQIYPGSIELMQVIEDFIHIVGMGMMDFQNSYLMTGNVVASIQKLPAASVLTDINFPMKGRKGMVDWARNSEDRVVIPKSIFTPVSSKELDESSVFVLGAVLYKNLDLILPTLRNYTVINSKIIVVTIRPEPKTTDSFLEIELAHLANGTLNPYCVLWDDSKTNESLGTWSTQGCKTVLTDASHTKCLCDRLSTFAILAQQPREIIMESSGTPSVTLIVGSGLSCLALITLAVVYAALWRYIRSERSIILINFCLSIISSNILILVGQTQTHNKSICTTTTAFLHFFFLASFCWVLTEAWQSYMAVTGKIRTRLIRKRFLCLGWGLPALVVATSVGFTRTKGYGTDHYCWLSLEGGLLYAFVGPAAAVVLVNMVIGILVFNKLVSRDGILDKKLKHRAGQMSEPHSGLTLKCAKCGVVSTTALSATTASNAMASLWSSCVVLPLLALTWMSAVLAMTDKRSILFQILFAVFDSLQGFVIVMVHCILRREVQDAFRCRLRNCQDPINADSSSSFPNGHAQIMTDFEKDVDIACRSVLHKDIGPCRAATITGTLSRISLNDDEEEKGTNPEGLSYSTLPGNVISKVIIQQPTGLHMPMSMNELSNPCLKKENSELRRTVYLCTDDNLRGADMDIVHPQERMMESDYIVMPRSSVNNQPSMKEESKMNIGMETLPHERLLHYKVNPEFNMNPPVMDQFNMNLEQHLAPQEHMQNLPFEPRTAVKNFMASELDDNAGLSRSETGSTISMSSLERRKSRYSDLDFEKVMHTRKRHMELFQELNQKFQTLDRFRDIPNTSSMENPAPNKNPWDTFKNPSEYPHYTTINVLDTEAKDALELRPAEWEKCLNLPLDVQEGDFQTEV

SEQ ID NO: 3278 - DNA, 6058 bp, Homo sapiens
actatctcgctccctctcgcgcctccctcctcgctgggcattcaaacagctttccgacatcaccagccaaggatttttttccccgctctccttagtcgccgtccgtccatcagtacctgcaggggggaggaggaggagggaggaaagcggaaagaggaaaaagcataagcttgagccttccgatccgaccacgaatactcctgtaataaacccaccgccccaacaaatctgccatagcagccgccgccgccgccggtcacttctcgtctcagcgctttctttgcttcttggtttgttgggggtagcttttatgaaacaaatctttgctattaagccacttacattttggggggttccttagagtctcccttgggggggcttctccctccctttagcccccctcggtttggaggttggattcagttggatacggcgcaaggttctgggctcctgctggcttttttttcctctctctcatcgacccccctttggttcccaccccccaccttttgcttttcgtatgtatgcatttttaaaaataaatcctgattttggaagctgagccggggaaaatgggcaacggtgattgggaccgaaggggagtctctccgtcactgttgctgggacgcgtgcctgtgctggtgtcttagagcaagagcctccctgagctttcggagtggaagaacagtggaagagactgcagcctaaagacttttaaaattaacttggcatcacttttatcagctcaaaggctaaacaaacaaacaaaagcagtgtcatttattctaagaaataacttcttaaaggttaaagctgaaaaatattcaagttatttttggataacaacttacagaggccaaatgacataggatgaaggctgttcgtaacctgctgatttatatattttccacctatctcctggttatgtttggatttaatgctgcccaagacttctggtgttcaactttggtgaagggagtcatttatggatcgtattctgtaagtgaaatgtttcctaaaaactttacaaactgcacttggacgctggaaaatccagatccaaccaaatatagcatttacctgaaattttccaaaaaggaccttagctgctctaacttttcactcctggcttatcagtttgatcatttttcccatgaaaaaataaaggatcttttaagaaagaatcattctataatgcaactctgcaattccaagaatgctttcgtttttctacagtatgataaaaattttattcaaatacgtcgagtatttccaactaatttcccaggattacagaaaaaaggggaagaagatcagaaatctttttttgagtttttggtattgaacaaggtcagcccaagccagtttggttgccatgtattatgtacttggttggagagctgcttaaaatcagaaaatgggagaacagaatcatgtgggatcatgtatacaaaatgcacctgccctcagcatttgggagagtgggggatcgacgaccagtcgctgattttgttaaataacgtggtgttacccctgaatgagcagacagagggctgcctgacccaggagctgcaaaccacccaagtctgcaatcttaccagggaggccaagcgaccacccaaagaagaatttggaatgatgggagatcatacaattaaaagtcagcgacctcgatctgttcatgaaaaaagggtccctcaggaacaagctgatgctgctaaatttatggcacaaactggtgaatctggtgtggaagagtggtcccagtggagcacatgttcggttacttgtggtcaagggtcgcaggtgcgaaccagaacttgtgtatcaccttacgggacacactgcagcggcccattaagagaatcaagggtttgcaataacactgccctctgtccagtacacggagtatgggaggaatggtcaccatggagtttatgttcatttacatgtggtcgaggccaaagaacaagaacaaggtcatgcacacctcctcagtatggaggaaggccgtgtgaaggacctgaaacacatcataagccttgtaatattgctctttgcccagttgatggacagtggcaagagtggagttcgtggagccagtgctcagtaacgtgctcgaatgggactcagcagagaagccggcagtgcactgcagctgcccatggaggctccgaatgcagagggccatgggcagaaagcagagagtgctataaccctgaatgtacagccaatggtcaatggaatcagtggggtcattggagtggttgttccaagtcctgtgatggcggctgggaaaggcgaataaggacctgtcagggtgcagtgataacagggcagcaatgtgaaggaacgggcgaagaagtgagaagatgcaatgagcagcgatgccctgcaccttatgaaatatgccctgaggattatctgatgtcgatggtgtggaaaagaactccagcaggcgacttggcattcaatcaatgtcccctgaatgccacaggcaccactagcagacgctgctctctcagtcttcatggagtggccttctgggaacagccgagctttgcaagatgcatatcaaatgagtacagacacttgcagcattcaattaaagagcaccttgctaaggggcagcgaatgctggcaggtgatggaatgtcccaggtgaccaagacactgttggatttaactcagagaaaaaatttctatgcaggcgatcttctgatgtctgtggagatcctgagaaatgtgacagacacatttaaaagggcaagttacatccctgcatctgatggtgtccagaacttctttcaaatagttagcaaccttctagatgaagaaaacaaggaaaaatgggaagatgcacaacagatttatccagggtcaatagagttaatgcaggtgattgaagattttatacacattgttggaatggggatgatggactttcagaattcatacttaatgactggaaatgtagtggctagtattcagaagcttcctgcagcctctgttctaacagacatcaactttccaatgaaaggacggaagggaatggttgactgggcaagaaactcagaagatagggtagtaattccaaaaagcattttcactccggtgtcatcaaaagaattagatgaatcatctgtatttgttcttggcgcagtcctatacaaaaacttagatctaattttgcccactttgagaaattatactgtcattaattccaaaatcatcgtggtcacaataaggcctgaacccaaaacaaccgattcgtttctggagatagaactagctcatttggctaatggtactttgaatccctattgtgtattgtgggatgactccaaaacgaacgagtctttgggaacgtggtccacccagggatgtaaaactgtgcttaccgatgcatcccatacgaaatgcttatgtgatcgtctctctaccttcgccattttggctcagcaacctagagaaataatcatggaatcctctggcacaccttcagttaccctaatagtaggcagtggtctttcttgcttggccttgattaccctagcagttgtctatgcagcattatggaggtacatacgctctgagagatccataatactaattaacttctgcctgtctatcatctcatccaatatcctcatactggttggacagactcagacacataataagagtatctgcacaaccaccactgcatttttgcactttttcttcctggcttcattctgttgggttttgactgaggcgtggcaatcatatatggctgtaactggaaaaattaggacacggcttataagaaaacgctttttgtgccttggatggggtttaccagcattagtagtggccacatcagtaggcttcaccagaacaaaaggatatggcactgatcactactgctggctctctcttgaaggaggactactctatgcttttgtgggacctgcagccgctgttgtcctggtcaacatggtgattggcattttggtatttaataaacttgtttccagagatggaatcctagataaaaagctcaaacacagagccggtcagatgagtgagcctcatagcggtttgacgctcaaatgtgccaagtgtggagtagtttcaacaacagctttgtcagccaccaccgccagtaacgccatggcgtctctttggagctcctgtgtggtgttgccccttctggctttgacgtggatgtctgcggttctggccatgacagataaacgctccatattgtttcaaatactttttgctgtgtttgattcattgcaaggctttgttatagtcatggtccactgcattcttcggagagaggttcaggatgcatttagatgccgattgagaaactgtcaggatcccatcaatgcagattcttcgagttcgtttcctaatgggcatgctcaaatcatgacagactttgaaaaggatgtagacattgcctgtcgatcagttcttcataaggatattggtccttgccgagcagccacaataacaggaacactttctaggatttctctaaatgatgatgaagaagaaaagggaacaaaccctgaagggctaagctattcaacattgcctggaaatgtcatttccaaagtcatcatccagcaacccacaggtttgcacatgcccatgagtatgaatgagcttagcaatccatgtttgaaaaaagaaaatagtgaattgcggagaactgtgtacttatgtacggatgataatttgagaggggctgacatggacatagtccatcctcaagaaagaatgatggaaagtgactatattgtgatgcccagaagttctgtaaataaccagccttcaatgaaagaagaaagcaaaatgaatattggcatggaaaccttgccgcatgaaaggctattgcactacaaagtaaaccctgaattcaatatgaatccccctgtaatggaccagttcaatatgaacttagagcaacatctcgcaccccaggaacatatgcagaatttgccctttgaacctcgcacagctgtgaagaatttcatggcctctgagttggatgataatgcaggactatcaagaagtgaaactggatcaacgatatcaatgagttctttagagagaagaaaatcacgatattcagaccttgactttgagaaggtcatgcatacaaggaagaggcatatggaactatttcaagaactaaatcagaaatttcaaactttggacagatttcgggatataccaaatacaagcagtatggaaaaccccgcaccaaacaagaatccatgggacactttcaaaaaccccagtgaatacccgcattacaccacaatcaatgtcttagacacagaggcaaaggatgctttggaactgaggccagcagagtgggagaagtgtctgaatttgcctctggatgtgcaagagggtgactttcaaacagaagtttaaaaaaatcaaaatggactaaggtagagacaaaactttattgcactgacacttaagacttgggaagcctgacatttctatctggacagtgtgactatcttatgtcaggaccttcatgtgccaaacgtcagtggtgttttcatatggtaacttctcactagtcaggctagtggagagatgaccaggtgtacagttctgaccatcctgtgttgtaagtacccgtggaatggatttgtaaggtaatctttatagataaacctcaagcaacgattcatgttgtaaccgcttcatatggtttagttttcaaaaaacttcaccatgaagcacaatgtatatatttatgcagtttttaaagtttataacagtctgtttggccattactacactttttactttataatataaaagcaaagtttttgtcattaaatgaatgtttgttgagctacattcttcattgctttaaatgcaataaagtaataatctcacttttatatgaataatatatttcacatctttattattgcagttttctctagaaagctctgagaagctttctctgctgcagctgtgtataaaatatttaaaatgttgtatggtgtaaataaacttttgtctacatatc

SEQ ID NO: 3279 - protein, 1522 aa, Homo sapiens; identical to SEQ ID NO: 3277

SEQ ID NO: 3280 - DNA, 510 bp, Homo sapiens
gtcctgcactctcttcttcccacggttaccataagaatcccactgaatttatgggaaacactcgcctgacttctccatgctgctgtagacagtgacacacacagggtggaaggaagttgtttctgctgttacctttcagagtcttaagtcctcttgtccaatatccgtgtggtagcccctgtaagcatttgggtttgtgatccctgatatccagttccttttcagctttgtcattcaatgatgcttttttgcccatctgtcctaagcttagcctattgttccactcttctgggcttcgtcttctatcccttgagtgcaggtttcctcttccaggacacttctcctccacttgtactgctgcttattaaagtgaaagtgagcacatacatagcatttaggaatccatgtccccagcagtccatgtggtcagtgatattagctatgtgctggcatttcatgtatatgtcactggaaacttatcactttaataatcacaaatcttcagtcttg

SEQ ID NO: 3281 - protein, 90 aa, Homo sapiens [sequence omitted]

SEQ ID NO: 3282 - DNA, 1147 bp, Homo sapiens
gtaatatacacatgtatggaacaaggagaaactattatcacaatggactataatatagtttctgactccctgtaaatagaatctgctctaaattaagcagatgctatagccatgcttcaatataactctgttttcaacttcgttatgaaatcctttaagggtgaggccattttacaaaggacaaagaaactggtgcttcaggaactaaacttttttggatgaaacccaaatgtatctggcatatcttgaattgtcttttatagtcaatcctgttttagggacattaacaaaggtttattattacataatttgagagtctttcaaataaaaggaaagggcagatcaagggccattttccccaacctcaggagttaactcctcagtacctcacaggaacctgaaatctttggaggaaaaaaaaatagtattattttaaaaattaaaaataataaagatggctctctaaagaaacatctgaaattagtagtaacatgctgtaatattattttccattgactgtagccaagggcctctgctagcacccatgagaactttgtgttcttgagaataagacacctttgctccagggcttagtgagcagggcctgaactggagttccctcccaccaccttaactgaactcttcatgcaggacacagcatgtacaacctcacatagagttcctgaccagacaagacttgctggaaatttcccaggatcttccttccttaagaggaatcaaaagaaggaggaagaatagaatgatttggaggaaaagaaggagaaagtagaggagttgaaaaaaaggaagaaaaagaaaaatgcagaatcctttgtcaatccaacagaacacagcaaaaaagcaaagaaagtgaaagcatagatttgcttgtaagtagataatgcatcatgagcatcttctctattgatgaaaatctttcggtgttgggatctgtttataactgcatcatcacaaacatgatctaatcaagagtcactccttgcagtaatgttcacgtttccttcgtctctgaaaagatatccctctagaaaccctgtttctactacaaaaattagctggacgtggtggcgggcgtctgtaatcccagctactctggaggccgaggcaggagaattgctcgaactca

SEQ ID NO: 3283 - protein, 45 aa, Homo sapiens
MFTFPSSLKRYPSRNPVSTTKISWTWWRASVIPATLEAEAGELLE

SEQ ID NO: 3284 - DNA, 467 bp, Homo sapiens
aatccttccaagaaactcacaaagcagggctttttcttgaacttctcttcctcacaacagttaaatcatccatttaaagatgtcaaacaacctccgtgttctaagatgtctctgtgttaggaaaacttggataagcaggtccatagaaattcctctgctagccctgtctcctggaatttctacataatggcatatcctcagtttgaagctgaaaaggttaaattctacctgaaggatgaaaacaaccaacattctgtgccaagacagtcaggagggcaaccatgtttcctggtggagcctctggaaccactcaagccaagatgaccgggggtttggctgggaggagatggggaaactacagaccctacagatggtttcctgtaccatgaggttaagcctgggggcaggagaggctgtaccttagttccttcatctgtaaaataaagtaacatagtacctacctcata

SEQ ID NO: 3285 - protein, 45 aa, Homo sapiens
MAYPQFEAEKVKFYLKDENNQHSVPRQSGGQPCFLVEPLEPLKPR

SEQ ID NO: 3286 - DNA, 412 bp, Homo sapiens
ttaaatcatccatttaaagatgtcaaacaacctccgtgttctaaggacacagcatgtacaacctcacatagagttcctgaccagacaagacttgctggaaatttcccaggatcttccttccttaagtttgaatagctctctggttccagtttgaagctgaaaaggttaaattctacctgaaggatgaaaacaaccaacattctgtgccaagacagtcaggagggcaaccatgtttcctggtggagcctctggaaccactcaagccaagatgaccgggggtttggctgggaggagatggggaaactacagaccctacagatggtttcctgtaccatgaggttaagcctgggggcaggagaggctgtaccttagttccttcatctgtaaaataaagtaacatagtacctacctc

SEQ ID NO: 3287 - protein, 44 aa, Homo sapiens
MSNNLRVLRTQHVQPHIEFLTRQDLLEISQDLPSLSLNSSLVPV

SEQ ID NO: 3288 - DNA, 522 bp, Homo sapiens; identical to SEQ ID NO: 371

SEQ ID NO: 3289 - protein, 173 aa, Homo sapiens [sequence omitted]

SEQ ID NO: 3290 - DNA, 2094 bp, Homo sapiens
tcgacaccacgtccacgccagtcctcagctccaggagctgggcgggatccctcatcccgctcagctgggagatgccccgggagggcgtcccccggctccgggcggcgagggtagtagccgaccccaatccactccgggggccgccgggggccgcgtgaaggcaggtgttccggggagaaacgtggaagggaggcgcggcctggggccggtggcgctcggctgggggccgcagttggctcccctgggggctctgggcggcggcagctcccgcctgtggggaggagaaggagccggatgggcgggttcaggcgcgcgcggcggcggtcccggggccgccggctcctccccgcgagggtgcctgtccgccgctcgccgcgctgaggcagtgcggggcgggcgcgcctaggctgccgcccagcgccctcgccgcggccatgcccgggccctagagcgcctgccgcagcttgcgccccgcagccccgcagccccgcgcccgccgccgcctcttcaatgggcaacctgctcggcggggtcagcttccgcgagcccaccaccgtggaggactgcgactccacctggcagaccgactcggagcccgagcccgaagaaccagggccgggcggcggcagcgagggcccggggcaggagtccgagcagcccgcgcagcccccggagcaagccggcgggcggcccggcgccagccccgcgccggacgaggacgccgaggcggcgggcgccgagcagggtggtgattccactgaagcaactgccaaaccaaagagaagtttttatgctgccagggatttgtacaagtaccgacaccagtacccaaacttcaaagatatccgatatcaaaatgacttgagcaatcttcgtttttataagaataaaattccattcaagccagatggtgtttacattgaagaagttctaagtaaatggaaaggagattatgaaaaactggagcacaaccacacttacattcaatggcttttccccctgagagaacaaggcttgaacttctatgccaaagaactaactacatatgaaattgaggaattcaaaaaaacaaaagaagcaattagaagattcctcctggcttataaaatgatgctagaattttttggaataaaactgactgataaaactggaaatgttgctcgggctgttaactggcaggaaagatttcagcatctgaatgagtcccagcacaactatttaagaatcactcgtattcttaaaagccttggtgagcttggatatgaaagttttaaatctcctcttgtaaaatttattcttcatgaagctcttgtggagaatactattcccaatattaagcagagtgctctagagtattttgtttatacaattagagacagaagagaaaggagaaagctcctgcggttcgcccagaaacactacacgccttcagagaactttatctggggaccgcctcgaaaagaacagtcggagggaagcaaagcccagaaaatgtcttcccctctcgcctccagtcataacagtcaaacttctatgcacaaaaaagccaaggactccaaaaattcctcctcagctgttcatttaaatagcaaaacagctgaagacaaaaaagtggcaccaaaagagcctgtggaagagacagacaggcccagcccagagcccagcaatgaagctgccaagccaagaaatacagagaaggacagtaatgctgagaacatgaattctcaacctgagaaaacagttactactcccacagaaaaaaaggagagtgtatctcctgagaataacgaagaaggtggaaatgataaccaagacaatgaaaatcctggaaatacaaattgccatgatgttgtactagtacagtgaattatcagaaaacccagaagccagtttaggctagagaggaaaaaactactgtatcatttatcctaaagaacagagatgaggtcaatttcaaattttagccatctgtttgtgatttctgtcataagcattttgttgtttgtttttttattttggatgacaatgaattgaatatctaataaggagatttaagataagacccaataaatgaatgtattctgtaatgctttt

SEQ ID NO: 3291 - protein, 451 aa, Homo sapiens; identical to SEQ ID NO: 374

SEQ ID NO: 3292 - DNA, 8761 bp, Homo sapiens
tcgacaccacgtccacgccagtcctcagctccaggagctgggcgggatccctcatcccgctcagctgggagatgccccgggagggcgtcccccggctccgggcggcgagggtagtagccgaccccaatccactccgggggccgccgggggccgcgtgaaggcaggtgttccggggagaaacgtggaagggaggcgcggcctggggccggtggcgctcggctgggggccgcagttggctcccctgggggctctgggcggcggcagctcccgcctgtggggaggagaaggagccggatgggcgggttcaggcgcgcgcggcggcggtcccggggccgccggctcctccccgcgagggtgcctgtccgccgctcgccgcgctgaggcagtgcggggcgggcgcgcctaggctgccgcccagcgccctcgccgcggccatgcccgggccctagagcgcctgccgcagcttgcgccccgcagccccgcagccccgcgcccgccgccgcctcttcaatgggcaacctgctcggcggggtcagcttccgcgagcccaccaccgtggaggactgcgactccacctggcagaccgactcggagcccgagcccgaagaaccagggccgggcggcggcagcgagggcccggggcaggagtccgagcagcccgcgcagcccccggagcaagccggcgggcggcccggcgccagccccgcgccggacgaggacgccgaggcggcgggcgccgagcagggtggtgattccactgaagcaactgccaaaccaaagagaagtttttatgctgccagggatttgtacaagtaccgacaccagtacccaaacttcaaagatatccgatatcaaaatgacttgagcaatcttcgtttttataagaataaaattccattcaagccagatggtgtttacattgaagaagttctaagtaaatggaaaggagattatgaaaaactggagcacaaccacacttacattcaatggcttttccccctgagagaacaaggcttgaacttctatgccaaagaactaactacatatgaaattgaggaattcaaaaaaacaaaagaagcaattagaagattcctcctggcttataaaatgatgctagaattttttggaataaaactgactgataaaactggaaatgttgctcgggctgttaactggcaggaaagatttcagcatctgaatgagtcccagcacaactatttaagaatcactcgtattcttaaaagccttggtgagcttggatatgaaagttttaaatctcctcttgtaaaatttattcttcatgaagctcttgtggagaatactattcccaatattaagcagagtgctctagagtattttgtttatacaattagagacagaagagaaaggagaaagctcctgcggttcgcccagaaacactacacgccttcagagaactttatctggggaccgcctcgaaaagaacagtcggagggaagcaaagcccagaaaatgtcttcccctctcgcctccagtcataacagtcaaacttctatgcacaaaaaagccaaggactccaaaaattcctcctcagctgttcatttaaatagcaaaacagctgaagacaaaaaagtggcaccaaaagagcctgtggaagagacagacaggcccagcccagagcccagcaatgaagctgccaagccaagaaatacagagaaggacagtaatgctgagaacatgaattctcaacctgagaaaacagttactactcccacagaaaaaaaggagagtgtatctcctgagaataacgaagaaggtggaaatgataaccaagacaatgaaaatcctggaaatacaaattgccatgatgttgtactagtacagtgaattatcagaaaacccagaagccagtttaggctagagaggaaaaaactactgtatcatttatcctaaagaacagagatgaggtcaatttcaaattttagccatctgtttgtgatttctgtcataagcattttgttgtttgtttttttattttggatgacaatgaattgaatatctaataaggagatttaagataagacccaataaatgaatgtattctgtaatgcttttaggatgtgaattttcaaattttgtatataataattactttgagaatattttcagagtatctagaaattaccatgtagtatttggtatacaaaatacattcttttgagacattatagtctacatgaaggaaatcaagaggataatttcattggattgctacacttttacctgatttatggctttattttactttattttattttattattattttttgagacggagtctctgttgcccaggctggagtgcagtggcatgatctcggctcactgcaacctctgcctcctggactcaaacgattctcctgcctcagcctcctgagtagctgggattacaggcgtgtgccaccacgcctggctaatttttgtatttttagtagagacggggtttcaccatgttggtcaggctggtctcaaactcctgacctcatgatccacccgcctcggcctcccaaagtgctgggattacaggcatgagccaccatgtctggctgattaattttttttttaactgtaagagtttgatcttttcaaatgtgttcagaaactaatttggattctttgattctagtatctcaacgtgtttatttttagattctgataagtgaaatggatgtccttgtggagctctggcctccccagcttatctatcagtcctgctgtcctcacctccttgcctctttccatgcttacccttaagccaccatctttctcagctagcgtgtgtgtttctagtgtagttggccctccatattcaggggtccagcatctgtggattcaaccaaccgcagattgaaaatatttgttggaaaaaatggatggttacatctctactaaatatgtgcagtccttttatttgtcattattctctaaacaatacagtataacaactattgacatagcatttatattgtatgtattaggtattgtaagtaatttagagatgatttaaagtattttacataagggacttgagcattcctagattttggtaactgcagagggtcctggaaccaaccccctacagatatcaagggaccactatacacattaggatgatctatattgaaatctacatggaacagagtgggacttctaattgtatgacttcaagattttgctttgtttaaattaataactgttttcagaattaagtgcttaaaaacaaatttgattgaaaagttcaagacaagaattttgctctctatggctgttccatataaatttgatggttgattctgaatgtaaatgactgaagaattaaaaaataagaaattcctttttaaaaggcatgcctcttgcactgtgaacaagacagtagtcccttaaaccatgaatatgtcagtgttctatggattacgaaattagtaatgttgcttagcccaaacgtgttttttaaaaagtatagttttgtacatctctaagttatcaaacttcaaaattgagaacaaatttaaaagtccatatatgcaactctagtaagcacttaataggttacatagcactggttaagaacaattaattttgtttctatattattactaattattattacaaatcaaaaaacactgtgataagaacttcaaagcatatatacaaatatagttaaagcaatgaatagatgaaacatgtctactttatttcatttagaaaggaattaacttttttgttaggcttttaagaaaagttctattcattttaatcccctagggaatttgtaatatgtcctacttcatatcatcttctgttgcctctattgatccacattttctgcagtggatttcttgaaaagaatcacacttatagtatgcctctagaaatatgattttactgctttgaagtttacatgaaacatgccagttgcttaactctaattttttatatgaatctcagtagcacttttgttgtacattgtgttccaataagtatagtatggaacactttctcatttttagttcccataatatgccagtttttgctttcctagtgttctgtgagtattaggatttggcaatctgcttttgcatttcaatttctgttttacatgcaagaaaaacatggacactcttacgtggtgcttgtagctgtgtctccgtagagctcagtaaatagttctacagggtttagaggatgagaagcgattgtcaaattaggctgaattgtagaacacaaataatttaattcaaaataacttaccaattttatatacatgataaagtattcagacaactttctaaatgcataatagtaaaagattgtgaccagatattatgatattaataaagttaccagatactaaaatcaatgaatgtaatttgaattacttagaaattgtatattagagcccttatgagtaaaaacatttcatttagcaacttaacttttagaatattcttcctacttagggattttgattagattgtaacattaaattcgagaatatttagtctcaagagaaacacttcctggcatccatcttaaatagtggccttttcccactatggtgtttttaaatgcatattcatatataatagtatgtttcttacatttaatccctaaataacttagataatcattcagtggagaacaagtaaaaggatatcattccttttggagataaacattgagtgtctagaatttttttctattaatgctttgtatattagttttttaaataagatctatagatatgtatttatgtgtgtcttatatatgaaacagtgctctgggtttgactcctatgttttgtaattttaaaaactacgatatgcttgcagaaattcattgagaagctgttataaaaaatgcagtgaagcatgaccaaatagctaaaaatattactgaatctttacaaatatataatctttattgttgtactgtggagtgcaaggatactaaatattggctattgataaaatactaacttgcatttcatggcaaatagatgttatatcgcttgattagtctagaacatttctaatattttgtgctttcatatatcaaaggagattatgtgaaactatttttaaatactgtaaagtgacatatagttataagatatatttctgtacagtagagaaagagtttataacatgaagaatattgtaccattatacattttcattctcgatctcataagaaattcaaaagaataatgatagaggtgaaaatatgtttactttctctaaatcaagcctagttgtcaactcaaaaattatgttgcatagttttattttgaatttaggttttgggactacttttttccagcttcaatgagaaaataaaatctacaactcaggagttactagagaagttctaagtatttttttgctaagtagtaaaaatataaacatatgaaaatgccataatgcctgtcatagtcattgtttcatattttgtcatataaaatcacctaccctgcttctagttttatactttaatctgagtgaaagtatgatgtggtggaaagaaaaaacagtacagtattacatctgagttagtctttgaaaaatcatagtagtaaatgaacctcaacactgagtggtcaaaaattgggttaaccaatggggggagaatatttggttaattgttttaatattaaattttcaagtttataatagagttatggttgagtagtcatccatactgagtaatcacgcattttttaaactataattgaggctcttctaaagctttgttttctaatctaagatacaaaggatattcttgatcttgcttgattgtaactacatctaccagtctttaatgtctgtttggggtgagtggcgatcctctgttgtaggaatgtttttgaagatttctattttgttttccacttaggaaattcccctctctcatttggggtatatgcgttgagtataaggtaggctgtatttagacacactagaatcattaaatgtaggtgaagttgtagagaaaaatggcctgggtcaatgtaggatctagaaaattaggagtgtacatttgctggcttctttttgagttttgtactgtttattacaggaacatatttgtgtggctaatctctagggtgacagtgagtactaccctgctccttctgcattctagttatccaacacacccagcagattgtgttcagggacagaatgtgtttttagaaatcccttattattgaaatgaataataatatagctataaatatgaatgtctggaggtatccagatgtgccttaacaaatgtaaatggttttcattcagaagtttacatttttattacattataaaatctcatcattgggaactttctaaaccatgaatatcagttcttttaatgaaatttaggtggtgctttatcattttggagaagttgctgtttgggacaatagcatcagtttatcaagaagtgtactcaccatgatattcaacaatgtgttacatttgacaaaacgtgtttagagtaagaaagactaactatactgtctgttatatttatttatgctttttgtagtttagctacatactataattttcattttaaacgttccttagttactacaaataatatttatgttttgcttcttcttagatgtaggcggatgcagaaatagaattatgttagagaaattattaaaagtttaattccagtaggcagttggagaaatctgaaactaatttgaaaaacttttatgctgtagtctcattagaatcattttaaaagcactgttcttgcatttttcctagactacagagagtgttctttgtcattttttttcctattctgttgtgaagtttattgtttcagttatttgagggaaataacctcttaatatgtttattttcctgaactaaagttttcatgtagagaatacaattaaatgttttgtgttatgacccaaactggctggaagtagagttcagagagggagaagggacaagaatcagtgtgggcatctcaggaaagtggcgccagtgctgggctccagccttctccactggcatgatgggtcctcagattctcctctggataatgagggtgttgggcactgtgagctctgacttctggggaggataggccatcatggactccatacacaattttgatgggtatcagttctcataaaatacctgctacaatttatttattttgtagttgtttagaaaactgtgagcagttgggcattagtaaattgtagttatatcttaacgatcttgggaatcattgaaatatgagtttttttccctcactcctatttatttaattaaaaaattagggaagttgttcattcacagctgtatattaatataaaatctctttataaaatgattcagagaaaaggcagtagtggtcacttactgtgctaaaatacctttttctctaaaaatatttaagctttagggtttgtcatagttttactttttaaattatactttgtgtaacaatttacgttaactagaaaaattagatatataataagttttggtactaagaaacatttacattctacactcattagtcaaatgaacttttctttcccagtgctaacagattttgtttcatgtgaagaaaaataaaatacaaatgaaataaaagtctagaaacagcaacaggaaactcaccacagaaataaagacataacccttgataagtttgtgtaagtgccagaattattggaagcaggtgacgaatgattaagaaaagctttattgtggggacatgctttaagaatcagctctgtatttgtgccaaggagatcaggtattggtgtgcaaacagatcccattaatactctgatttgaaccatgaattccacctactctgcgttgaagccctccagtagactgatagatgtaatcaaatgatcagctaccaagtttaattcctttgcctgtgtgtagcaacagttggtagttttacaagttaagttgatggtctggctgcagataagagaaagactcagtgataggtggtttgtgagtgaagtaacttccacactgtcaagagttgacagcatattaattgtgtggcattataattgtgagaaacaaatgagagcaaaatgttaggtcctttgacaagcattttcctcctgtttttaaaaagggctttaagttgtttcctatgtaaggtaatctttcttttttagtattatctaagaaggatggtagattatgtcattttggaaactattgtgtcccttgtattttaaatatttcaggaaaatgcctacgattgttacaaagatgtgtgttttacttataacataagctctgattctccagtggccactgggccttctctgtgctctgtattcaactgcagtatgaattacagaatgctgtgcatgttcgttagtaccaataccatgtgtatgtggtagaagttgtaaccagtttctggatctgtatggtactataaaatacttattttataattctgtaaccgtatggcagtgttatgccaaaaatgtataaagagcaatagtttttgttgcttactgctgtattttaaaatattgtttctaaaataatagagttagagttccttttgagtaattatttttaagaactattgccaaatatacatcctgtaaaactaataaaagccactccatcttagataacattttagcattgtgctagagtacattatggtgattttgcacgattaaaatatttttaaagaactag

SEQ ID NO: 3293 - protein, 451 aa, Homo sapiens; identical to SEQ ID NO: 374

SEQ ID NO: 3294 - DNA, 8875 bp, Homo sapiens
tcgacaccacgtccacgccagtcctcagctccaggagctgggcgggatccctcatcccgctcagctgggagatgccccgggagggcgtcccccggctccgggcggcgagggtagtagccgaccccaatccactccgggggccgccgggggccgcgtgaaggcaggtgttccggggagaaacgtggaagggaggcgcggcctggggccggtggcgctcggctgggggccgcagttggctcccctgggggctctgggcggcggcagctcccgcctgtggggaggagaaggagccggatgggcgggttcaggcgcgcgcggcggcggtcccggggccgccggctcctccccgcgagggtgcctgtccgccgctcgccgcgctgaggcagtgcggggcgggcgcgcctaggctgccgcccagcgccctcgccgcggccatgcccgggccctagagcgcctgccgcagcttgcgccccgcagccccgcagccccgcgcccgccgccgcctcttcaatgggcaacctgctcggcggggtcagcttccgcgagcccaccaccgtggaggactgcgactccacctggcagaccgactcggagcccgagcccgaagaaccagggccgggcggcggcagcgagggcccggggcaggagtccgagcagcccgcgcagcccccggagcaagccggcgggcggcccggcgccagccccgcgccggacgaggacgccgaggcggcgggcgccgagcagggtggtgattccactgaagcaactgccaaaccaaagagaagtttttatgctgccagggatttgtacaagtaccgacaccagtacccaaacttcaaagatatccgatatcaaaatgacttgagcaatcttcgtttttataagaataaaattccattcaagccagatggtgtttacattgaagaagttctaagtaaatggaaaggagattatgaaaaactggagcacaaccacacttacattcaatggcttttccccctgagagaacaaggcttgaacttctatgccaaagaactaactacatatgaaattgaggaattcaaaaaaacaaaagaagcaattagaagattcctcctggcttataaaatgatgctagaattttttggaataaaactgactgataaaactggaaatgttgctcgggctgttaactggcaggaaagatttcagcatctgaatgagtcccagcacaactatttaagaatcactcgtattcttaaaagccttggtgagcttggatatgaaagttttaaatctcctcttgtaaaatttattcttcatgaagctcttgtggagaatactattcccaatattaagcagagtgctctagagtattttgtttatacaattagagacagaagagaaaggagaaagctcctgcggttcgcccagaaacactacacgccttcagagaactttatctggggaccgcctcgaaaagaacagtcggagggaagcaaagcccagaaaatgtcttcccctctcgcctccagtcataacagtcaaacttctatgcacaaaaaagccaaggactccaaaaattcctcctcagctgttcatttaaatagcaaaacagctgaagacaaaaaagtggcaccaaaagagcctgtggaagagacagacaggcccagcccagagcccagcaatgaagctgccaagccaagaaatacagagaaggacagtaatgctgagaacatgaattctcaacctgagaaaacagttactactcccacagaaaaaaaggagagtgtatctcctgagaataacgaagaaggtggaaatgataaccaagacaatgaaaatcctggaaatacaaattgccatgatgttgtactagtacagtgaattatcagaaaacccagaagccagtttaggctagagaggaaaaaactactgtatcatttatcctaaagaacagagatgaggtcaatttcaaattttagccatctgtttgtgatttctgtcataagcattttgttgtttgtttttttattttggatgacaatgaattgaatatctaataaggagatttaagataagacccaataaatgaatgtattctgtaatgcttttaggatgtgaattttcaaattttgtatataataattactttgagaatattttcagagtatctagaaattaccatgtagtatttggtatacaaaatacattcttttgagacattatagtctacatgaaggaaatcaagaggataatttcattggattgctacacttttacctgatttatggctttattttactttattttattttattattattttttgagacggagtctctgttgcccaggctggagtgcagtggcatgatctcggctcactgcaacctctgcctcctggactcaaacgattctcctgcctcagcctcctgagtagctgggattacaggcgtgtgccaccacgcctggctaatttttgtatttttagtagagacggggtttcaccatgttggtcaggctggtctcaaactcctgacctcatgatccacccgcctcggcctcccaaagtgctgggattacaggcatgagccaccatgtctggctgattaattttttttttaactgtaagagtttgatcttttcaaatgtgttcagaaactaatttggattctttgattctagtatctcaacgtgtttatttttagattctgataagtgaaatggatgtccttgtggagctctggcctccccagcttatctatcagtcctgctgtcctcacctccttgcctctttccatgcttacccttaagccaccatctttctcagctagcgtgtgtgtttctagtgtagttggccctccatattcaggggtccagcatctgtggattcaaccaaccgcagattgaaaatatttgttggaaaaaatggatggttacatctctactaaatatgtgcagtccttttatttgtcattattctctaaacaatacagtataacaactattgacatagcatttatattgtatgtattaggtattgtaagtaatttagagatgatttaaagtattttacataagggacttgagcattcctagattttggtaactgcagagggtcctggaaccaaccccctacagatatcaagggaccactatacacattaggatgatctatattgaaatctacatggaacagagtgggacttctaattgtatgacttcaagattttgctttgtttaaattaataactgttttcagaattaagtgcttaaaaacaaatttgattgaaaagttcaagacaagaattttgctctctatggctgttccatataaatttgatggttgattctgaatgtaaatgactgaagaattaaaaaataagaaattcctttttaaaaggcatgcctcttgcactgtgaacaagacagtagtcccttaaaccatgaatatgtcagtgttctatggattacgaaattagtaatgttgcttagcccaaacgtgttttttaaaaagtatagttttgtacatctctaagttatcaaacttcaaaattgagaacaaatttaaaagtccatatatgcaactctagtaagcacttaataggttacatagcactggttaagaacaattaattttgtttctatattattactaattattattacaaatcaaaaaacactgtgataagaacttcaaagcatatatacaaatatagttaaagcaatgaatagatgaaacatgtctactttatttcatttagaaaggaattaacttttttgttaggcttttaagaaaagttctattcattttaatcccctagggaatttgtaatatgtcctacttcatatcatcttctgttgcctctattgatccacattttctgcagtggatttcttgaaaagaatcacacttatagtatgcctctagaaatatgattttactgctttgaagtttacatgaaacatgccagttgcttaactctaattttttatatgaatctcagtagcacttttgttgtacattgtgttccaataagtatagtatggaacactttctcatttttagttcccataatatgccagtttttgctttcctagtgttctgtgagtattaggatttggcaatctgcttttgcatttcaatttctgttttacatgcaagaaaaacatggacactcttacgtggtgcttgtagctgtgtctccgtagagctcagtaaatagttctacagggtttagaggatgagaagcgattgtcaaattaggctgaattgtagaacacaaataatttaattcaaaataacttaccaattttatatacatgataaagtattcagacaactttctaaatgcataatagtaaaagattgtgaccagatattatgatattaataaagttaccagatactaaaatcaatgaatgtaatttgaattacttagaaattgtatattagagcccttatgagtaaaaacatttcatttagcaacttaacttttagaatattcttcctacttagggattttgattagattgtaacattaaattcgagaatatttagtctcaagagaaacacttcctggcatccatcttaaatagtggccttttcccactatggtgtttttaaatgcatattcatatataatagtatgtttcttacatttaatccctaaataacttagataatcattcagtggagaacaagtaaaaggatatcattccttttggagataaacattgagtgtctagaatttttttctattaatgctttgtatattagttttttaaataagatctatagatatgtatttatgtgtgtcttatatatgaaacagtgctctgggtttgactcctatgttttgtaattttaaaaactacgatatgcttgcagaaattcattgagaagctgttataaaaaatgcagtgaagcatgaccaaatagctaaaaatattactgaatctttacaaatatataatctttattgttgtactgtggagtgcaaggatactaaatattggctattgataaaatactaacttgcatttcatggcaaatagatgttatatcgcttgattagtctagaacatttctaatattttgtgctttcatatatcaaaggagattatgtgaaactatttttaaatactgtaaagtgacatatagttataagatatatttctgtacagtagagaaagagtttataacatgaagaatattgtaccattatacattttcattctcgatctcataagaaattcaaaagaataatgatagaggtgaaaatatgtttactttctctaaatcaagcctagttgtcaactcaaaaattatgttgcatagttttattttgaatttaggttttgggactacttttttccagcttcaatgagaaaataaaatctacaactcaggagttactagagaagttctaagtatttttttgctaagtagtaaaaatataaacatatgaaaatgccataatgcctgtcatagtcattgtttcatattttgtcatataaaatcacctaccctgcttctagttttatactttaatctgagtgaaagtatgatgtggtggaaagaaaaaacagtacagtattacatctgagttagtctttgaaaaatcatagtagtaaatgaacctcaacactgagtggtcaaaaattgggttaaccaatggggggagaatatttggttaattgttttaatattaaattttcaagtttataatagagttatggttgagtagtcatccatactgagtaatcacgcattttttaaactataattgaggctcttctaaagctttgttttctaatctaagatacaaaggatattcttgatcttgcttgattgtaactacatctaccagtctttaatgtctgtttggggtgagtggcgatcctctgttgtaggaatgtttttgaagatttctattttgttttccacttaggaaattcccctctctcatttggggtatatgcgttgagtataaggtaggctgtatttagacacactagaatcattaaatgtaggtgaagttgtagagaaaaatggcctgggtcaatgtaggatctagaaaattaggagtgtacatttgctggcttctttttgagttttgtactgtttattacaggaacatatttgtgtggctaatctctagggtgacagtgagtactaccctgctccttctgcattctagttatccaacacacccagcagattgtgttcagggacagaatgtgtttttagaaatcccttattattgaaatgaataataatatagctataaatatgaatgtctggaggtatccagatgtgccttaacaaatgtaaatggttttcattcagaagtttacatttttattacattataaaatctcatcattgggaactttctaaaccatgaatatcagttcttttaatgaaatttaggtggtgctttatcattttggagaagttgctgtttgggacaatagcatcagtttatcaagaagtgtactcaccatgatattcaacaatgtgttacatttgacaaaacgtgtttagagtaagaaagactaactatactgtctgttatatttatttatgctttttgtagtttagctacatactataattttcattttaaacgttccttagttactacaaataatatttatgttttgcttcttcttagatgtaggcggatgcagaaatagaattatgttagagaaattattaaaagtttaattccagtaggcagttggagaaatctgaaactaatttgaaaaacttttatgctgtagtctcattagaatcattttaaaagcactgttcttgcatttttcctagactacagagagtgttctttgtcattttttttcctattctgttgtgaagtttattgtttcagttatttgagggaaataacctcttaatatgtttattttcctgaactaaagttttcatgtagagaatacaattaaatgttttgtgttatgacccaaactggctggaagtagagttcagagagggagaagggacaagaatcagtgtgggcatctcaggaaagtggcgccagtgctgggctccagccttctccactggcatgatgggtcctcagattctcctctggataatgagggtgttgggcactgtgagctctgacttctggggaggataggccatcatggactccatacacaattttgatgggtatcagttctcataaaatacctgctacaatttatttattttgtagttgtttagaaaactgtgagcagttgggcattagtaaattgtagttatatcttaacgatcttgggaatcattgaaatatgagtttttttccctcactcctatttatttaattaaaaaattagggaagttgttcattcacagctgtatattaatataaaatctctttataaaatgattcagagaaaaggcagtagtggtcacttactgtgctaaaatacctttttctctaaaaatatttaagctttagggtttgtcatagttttactttttaaattatactttgtgtaacaatttacgttaactagaaaaattagatatataataagttttggtactaagaaacatttacattctacactcattagtcaaatgaacttttctttcccagtgctaacagattttgtttcatgtgaagaaaaataaaatacaaatgaaataaaagtctagaaacagcaacaggaaactcaccacagaaataaagacataacccttgataagtttgtgtaagtgccagaattattggaagcaggtgacgaatgattaagaaaagctttattgtggggacatgctttaagaatcagctctgtatttgtgccaaggagatcaggtattggtgtgcaaacagatcccattaatactctgatttgaaccatgaattccacctactctgcgttgaagccctccagtagactgatagatgtaatcaaatgatcagctaccaagtttaattcctttgcctgtgtgtagcaacagttggtagttttacaagttaagttgatggtctggctgcagataagagaaagactcagtgataggtggtttgtgagtgaagtaacttccacactgtcaagagttgacagcatattaattgtgtggcattataattgtgagaaacaaatgagagcaaaatgttaggtcctttgacaagcattttcctcctgtttttaaaaagggctttaagttgtttcctatgtaaggtaatctttcttttttagtattatctaagaaggatggtagattatgtcattttggaaactattgtgtcccttgtattttaaatatttcaggaaaatgcctacgattgttacaaagatgtgtgttttacttataacataagctctgattctccagtggccactgggccttctctgtgctctgtattcaactgcagtatgaattacagaatgctgtgcatgttcgttagtaccaataccatgtgtatgtggtagaagttgtaaccagtttctggatctgtatggtactataaaatacttattttataattctgtaaccgtatggcagtgttatgccaaaaatgtataaagagcaatagtttttgttgcttactgctgtattttaaaatattgtttctaaaataatagagttagagttccttttgagtaattatttttaagaactattgccaaatatacatcctgtaaaactaataaaagccactccatcttagataacattttagcattgtgctagagtacattatggtgattttgcacgattaaaatatttttaaagaactagaaaaaatgacttgctgttttcctgtcattaagcatgtattttttatgattaacacataagactaacattattttcttttatcctcaaaaataaatattgtgaagggtgaatcat

SEQ ID NO: 3295 - protein, 451 aa, Homo sapiens; identical to SEQ ID NO: 374

SEQ ID NO: 3296 - DNA, 1160 bp, Homo sapiens
atcattttagatacctcaaacttgttatttttggttggaatagcaatcttgcttaataaatttttattgaatgaataaatgattaacaaaatatggtcttcagcttaaatcctccttggagttttgttatcatatgtgtaaaactgagacatctgtgctgcattttaccctctgggcttcacagttgaatgttaagacaataattttttagtaaacatccagaaagatgaagatgatgaactgttgggcttagcttttccagtgtttggtcccagcacaactatttaagaatcactcgtattcttaaaagccttggtgagcttggatatgaaagttttaaatctcctcttgtaaaatttattcttcatgaagctcttgtggagaatactattcccaatattaagcagagtgctctagagtattttgtttatacaattagagacagaagagaaaggagaaagctcctgcggttcgcccagaaacactacacgccttcagagaactttatctggggaccgcctcgaaaagaacagtcggagggaagcaaagcccagaaaatgtcttcccctctcgcctccagtcataacagtcaaacttctatgcacaaaaaagccaaggactccaaaaattcctcctcagctgttcatttaaatagcaaaacagctgaagacaaaaaagtggcaccaaaagagcctgtggaagagacagacaggcccagcccagagcccagcaatgaagctgccaagccaagaaatacagagaaggacagtaatgctgagaacatgaattctcaacctgagaaaacagttactactcccacagaaaaaaaggagagtgtatctcctgagaataacgaagaaggtggaaatgataaccaagacaatgaaaatcctggaaatacaaattgccatgatgttgtactagtacagtgaattatcagaaaacccagaagccagtttaggctagagaggaaaaaactactgtatcatttatcctaaagaacagagatgaggtcaatttcaaattttagccatctgtttgtgatttctgtcataagcattttgttgtttgtttttttattttggatgacaatgaattgaatatctaataaggagatttaagataagacccaataaatgaatgtattctgtaatgctttt

SEQ ID NO: 3297 - protein, 31 aa, Homo sapiens
MVFSLNPPWSFVIICVKLRHLCCILPSGLHS

SEQ ID NO: 3298 - DNA, 7827 bp, Homo sapiens
atcattttagatacctcaaacttgttatttttggttggaatagcaatcttgcttaataaatttttattgaatgaataaatgattaacaaaatatggtcttcagcttaaatcctccttggagttttgttatcatatgtgtaaaactgagacatctgtgctgcattttaccctctgggcttcacagttgaatgttaagacaataattttttagtaaacatccagaaagatgaagatgatgaactgttgggcttagcttttccagtgtttggtcccagcacaactatttaagaatcactcgtattcttaaaagccttggtgagcttggatatgaaagttttaaatctcctcttgtaaaatttattcttcatgaagctcttgtggagaatactattcccaatattaagcagagtgctctagagtattttgtttatacaattagagacagaagagaaaggagaaagctcctgcggttcgcccagaaacactacacgccttcagagaactttatctggggaccgcctcgaaaagaacagtcggagggaagcaaagcccagaaaatgtcttcccctctcgcctccagtcataacagtcaaacttctatgcacaaaaaagccaaggactccaaaaattcctcctcagctgttcatttaaatagcaaaacagctgaagacaaaaaagtggcaccaaaagagcctgtggaagagacagacaggcccagcccagagcccagcaatgaagctgccaagccaagaaatacagagaaggacagtaatgctgagaacatgaattctcaacctgagaaaacagttactactcccacagaaaaaaaggagagtgtatctcctgagaataacgaagaaggtggaaatgataaccaagacaatgaaaatcctggaaatacaaattgccatgatgttgtactagtacagtgaattatcagaaaacccagaagccagtttaggctagagaggaaaaaactactgtatcatttatcctaaagaacagagatgaggtcaatttcaaattttagccatctgtttgtgatttctgtcataagcattttgttgtttgtttttttattttggatgacaatgaattgaatatctaataaggagatttaagataagacccaataaatgaatgtattctgtaatgcttttaggatgtgaattttcaaattttgtatataataattactttgagaatattttcagagtatctagaaattaccatgtagtatttggtatacaaaatacattcttttgagacattatagtctacatgaaggaaatcaagaggataatttcattggattgctacacttttacctgatttatggctttattttactttattttattttattattattttttgagacggagtctctgttgcccaggctggagtgcagtggcatgatctcggctcactgcaacctctgcctcctggactcaaacgattctcctgcctcagcctcctgagtagctgggattacaggcgtgtgccaccacgcctggctaatttttgtatttttagtagagacggggtttcaccatgttggtcaggctggtctcaaactcctgacctcatgatccacccgcctcggcctcccaaagtgctgggattacaggcatgagccaccatgtctggctgattaattttttttttaactgtaagagtttgatcttttcaaatgtgttcagaaactaatttggattctttgattctagtatctcaacgtgtttatttttagattctgataagtgaaatggatgtccttgtggagctctggcctccccagcttatctatcagtcctgctgtcctcacctccttgcctctttccatgcttacccttaagccaccatctttctcagctagcgtgtgtgtttctagtgtagttggccctccatattcaggggtccagcatctgtggattcaaccaaccgcagattgaaaatatttgttggaaaaaatggatggttacatctctactaaatatgtgcagtccttttatttgtcattattctctaaacaatacagtataacaactattgacatagcatttatattgtatgtattaggtattgtaagtaatttagagatgatttaaagtattttacataagggacttgagcattcctagattttggtaactgcagagggtcctggaaccaaccccctacagatatcaagggaccactatacacattaggatgatctatattgaaatctacatggaacagagtgggacttctaattgtatgacttcaagattttgctttgtttaaattaataactgttttcagaattaagtgcttaaaaacaaatttgattgaaaagttcaagacaagaattttgctctctatggctgttccatataaatttgatggttgattctgaatgtaaatgactgaagaattaaaaaataagaaattcctttttaaaaggcatgcctcttgcactgtgaacaagacagtagtcccttaaaccatgaatatgtcagtgttctatggattacgaaattagtaatgttgcttagcccaaacgtgttttttaaaaagtatagttttgtacatctctaagttatcaaacttcaaaattgagaacaaatttaaaagtccatatatgcaactctagtaagcacttaataggttacatagcactggttaagaacaattaattttgtttctatattattactaattattattacaaatcaaaaaacactgtgataagaacttcaaagcatatatacaaatatagttaaagcaatgaatagatgaaacatgtctactttatttcatttagaaaggaattaacttttttgttaggcttttaagaaaagttctattcattttaatcccctagggaatttgtaatatgtcctacttcatatcatcttctgttgcctctattgatccacattttctgcagtggatttcttgaaaagaatcacacttatagtatgcctctagaaatatgattttactgctttgaagtttacatgaaacatgccagttgcttaactctaattttttatatgaatctcagtagcacttttgttgtacattgtgttccaataagtatagtatggaacactttctcatttttagttcccataatatgccagtttttgctttcctagtgttctgtgagtattaggatttggcaatctgcttttgcatttcaatttctgttttacatgcaagaaaaacatggacactcttacgtggtgcttgtagctgtgtctccgtagagctcagtaaatagttctacagggtttagaggatgagaagcgattgtcaaattaggctgaattgtagaacacaaataatttaattcaaaataacttaccaattttatatacatgataaagtattcagacaactttctaaatgcataatagtaaaagattgtgaccagatattatgatattaataaagttaccagatactaaaatcaatgaatgtaatttgaattacttagaaattgtatattagagcccttatgagtaaaaacatttcatttagcaacttaacttttagaatattcttcctacttagggattttgattagattgtaacattaaattcgagaatatttagtctcaagagaaacacttcctggcatccatcttaaatagtggccttttcccactatggtgtttttaaatgcatattcatatataatagtatgtttcttacatttaatccctaaataacttagataatcattcagtggagaacaagtaaaaggatatcattccttttggagataaacattgagtgtctagaatttttttctattaatgctttgtatattagttttttaaataagatctatagatatgtatttatgtgtgtcttatatatgaaacagtgctctgggtttgactcctatgttttgtaattttaaaaactacgatatgcttgcagaaattcattgagaagctgttataaaaaatgcagtgaagcatgaccaaatagctaaaaatattactgaatctttacaaatatataatctttattgttgtactgtggagtgcaaggatactaaatattggctattgataaaatactaacttgcatttcatggcaaatagatgttatatcgcttgattagtctagaacatttctaatattttgtgctttcatatatcaaaggagattatgtgaaactatttttaaatactgtaaagtgacatatagttataagatatatttctgtacagtagagaaagagtttataacatgaagaatattgtaccattatacattttcattctcgatctcataagaaattcaaaagaataatgatagaggtgaaaatatgtttactttctctaaatcaagcctagttgtcaactcaaaaattatgttgcatagttttattttgaatttaggttttgggactacttttttccagcttcaatgagaaaataaaatctacaactcaggagttactagagaagttctaagtatttttttgctaagtagtaaaaatataaacatatgaaaatgccataatgcctgtcatagtcattgtttcatattttgtcatataaaatcacctaccctgcttctagttttatactttaatctgagtgaaagtatgatgtggtggaaagaaaaaacagtacagtattacatctgagttagtctttgaaaaatcatagtagtaaatgaacctcaacactgagtggtcaaaaattgggttaaccaatggggggagaatatttggttaattgttttaatattaaattttcaagtttataatagagttatggttgagtagtcatccatactgagtaatcacgcattttttaaactataattgaggctcttctaaagctttgttttctaatctaagatacaaaggatattcttgatcttgcttgattgtaactacatctaccagtctttaatgtctgtttggggtgagtggcgatcctctgttgtaggaatgtttttgaagatttctattttgttttccacttaggaaattcccctctctcatttggggtatatgcgttgagtataaggtaggctgtatttagacacactagaatcattaaatgtaggtgaagttgtagagaaaaatggcctgggtcaatgtaggatctagaaaattaggagtgtacatttgctggcttctttttgagttttgtactgtttattacaggaacatatttgtgtggctaatctctagggtgacagtgagtactaccctgctccttctgcattctagttatccaacacacccagcagattgtgttcagggacagaatgtgtttttagaaatcccttattattgaaatgaataataatatagctataaatatgaatgtctggaggtatccagatgtgccttaacaaatgtaaatggttttcattcagaagtttacatttttattacattataaaatctcatcattgggaactttctaaaccatgaatatcagttcttttaatgaaatttaggtggtgctttatcattttggagaagttgctgtttgggacaatagcatcagtttatcaagaagtgtactcaccatgatattcaacaatgtgttacatttgacaaaacgtgtttagagtaagaaagactaactatactgtctgttatatttatttatgctttttgtagtttagctacatactataattttcattttaaacgttccttagttactacaaataatatttatgttttgcttcttcttagatgtaggcggatgcagaaatagaattatgttagagaaattattaaaagtttaattccagtaggcagttggagaaatctgaaactaatttgaaaaacttttatgctgtagtctcattagaatcattttaaaagcactgttcttgcatttttcctagactacagagagtgttctttgtcattttttttcctattctgttgtgaagtttattgtttcagttatttgagggaaataacctcttaatatgtttattttcctgaactaaagttttcatgtagagaatacaattaaatgttttgtgttatgacccaaactggctggaagtagagttcagagagggagaagggacaagaatcagtgtgggcatctcaggaaagtggcgccagtgctgggctccagccttctccactggcatgatgggtcctcagattctcctctggataatgagggtgttgggcactgtgagctctgacttctggggaggataggccatcatggactccatacacaattttgatgggtatcagttctcataaaatacctgctacaatttatttattttgtagttgtttagaaaactgtgagcagttgggcattagtaaattgtagttatatcttaacgatcttgggaatcattgaaatatgagtttttttccctcactcctatttatttaattaaaaaattagggaagttgttcattcacagctgtatattaatataaaatctctttataaaatgattcagagaaaaggcagtagtggtcacttactgtgctaaaatacctttttctctaaaaatatttaagctttagggtttgtcatagttttactttttaaattatactttgtgtaacaatttacgttaactagaaaaattagatatataataagttttggtactaagaaacatttacattctacactcattagtcaaatgaacttttctttcccagtgctaacagattttgtttcatgtgaagaaaaataaaatacaaatgaaataaaagtctagaaacagcaacaggaaactcaccacagaaataaagacataacccttgataagtttgtgtaagtgccagaattattggaagcaggtgacgaatgattaagaaaagctttattgtggggacatgctttaagaatcagctctgtatttgtgccaaggagatcaggtattggtgtgcaaacagatcccattaatactctgatttgaaccatgaattccacctactctgcgttgaagccctccagtagactgatagatgtaatcaaatgatcagctaccaagtttaattcctttgcctgtgtgtagcaacagttggtagttttacaagttaagttgatggtctggctgcagataagagaaagactcagtgataggtggtttgtgagtgaagtaacttccacactgtcaagagttgacagcatattaattgtgtggcattataattgtgagaaacaaatgagagcaaaatgttaggtcctttgacaagcattttcctcctgtttttaaaaagggctttaagttgtttcctatgtaaggtaatctttcttttttagtattatctaagaaggatggtagattatgtcattttggaaactattgtgtcccttgtattttaaatatttcaggaaaatgcctacgattgttacaaagatgtgtgttttacttataacataagctctgattctccagtggccactgggccttctctgtgctctgtattcaactgcagtatgaattacagaatgctgtgcatgttcgttagtaccaataccatgtgtatgtggtagaagttgtaaccagtttctggatctgtatggtactataaaatacttattttataattctgtaaccgtatggcagtgttatgccaaaaatgtataaagagcaatagtttttgttgcttactgctgtattttaaaatattgtttctaaaataatagagttagagttccttttgagtaattatttttaagaactattgccaaatatacatcctgtaaaactaataaaagccactccatcttagataacattttagcattgtgctagagtacattatggtgattttgcacgattaaaatatttttaaagaactag

SEQ ID NO: 3299 - protein, 31 aa, Homo sapiens; identical to SEQ ID NO: 3297

SEQ ID NO: 3300 - DNA, 7941 bp, Homo sapiens
atcattttagatacctcaaacttgttatttttggttggaatagcaatcttgcttaataaatttttattgaatgaataaatgattaacaaaatatggtcttcagcttaaatcctccttggagttttgttatcatatgtgtaaaactgagacatctgtgctgcattttaccctctgggcttcacagttgaatgttaagacaataattttttagtaaacatccagaaagatgaagatgatgaactgttgggcttagcttttccagtgtttggtcccagcacaactatttaagaatcactcgtattcttaaaagccttggtgagcttggatatgaaagttttaaatctcctcttgtaaaatttattcttcatgaagctcttgtggagaatactattcccaatattaagcagagtgctctagagtattttgtttatacaattagagacagaagagaaaggagaaagctcctgcggttcgcccagaaacactacacgccttcagagaactttatctggggaccgcctcgaaaagaacagtcggagggaagcaaagcccagaaaatgtcttcccctctcgcctccagtcataacagtcaaacttctatgcacaaaaaagccaaggactccaaaaattcctcctcagctgttcatttaaatagcaaaacagctgaagacaaaaaagtggcaccaaaagagcctgtggaagagacagacaggcccagcccagagcccagcaatgaagctgccaagccaagaaatacagagaaggacagtaatgctgagaacatgaattctcaacctgagaaaacagttactactcccacagaaaaaaaggagagtgtatctcctgagaataacgaagaaggtggaaatgataaccaagacaatgaaaatcctggaaatacaaattgccatgatgttgtactagtacagtgaattatcagaaaacccagaagccagtttaggctagagaggaaaaaactactgtatcatttatcctaaagaacagagatgaggtcaatttcaaattttagccatctgtttgtgatttctgtcataagcattttgttgtttgtttttttattttggatgacaatgaattgaatatctaataaggagatttaagataagacccaataaatgaatgtattctgtaatgcttttaggatgtgaattttcaaattttgtatataataattactttgagaatattttcagagtatctagaaattaccatgtagtatttggtatacaaaatacattcttttgagacattatagtctacatgaaggaaatcaagaggataatttcattggattgctacacttttacctgatttatggctttattttactttattttattttattattattttttgagacggagtctctgttgcccaggctggagtgcagtggcatgatctcggctcactgcaacctctgcctcctggactcaaacgattctcctgcctcagcctcctgagtagctgggattacaggcgtgtgccaccacgcctggctaatttttgtatttttagtagagacggggtttcaccatgttggtcaggctggtctcaaactcctgacctcatgatccacccgcctcggcctcccaaagtgctgggattacaggcatgagccaccatgtctggctgattaattttttttttaactgtaagagtttgatcttttcaaatgtgttcagaaactaatttggattctttgattctagtatctcaacgtgtttatttttagattctgataagtgaaatggatgtccttgtggagctctggcctccccagcttatctatcagtcctgctgtcctcacctccttgcctctttccatgcttacccttaagccaccatctttctcagctagcgtgtgtgtttctagtgtagttggccctccatattcaggggtccagcatctgtggattcaaccaaccgcagattgaaaatatttgttggaaaaaatggatggttacatctctactaaatatgtgcagtccttttatttgtcattattctctaaacaatacagtataacaactattgacatagcatttatattgtatgtattaggtattgtaagtaatttagagatgatttaaagtattttacataagggacttgagcattcctagattttggtaactgcagagggtcctggaaccaaccccctacagatatcaagggaccactatacacattaggatgatctatattgaaatctacatggaacagagtgggacttctaattgtatgacttcaagattttgctttgtttaaattaataactgttttcagaattaagtgcttaaaaacaaatttgattgaaaagttcaagacaagaattttgctctctatggctgttccatataaatttgatggttgattctgaatgtaaatgactgaagaattaaaaaataagaaattcctttttaaaaggcatgcctcttgcactgtgaacaagacagtagtcccttaaaccatgaatatgtcagtgttctatggattacgaaattagtaatgttgcttagcccaaacgtgttttttaaaaagtatagttttgtacatctctaagttatcaaacttcaaaattgagaacaaatttaaaagtccatatatgcaactctagtaagcacttaataggttacatagcactggttaagaacaattaattttgtttctatattattactaattattattacaaatcaaaaaacactgtgataagaacttcaaagcatatatacaaatatagttaaagcaatgaatagatgaaacatgtctactttatttcatttagaaaggaattaacttttttgttaggcttttaagaaaagttctattcattttaatcccctagggaatttgtaatatgtcctacttcatatcatcttctgttgcctctattgatccacattttctgcagtggatttcttgaaaagaatcacacttatagtatgcctctagaaatatgattttactgctttgaagtttacatgaaacatgccagttgcttaactctaattttttatatgaatctcagtagcacttttgttgtacattgtgttccaataagtatagtatggaacactttctcatttttagttcccataatatgccagtttttgctttcctagtgttctgtgagtattaggatttggcaatctgcttttgcatttcaatttctgttttacatgcaagaaaaacatggacactcttacgtggtgcttgtagctgtgtctccgtagagctcagtaaatagttctacagggtttagaggatgagaagcgattgtcaaattaggctgaattgtagaacacaaataatttaattcaaaataacttaccaattttatatacatgataaagtattcagacaactttctaaatgcataatagtaaaagattgtgaccagatattatgatattaataaagttaccagatactaaaatcaatgaatgtaatttgaattacttagaaattgtatattagagcccttatgagtaaaaacatttcatttagcaacttaacttttagaatattcttcctacttagggattttgattagattgtaacattaaattcgagaatatttagtctcaagagaaacacttcctggcatccatcttaaatagtggccttttcccactatggtgtttttaaatgcatattcatatataatagtatgtttcttacatttaatccctaaataacttagataatcattcagtggagaacaagtaaaaggatatcattccttttggagataaacattgagtgtctagaatttttttctattaatgctttgtatattagttttttaaataagatctatagatatgtatttatgtgtgtcttatatatgaaacagtgctctgggtttgactcctatgttttgtaattttaaaaactacgatatgcttgcagaaattcattgagaagctgttataaaaaatgcagtgaagcatgaccaaatagctaaaaatattactgaatctttacaaatatataatctttattgttgtactgtggagtgcaaggatactaaatattggctattgataaaatactaacttgcatttcatggcaaatagatgttatatcgcttgattagtctagaacatttctaatattttgtgctttcatatatcaaaggagattatgtgaaactatttttaaatactgtaaagtgacatatagttataagatatatttctgtacagtagagaaagagtttataacatgaagaatattgtaccattatacattttcattctcgatctcataagaaattcaaaagaataatgatagaggtgaaaatatgtttactttctctaaatcaagcctagttgtcaactcaaaaattatgttgcatagttttattttgaatttaggttttgggactacttttttccagcttcaatgagaaaataaaatctacaactcaggagttactagagaagttctaagtatttttttgctaagtagtaaaaatataaacatatgaaaatgccataatgcctgtcatagtcattgtttcatattttgtcatataaaatcacctaccctgcttctagttttatactttaatctgagtgaaagtatgatgtggtggaaagaaaaaacagtacagtattacatctgagttagtctttgaaaaatcatagtagtaaatgaacctcaacactgagtggtcaaaaattgggttaaccaatggggggagaatatttggttaattgttttaatattaaattttcaagtttataatagagttatggttgagtagtcatccatactgagtaatcacgcattttttaaactataattgaggctcttctaaagctttgttttctaatctaagatacaaaggatattcttgatcttgcttgattgtaactacatctaccagtctttaatgtctgtttggggtgagtggcgatcctctgttgtaggaatgtttttgaagatttctattttgttttccacttaggaaattcccctctctcatttggggtatatgcgttgagtataaggtaggctgtatttagacacactagaatcattaaatgtaggtgaagttgtagagaaaaatggcctgggtcaatgtaggatctagaaaattaggagtgtacatttgctggcttctttttgagttttgtactgtttattacaggaacatatttgtgtggctaatctctagggtgacagtgagtactaccctgctccttctgcattctagttatccaacacacccagcagattgtgttcagggacagaatgtgtttttagaaatcccttattattgaaatgaataataatatagctataaatatgaatgtctggaggtatccagatgtgccttaacaaatgtaaatggttttcattcagaagtttacatttttattacattataaaatctcatcattgggaactttctaaaccatgaatatcagttcttttaatgaaatttaggtggtgctttatcattttggagaagttgctgtttgggacaatagcatcagtttatcaagaagtgtactcaccatgatattcaacaatgtgttacatttgacaaaacgtgtttagagtaagaaagactaactatactgtctgttatatttatttatgctttttgtagtttagctacatactataattttcattttaaacgttccttagttactacaaataatatttatgttttgcttcttcttagatgtaggcggatgcagaaatagaattatgttagagaaattattaaaagtttaattccagtaggcagttggagaaatctgaaactaatttgaaaaacttttatgctgtagtctcattagaatcattttaaaagcactgttcttgcatttttcctagactacagagagtgttctttgtcattttttttcctattctgttgtgaagtttattgtttcagttatttgagggaaataacctcttaatatgtttattttcctgaactaaagttttcatgtagagaatacaattaaatgttttgtgttatgacccaaactggctggaagtagagttcagagagggagaagggacaagaatcagtgtgggcatctcaggaaagtggcgccagtgctgggctccagccttctccactggcatgatgggtcctcagattctcctctggataatgagggtgttgggcactgtgagctctgacttctggggaggataggccatcatggactccatacacaattttgatgggtatcagttctcataaaatacctgctacaatttatttattttgtagttgtttagaaaactgtgagcagttgggcattagtaaattgtagttatatcttaacgatcttgggaatcattgaaatatgagtttttttccctcactcctatttatttaattaaaaaattagggaagttgttcattcacagctgtatattaatataaaatctctttataaaatgattcagagaaaaggcagtagtggtcacttactgtgctaaaatacctttttctctaaaaatatttaagctttagggtttgtcatagttttactttttaaattatactttgtgtaacaatttacgttaactagaaaaattagatatataataagttttggtactaagaaacatttacattctacactcattagtcaaatgaacttttctttcccagtgctaacagattttgtttcatgtgaagaaaaataaaatacaaatgaaataaaagtctagaaacagcaacaggaaactcaccacagaaataaagacataacccttgataagtttgtgtaagtgccagaattattggaagcaggtgacgaatgattaagaaaagctttattgtggggacatgctttaagaatcagctctgtatttgtgccaaggagatcaggtattggtgtgcaaacagatcccattaatactctgatttgaaccatgaattccacctactctgcgttgaagccctccagtagactgatagatgtaatcaaatgatcagctaccaagtttaattcctttgcctgtgtgtagcaacagttggtagttttacaagttaagttgatggtctggctgcagataagagaaagactcagtgataggtggtttgtgagtgaagtaacttccacactgtcaagagttgacagcatattaattgtgtggcattataattgtgagaaacaaatgagagcaaaatgttaggtcctttgacaagcattttcctcctgtttttaaaaagggctttaagttgtttcctatgtaaggtaatctttcttttttagtattatctaagaaggatggtagattatgtcattttggaaactattgtgtcccttgtattttaaatatttcaggaaaatgcctacgattgttacaaagatgtgtgttttacttataacataagctctgattctccagtggccactgggccttctctgtgctctgtattcaactgcagtatgaattacagaatgctgtgcatgttcgttagtaccaataccatgtgtatgtggtagaagttgtaaccagtttctggatctgtatggtactataaaatacttattttataattctgtaaccgtatggcagtgttatgccaaaaatgtataaagagcaatagtttttgttgcttactgctgtattttaaaatattgtttctaaaataatagagttagagttccttttgagtaattatttttaagaactattgccaaatatacatcctgtaaaactaataaaagccactccatcttagataacattttagcattgtgctagagtacattatggtgattttgcacgattaaaatatttttaaagaactagaaaaaatgacttgctgttttcctgtcattaagcatgtattttttatgattaacacataagactaacattattttcttttatcctcaaaaataaatattgtgaagggtgaatcat

SEQ ID NO: 3301 - protein, 31 aa, Homo sapiens; identical to SEQ ID NO: 3297

SEQ ID NO: 3302 - DNA, 525 bp, Homo sapiens
cagcaaacctttccctgctgtgaggtgggcaagttagttgctccaaaaacaagataaaatgattgagttcttttctcaagcgggagtcggagtttatctgctctgagagccccagcagctactattaatgagtgtctggaatatgttcctggcatttcacctaccctctctccaatccttccaagaaactcacaaagcagggctttttcttgaacttctcttcctcacaacagttaaatcatccatttaaagatgtcaaacaacctccgtgttctaagaactatttactgagctctacggagacacagctacaagcaccacatgctggacccctgaatatggagggccaactacactagaaacacacacgctagctgagaaagatggtggcttaagggtaagcatggaaagaggcaaggaggtgaggacagcaggactgatagataagctggggaggccagagctccacaaggacatccatttcacttatcagaatctaaaaataaacacgttgagatactagaa

SEQ ID NO: 3303 - protein, 40 aa, Homo sapiens
MSVWNMFLAFHLPSLQSFQETHKAGLFLELLFLTTVKSSI

SEQ ID NO: 3304 - DNA, 1184 bp, Homo sapiens
cattcagaagtttacatttttattacattataaaatctcatcattgggaactttctaaaccatgaatatcagttcttttaatgaaatttaggtggtgctttatcattttggagaagttgctgtttgggacaatagcatcagtttatcaagaagtgtactcaccatgatattcaacaatgtgttacatttgacaaaacgtgtttagagtaagaaagactaactatactgtctgttatatttatttatgctttttgtagtttagctacatactataattttcattttaaacgttccttagttactacaaataatatttatgttttgcttcttcttagatgtaggcggatgcagaaatagaattatgttagagaaattattaaaagtttaattccagtaggcagttggagaaatctgaaactaatttgaaaaacttttatgctgtagtctcattagaatcattttaaaagcactgttcttgcatttttcctagactacagagagtgttctttgtcattttttttcctattctgttgtgaagtttattgtttcagttatttgagggaaataacctcttaatatgtttattttcctgaactaaagttttcatgtagagaatacaattaaatgttttgtgttatgacccaaactggctggaagtagagttcagagagggagaagggacaagaatcagtgtgggcatctcaggaaagtggcgccagtgctgggctccagccttctccactggcatgatgggtcctcagattctcctctggataatgagggtgttgggcactgtgagctctgacttctggggaggataggccatcatggactccatacacaattttgatgggtatcagttctcataaaatacctgctacaatttatttattttgtagttgtttagaaaactgtgagcagttgggcattagtaaattgtagttatatcttaacgatcttgggaatcattgaaatatgagtttttttccctcatccatcttagataacattttagcattgtgctagagtacattatggtgattttgcacgattaaaatatttttaaagaactagaaaaaatgacttgctgttttcctgtcattaagcatgtattttttatgattaacacataagactaacattattttcttttatcctcaaaaataaatattgtgaagggtgaa

SEQ ID NO: 3305 - protein, 30 aa, Homo sapiens
MGISSHKIPATIYLFCSCLENCEQLGISKL

SEQ ID NO: 3306 - DNA, 926 bp, Homo sapiens
cctttccctgctgtgaggtgggcaagttagttgctccaaaaacaagataaaatgattgagttcttttctcaagcgggagtcggagtttatctgctctgagagccccagcagctactattaatgagtgtctggaatatgttcctggcatttcacctaccctctctccaatccttccaagaaactcacaaagcagggctttttcttgaacttctcttcctcacaacagttaaatcatccatttaaagatgtcaaacaacctccgtgttctaagccagaccatcaacttaacttgtaaaactaccaactgttgctacacacaggcaaaggaattaaacttggtagctgatcatttgattacatctatcagtctactggagggcttcaacgcagagtaggtggaattcatggttcaaatcagagtattaatgggatctgtttgcacaccaatacctgatctccttggcacaaatacagagctgattcttaaagcatgtccccacaataaagcttttcttaatcattcgtcacctgcttccaataattctggcacttacacaaacttatcaagggttatgtctttatttctgtggtgagtttcctgttgctgtttctagacttttatttcatttgtattttatttttcttcacatgaaacaaaatctgttagcactgggaaagaaaagttcatttgactaatgagtgtagaatgtaaatgtttcttagtaccaaaacttattatatatctaatttttctagttaacgtaaattgttacacaaagtataatttaaaaagtaaaactatgacaaaccctaaagcttaaatatttttagagaaaaaggtattttagcacagtaagtgaccactactgccttttctctgaatcattttataaagagattttatattaatatacagctgtgaatga

SEQ ID NO: 3307 - protein, 49 aa, Homo sapiens
MSNNLRVLSQTINLTCKTTNCCYTQAKELNLVADHLITSISLLEGFNAE

SEQ ID NO: 3308 - DNA, 352 bp, Homo sapiens
gtggtaaacaggatagaaaatgtctctgctctagtggatcttaattcaaattaggcaggagatgatggtaactttgatgtgagcattggaggcagaagagaggagaatggatgcaggatgcattttggagggagatctgatgaaatttgtgatggattagatgtgggtgataagagaaagctatggaaagaatgaaatcaaggatgagcaagtaggtgagtaatggtaatatttactgagatgaggaagactccatttctcccagcagccctttaagttgggttcacctatcccaccctattcctgtatctattttattctatatctatacatctaacctttatctatattg

SEQ ID NO: 3309 - protein, 36 aa, Homo sapiens
DEEDSISPSSPLSWVHLSHPIPVSILFYIYTSNLYL

SEQ ID NO: 3310 - DNA, 1345 bp, Homo sapiens
gctgcgcgagccgctgcggagggaagggctcctagccaattggggtctttgaggcgaatgcgaggctggggccggttgcctaccggccgcttctcgccgaggcagtccagacttttcccccggcggtgcccgctccaagacagcatctgtcaacgctcctcttctcccctcctcctcctgccgggccgggctccgccggctgcggccgagaggacgcgggacccggcgcggtgagcccatcagctgtcaggcgagcggcgaagcggctggagggcggcgagagacacacaaagaacgcggtgggcggcggcggcgaaaggggacggcaactcctccccgcgcccgccggtgccaccgccggccgtgcttgttccgaggccgcgcagacaatgcggccgggctcgtccccgcgtgccccagagtgcggagcgcccgcgctcccccgaccccaacttgaccgtctcccggctcgcccagccccctcccggggtaggggcgccccctccctccggtggccggcgaaggaagtcggtccgcggccgcagatcccggcaacttgcgaaccgggaaaagtttgcggcgcctccgcggggcggcgcgacgcggcccgcccctcgcgtccgcggtcatcgcgggtgactttctcgactcgtcgtcagccggggccgcagcgcggccggtggggactgcggggcgggccggagtccgtccgagggctcccgcacctcgggctgcgggaacattaaaatctccccagatgctcactgctctgatcatttcccctacagcaccagacatgttggcatcatctcttagttgggccatgtggccagggaacccttcatgaaaccacctctgcagtcctggagagttgctgtagaagaaggaaaagagaggaagacaacacaacacaggaggggataagtacctctggacacaatggaagtagtagttgttgagcagagggaaagggataggagaaggatgtggactgcagtgctgcagtgccagtggacatgagagaaagatcccatagccctcttggtcttggttggaacaggaggaaaatgaaaactggacatccatcttaggacttaatcctacggagaccacaagctggaagaggcactcaatactagcatggcttctgtggcattttgatgagtagtatgggctccacactgaaatattaatatcttattgttttgatgatgatgatgatgttcattggcccagggcaaaaggtaaaggttgtgttataaagctgatctattcaatatctgtggatgttaactccaccccatccccttattgaacaattacgatgcctataaatattgtattg

SEQ ID NO: 3311 - protein, 118 aa, Homo sapiens
MRPGSSPRAPECGAPALPRPQLDRLPARPAPSRGRGAPSLRWPAKEVGPRPQIPATCEPGKVCGASAGRRDAARPSRPRSSRVTFSTRRQPGPQRGRWGLRGGPESVRGLPHLGLREH

SEQ ID NO: 3312 - DNA, 966 bp, Homo sapiens
catatatatgaatgtcatatattttcatatatatgaatgtcatatattttcatatatatgaatgtcatatatattttcatatatatgaatgtcatatatattttcatatctatttcataaatatatgaaattcatatctatttcatatatatatgaaattcatatctatttcatatatatatgaaattcatatctatttcataaatatatgaaattcatatctatttcatatatatatgaaattcatatctatttcatatatatatgaaattcatatctatttcatatatatatgaaattcatatctattttcatatatatttcatatatattttccatatatatatatataaattcatcagaacaaggttgtctttttttcttctgaccacaccaatgtaatgaaacagtaagtgtgaaaaagaaaaaaaaaaatacaggaatcaagagcccaaagaatttttaaggaaaccatgattgaataggttatatcagactgactggtctcctaactttgattctgcccacaccattcaatagaaagaggacatggaattccagctattccctccactatagaatttactacattttaaatttaaacaggttaatttaagctacagtaataatttgagacagaatctcatcaagcacagattcaaagtaccacactttgaggtcagagtggagagagcttttcccttgggatgaacatgagaaggttaattaaagaggaagtggactttctcagagcaaagggtattttcataaaaccatggaatctttgagttggctaaatctccataaattttatgaacatattgtgttcttttatctactgtaaagtcacattactgttgattttccatatattttaactgtagtgagttattctatgctgtaattttcctttaggatccagggtaaataaaagcaaactagtataagaacctttataagttactg

SEQ ID NO: 3313 - protein, 38 aa, Homo sapiens
MSYIFIYMNVIYFHIYECHIYFHIYECHIYFHIYFINI

SEQ ID NO: 3314 - DNA, 669 bp, Homo sapiens
gtctgtgggaattatttcctcccattggtattagattatatttttccaagtcaactcttcctggctgcccttcaaggttctaaagattttctactgttgtagtgtaactagtaagaggcaaaaccatgagaatcagagagaacttcccttcatgatgctatgcaatccccaggagaagcacgttgaaagctgaaaagaagactgactgagatgtgttggcgggcttctcaagatccctatcgatggcagaatgctgacatgagttgcccatagtccaggtttcccaatgtagcagatgactctagcggctccagcttcagcatcatcttaagttcaagtgaaaaggaaaagagaatctctttttcttcaaacaatttcaaactaaaatcttgagtctgacttttcctggccagaattaagcttgtacttatccctgaaaaatcatcaatgctacagtgatgaatttaccaattgaggcagaatttaggtcacatgacgctccaaagcctcttcaaaaccgcatgactcagagtgaggcagaagtatttgggatatttgcaacaggagaagggtaaatgaatggagagtgccaaaacaacttatgtcaattatacaattataaatacaaccaaaataaagtatggaaatcagtattttcacctatcttaa

SEQ ID NO: 3315 - protein, 38 aa, Homo sapiens [sequence omitted]

SEQ ID NO: 3316 - DNA, 577 bp, Homo sapiens
aaaccatgagaatcagaggtaagtgcttatcaaaggaatagaaccaagaggacaaattctacttaaacaatgccatccttaaatgagagagaacttcccttcatgatgctatgcaatccccaggagaagcacgttgaaagctgaaaagaagactgactgagatgtgttggcgggcttctcaagatccctatcgatggcagaatgctgacatgagttgcccatagtccagggactgtgttggataagaaataaaaaagaatatgaagaaaaaacaatggtggtgttagagaaaggacccacagagtctgagaatgtgacagaagagcccttccacgtctgggaatgcaacaaggaacatattatatctatttttaaatcttcaaaattcctgtagtagctgagagctggaaatgctacttggattatctcattgttggacctcacctaacacccagtttcctttccctcacattgtgtacttggactttgctcctgccatttatgtgcttcctgcaataccgtcatagaccaccatcacctccacattcattctccaaccactgctaccacaatactc

SEQ ID NO: 3317 - protein, 39 aa, Homo sapiens
MVVLEKGPTESENVTEEPFHVWECNKEHIISIFKSSKFL

SEQ ID NO: 3318 - DNA, 618 bp, Homo sapiens
acagcttccagcatgtgttgtgaaacatttcttctaatttctaaaattgaaacaattactatgatctacaaaatttgaagaacaactatgaatcaataatttactgctataatcaacaaaggataaattaacttcatctgacacatgctgaataatctacataaatatgattgcaagtcatggcaagtattcgtaagtgatttgagaaagtccatgcatgggagcaggacaaagagaaataatctgatcatccctaagaggtttcaaggttttggtatcaggatgatgctggcctcatggagtaagttaaggagtctctccttttcaatcttttgaaatagtttcagtaagaatggtaccctctcttctttatatttctggtagaatttgactgtaaatgtatatttggctggtcctaagttttttgtggttggtaggctttttattactgatttgatttcagaactcattatttgttagttcagggattcaatttctcccttgttcagccttgggaaattgtttgtttctaggaatttattaatttcttctagattttgtcctttgtgtgcatagaggtgttcatagtagactctgagaggtgtatatatatatata

SEQ ID NO: 3319 - protein, 63 aa, Homo sapiens
MLNNLHKYDCKSWQVFVSDLRKSMHGSRTKRNNLIIPKRFQGFGIRMMLASWSKLRSLSFSIF

SEQ ID NO: 3320 - DNA, 665 bp, Homo sapiens
tttatttactagggagcagtttccccgcgcgacagttcgggagcgcgcaggcagtcgcgcgcacacacgcacgcaggcacacacacacacacacacacacacacacacacactttcgcacacacaaacacgctaggacgctcgtcttcgctactgcatccccgaaccagcagagcgaagctactgcgggttctgttaacctcagcatcgtggggcgaagcagagccattgtgcatcaaggagaggccggtgcctgcgctgccgtctctggcacctaacccagcagaccgctcaccccatcggctggaatgcttgctgattcctctgcacacttctaaggctgagaacctgaggaacccagctggaaaatgccgtctgaacgctgcctcagtattcaagaaatgctgacaggccagaggctctgccactccgaatctcacaatgacagtgtcctggcagcgctgaatcagcagaggagtgatggcatcctctgcgacatcaccctgattgctgaggaacagaaattccatgctcacaaggcagtcctagcagcatgcagtgactatttccggatcttggggaacatctcttccttcctgcaggtggtccttgagtcacccttcttcctatctgtcctggtttgagtgtcagactacatgttgatgg

SEQ ID NO: 3321 - protein, 91 aa, Homo sapiens
MPSERCLSIQEMLTGQRLCHSESHNDSVLAALNQQRSDGILCDITLIAEEQKFHAHKAVLAACSDYFRILGNISSFLQVVLESPFFLSVLV

SEQ ID NO: 3322 - DNA, 1952 bp, Homo sapiens
tttatttactagggagcagtttccccgcgcgacagttcgggagcgcgcaggcagtcgcgcgcacacacgcacgcaggcacacacacacacacacacacacacacacacacactttcgcacacacaaacacgctaggacgctcgtcttcgctactgcatccccgaaccagcagagcgaagctactgcgggttctgttaacctcagcatcgtggggcgaagcagagccattgtgcatcaaggagaggccggtgcctgcgctgccgtctctggcacctaacccagcagaccgctcaccccatcggctggaatgcttgctgattcctctgcacacttctaaggctgagaacctgaggaacccagctggaaaatgccgtctgaacgctgcctcagtattcaagaaatgctgacaggccagaggctctgccactccgaatctcacaatgacagtgtcctggcagcgctgaatcagcagaggagtgatggcatcctctgcgacatcaccctgattgctgaggaacagaaattccatgctcacaaggcagtcctagcagcatgcagtgactatttccgggcaatgttcagtctttgtatggtggaaagtggagctgatgaggttaatttgcacggtgtgaccagccttggcttaaagcaggctctggagtttgcatacacaggacagattttgctggagccaggtgtgatccaggatgtgctagcagcgggcagtcacctacagctgttggagcttctcaatttatgctcccactatctcatccaggaattaaatagctttaattacttggatctgtacagacttgctgacctctttaacctcactttgttggagaaggcagtgatcgatttcttagtgaaacatctctctgaactcctgaagagccgcccagaagaagttctaacgcttccctattgcctgcttcaggaggtgctgaagagcgaccgcctgacctccctgagtgaagagcagatctggcagctagctgtgaggtggttggaacacaactgccactaccagtacatggacgagctcctgcaatacatccgctttggcctaatggatgtggatactctccatacagttgccctgtcccacccccttgtccaagcaagtgagactgcaacagcccttgtcaacgaggccctggaataccaccagagcatctatgcacagcctgtctggcagactcgcaggaccaaaccacgattccagtcagacactctgtatatcattggtgggaaaaagcgcgaggtctgcaaggtcaaggaacttcggtacttcaatcctgttgatcaggagaatgctctcatagctgccattgccaactggagtgagctggctcccatgcctgtgggaaggagccaccattgtgtggcagtcatgggggacttcctgtttgtggcaggaggggaagttgagcatgccagtggccggacgtgtgctgtgaggactgcctgtcgctatgacccccgcagtaattcctgggcagagatagcacccatgaaaaactgccgggagcattttgtgctgggtgccatggaggaatacctctatgcagttgggggcagaaatgaactgcgccaggttctgcctacagttgagcgatattgccccaagaagaacaaatggacttttgttcagtcctttgacagatccctttcatgccatgctggatatgtggctgatggtcttctttggatatcaggtagaacatacctcatgttggatttatcaaaacacactttcattgtggtatatatttaaaagtcaagctttaatactgtggccatgtgtaattgaaagattgaaccaagcatgccattttagctaattaacattcatttattgagcacctactctagagagcaatgtaattggaaataatatgcctttctgtgactttctgagtgactaatggaataaaaattcaaggtgg

SEQ ID NO: 3323 - protein, 470 aa, Homo sapiens
MPSERCLSIQEMLTGQRLCHSESHNDSVLAALNQQRSDGILCDITLIAEEQKFHAHKAVLAACSDYFRAMFSLCMVESGADEVNLHGVTSLGLKQALEFAYTGQILLEPGVIQDVLAAGSHLQLLELLNLCSHYLIQELNSFNYLDLYRLADLFNLTLLEKAVIDFLVKHLSELLKSRPEEVLTLPYCLLQEVLKSDRLTSLSEEQIWQLAVRWLEHNCHYQYMDELLQYIRFGLMDVDTLHTVALSHPLVQASETATALVNEALEYHQSIYAQPVWQTRRTKPRFQSDTLYIIGGKKREVCKVKELRYFNPVDQENALIAAIANWSELAPMPVGRSHHCVAVMGDFLFVAGGEVEHASGRTCAVRTACRYDPRSNSWAEIAPMKNCREHFVLGAMEEYLYAVGGRNELRQVLPTVERYCPKKNKWTFVQSFDRSLSCHAGYVADGLLWISGRTYLMLDLSKHTFIVVYI

SEQ ID NO: 3324 - DNA, 2758 bp, Homo sapiens
tttatttactagggagcagtttccccgcgcgacagttcgggagcgcgcaggcagtcgcgcgcacacacgcacgcaggcacacacacacacacacacacacacacacacacactttcgcacacacaaacacgctaggacgctcgtcttcgctactgcatccccgaaccagcagagcgaagctactgcgggttctgttaacctcagcatcgtggggcgaagcagagccattgtgcatcaaggagaggccggtgcctgcgctgccgtctctggcacctaacccagcagaccgctcaccccatcggctggaatgcttgctgattcctctgcacacttctaaggctgagaacctgaggaacccagctggaaaatgccgtctgaacgctgcctcagtattcaagaaatgctgacaggccagaggctctgccactccgaatctcacaatgacagtgtcctggcagcgctgaatcagcagaggagtgatggcatcctctgcgacatcaccctgattgctgaggaacagaaattccatgctcacaaggcagtcctagcagcatgcagtgactatttccgggcaatgttcagtctttgtatggtggaaagtggagctgatgaggttaatttgcacggtgtgaccagccttggcttaaagcaggctctggagtttgcatacacaggacagattttgctggagccaggtgtgatccaggatgtgctagcagcgggcagtcacctacagctgttggagcttctcaatttatgctcccactatctcatccaggtggagtaactaatacggcacaatatcagaacaggctaatggtgtatgaacctaaccagaataagtggataagccgtagccccatgctgcagagaagggtctaccattccatggctgctgtacaaaggaagctttatgttcttggaggcaatgacctagactacaataatgaccggatccttgtgcgccatatagattcttacaacatagacactgaccagtggacacgttgtaatttcaacctgctgactggccaaaatgaatctggagttgctgtccataatgggagaatatatttagttggtggatattcaatttggacaaatgagcctctggcttgtatccaggtactggatgtaagcagagaaggcaaagaagaagtattctatgggcctacactcccttttgcttccaatggaatagcagcatgcttccttccagctccatattttacatgccctaaccttcaaactcttcaagtgcctcatcacaggattggcaccatctgaaaagccaagccatcatgaacaggaggaaaacatagctctgactgttggatactgggcatgaaaagactcagtgctccatgcttccttgtcttgctttataggtcttatattcggataaatttaagcaaaaaatgaacaattttctaaaatacgttattgaaaactcgtcacccttctcagtgtatgtcaacattcaatatgtatgacttttattgtggtatagcttagtgccaatttaaggtatattgtgttccatgggtctttagagcattctttgtacactttttctaatcagcactgtcttaagacaacataacactgttagtaaggcaatttattggacacaatggcatcgatgatcttaaaaatatatatattctgtacttaatccctttattatttaaagccgggcttgtaatttttctttttaaaatttaacattatgcagccctgctcagtagagactcactcagcattatgacatcataaatttttaaatgccatattttattcaaggtgatacgaataataatagacatacactggaacagcagttgttgaaatacccagatttttcaccttggttactctgaccttgggtcagaacctaactttacagtgcttcagttttcccaccttttaaggaggataattactgatttccacgttaatttaaaagaacattatgaggattaggcgaacactttgtaatactttgcccaagaaaaagaaaaatgttgttactgaaattataaggtattttattgtctttagaaccttgtaattgaacagggagattatttttgaagtttaaaaattactagatagaatttggaaacatgttgtggaataaatgattctaaaaagcatgtgaaagagacacacaatgaggaaatagggagtttctcaaaatctaaacttgtacaggtatctaaacttgcctcaagtaactctcagatgtcttatttaaaatcatttagtgaaaaatgacatttaaagctaaaaaataatttagttgtactaattatggtaccataaagtgctttgacataaatttgaacctagaattggcagttctaataaaagtttttccactttgttaaaggttatgtcaatcttgagtgcttgtggaattcttcaccaccaatacatattttattactatctcttttaataatgcataggaattcttttttagactagtttttgggtttgctttgtctataacaaaaaataaatacaacaacttaataatcacatttgaaaacaaatttaacaagtataatgtgagtttttcttttttcctaacttcctcaggacctaggtcacctttattaaaaggaagaattcactcttttttccttggcagtttaatcattcaggaatccctctcttaaaggaaattgttattttattcatgtaacctttttttgtaatcaaaagtgaataaaaacgatctttttgtcttaca

SEQ ID NO: 3325 - protein, 176 aa, Homo sapiens
MLPLSHPGGVTNTAQYQNRLMVYEPNQNKWISRSPMLQRRVYHSMAAVQRKLYVLGGNDLDYNNDRILVRHIDSYNIDTDQWTRCNFNLLTGQNESGVAVHNGRIYLVGGYSIWTNEPLACIQVLDVSREGKEEVFYGPTLPFASNGIAACFLPAPYFTCPNLQTLQVPHHRIGTI

SEQ ID NO: 3326 - DNA, 2502 bp, Homo sapiens
ggttcactgcagattatcaatcagtggaaagtgatagaagcaatggatcagcagaatgggtatagaggcaatgttcagtctttgtatggtggaaagtggagctgatgaggttaatttgcacggtgtgaccagccttggcttaaagcaggctctggagtttgcatacacaggacaggccatgcctcttctgcaagactatacaacatccttgctcctctgatgggagctgcactaatttcgtgaatgtcagtcaaagcctccttccttgaggagttggcgaaagacgggtttctctttctgactagatggaaaaggagatataaagatttttcagaataagatgagtattttgctggagccaggtgtgatccaggatgtgctagcagcgggcagtcacctacagctgttggagcttctcaatttatgctcccactatctcatccaggaattaaatagctttaattacttggatctgtacagacttgctgacctctttaacctcactttgttggagaaggcagtgatcgatttcttagtgaaacatctctctgaactcctgaagagccgcccagaagaagttctaacgcttccctattgcctgcttcaggaggtgctgaagagcgaccgcctgacctccctgagtgaagagcagatctggcaggtggagtaactaatacggcacaatatcagaacaggctaatggtgtatgaacctaaccagaataagtggataagccgtagccccatgctgcagagaagggtctaccattccatggctgctgtacaaaggaagctttatgttcttggaggcaatgacctagactacaataatgaccggatccttgtgcgccatatagattcttacaacatagacactgaccagtggacacgttgtaatttcaacctgctgactggccaaaatgaatctggagttgctgtccataatgggagaatatatttagttggtggatattcaatttggacaaatgagcctctggcttgtatccaggtactggatgtaagcagagaaggcaaagaagaagtattctatgggcctacactcccttttgcttccaatggaatagcagcatgcttccttccagctccatattttacatgccctaaccttcaaactcttcaagtgcctcatcacaggattggcaccatctgaaaagccaagccatcatgaacaggaggaaaacatagctctgactgttggatactgggcatgaaaagactcagtgctccatgcttccttgtcttgctttataggtcttatattcggataaatttaagcaaaaaatgaacaattttctaaaatacgttattgaaaactcgtcacccttctcagtgtatgtcaacattcaatatgtatgacttttattgtggtatagcttagtgccaatttaaggtatattgtgttccatgggtctttagagcattctttgtacactttttctaatcagcactgtcttaagacaacataacactgttagtaaggcaatttattggacacaatggcatcgatgatcttaaaaatatatatattctgtacttaatccctttattatttaaagccgggcttgtaatttttctttttaaaatttaacattatgcagccctgctcagtagagactcactcagcattatgacatcataaatttttaaatgccatattttattcaaggtgatacgaataataatagacatacactggaacagcagttggcgaacactttgtaatactttgcccaagaaaaagaaaaatgttgttactgaaattataaggtattttattgtctttagaaccttgtaattgaacagggagattatttttgaagtttaaaaattactagatagaatttggaaacatgttgtggaataaatgattctaaaaagcatgtgaaagagacacacaatgaggaaatagggagtttctcaaaatctaaacttgtacaggtatctaaacttgcctcaagtaactctcagatgtcttatttaaaatcatttagtgaaaaatgacatttaaagctaaaaaataatttagttgtactaattatggtaccataaagtgctttgacataaatttgaacctagaattggcagttctaataaaagtttttccactttgttaaaggttatgtcaatcttgagtgcttgtggaattcttcaccaccaatacatattttattactatctcttttaataatgcataggaattcttttttagactagtttttgggtttgctttgtctataacaaaaaataaatacaacaacttaataatcacatttgaaaacaaatttaacaagtataatgtgagtttttcttttttcctaacttcctcaggacctaggtcacctttattaaaaggaagaattcactcttttttccttggcagtttaatcattcaggaatccctctcttaaaggaaattgttattttattcatgtaacctttttttgtaatcaaaagtgaataaaaacgatctttttgtcttaca

SEQ ID NO: 3327 - protein, 156 aa, Homo sapiens
MVYEPNQNKWISRSPMLQRRVYHSMAAVQRKLYVLGGNDLDYNNDRILVRHIDSYNIDTDQWTRCNFNLLTGQNESGVAVHNGRIYLVGGYSIWTNEPLACIQVLDVSREGKEEVFYGPTLPFASNGIAACFLPAPYFTCPNLQTLQVPHHRIGTI

SEQ ID NO: 3328 - DNA, 502 bp, Homo sapiens
agctgtaagctgtccgcgagggaggtgatctcctgggccgagggcttggggcatttgaggaaatggctctccagagcccccttgacgctcacctcgatggagttgctgtgagtagtaccaccagtacaatgttgaacagaagtggtgagagtaacagagaggcccaagaagagggagaaagatggaggagtggctgtttgatggaagagtcagaaaacacacaacatttgttggttgagtttgccatcttattggtctggaactgagcctgccgtgtctcccaggtacacctgtgcctactatgtgttatcagggattcaaagattaggacagaaatgagaaaagccagacttcgaagcctaattttcaggggctcacatcacttctgttcctgtgtcgtgggaccatccagcagcagcacataattgaaagtcatctgactcacaggattgggagtgaacctggcaggccctggaacagatcttcactgactggcatgtgt

SEQ ID NO: 3329 - protein, 67 aa, Homo sapiens [sequence omitted]

SEQ ID NO: 3330 - DNA, 2941 bp, Homo sapiens
gaggcagctgcggggggagccggcggccgctgctgccgcccagggctctggggccccgccggccaggcccgccgtccgcggccagtgcccttcctcctcctcctcctctgccgccgcctcctcagtcgccgccgcctcctcagtcgccgccgcccgcgccgcccgcgccctccgcgcgcctctgagcccgcgccgggccgcgccggccccttcccatgcgggcggcgcgggccctgggaggggcgcccggagccagccgcgcagcatgcactggggggttggctttgcttcgtccaggccgtgcgtggtggatctgagctggaaccagagcatctccttcttcggctggtgggccgggtccgaggagcccttctccttttatggggacatcatcgctttccctttgcaggattacggtgggatcatggcagggctgggctccgatccctggtggaagaaaaccctttacttgaccgggggagctttgctggccgcagctgcgtatctgctccacgaactcctggtcattaggaaacagcaagagattgactctaaagatgctattattttgcatcagtttgcaagacctaacaatggtgttccaagtttatctcctttctgtttaaagatggaaacttatttaaggatggctgacttaccgtatcagaactattttggtggaaaactctctgctcaagggaaaatgccttggattgaatataatcatgaaaaagtttctggcacagaattcataattgactttctggaagagaagcttggagtgaatttaaacaaaaaccttggccctcatgaaagagccatctccagagcggtgaccaagatggtggaggagcacttctactggacattagcttattgccagtgggtggacaatctcaatgagacccggaagatgctctctcttagtggtggtggtcccttcagcaacctgctgaggtgggttgtgtgccacataacgaaaggaattgtgaaacgcgagatgcacggccacggcattggccgcttctccgaggaagagatttacatgctgatggagaaggacatgcggtctttagcagggcttttgggtgataagaagtacatcatggggcccaagctttccactcttgacgccactgtctttggacacttggcacaggcaatgtggaccttaccagggacaagacccgaacggctgatcaaaggtgagctgatcaaccttgccatgtactgtgagaggataaggaggaaattttggccagagtggcaccacgatgatgacaataccatctatgagtctgaggagagcagcgaaggcagcaaaacccacaccccgctgctggattttagcttttactcaaggacagagacctttgaagatgagggagcagaaaacagtttttccagaaccccagacacagattttactggacactcactctttgattcggatgtggacatggatgactatacagaccacgaacagtgcaagtgacgtccagcctcactgaccctcttccttgggacctgccactccctgggtcggtccattttcccaggtagcaatccatccgagctgggaggagatcttcgtgcttggcagagttttcacatgctaactggactatagcagccttatttcttttttgtacaaacaaaacacagaaccattcagatgactccattgaaaacaaacaggcaaaaaataatgtcagcatggttcctgaaatccatttttgttttcattagaaaactattaataatattgtgtggtagagcaggtgtaagagctggttgtcagctgatagtttttatgatgatcctcttcaaccctgaggtcttaattgtgagatggattcttgaacctccttcctccaccaggatttgaagtaatgagagatatcatcagaaaaatgttttacggtggctgcttgtactttatgtgtgtatattgtatgttgagacataagtcaaataactcttagaagtggtgcgacataaacacagcattttattctttattgcacttcatgcatgtgaagatttgagggcaaaggaattccatatccaggcaaccaccaccacagtcacctgcaaaagctgagcagatgaaatacacacaaaggtacacttaggactttgtcatgattcctttctgtaatcttggctgaatcaaaatcttttgttcaaagaacattggaaatgtttttacaaattatcgacagctacaaacagtcttcaattctaccatgtatttgcagaaaagtggttctttcattgcctgaactcaccctggcatgttctgtgttgactccagagtgttacgttgcctatgtttgatttatttgagaagaataaatctcaggtatatggcaggtttcatagagttgaagggaaagtatttcattgatttttataagcagaagcctgccaacttgtaatgtctttttgaaaacaaaccttgcaaagatgtattgaaaagatgaagtagcaagaggatacttgtatcaaagcactctgtgcagtgttagactatatgcagttttattaatgcaacttttctggtgttttcagccactgcccagtgagaggagagcaatgctgagaacaagtcttaatgtttttgctgtctcatccccgttctctctctctttccctatagtattcgatgaactgttggcttacccatatttgtgaaggcaccctatttctaaagatgaagttgttgttgttgttgttgttttgacttaggacattttccagggaaatatggggcagagatcctgggtgatggctgtgagatttgggctaggagagccaagatttacaattgcaaacaaaactgctttgcttctgaccaacataaggattgctcattatggggttaaagaggcacttcttaaaatacagcaacttctgagaaatccatgcactttacttg

SEQ ID NO: 3331 - protein, 409 aa, Homo sapiens; identical to SEQ ID NO: 376

SEQ ID NO: 3332 - DNA, 915 bp, Homo sapiens
ggtagtgcaatactattaattcccaggccatgctgtcagctcatcagtagagagttgagtggaggtgaagggcatgaggactaacgaggttaatatgaattcaacaggtgagctgatcaaccttgccatgtactgtgagaggataaggaggaaattttggccagagtggcaccacgatgatgacaataccatctatgagtctgaggagagcagcgaaggcagcaaaacccacaccccgctgctggattttagcttttactcaaggacagagacctttgaagatgagggagcagaaaacagtttttccagaaccccagacacagattttactggacactcactctttgattcggatgtggacatggatgactatacagaccacgaacagtgcaagtgacgtccagcctcactgaccctcttccttgggacctgccactccctgggtcggtccattttcccaggtagcaatccatccgagctgggaggagatcttcgtgcttggcagagttttcacatgctaactggactatagcagccttatttcttttttgtacaaacaaaacacagaaccattcagatgactccattgaaaacaaacaggcaaaaaataatgtcagcatggttcctgaaatccatttttgttttcattagaaaactattaataatattgtgtggtagagcaggtgtaagagctggttgtcagctgatagtttttatgatgatcctcttcaaccctgaggtcttaattgtgagatggattcttgaacctccttcctccaccaggatttgaagtaatgagagatatcatcagaaaaatgttttacggtggctgcttgtactttatgtgtgtatattgtatgttgagacataagtcaaataaaatccacagatattaaacgaacacctactatgtgc

SEQ ID NO: 3333 - protein, 107 aa, Homo sapiens
MRTNEVNMNSTGELINLAMYCERIRRKFWPEWHHDDDNTIYESEESSEGSKTHTPLLDFSFYSRTETFEDEGAENSFSRTPDTDFTGHSLFDSDVDMDDYTDHEQCK

SEQ ID NO: 3334 - DNA, 854 bp, Homo sapiens
agaacaattgctgatattgtggtatgtatgtaatcttttatcaaatgtgagctgatcaaccttgccatgtactgtgagaggataaggaggaaattttggccagagtggcaccacgatgatgacaataccatctatgagtctgaggagagcagcgaaggcagcaaaacccacaccccgctgctggattttagcttttactcaaggacagagacctttgaagatgagggagcagaaaacagtttttccagaaccccagacacagattttactggacactcactctttgattcggatgtggacatggatgactatacagaccacgaacagtgcaagtgacgtccagcctcactgaccctcttccttgggacctgccactccctgggtcggtccattttcccaggtagcaatccatccgagctgggaggagatcttcgtgcttggcagagttttcacatgctaactggactatagcagccttatttcttttttgtacaaacaaaacacagaaccattcagatgactccattgaaaacaaacaggcaaaaaataatgtcagcatggttcctgaaatccatttttgttttcattagaaaactattaataatattgtgtggtagagcaggtgtaagagctggttgtcagctgatagtttttatgatgatcctcttcaaccctgaggtcttaattgtgagatggattcttgaacctccttcctccaccaggatttgaagtaatgagagatatcatcagaaaaatgttttacggtggctgcttgtactttatgtgtgtatattgtatgttgagacataagtcaaataaaatccacagatattaaacgaacacctactatgtgc

SEQ ID NO: 3335 - protein, 89 aa, Homo sapiens
MYCERIRRKFWPEWHHDDDNTIYESEESSEGSKTHTPLLDFSFYSRTETFEDEGAENSFSRTPDTDFTGHSLFDSDVDMDDYTDHEQCK

SEQ ID NO: 3336 - DNA, 899 bp, Homo sapiens
ggtagtgcaatactattaattcccaggccatgctgtcagctcatcagtagagagttgagtggaggtgaagggcatgaggactaacgaggttaatatgaattcaacaggtgagctgatcaaccttgccatgtactgtgagaggataaggaggaaattttggccagagtggcaccacgatgatgacaataccatctatgagtctgaggagagcagcgaaggcagcaaaacccacaccccgctgctggattttagcttttactcaaggacagagacctttgaagatgagggagcagaaaacagtttttccagaaccccagacacagattttactggacactcactctttgattcggatgtggacatggatgactatacagaccacgaacagtgcaagtgacgtccagcctcactgaccctcttccttgggacctgccactccctgggtcggtccattttcccaggtagcaatccatccgagctgggaggagatcttcgtgcttggcagagttttcacatgctaactggactatagcagccttatttcttttttgtacaaacaaaacacagaaccattcagatgactccattgaaaacaaacaggcaaaaaataatgtcagcatggttcctgaaatccatttttgttttcattagaaaactattaataatattgtgtggtagagcaggtgtaagagctggttgtcagctgatagtttttatgatgatcctcttcaaccctgaggtcttaattgtgagatggattcttgaacctccttcctccaccaggatttgaagtaatgagagatatcatcagaaaaatgttttacggtggctgcttgtactttatgtgtgtatattgtatgttgagacataagtcaaataaaatccacagatattaaacg

SEQ ID NO: 3337 - protein, 107 aa, Homo sapiens; identical to SEQ ID NO: 3333

SEQ ID NO: 3338 - DNA, 838 bp, Homo sapiens
agaacaattgctgatattgtggtatgtatgtaatcttttatcaaatgtgagctgatcaaccttgccatgtactgtgagaggataaggaggaaattttggccagagtggcaccacgatgatgacaataccatctatgagtctgaggagagcagcgaaggcagcaaaacccacaccccgctgctggattttagcttttactcaaggacagagacctttgaagatgagggagcagaaaacagtttttccagaaccccagacacagattttactggacactcactctttgattcggatgtggacatggatgactatacagaccacgaacagtgcaagtgacgtccagcctcactgaccctcttccttgggacctgccactccctgggtcggtccattttcccaggtagcaatccatccgagctgggaggagatcttcgtgcttggcagagttttcacatgctaactggactatagcagccttatttcttttttgtacaaacaaaacacagaaccattcagatgactccattgaaaacaaacaggcaaaaaataatgtcagcatggttcctgaaatccatttttgttttcattagaaaactattaataatattgtgtggtagagcaggtgtaagagctggttgtcagctgatagtttttatgatgatcctcttcaaccctgaggtcttaattgtgagatggattcttgaacctccttcctccaccaggatttgaagtaatgagagatatcatcagaaaaatgttttacggtggctgcttgtactttatgtgtgtatattgtatgttgagacataagtcaaataaaatccacagatattaaacg

SEQ ID NO: 3339 - protein, 89 aa, Homo sapiens; identical to SEQ ID NO: 3335

SEQ ID NO: 3340 - DNA, 1996 bp, Homo sapiens
cacaaagagcggggcggagaggcagctgcggggggagccggcggccgctgctgccgcccagggctctggggccccgccggccaggcccgccgtccgcggccagtgcccttcctcctcctcctcctctgccgccgcctcctcagtcgccgccgcctcctcagtcgccgccgcccgcgccgcccgcgccctccgcgcgcctctgagcccgcgccgggccgcgccggccccttcccatgcgggcggcgcgggccctgggaggggcgcccggagccagccgcgcagcatgcactggggggttggctttgcttcgtccaggccgtgcgtggtggatctgagctggaaccagagcatctccttcttcggctggtgggccgggtccgaggagcccttctccttttatggggacatcatcgctttccctttgcaggattacggtgggatcatggcagggctgggctccgatccctggtggaagaaaaccctttacttgaccgggggagctttgctggccgcagctgcgtatctgctccacgaactcctggtcattaggaaacagcaagagattgactctaaagatgctattattttgcatcagtttgcaagacctaacaatggtgttccaagtttatctcctttctgtttaaagatggaaacttatttaaggatggctgacttaccgtatcagaactattttggtggaaaactctctgctcaagggaaaatgccttggattgaatataatcatgaaaaagtttctggcacagaattcataattgactttctggaagagaagcttggagtgaatttaaacaaaaaccttggccctcatgaaagagccatctccagagcggtgaccaagatggtggaggagcacttctactggacattagcttattgccagtgggtggacaatctcaatgagacccggaagatgctctctcttagtggtggtggtcccttcagcaacctgctgaggtgggttgtgtgccacataacgaaaggaattgtgaaacgcgagatgcacggccacggcattggccgcttctccgaggaagagatttacatgctgatggagaaggacatgcggtctttagcagggcttttgggtgataagaagtacatcatggggcccaagctttccactcttgacgccactgtctttggacacttggcacaggcaatgtggaccttaccagggacaagacccgaacggctgatcaaaggtgagctgatcaaccttgccatgtactgtgagaggataaggaggaaattttggccagagtggcaccacgatgatgacaataccatctatgagtctgaggagagcagcgaaggcagcaaaacccacaccccgctgctggattttagcttttactcaaggacagagacctttgaagatgagggagcagaaaacagtttttccagaaccccagacacagattttactggacactcactctttgattcggatgtggacatggatgactatacagaccacgaacagtgcaagtgacgtccagcctcactgaccctcttccttgggacctgccactccctgggtcggtccattttcccaggtagcaatccatccgagctgggaggagatcttcgtgcttggcagagttttcacatgctaactggactatagcagccttatttcttttttgtacaaacaaaacacagaaccattcagatgactccattgaaaacaaacaggcaaaaaataatgtcagcatggttcctgaaatccatttttgttttcattagaaaactattaataatattgtgtggtagagcaggtgtaagagctggttgtcagctgatagtttttatgatgatcctcttcaaccctgaggtcttaattgtgagatggattcttgaacctccttcctccaccaggatttgaagtaatgagagatatcatcagaaaaatgttttacggtggctgcttgtactttatgtgtgtatattgtatgttgagacataagtcaaataa

SEQ ID NO: 3341 - protein, 409 aa, Homo sapiens; identical to SEQ ID NO: 376

SEQ ID NO: 3342 - DNA, 638 bp, Homo sapiens
agatgcaaccccaggagacgtccctgtggcagccagtgtcagctgcttccttccccagcgttttgcttcagccctcactcctcagccacttccactgctcctgtggttagtgaccgcctctgcctcctccactacccggacagcttggtgaatacttccagggaaaattctgcttaaattccgctggtggcatgcccataagcatttccagatctgaaggcgcttgcgcctttcctagtactctactgtccacagggccacagagtctcaactgctggatattgtccaagtcctcttcattgcagctgtgatggctacacggccaggcctggctcggaggcacaaagccggttttttgtgtgaccacagaaaggtcatcccaacactgaattttatcaccccttggggagatgctaacataggagtcaaaatagcgaaggtttaaggtgagaggcgcgctcccggttacaggtatccgtggtcattcttctgaatctctagaaatcggactcaggcgctcctctctttggggctcctcgcaggcgactgcatttgctgcgcggcgcggccaggcgggtccttagcgccggcaccgtcgccctcggcatcccacagcgcgcagcgcagccaccgctctt

SEQ ID NO: 3343 - protein, 44 aa, Homo sapiens
MATRPGLARRHKAGFLCDHRKVIPTLNFITPWGDANIGVKIAKV

SEQ ID NO: 3344 - DNA, 3848 bp, Homo sapiens
cacaaggcagaagaagtgttctatgcagtcaaagttttacagaagaaagcaatcctgaaaaagaaagaggtatgagatgtgcttgatggggctggcattggcggtagacactccttgaataatcttgattctggaatgttggtgccaagttgaaacatgccactaaatctgaatcgtcattttcctaggagaagcatattatgtcggagcggaatgttctgttgaagaatgtgaagcaccctttcctggtgggccttcacttctctttccagactgctgacaaattgtactttgtcctagactacattaatggtggagagttgttctaccatctccagagggaacgctgcttcctggaaccacgggctcgtttctatgctgctgaaatagccagtgccttgggctacctgcattcactgaacatcgtttataggtaagcctgagagctcttcaggctaccagttttggtataaaggagacgtagcactggctgtttcatagggccttaaaataatttgtgtttatttgcaacttggttgcctaaaaccagatcccctagcacgtgagctggcttgacttaagtgccaagggggaaccagccaagtaggattgtgcctaatccagaatagatgagcagaacaagggctcccttttttcttcactacacaactacagtgaacctaaaatgcctctaatacctttagcaattatctttaagaggatatcttatgaagtgaaattaacttgtgcaactacttttctattcacttttttacagagacttaaaaccagagaatattttgctagattcacagggacacattgtccttactgacttcggactctgcaaggagaacattgaacacaacagcacaacatccaccttctgtggcacgccggaggtaggcgctgtcttggtttggtgcctggtttacccccgccttccaagagagagatgtacaatcatgcacttaactaccaaaaagagtaaactcctctcagagacttcttaatacagttcagtgcaaataaaatacatttgctgtttgatgtagcatgagaaatcccaagtccttctgttcctttactgaaaagtagctgtttgtaagtaagatctgcatcataaaaactttctaaatccctaagtaagagatatcaagtgcccagcagtttcctaaatgtcagtacacataggtagccagtcaccctcaaaaagtccagcagttttatcaggaaggaatctaaagatatctatcttccaagctggctctgggtctctcagctttttcaaactaaatgtgtggtcgtgggattgcttgctttcgcaggttctaaacgctgtttccctggtctgtttttcagtatctcgcacctgaggtgcttcataagcagccttatgacaggactgtggactggtggtgcctgggagctgtcttgtatgagatgctgtatggcctggtgagtggcacattgggaaccatggaacactgcctgctccctacaatattgccttcacacagcccatgcttggccatggtgtcttgcccttaccagtacgcttatcaaaagcagctaagaggcatattggttattttatagttcataagaataatcacttacctggttcttttgtgcatttcacattttactagataggaccacattgaacctgtgtggtggtgaaaaactaccacttattaacatctaccccctcaccctccacacacacacacacaaacacacacacgggttgcaaagtagacacttaaatagcaagggaaaagaaagcattgaggtggggagagtttctcaaatcgagcctaatatttattgccgtttatatctttttctctactggtaatgtgtgccatatgaaacttccaattaagtctaaagtaattttccccttctttcagccgcctttttatagccgaaacacagctgaaatgtacgacaacattctgaacaagcctctccagctgaaaccaaatattacaaattccgcaagacacctcctggagggcctcctgcagaaggacaggacaaagcggctcggggccaaggatgacttcgtgagtgatgttttcctgtcctcctgggccggccgggacgtgcactagacctccctgcccttattgaatgcacctgtctaaattaatcttgggtttcttatcaacagatggagattaagagtcatgtcttcttctccttaattaactgggatgatctcattaataagaagattactcccccttttaacccaaatgtggtgagtatctgtctctcttctaagtatagagaagcccaaagggcatttattttaattcagaattgtctgggggagggttggaaggaatacattggcagatgttttctccataaacctgttattttacctacataaaaagcacatttttgtgtcccaacaaggctcccataatttttagacacatttatcaattcgaagcaccaaaaggcaacaagtgaacattattcttatgtttaactgtgtgtagccttttgagattttgtgcttgaagtgggtgattatggaagttgatataagacttaaacttggtatttaaagcctggtcaagatttccctgtcctgtgtctagtgtgagttcttgacaagagtgtttttcccttcccgtcacagagtgggcccaacgacctacggcactttgaccccgagtttaccgaagagcctgtccccaactccattggcaagtcccctgacagcgtcctcgtcacagccagcgtcaaggaagctgccgaggctttcctaggcttttcctatgcgcctcccacggactctttcctctgaaccctgttagggcttggttttaaaggattttatgtgtgtttccgaatgttttagttagccttttggtggagccgccagctgacaggacatcttacaagagaatttgcacatctctggaagcttagcaatcttattgcacactgttcgctggaagctttttgaagagcacattctcctcagtgagctcatgaggttttcatttttattcttccttccaacgtggtgctatctctgaaacgagcgttagagtgccgccttagacggaggcaggagtttcgttagaaagcggacgctgttctaaaaaaggtctcctgcagatctgtctgggctgtgatgacgaatattatgaaatgtgccttttctgaagagattgtgttagctccaaagcttttcctatcgcagtgtttcagttctttattttcccttgtggatatgctgtgtgaaccgtcgtgtgagtgtggtatgcctgatcacagatggattttgttataagcatcaatgtgacacttgcaggacactacaacgtgggacattgtttgtttcttccatatttggaagataaatttatgtgtagacttttttgtaagatacggttaataactaaaatttattgaaatggtcttgcaatgactcgtattcagatgcttaaagaaagcattgctgctacaaatatttctatttttagaaagggtttttatggaccaatgccccagttgtcagtcagagccgttggtgtttttcattgtttaaaatgtcacctgtaaaatgggcattatttatgtttttttttttgcattcctgataattgtatgtattgtataaagaacgtctgtacattgggttataacactagtatatttaaacttacaggcttatttgtaatgtaaaccaccattttaatgtactgtaattaacatggttataatacgtacaatccttccctcatcccatcacacaactttttttgtgtgtgataaactgattttggtttgcaataaaaccttgaaaaatatttacatat

SEQ ID NO: 3345 - protein, 78 aa, Homo sapiens
MSERNVLLKNVKHPFLVGLHFSFQTADKLYFVLDYINGGELFYHLQRERCFLEPRARFYAAEIASALGYLHSLNIVYR

SEQ ID NO: 3346 - DNA, 2441 bp, Homo sapiens
gaagatcttttggtacacttccttcatgtcctcttttgtattctccctggatgaggatagaaaaatgatttttttaaattgaaatttcaggttcttctagcaagacacaaggcagaagaagtgttctatgcagtcaaagttttacagaagaaagcaatcctgaaaaagaaagaggtatgagatgtgcttgatggggctggcattggcggtagacactccttgaataatcttgattctggaatgttggtgccaagttgaaacatgccactaaatctgaatcgtcattttcctaggagaagcatattatgtcggagcggaatgttctgttgaagaatgtgaagcaccctttcctggtgggccttcacttctctttccagactgctgacaaattgtactttgtcctagactacattaatggtggagaggtgagcaggggggatagaagtcaactcttagtgtctctgcacagcctgctttgttttagtttgagaaaaaagttttcaaagatttttggtggggagaatgttaccagaattagcatttccttcaacctgtcaggtttatagttaatagattacttggggccacttcctgcagttgttcttttgctgtgtatgtcaaaactaattaaattcatttgcaacccagaatgactttgttctgtctcctgcagttgttctaccatctccagagggaacgctgcttcctggaaccacgggctcgtttctatgctgctgaaatagccagtgccttgggctacctgcattcactgaacatcgtttatagagacttaaaaccagagaatattttgctagattcacagggacacattgtccttactgacttcggactctgcaaggagaacattgaacacaacagcacaacatccaccttctgtggcacgccggagtatctcgcacctgaggtgcttcataagcagccttatgacaggactgtggactggtggtgcctgggagctgtcttgtatgagatgctgtatggcctgccgcctttttatagccgaaacacagctgaaatgtacgacaacattctgaacaagcctctccagctgaaaccaaatattacaaattccgcaagacacctcctggagggcctcctgcagaaggacaggacaaagcggctcggggccaaggatgacttcatggagattaagagtcatgtcttcttctccttaattaactgggatgatctcattaataagaagattactcccccttttaacccaaatgtgagtgggcccaacgacctacggcactttgaccccgagtttaccgaagagcctgtccccaactccattggcaagtcccctgacagcgtcctcgtcacagccagcgtcaaggaagctgccgaggctttcctaggcttttcctatgcgcctcccacggactctttcctctgaaccctgttagggcttggttttaaaggattttatgtgtgtttccgaatgttttagttagccttttggtggagccgccagctgacaggacatcttacaagagaatttgcacatctctggaagcttagcaatcttattgcacactgttcgctggaagctttttgaagagcacattctcctcagtgagctcatgaggttttcatttttattcttccttccaacgtggtgctatctctgaaacgagcgttagagtgccgccttagacggaggcaggagtttcgttagaaagcggacgctgttctaaaaaaggtctcctgcagatctgtctgggctgtgatgacgaatattatgaaatgtgccttttctgaagagattgtgttagctccaaagcttttcctatcgcagtgtttcagttctttattttcccttgtggatatgctgtgtgaaccgtcgtgtgagtgtggtatgcctgatcacagatggattttgttataagcatcaatgtgacacttgcaggacactacaacgtgggacattgtttgtttcttccatatttggaagataaatttatgtgtagacttttttgtaagatacggttaataactaaaatttattgaaatggtcttgcaatgactcgtattcagatgcttaaagaaagcattgctgctacaaatatttctatttttagaaagggtttttatggaccaatgccccagttgtcagtcagagccgttggtgtttttcattgtttaaaatgtcacctgtaaaatgggcattatttatgtttttttttttgcattcctgataattgtatgtattgtataaagaacgtctgtacattgggttataacactagtatatttaaacttacaggcttatttgtaatgtaaaccaccattttaatgtactgtaattaacatggttataatacgtacaatccttccctcatcccatcacacaactttttttgtgtgtgataaactgattttggtttgcaataaaaccttgaaaaatatttacatat

SEQ ID NO: 3347 - protein, 256 aa, Homo sapiens [sequence omitted]

SEQ ID NO: 3348 - DNA, 4806 bp, Homo sapiens
atccacagctttcatgaagcagaggaggatgggtctgaacgactttattcagaagattgccaataactcctatgcatgcaaacagtaagtttgaccggatttgaggaaataactagtatagtttgaatttgccagcggtaaacattctcatcacggcgtttatcgggaaggcgaagacttcttctggggtggggatctcatttctccttaaattctaatatatttgacacattttaaacattaaagttaatttgctgatttggcttgaactggagatgtaagataaatggttcgtgttggccgaattcacggcctttctccatgagcaacaatccttatttctgtatttaatggggtttattattttctttaactgactaatgtattggggtattttcagtttaaacagtgaattatccgggtagaagtcggtagagccagaaactcacttttgatgttggtgtgccccctagtggcgagctggattctaaatcgtgccctttattccctgcagccctgaagttcagtccatcttgaagatctcccaacctcaggagcctgagcttatgaatgccaacccttctcctccaccaagtccttctcagcaaatcaaccttggcccgtcgtccaatcctcatgctaaaccatctgactttcacttcttgaaagtgatcggaaagggcagttttggaaaggttcttctagcaagacacaaggcagaagaagtgttctatgcagtcaaagttttacagaagaaagcaatcctgaaaaagaaagaggtatgagatgtgcttgatggggctggcattggcggtagacactccttgaataatcttgattctggaatgttggtgccaagttgaaacatgccactaaatctgaatcgtcattttcctaggagaagcatattatgtcggagcggaatgttctgttgaagaatgtgaagcaccctttcctggtgggccttcacttctctttccagactgctgacaaattgtactttgtcctagactacattaatggtggagaggtgagcaggggggatagaagtcaactcttagtgtctctgcacagcctgctttgttttagtttgagaaaaaagttttcaaagatttttggtggggagaatgttaccagaattagcatttccttcaacctgtcaggtttatagttaatagattacttggggccacttcctgcagttgttcttttgctgtgtatgtcaaaactaattaaattcatttgcaacccagaatgactttgttctgtctcctgcagttgttctaccatctccagagggaacgctgcttcctggaaccacgggctcgtttctatgctgctgaaatagccagtgccttgggctacctgcattcactgaacatcgtttataggtaagcctgagagctcttcaggctaccagttttggtataaaggagacgtagcactggctgtttcatagggccttaaaataatttgtgtttatttgcaacttggttgcctaaaaccagatcccctagcacgtgagctggcttgacttaagtgccaagggggaaccagccaagtaggattgtgcctaatccagaatagatgagcagaacaagggctcccttttttcttcactacacaactacagtgaacctaaaatgcctctaatacctttagcaattatctttaagaggatatcttatgaagtgaaattaacttgtgcaactacttttctattcacttttttacagagacttaaaaccagagaatattttgctagattcacagggacacattgtccttactgacttcggactctgcaaggagaacattgaacacaacagcacaacatccaccttctgtggcacgccggaggtaggcgctgtcttggtttggtgcctggtttacccccgccttccaagagagagatgtacaatcatgcacttaactaccaaaaagagtaaactcctctcagagacttcttaatacagttcagtgcaaataaaatacatttgctgtttgatgtagcatgagaaatcccaagtccttctgttcctttactgaaaagtagctgtttgtaagtaagatctgcatcataaaaactttctaaatccctaagtaagagatatcaagtgcccagcagtttcctaaatgtcagtacacataggtagccagtcaccctcaaaaagtccagcagttttatcaggaaggaatctaaagatatctatcttccaagctggctctgggtctctcagctttttcaaactaaatgtgtggtcgtgggattgcttgctttcgcaggttctaaacgctgtttccctggtctgtttttcagtatctcgcacctgaggtgcttcataagcagccttatgacaggactgtggactggtggtgcctgggagctgtcttgtatgagatgctgtatggcctggtgagtggcacattgggaaccatggaacactgcctgctccctacaatattgccttcacacagcccatgcttggccatggtgtcttgcccttaccagtacgcttatcaaaagcagctaagaggcatattggttattttatagttcataagaataatcacttacctggttcttttgtgcatttcacattttactagataggaccacattgaacctgtgtggtggtgaaaaactaccacttattaacatctaccccctcaccctccacacacacacacacaaacacacacacgggttgcaaagtagacacttaaatagcaagggaaaagaaagcattgaggtggggagagtttctcaaatcgagcctaatatttattgccgtttatatctttttctctactggtaatgtgtgccatatgaaacttccaattaagtctaaagtaattttccccttctttcagccgcctttttatagccgaaacacagctgaaatgtacgacaacattctgaacaagcctctccagctgaaaccaaatattacaaattccgcaagacacctcctggagggcctcctgcagaaggacaggacaaagcggctcggggccaaggatgacttcgtgagtgatgttttcctgtcctcctgggccggccgggacgtgcactagacctccctgcccttattgaatgcacctgtctaaattaatcttgggtttcttatcaacagatggagattaagagtcatgtcttcttctccttaattaactgggatgatctcattaataagaagattactcccccttttaacccaaatgtggtgagtatctgtctctcttctaagtatagagaagcccaaagggcatttattttaattcagaattgtctgggggagggttggaaggaatacattggcagatgttttctccataaacctgttattttacctacataaaaagcacatttttgtgtcccaacaaggctcccataatttttagacacatttatcaattcgaagcaccaaaaggcaacaagtgaacattattcttatgtttaactgtgtgtagccttttgagattttgtgcttgaagtgggtgattatggaagttgatataagacttaaacttggtatttaaagcctggtcaagatttccctgtcctgtgtctagtgtgagttcttgacaagagtgtttttcccttcccgtcacagagtgggcccaacgacctacggcactttgaccccgagtttaccgaagagcctgtccccaactccattggcaagtcccctgacagcgtcctcgtcacagccagcgtcaaggaagctgccgaggctttcctaggcttttcctatgcgcctcccacggactctttcctctgaaccctgttagggcttggttttaaaggattttatgtgtgtttccgaatgttttagttagccttttggtggagccgccagctgacaggacatcttacaagagaatttgcacatctctggaagcttagcaatcttattgcacactgttcgctggaagctttttgaagagcacattctcctcagtgagctcatgaggttttcatttttattcttccttccaacgtggtgctatctctgaaacgagcgttagagtgccgccttagacggaggcaggagtttcgttagaaagcggacgctgttctaaaaaaggtctcctgcagatctgtctgggctgtgatgacgaatattatgaaatgtgccttttctgaagagattgtgttagctccaaagcttttcctatcgcagtgtttcagttctttattttcccttgtggatatgctgtgtgaaccgtcgtgtgagtgtggtatgcctgatcacagatggattttgttataagcatcaatgtgacacttgcaggacactacaacgtgggacattgtttgtttcttccatatttggaagataaatttatgtgtagacttttttgtaagatacggttaataactaaaatttattgaaatggtcttgcaatgactcgtattcagatgcttaaagaaagcattgctgctacaaatatttctatttttagaaagggtttttatggaccaatgccccagttgtcagtcagagccgttggtgtttttcattgtttaaaatgtcacctgtaaaatgggcattatttatgtttttttttttgcattcctgataattgtatgtattgtataaagaacgtctgtacattgggttataacactagtatatttaaacttacaggcttatttgtaatgtaaaccaccattttaatgtactgtaattaacatggttataatacgtacaatccttccctcatcccatcacacaactttttttgtgtgtgataaactgattttggtttgcaataaaaccttgaaaaatatttacatat

SEQ ID NO: 3349 - protein, 72 aa, Homo sapiens
MNANPSPPPSPSQQINLGPSSNPHAKPSDFHFLKVIGKGSFGKVLLARHKAEEVFYAVKVLQKKAILKKKEV

SEQ ID NO: 3350 - DNA, 4501 bp, Homo sapiens
agcatacgccgagccggtctttgagcgctaacgtctttctgtctccccgcggtggtgatgacggtgaaaactgaggctgctaagggcaccctcacttactccaggatgaggggcatggtggcaattctcatcgctttcatgaagcagaggaggatgggtctgaacgactttattcagaagattgccaataactcctatgcatgcaaacaccctgaagttcagtccatcttgaagatctcccaacctcaggagcctgagcttatgaatgccaacccttctcctccaccaagtccttctcagcaaatcaaccttggcccgtcgtccaatcctcatgctaaaccatctgactttcacttcttgaaagtgatcggaaagggcagttttggaaaggttcttctagcaagacacaaggcagaagaagtgttctatgcagtcaaagttttacagaagaaagcaatcctgaaaaagaaagaggtatgagatgtgcttgatggggctggcattggcggtagacactccttgaataatcttgattctggaatgttggtgccaagttgaaacatgccactaaatctgaatcgtcattttcctaggagaagcatattatgtcggagcggaatgttctgttgaagaatgtgaagcaccctttcctggtgggccttcacttctctttccagactgctgacaaattgtactttgtcctagactacattaatggtggagaggtgagcaggggggatagaagtcaactcttagtgtctctgcacagcctgctttgttttagtttgagaaaaaagttttcaaagatttttggtggggagaatgttaccagaattagcatttccttcaacctgtcaggtttatagttaatagattacttggggccacttcctgcagttgttcttttgctgtgtatgtcaaaactaattaaattcatttgcaacccagaatgactttgttctgtctcctgcagttgttctaccatctccagagggaacgctgcttcctggaaccacgggctcgtttctatgctgctgaaatagccagtgccttgggctacctgcattcactgaacatcgtttataggtaagcctgagagctcttcaggctaccagttttggtataaaggagacgtagcactggctgtttcatagggccttaaaataatttgtgtttatttgcaacttggttgcctaaaaccagatcccctagcacgtgagctggcttgacttaagtgccaagggggaaccagccaagtaggattgtgcctaatccagaatagatgagcagaacaagggctcccttttttcttcactacacaactacagtgaacctaaaatgcctctaatacctttagcaattatctttaagaggatatcttatgaagtgaaattaacttgtgcaactacttttctattcacttttttacagagacttaaaaccagagaatattttgctagattcacagggacacattgtccttactgacttcggactctgcaaggagaacattgaacacaacagcacaacatccaccttctgtggcacgccggaggtaggcgctgtcttggtttggtgcctggtttacccccgccttccaagagagagatgtacaatcatgcacttaactaccaaaaagagtaaactcctctcagagacttcttaatacagttcagtgcaaataaaatacatttgctgtttgatgtagcatgagaaatcccaagtccttctgttcctttactgaaaagtagctgtttgtaagtaagatctgcatcataaaaactttctaaatccctaagtaagagatatcaagtgcccagcagtttcctaaatgtcagtacacataggtagccagtcaccctcaaaaagtccagcagttttatcaggaaggaatctaaagatatctatcttccaagctggctctgggtctctcagctttttcaaactaaatgtgtggtcgtgggattgcttgctttcgcaggttctaaacgctgtttccctggtctgtttttcagtatctcgcacctgaggtgcttcataagcagccttatgacaggactgtggactggtggtgcctgggagctgtcttgtatgagatgctgtatggcctggtgagtggcacattgggaaccatggaacactgcctgctccctacaatattgccttcacacagcccatgcttggccatggtgtcttgcccttaccagtacgcttatcaaaagcagctaagaggcatattggttattttatagttcataagaataatcacttacctggttcttttgtgcatttcacattttactagataggaccacattgaacctgtgtggtggtgaaaaactaccacttattaacatctaccccctcaccctccacacacacacacacaaacacacacacgggttgcaaagtagacacttaaatagcaagggaaaagaaagcattgaggtggggagagtttctcaaatcgagcctaatatttattgccgtttatatctttttctctactggtaatgtgtgccatatgaaacttccaattaagtctaaagtaattttccccttctttcagccgcctttttatagccgaaacacagctgaaatgtacgacaacattctgaacaagcctctccagctgaaaccaaatattacaaattccgcaagacacctcctggagggcctcctgcagaaggacaggacaaagcggctcggggccaaggatgacttcgtgagtgatgttttcctgtcctcctgggccggccgggacgtgcactagacctccctgcccttattgaatgcacctgtctaaattaatcttgggtttcttatcaacagatggagattaagagtcatgtcttcttctccttaattaactgggatgatctcattaataagaagattactcccccttttaacccaaatgtggtgagtatctgtctctcttctaagtatagagaagcccaaagggcatttattttaattcagaattgtctgggggagggttggaaggaatacattggcagatgttttctccataaacctgttattttacctacataaaaagcacatttttgtgtcccaacaaggctcccataatttttagacacatttatcaattcgaagcaccaaaaggcaacaagtgaacattattcttatgtttaactgtgtgtagccttttgagattttgtgcttgaagtgggtgattatggaagttgatataagacttaaacttggtatttaaagcctggtcaagatttccctgtcctgtgtctagtgtgagttcttgacaagagtgtttttcccttcccgtcacagagtgggcccaacgacctacggcactttgaccccgagtttaccgaagagcctgtccccaactccattggcaagtcccctgacagcgtcctcgtcacagccagcgtcaaggaagctgccgaggctttcctaggcttttcctatgcgcctcccacggactctttcctctgaaccctgttagggcttggttttaaaggattttatgtgtgtttccgaatgttttagttagccttttggtggagccgccagctgacaggacatcttacaagagaatttgcacatctctggaagcttagcaatcttattgcacactgttcgctggaagctttttgaagagcacattctcctcagtgagctcatgaggttttcatttttattcttccttccaacgtggtgctatctctgaaacgagcgttagagtgccgccttagacggaggcaggagtttcgttagaaagcggacgctgttctaaaaaaggtctcctgcagatctgtctgggctgtgatgacgaatattatgaaatgtgccttttctgaagagattgtgttagctccaaagcttttcctatcgcagtgtttcagttctttattttcccttgtggatatgctgtgtgaaccgtcgtgtgagtgtggtatgcctgatcacagatggattttgttataagcatcaatgtgacacttgcaggacactacaacgtgggacattgtttgtttcttccatatttggaagataaatttatgtgtagacttttttgtaagatacggttaataactaaaatttattgaaatggtcttgcaatgactcgtattcagatgcttaaagaaagcattgctgctacaaatatttctatttttagaaagggtttttatggaccaatgccccagttgtcagtcagagccgttggtgtttttcattgtttaaaatgtcacctgtaaaatgggcattatttatgtttttttttttgcattcctgataattgtatgtattgtataaagaacgtctgtacattgggttataacactagtatatttaaacttacaggcttatttgtaatgtaaaccaccattttaatgtactgtaattaacatggttataatacgtacaatccttccctcatcccatcacacaactttttttgtgtgtgataaactgattttggtttgcaataaaaccttgaaaaatatttacatat

SEQ ID NO: 3351 - protein, 140 aa, Homo sapiens
MTVKTEAAKGTLTYSRMRGMVAILIAFMKQRRMGLNDFIQKIANNSYACKHPEVQSILKISQPQEPELMNANPSPPPSPSQQINLGPSSNPHAKPSDFHFLKVIGKGSFGKVLLARHKAEEVFYAVKVLQKKAILKKKEV

SEQ ID NO: 3352 - DNA, 2483 bp, Homo sapiens
gcagcatacgccgagccggtctttgagcgctaacgtctttctgtctccccgcggtggtgatgacggtgaaaactgaggctgctaagggcaccctcacttactccaggatgaggggcatggtggcaattctcatcgctttcatgaagcagaggaggatgggtctgaacgactttattcagaagattgccaataactcctatgcatgcaaacaccctgaagttcagtccatcttgaagatctcccaacctcaggagcctgagcttatgaatgccaacccttctcctccaccaagtccttctcagcaaatcaaccttggcccgtcgtccaatcctcatgctaaaccatctgactttcacttcttgaaagtgatcggaaagggcagttttggaaaggttcttctagcaagacacaaggcagaagaagtgttctatgcagtcaaagttttacagaagaaagcaatcctgaaaaagaaagaggagaagcatattatgtcggagcggaatgttctgttgaagaatgtgaagcaccctttcctggtgggccttcacttctctttccagactgctgacaaattgtactttgtcctagactacattaatggtggagagttgttctaccatctccagagggaacgctgcttcctggaaccacgggctcgtttctatgctgctgaaatagccagtgccttgggctacctgcattcactgaacatcgtttatagagacttaaaaccagagaatattttgctagattcacagggacacattgtccttactgacttcggactctgcaaggagaacattgaacacaacagcacaacatccaccttctgtggcacgccggagtatctcgcacctgaggtgcttcataagcagccttatgacaggactgtggactggtggtgcctgggagctgtcttgtatgagatgctgtatggcctgccgcctttttatagccgaaacacagctgaaatgtacgacaacattctgaacaagcctctccagctgaaaccaaatattacaaattccgcaagacacctcctggagggcctcctgcagaaggacaggacaaagcggctcggggccaaggatgacttcgtgagtgatgttttcctgtcctcctgggccggccgggacgtgcactagacctccctgcccttattgaatgcacctgtctaaattaatcttgggtttcttatcaacagatggagattaagagtcatgtcttcttctccttaattaactgggatgatctcattaataagaagattactcccccttttaacccaaatgtgagtgggcccaacgacctacggcactttgaccccgagtttaccgaagagcctgtccccaactccattggcaagtcccctgacagcgtcctcgtcacagccagcgtcaaggaagctgccgaggctttcctaggcttttcctatgcgcctcccacggactctttcctctgaaccctgttagggcttggttttaaaggattttatgtgtgtttccgaatgttttagttagccttttggtggagccgccagctgacaggacatcttacaagagaatttgcacatctctggaagcttagcaatcttattgcacactgttcgctggaagctttttgaagagcacattctcctcagtgagctcatgaggttttcatttttattcttccttccaacgtggtgctatctctgaaacgagcgttagagtgccgccttagacggaggcaggagtttcgttagaaagcggacgctgttctaaaaaaggtctcctgcagatctgtctgggctgtgatgacgaatattatgaaatgtgccttttctgaagagattgtgttagctccaaagcttttcctatcgcagtgtttcagttctttattttcccttgtggatatgctgtgtgaaccgtcgtgtgagtgtggtatgcctgatcacagatggattttgttataagcatcaatgtgacacttgcaggacactacaacgtgggacattgtttgtttcttccatatttggaagataaatttatgtgtagacttttttgtaagatacggttaataactaaaatttattgaaatggtcttgcaatgactcgtattcagatgcttaaagaaagcattgctgctacaaatatttctatttttagaaagggtttttatggaccaatgccccagttgtcagtcagagccgttggtgtttttcattgtttaaaatgtcacctgtaaaatgggcattatttatgtttttttttttgcattcctgataattgtatgtattgtataaagaacgtctgtacattgggttataacactagtatatttaaacttacaggcttatttgtaatgtaaaccaccattttaatgtactgtaattaacatggttataatacgtacaatccttccctcatcccatcacacaactttttttgtgtgtgataaactgattttggtttgcaataaaaccttgaaaaatatttacatat

SEQ ID NO: 3353 - protein, 361 aa, Homo sapiens
MTVKTEAAKGTLTYSRMRGMVAILIAFMKQRRMGLNDFIQKIANNSYACKHPEVQSILKISQPQEPELMNANPSPPPSPSQQINLGPSSNPHAKPSDFHFLKVIGKGSFGKVLLARHKAEEVFYAVKVLQKKAILKKKEEKHIMSERNVLLKNVKHPFLVGLHFSFQTADKLYFVLDYINGGELFYHLQRERCFLEPRARFYAAEIASALGYLHSLNIVYRDLKPENILLDSQGHIVLTDFGLCKENIEHNSTTSTFCGTPEYLAPEVLHKQPYDRTVDWWCLGAVLYEMLYGLPPFYSRNTAEMYDNILNKPLQLKPNITNSARHLLEGLLQKDRTKRLGAKDDFVSDVFLSSWAGRDVH

SEQ ID NO: 3354 - DNA, 5475 bp, Homo sapiens
gcagcatacgccgagccggtctttgagcgctaacgtctttctgtctccccgcggtggtgatgacggtgaaaactgaggctgctaagggcaccctcacttactccaggatgaggggcatggtggcaattctcatcgctttcatgaagcagaggaggatgggtctgaacgactttattcagaagattgccaataactcctatgcatgcaaacagtaagtttgaccggatttgaggaaataactagtatagtttgaatttgccagcggtaaacattctcatcacggcgtttatcgggaaggcgaagacttcttctggggtggggatctcatttctccttaaattctaatatatttgacacattttaaacattaaagttaatttgctgatttggcttgaactggagatgtaagataaatggttcgtgttggccgaattcacggcctttctccatgagcaacaatccttatttctgtatttaatggggtttattattttctttaactgactaatgtattggggtattttcagtttaaacagtgaattatccgggtagaagtcggtagagccagaaactcacttttgatgttggtgtgccccctagtggcgagctggattctaaatcgtgccctttattccctgcagccctgaagttcagtccatcttgaagatctcccaacctcaggagcctgagcttatgaatgccaacccttctcctccagtaagtttttgtatgtgccgtgcatctgtggagaactgtaagggagtcagttagtattcctacattaatggattaaaatagcatttctagaaattagtatcaaggcaggaatgcttcattatggcataacaagtgatataaatatttaagtattgagtcagagtattattttatttttttcctgggcatattttacctccaaagtggttattttaaaaggcatatttcataaaaaggttttatctgtctgaaacaacatgactgtgtgcagtttccatactcatttgaaatgtgatgaaatgtagttttgaatgtttatagatgtatggtcatttgcatcagtcatttgtagatgtaacattttctacatcgtttatgttatagatgtcttcctttgaagcaatggtattaaaagaaattctttttttttttttctagccaagtccttctcagcaaatcaaccttggcccgtcgtccaatcctcatgctaaaccatctgactttcacttcttgaaagtgatcggaaagggcagttttggaaaggtaatttcaaatctgaagatcttttggtacacttccttcatgtcctcttttgtattctccctggatgaggatagaaaaatgatttttttaaattgaaatttcaggttcttctagcaagacacaaggcagaagaagtgttctatgcagtcaaagttttacagaagaaagcaatcctgaaaaagaaagaggtatgagatgtgcttgatggggctggcattggcggtagacactccttgaataatcttgattctggaatgttggtgccaagttgaaacatgccactaaatctgaatcgtcattttcctaggagaagcatattatgtcggagcggaatgttctgttgaagaatgtgaagcaccctttcctggtgggccttcacttctctttccagactgctgacaaattgtactttgtcctagactacattaatggtggagaggtgagcaggggggatagaagtcaactcttagtgtctctgcacagcctgctttgttttagtttgagaaaaaagttttcaaagatttttggtggggagaatgttaccagaattagcatttccttcaacctgtcaggtttatagttaatagattacttggggccacttcctgcagttgttcttttgctgtgtatgtcaaaactaattaaattcatttgcaacccagaatgactttgttctgtctcctgcagttgttctaccatctccagagggaacgctgcttcctggaaccacgggctcgtttctatgctgctgaaatagccagtgccttgggctacctgcattcactgaacatcgtttataggtaagcctgagagctcttcaggctaccagttttggtataaaggagacgtagcactggctgtttcatagggccttaaaataatttgtgtttatttgcaacttggttgcctaaaaccagatcccctagcacgtgagctggcttgacttaagtgccaagggggaaccagccaagtaggattgtgcctaatccagaatagatgagcagaacaagggctcccttttttcttcactacacaactacagtgaacctaaaatgcctctaatacctttagcaattatctttaagaggatatcttatgaagtgaaattaacttgtgcaactacttttctattcacttttttacagagacttaaaaccagagaatattttgctagattcacagggacacattgtccttactgacttcggactctgcaaggagaacattgaacacaacagcacaacatccaccttctgtggcacgccggaggtaggcgctgtcttggtttggtgcctggtttacccccgccttccaagagagagatgtacaatcatgcacttaactaccaaaaagagtaaactcctctcagagacttcttaatacagttcagtgcaaataaaatacatttgctgtttgatgtagcatgagaaatcccaagtccttctgttcctttactgaaaagtagctgtttgtaagtaagatctgcatcataaaaactttctaaatccctaagtaagagatatcaagtgcccagcagtttcctaaatgtcagtacacataggtagccagtcaccctcaaaaagtccagcagttttatcaggaaggaatctaaagatatctatcttccaagctggctctgggtctctcagctttttcaaactaaatgtgtggtcgtgggattgcttgctttcgcaggttctaaacgctgtttccctggtctgtttttcagtatctcgcacctgaggtgcttcataagcagccttatgacaggactgtggactggtggtgcctgggagctgtcttgtatgagatgctgtatggcctggtgagtggcacattgggaaccatggaacactgcctgctccctacaatattgccttcacacagcccatgcttggccatggtgtcttgcccttaccagtacgcttatcaaaagcagctaagaggcatattggttattttatagttcataagaataatcacttacctggttcttttgtgcatttcacattttactagataggaccacattgaacctgtgtggtggtgaaaaactaccacttattaacatctaccccctcaccctccacacacacacacacaaacacacacacgggttgcaaagtagacacttaaatagcaagggaaaagaaagcattgaggtggggagagtttctcaaatcgagcctaatatttattgccgtttatatctttttctctactggtaatgtgtgccatatgaaacttccaattaagtctaaagtaattttccccttctttcagccgcctttttatagccgaaacacagctgaaatgtacgacaacattctgaacaagcctctccagctgaaaccaaatattacaaattccgcaagacacctcctggagggcctcctgcagaaggacaggacaaagcggctcggggccaaggatgacttcgtgagtgatgttttcctgtcctcctgggccggccgggacgtgcactagacctccctgcccttattgaatgcacctgtctaaattaatcttgggtttcttatcaacagatggagattaagagtcatgtcttcttctccttaattaactgggatgatctcattaataagaagattactcccccttttaacccaaatgtggtgagtatctgtctctcttctaagtatagagaagcccaaagggcatttattttaattcagaattgtctgggggagggttggaaggaatacattggcagatgttttctccataaacctgttattttacctacataaaaagcacatttttgtgtcccaacaaggctcccataatttttagacacatttatcaattcgaagcaccaaaaggcaacaagtgaacattattcttatgtttaactgtgtgtagccttttgagattttgtgcttgaagtgggtgattatggaagttgatataagacttaaacttggtatttaaagcctggtcaagatttccctgtcctgtgtctagtgtgagttcttgacaagagtgtttttcccttcccgtcacagagtgggcccaacgacctacggcactttgaccccgagtttaccgaagagcctgtccccaactccattggcaagtcccctgacagcgtcctcgtcacagccagcgtcaaggaagctgccgaggctttcctaggcttttcctatgcgcctcccacggactctttcctctgaaccctgttagggcttggttttaaaggattttatgtgtgtttccgaatgttttagttagccttttggtggagccgccagctgacaggacatcttacaagagaatttgcacatctctggaagcttagcaatcttattgcacactgttcgctggaagctttttgaagagcacattctcctcagtgagctcatgaggttttcatttttattcttccttccaacgtggtgctatctctgaaacgagcgttagagtgccgccttagacggaggcaggagtttcgttagaaagcggacgctgttctaaaaaaggtctcctgcagatctgtctgggctgtgatgacgaatattatgaaatgtgccttttctgaagagattgtgttagctccaaagcttttcctatcgcagtgtttcagttctttattttcccttgtggatatgctgtgtgaaccgtcgtgtgagtgtggtatgcctgatcacagatggattttgttataagcatcaatgtgacacttgcaggacactacaacgtgggacattgtttgtttcttccatatttggaagataaatttatgtgtagacttttttgtaagatacggttaataactaaaatttattgaaatggtcttgcaatgactcgtattcagatgcttaaagaaagcattgctgctacaaatatttctatttttagaaagggtttttatggaccaatgccccagttgtcagtcagagccgttggtgtttttcattgtttaaaatgtcacctgtaaaatgggcattatttatgtttttttttttgcattcctgataattgtatgtattgtataaagaacgtctgtacattgggttataacactagtatatttaaacttacaggcttatttgtaatgtaaaccaccattttaatgtactgtaattaacatggttataatacgtacaatccttccctcatcccatcacacaactttttttgtgtgtgataaactgattttggtttgcaataaaaccttgaaaaatatttacatat

SEQ ID NO: 3355 - protein, 51 aa, Homo sapiens [sequence omitted]

SEQ ID NO: 3356 - DNA, 2376 bp, Homo sapiens
gcagcatacgccgagccggtctttgagcgctaacgtctttctgtctccccgcggtggtgatgacggtgaaaactgaggctgctaagggcaccctcacttactccaggatgaggggcatggtggcaattctcatcgctttcatgaagcagaggaggatgggtctgaacgactttattcagaagattgccaataactcctatgcatgcaaacaccctgaagttcagtccatcttgaagatctcccaacctcaggagcctgagcttatgaatgccaacccttctcctccaccaagtccttctcagcaaatcaaccttggcccgtcgtccaatcctcatgctaaaccatctgactttcacttcttgaaagtgatcggaaagggcagttttggaaaggttcttctagcaagacacaaggcagaagaagtgttctatgcagtcaaagttttacagaagaaagcaatcctgaaaaagaaagaggagaagcatattatgtcggagcggaatgttctgttgaagaatgtgaagcaccctttcctggtgggccttcacttctctttccagactgctgacaaattgtactttgtcctagactacattaatggtggagagttgttctaccatctccagagggaacgctgcttcctggaaccacgggctcgtttctatgctgctgaaatagccagtgccttgggctacctgcattcactgaacatcgtttatagagacttaaaaccagagaatattttgctagattcacagggacacattgtccttactgacttcggactctgcaaggagaacattgaacacaacagcacaacatccaccttctgtggcacgccggagtatctcgcacctgaggtgcttcataagcagccttatgacaggactgtggactggtggtgcctgggagctgtcttgtatgagatgctgtatggcctgccgcctttttatagccgaaacacagctgaaatgtacgacaacattctgaacaagcctctccagctgaaaccaaatattacaaattccgcaagacacctcctggagggcctcctgcagaaggacaggacaaagcggctcggggccaaggatgacttcatggagattaagagtcatgtcttcttctccttaattaactgggatgatctcattaataagaagattactcccccttttaacccaaatgtgagtgggcccaacgacctacggcactttgaccccgagtttaccgaagagcctgtccccaactccattggcaagtcccctgacagcgtcctcgtcacagccagcgtcaaggaagctgccgaggctttcctaggcttttcctatgcgcctcccacggactctttcctctgaaccctgttagggcttggttttaaaggattttatgtgtgtttccgaatgttttagttagccttttggtggagccgccagctgacaggacatcttacaagagaatttgcacatctctggaagcttagcaatcttattgcacactgttcgctggaagctttttgaagagcacattctcctcagtgagctcatgaggttttcatttttattcttccttccaacgtggtgctatctctgaaacgagcgttagagtgccgccttagacggaggcaggagtttcgttagaaagcggacgctgttctaaaaaaggtctcctgcagatctgtctgggctgtgatgacgaatattatgaaatgtgccttttctgaagagattgtgttagctccaaagcttttcctatcgcagtgtttcagttctttattttcccttgtggatatgctgtgtgaaccgtcgtgtgagtgtggtatgcctgatcacagatggattttgttataagcatcaatgtgacacttgcaggacactacaacgtgggacattgtttgtttcttccatatttggaagataaatttatgtgtagacttttttgtaagatacggttaataactaaaatttattgaaatggtcttgcaatgactcgtattcagatgcttaaagaaagcattgctgctacaaatatttctatttttagaaagggtttttatggaccaatgccccagttgtcagtcagagccgttggtgtttttcattgtttaaaatgtcacctgtaaaatgggcattatttatgtttttttttttgcattcctgataattgtatgtattgtataaagaacgtctgtacattgggttataacactagtatatttaaacttacaggcttatttgtaatgtaaaccaccattttaatgtactgtaattaacatggttataatacgtacaatccttccctcatcccatcacacaactttttttgtgtgtgataaactgattttggtttgcaataaaaccttgaaaaatatttacatat

SEQ ID NO: 3357 - protein, 431 aa, Homo sapiens; identical to SEQ ID NO: 378

SEQ ID NO: 3358 - DNA, 1615 bp, Homo sapiens
ggatagccgtctctggctcgtgctctcatgtcatctcagagttccagcttatcagaggcatgtagcagggaggcttattccagccataactgggctctacctccagcctccagaagtaatccccaacctgcatatccttgggcaacccgaagaatgaaagaagaagctataaaaccccctttgaaagctttcatgaagcagaggaggatgggtctgaacgacattctgaacaagcctctccagctgaaaccaaatattacaaattccgcaagacacctcctggagggcctcctgcagaaggacaggacaaagcggctcggggccaaggatgacttcatggagattaagagtcatgtcttcttctccttaattaactgggatgatctcattaataagaagattactcccccttttaacccaaatgtgagtgggcccaacgacctacggcactttgaccccgagtttaccgaagagcctgtccccaactccattggcaagtcccctgacagcgtcctcgtcacagccagcgtcaaggaagctgccgaggctttcctaggcttttcctatgcgcctcccacggactctttcctctgaaccctgttagggcttggttttaaaggattttatgtgtgtttccgaatgttttagttagccttttggtggagccgccagctgacaggacatcttacaagagaatttgcacatctctggaagcttagcaatcttattgcacactgttcgctggaagctttttgaagagcacattctcctcagtgagctcatgaggttttcatttttattcttccttccaacgtggtgctatctctgaaacgagcgttagagtgccgccttagacggaggcaggagtttcgttagaaagcggacgctgttctaaaaaaggtctcctgcagatctgtctgggctgtgatgacgaatattatgaaatgtgccttttctgaagagattgtgttagctccaaagcttttcctatcgcagtgtttcagttctttattttcccttgtggatatgctgtgtgaaccgtcgtgtgagtgtggtatgcctgatcacagatggattttgttataagcatcaatgtgacacttgcaggacactacaacgtgggacattgtttgtttcttccatatttggaagataaatttatgtgtagacttttttgtaagatacggttaataactaaaatttattgaaatggtcttgcaatgactcgtattcagatgcttaaagaaagcattgctgctacaaatatttctatttttagaaagggtttttatggaccaatgccccagttgtcagtcagagccgttggtgtttttcattgtttaaaatgtcacctgtaaaatgggcattatttatgtttttttttttgcattcctgataattgtatgtattgtataaagaacgtctgtacattgggttataacactagtatatttaaacttacaggcttatttgtaatgtaaaccaccattttaatgtactgtaattaacatggttataatacgtacaatccttccctcatcccatcacacaactttttttgtgtgtgataaactgattttggtttgcaataaaaccttgaaaaatatttacatat

SEQ ID NO: 3359 - protein, 188 aa, Homo sapiens
MSSQSSSLSEACSREAYSSHNWALPPASRSNPQPAYPWATRRMKEEAIKPPLKAFMKQRRMGLNDILNKPLQLKPNITNSARHLLEGLLQKDRTKRLGAKDDFMEIKSHVFFSLINWDDLINKKITPPFNPNVSGPNDLRHFDPEFTEEPVPNSIGKSPDSVLVTASVKEAAEAFLGFSYAPPTDSFL

SEQ ID NO: 3360 - DNA, 4566 bp, Homo sapiens
taacagaacagggatagccgtctctggctcgtgctctcatgtcatctcagagttccagcttatcagaggcatgtagcagggaggcttattccagccataactgggctctacctccagcctccagaagtaatccccaacctgcatatccttgggcaacccgaagaatgaaagaagaagctataaaaccccctttgaaagctttcatgaagcagaggaggatgggtctgaacgactttattcagaagattgccaataactcctatgcatgcaaacaccctgaagttcagtccatcttgaagatctcccaacctcaggagcctgagcttatgaatgccaacccttctcctccaccaagtccttctcagcaaatcaaccttggcccgtcgtccaatcctcatgctaaaccatctgactttcacttcttgaaagtgatcggaaagggcagttttggaaaggttcttctagcaagacacaaggcagaagaagtgttctatgcagtcaaagttttacagaagaaagcaatcctgaaaaagaaagaggtatgagatgtgcttgatggggctggcattggcggtagacactccttgaataatcttgattctggaatgttggtgccaagttgaaacatgccactaaatctgaatcgtcattttcctaggagaagcatattatgtcggagcggaatgttctgttgaagaatgtgaagcaccctttcctggtgggccttcacttctctttccagactgctgacaaattgtactttgtcctagactacattaatggtggagaggtgagcaggggggatagaagtcaactcttagtgtctctgcacagcctgctttgttttagtttgagaaaaaagttttcaaagatttttggtggggagaatgttaccagaattagcatttccttcaacctgtcaggtttatagttaatagattacttggggccacttcctgcagttgttcttttgctgtgtatgtcaaaactaattaaattcatttgcaacccagaatgactttgttctgtctcctgcagttgttctaccatctccagagggaacgctgcttcctggaaccacgggctcgtttctatgctgctgaaatagccagtgccttgggctacctgcattcactgaacatcgtttataggtaagcctgagagctcttcaggctaccagttttggtataaaggagacgtagcactggctgtttcatagggccttaaaataatttgtgtttatttgcaacttggttgcctaaaaccagatcccctagcacgtgagctggcttgacttaagtgccaagggggaaccagccaagtaggattgtgcctaatccagaatagatgagcagaacaagggctcccttttttcttcactacacaactacagtgaacctaaaatgcctctaatacctttagcaattatctttaagaggatatcttatgaagtgaaattaacttgtgcaactacttttctattcacttttttacagagacttaaaaccagagaatattttgctagattcacagggacacattgtccttactgacttcggactctgcaaggagaacattgaacacaacagcacaacatccaccttctgtggcacgccggaggtaggcgctgtcttggtttggtgcctggtttacccccgccttccaagagagagatgtacaatcatgcacttaactaccaaaaagagtaaactcctctcagagacttcttaatacagttcagtgcaaataaaatacatttgctgtttgatgtagcatgagaaatcccaagtccttctgttcctttactgaaaagtagctgtttgtaagtaagatctgcatcataaaaactttctaaatccctaagtaagagatatcaagtgcccagcagtttcctaaatgtcagtacacataggtagccagtcaccctcaaaaagtccagcagttttatcaggaaggaatctaaagatatctatcttccaagctggctctgggtctctcagctttttcaaactaaatgtgtggtcgtgggattgcttgctttcgcaggttctaaacgctgtttccctggtctgtttttcagtatctcgcacctgaggtgcttcataagcagccttatgacaggactgtggactggtggtgcctgggagctgtcttgtatgagatgctgtatggcctggtgagtggcacattgggaaccatggaacactgcctgctccctacaatattgccttcacacagcccatgcttggccatggtgtcttgcccttaccagtacgcttatcaaaagcagctaagaggcatattggttattttatagttcataagaataatcacttacctggttcttttgtgcatttcacattttactagataggaccacattgaacctgtgtggtggtgaaaaactaccacttattaacatctaccccctcaccctccacacacacacacacaaacacacacacgggttgcaaagtagacacttaaatagcaagggaaaagaaagcattgaggtggggagagtttctcaaatcgagcctaatatttattgccgtttatatctttttctctactggtaatgtgtgccatatgaaacttccaattaagtctaaagtaattttccccttctttcagccgcctttttatagccgaaacacagctgaaatgtacgacaacattctgaacaagcctctccagctgaaaccaaatattacaaattccgcaagacacctcctggagggcctcctgcagaaggacaggacaaagcggctcggggccaaggatgacttcgtgagtgatgttttcctgtcctcctgggccggccgggacgtgcactagacctccctgcccttattgaatgcacctgtctaaattaatcttgggtttcttatcaacagatggagattaagagtcatgtcttcttctccttaattaactgggatgatctcattaataagaagattactcccccttttaacccaaatgtggtgagtatctgtctctcttctaagtatagagaagcccaaagggcatttattttaattcagaattgtctgggggagggttggaaggaatacattggcagatgttttctccataaacctgttattttacctacataaaaagcacatttttgtgtcccaacaaggctcccataatttttagacacatttatcaattcgaagcaccaaaaggcaacaagtgaacattattcttatgtttaactgtgtgtagccttttgagattttgtgcttgaagtgggtgattatggaagttgatataagacttaaacttggtatttaaagcctggtcaagatttccctgtcctgtgtctagtgtgagttcttgacaagagtgtttttcccttcccgtcacagagtgggcccaacgacctacggcactttgaccccgagtttaccgaagagcctgtccccaactccattggcaagtcccctgacagcgtcctcgtcacagccagcgtcaaggaagctgccgaggctttcctaggcttttcctatgcgcctcccacggactctttcctctgaaccctgttagggcttggttttaaaggattttatgtgtgtttccgaatgttttagttagccttttggtggagccgccagctgacaggacatcttacaagagaatttgcacatctctggaagcttagcaatcttattgcacactgttcgctggaagctttttgaagagcacattctcctcagtgagctcatgaggttttcatttttattcttccttccaacgtggtgctatctctgaaacgagcgttagagtgccgccttagacggaggcaggagtttcgttagaaagcggacgctgttctaaaaaaggtctcctgcagatctgtctgggctgtgatgacgaatattatgaaatgtgccttttctgaagagattgtgttagctccaaagcttttcctatcgcagtgtttcagttctttattttcccttgtggatatgctgtgtgaaccgtcgtgtgagtgtggtatgcctgatcacagatggattttgttataagcatcaatgtgacacttgcaggacactacaacgtgggacattgtttgtttcttccatatttggaagataaatttatgtgtagacttttttgtaagatacggttaataactaaaatttattgaaatggtcttgcaatgactcgtattcagatgcttaaagaaagcattgctgctacaaatatttctatttttagaaagggtttttatggaccaatgccccagttgtcagtcagagccgttggtgtttttcattgtttaaaatgtcacctgtaaaatgggcattatttatgtttttttttttgcattcctgataattgtatgtattgtataaagaacgtctgtacattgggttataacactagtatatttaaacttacaggcttatttgtaatgtaaaccaccattttaatgtactgtaattaacatggttataatacgtacaatccttccctcatcccatcacacaactttttttgtgtgtgataaactgattttggtttgcaataaaaccttgaaaaatatttacatat

SEQ ID NO: 3361 - protein, 168 aa, Homo sapiens
MSSQSSSLSEACSREAYSSHNWALPPASRSNPQPAYPWATRRMKEEAIKPPLKAFMKQRRMGLNDFIQKIANNSYACKHPEVQSILKISQPQEPELMNANPSPPPSPSQQINLGPSSNPHAKPSDFHFLKVIGKGSFGKVLLARHKAEEVFYAVKVLQKKAILKKKEV

SEQ ID NO: 3362 - DNA, 3254 bp, Homo sapiens
aactgctcttcagtgtgccctgagccggctgtgccttctctccatccgctgctcagatattcatgaaccgttgcttcttccagcctcgccttctcgctccctctgcctttctggcgctgttctccctccctccctctggcttctgctctttcttactccttctctcagctgcttaactacagctcccactggaacttgcacaatcaaaaacaactctcctctctcaagccgcctccaggagcgcatcacctggagaagagcgactcgctccccgcgccggccgcggaagagcagccaggtagctgggggcggggaggcgtacccttctcccgctcggtaagagccacagcatctccccggagattggccgtatcccaccgtccggcccccagggtcctgcagcggtgatgcatatgtttcggagcaatgatggaaggagaaaagccgctgtcggtggcaactgaaagtggggagaggttgctgcagtagctggtgctgcagaatgcgcgagtgaagaactgagccccgctagattctccatcccgctcagtcttcattaactgtctgcaggaggtaaaccggggaaacagatatgcactaaccaggcgggtgccaacctggatctataactgtgaattccccacggtggaaaatggtaaacaaagacatgaatggattcccagtcaagaaatgctcagccttccaattttttaagaagcgggtacgaaggtggatcaagagcccaatggtcagtgtggacaagcatcagagtcccagcctgaagtacaccggctcctccatggtgcacatccctccaggggagccagacttcgagtcttccttgtgtcaaacatgcctgggtgaacatgctttccaaagaggggttctccctcaggagaacgagtcatgttcatgggaaactcaatctgggtgtgaagtgagagagccatgtaatcatgccaacatcctgaccaagcccgatccaagaaccttctggactaatgatgatccagctttcatgaagcagaggaggatgggtctgaacgactttattcagaagattgccaataactcctatgcatgcaaacaccctgaagttcagtccatcttgaagatctcccaacctcaggagcctgagcttatgaatgccaacccttctcctccaccaagtccttctcagcaaatcaaccttggcccgtcgtccaatcctcatgctaaaccatctgactttcacttcttgaaagtgatcggaaagggcagttttggaaaggttcttctagcaagacacaaggcagaagaagtgttctatgcagtcaaagttttacagaagaaagcaatcctgaaaaagaaagaggagaagcatattatgtcggagcggaatgttctgttgaagaatgtgaagcaccctttcctggtgggccttcacttctctttccagactgctgacaaattgtactttgtcctagactacattaatggtggagagttgttctaccatctccagagggaacgctgcttcctggaaccacgggctcgtttctatgctgctgaaatagccagtgccttgggctacctgcattcactgaacatcgtttatagagacttaaaaccagagaatattttgctagattcacagggacacattgtccttactgacttcggactctgcaaggagaacattgaacacaacagcacaacatccaccttctgtggcacgccggagtatctcgcacctgaggtgcttcataagcagccttatgacaggactgtggactggtggtgcctgggagctgtcttgtatgagatgctgtatggcctgccgcctttttatagccgaaacacagctgaaatgtacgacaacattctgaacaagcctctccagctgaaaccaaatattacaaattccgcaagacacctcctggagggcctcctgcagaaggacaggacaaagcggctcggggccaaggatgacttcatggagattaagagtcatgtcttcttctccttaattaactgggatgatctcattaataagaagattactcccccttttaacccaaatgtgagtgggcccaacgacctacggcactttgaccccgagtttaccgaagagcctgtccccaactccattggcaagtcccctgacagcgtcctcgtcacagccagcgtcaaggaagctgccgaggctttcctaggcttttcctatgcgcctcccacggactctttcctctgaaccctgttagggcttggttttaaaggattttatgtgtgtttccgaatgttttagttagccttttggtggagccgccagctgacaggacatcttacaagagaatttgcacatctctggaagcttagcaatcttattgcacactgttcgctggaagctttttgaagagcacattctcctcagtgagctcatgaggttttcatttttattcttccttccaacgtggtgctatctctgaaacgagcgttagagtgccgccttagacggaggcaggagtttcgttagaaagcggacgctgttctaaaaaaggtctcctgcagatctgtctgggctgtgatgacgaatattatgaaatgtgccttttctgaagagattgtgttagctccaaagcttttcctatcgcagtgtttcagttctttattttcccttgtggatatgctgtgtgaaccgtcgtgtgagtgtggtatgcctgatcacagatggattttgttataagcatcaatgtgacacttgcaggacactacaacgtgggacattgtttgtttcttccatatttggaagataaatttatgtgtagacttttttgtaagatacggttaataactaaaatttattgaaatggtcttgcaatgactcgtattcagatgcttaaagaaagcattgctgctacaaatatttctatttttagaaagggtttttatggaccaatgccccagttgtcagtcagagccgttggtgtttttcattgtttaaaatgtcacctgtaaaatgggcattatttatgtttttttttttgcattcctgataattgtatgtattgtataaagaacgtctgtacattgggttataacactagtatatttaaacttacaggcttatttgtaatgtaaaccaccattttaatgtactgtaattaacatggttataatacgtacaatccttccctcatcccatcacacaactttttttgtgtgtgataaactgattttggtttgcaataaaaccttgaaaaatatttacatat

SEQ ID NO: 3363 - protein, 526 aa, Homo sapiens
MVNKDMNGFPVKKCSAFQFFKKRVRRWIKSPMVSVDKHQSPSLKYTGSSMVHIPPGEPDFESSLCQTCLGEHAFQRGVLPQENESCSWETQSGCEVREPCNHANILTKPDPRTFWTNDDPAFMKQRRMGLNDFIQKIANNSYACKHPEVQSILKISQPQEPELMNANPSPPPSPSQQINLGPSSNPHAKPSDFHFLKVIGKGSFGKVLLARHKAEEVFYAVKVLQKKAILKKKEEKHIMSERNVLLKNVKHPFLVGLHFSFQTADKLYFVLDYINGGELFYHLQRERCFLEPRARFYAAEIASALGYLHSLNIVYRDLKPENILLDSQGHIVLTDFGLCKENIEHNSTTSTFCGTPEYLAPEVLHKQPYDRTVDWWCLGAVLYEMLYGLPPFYSRNTAEMYDNILNKPLQLKPNITNSARHLLEGLLQKDRTKRLGAKDDFMEIKSHVFFSLINWDDLINKKITPPFNPNVSGPNDLRHFDPEFTEEPVPNSIGKSPDSVLVTASVKEAAEAFLGFSYAPPTDSFL

SEQ ID NO: 3364 - DNA, 592 bp, Homo sapiens
gcagcatacgccgagccggtctttgagcgctaacgtctttctgtctccccgcggtggtgatgacggtgaaaactgaggctgctaagggcaccctcacttactccaggatgaggggcatggtggcaattctcatcgctttcatgaagcagaggaggatgggtctgaacgactttattcagaagattgccaataactcctatgcatgcaaacaccctgaagttcagtccatcttgaagatctcccaacctcaggagcctgagcttatgaatgccaacccttctcctccagtaagtttttgtatgtgccgtgcatctgtggagaactgtaagggagtcagttagtattcctacattaatggattaaaatagcatttctagaaattagtatcaaggcaggaatgcttcattatggcataacaagtgatataaatatttaagtattgagtcagagtattattttatttttttcctgggcatattttacctccaaagtggttattttaaaaggcatatttcataaaaaggttttatctgtctgaaacaacatgactgtgtgcagtttccatactcatttgaaatgtgatgaaatgtag

SEQ ID NO: 3365 - protein, 93 aa, Homo sapiens
MTVKTEAAKGTLTYSRMRGMVAILIAFMKQRRMGLNDFIQKIANNSYACKHPEVQSILKISQPQEPELMNANPSPPVSFCMCRASVENCKGVS

SEQ ID NO: 3366 - DNA, 541 bp, Homo sapiens
atagccgtctctggctcgtgctctcatgtcatctcagagttccagcttatcagaggcatgtagcagggaggcttattccagccataactgggctctacctccagcctccagaagtaatccccaacctgcatatccttgggcaacccgaagaatgaaagaagaagctataaaaccccctttgaaagctttcatgaagcagaggaggatgggtctgaacgactttattcagaagattgccaataactcctatgcatgcaaacaccctgaagttcagtccatcttgaagatctcccaacctcaggagcctgagcttatgaatgccaacccttctcctccagtaagtttttgtatgtgccgtgcatctgtggagaactgtaagggagtcagttagtattcctacattaatggattaaaatagcatttctagaaattagtatcaaggcaggaatgcttcattatggcataacaagtgatataaatatttaagtattgagtcagagtattattttatttttttcctgggcatattttacctccaaag

SEQ ID NO: 3367 - protein, 121 aa, Homo sapiens
MSSQSSSLSEACSREAYSSHNWALPPASRSNPQPAYPWATRRMKEEAIKPPLKAFMKQRRMGLNDFIQKIANNSYACKHPEVQSILKISQPQEPELMNANPSPPVSFCMCRASVENCKGVS

SEQ ID NO: 3368 - DNA, 520 bp, Homo sapiens
atacgccgagccggtctttgagcgctaacgtctttctgtctccccgcggtggtgatgacggtgaaaactgaggctgctaagggcaccctcacttactccaggatgaggggcatggtggcaattctcatcggtgagtgcaggaatcttgcgggacttctgctccaggagacgcaaagtggaaattttttgaaagtcccggatcagattagtgtgtgtggcgccggacgttatgaagccgtctaaacgtttctttatttctcctccttcatccacagctttcatgaagcagaggaggatgggtctgaacgactttattcagaagattgccaataactcctatgcatgcaaacaccctgaagttcagtccatcttgaagatctcccaacctcaggagcctgagcttatgaatgccaacccttctcctccagtaagtttttgtatgtgccgtgcatctgtggagaactgtaagggagtcagttagtattcctacattaatggattaaaatagcatttctagaaa

SEQ ID NO: 3369 - protein, 83 aa, Homo sapiens
MKPSKRFFISPPSSTAFMKQRRMGLNDFIQKIANNSYACKHPEVQSILKISQPQEPELMNANPSPPVSFCMCRASVENCKGVS

SEQ ID NO: 3370 - DNA, 3075 bp, Homo sapiens
aactgctcttcagtgtgccctgagccggctgtgccttctctccatccgctgctcagatattcatgaaccgttgcttcttccagcctcgccttctcgctccctctgcctttctggcgctgttctccctccctccctctggcttctgctctttcttactccttctctcagctgcttaactacagctcccactggaacttgcacaatcaaaaacaactctcctctctcaagccgcctccaggagcgcatcacctggagaagagcgactcgctccccgcgccggccgcggaagagcagccaggtagctgggggcggggaggcgtacccttctcccgctcggtaagagccacagcatctccccggagattggccgtatcccaccgtccggcccccagggtcctgcagcggtgatgcatatgtttcggagcaatgatggaaggagaaaagccgctgtcggtggcaactgaaagtggggagaggttgctgcagtagctggtgctgcagaatgcgcgagtgaagaactgagccccgctagattctccatcccgctcagtcttcattaactgtctgcaggaggtaaaccggggaaacagatatgcactaaccaggcgggtgccaacctggatctataactgtgaattccccacggtggaaaatggtaaacaaagacatgaatggattcccagtcaagaaatgctcagccttccaattttttaagaagcgggtacgaaggtggatcaagagcccaatggtcagtgtggacaagcatcagagtcccagcctgaagtacaccggctcctccatggtgcacatccctccaggggagccagacttcgagtcttccttgtgtcaaacatgcctgggtgaacatgctttccaaagaggggttctccctcaggagaacgagtcatgttcatgggaaactcaatctgggtgtgaagtaagttcatgttcgctctggatctattctcctggaaaaattctgggcctttgtttttcttgtatttctgccagagtatacccaaaaaataattttttaatgcatatttataaagcttctgaggaagacctagaattgtggtctttgttagctcattatgttatttttttaaagtaggctttatattttagagcagctttaagttcacagcaacattgagcagaaggtacagagattacccatatacgcttgtccccatgcacgtataacctactttgccatcaacattccctagcagagttttatgttagagttcactcttggtgttatacattctatgggtttggactaatgtataataacatgcatccaccattacagtatcatacagttaagtttcactgccctaaaaatcctctgccctccactattcatcccctccttaccctgacccctagcaaccactgatctttttactgtctccatagatttgccttttccagaatgtcatctagctgaatcatgcagtatgttgtattaatgttttacgtgggtccaagactgatacagcaatgtgttggtaaactggcaattcctcagaagtggtttgatcacacaggagatcaagtcttagatgatacaacgattgtaatagtcatctacatgttcgtagcttccattgaaatatttagttcaacacgatttgatccatttacagagcactatgtatacttttcattatttttctcaagctcatatatactcacatttttactaagacttattttccctgctactccaagagttgttttttaaaaattttgttaatccaagaaaaccagataactgattcatcttgcagtttctaagatttcaaaaatttaagattatatttttaacttataacttaattaggcccatatttattttgatttttaaaaccattatataaaatgcttatattatttttaccatcatactgacataaaaatacaatatttagaagacagaacatgttattacaaagtacagttaattgtaagtgatcttccaagtcagtgcatcatagaatgataaacgttaataaccgctcaccttttttatttttagcaaggtaaccattttccagagataaaataatcatttagctgctaaaagactgaagacattaaatctgagttccttttcactctgagttatcacgcaatgtcgctgaatctgtttcataatttgtctactttctttctttcttttttttttttttttgagtttcactcttgttgcccagactggagtgcaatggcacgatctcggctcactgcaacctccgcttcctgagttcaagtaattcttctgcctcagtctcccgagtagctgggattacaggcacccaacaccacgcctggctaatttttgtatttttaatagaaacagggtttctctatgttggtcaggctggtgtcaaactcccaacctcaggtaatccacctgcgtcggctttccaaattgctgggattacaggcatgagccactacgccggccctttttttggggggggtgggggtcggggacagggagacagggggacagagtcttgctctgtaaccctgacttgagtgcagtagtgcaatcataactcactgttacctcaaactcctaggttcaagtgatcctcccacctcaaccctcccaagtaaataagaccacaggcatacgccaacaaacctggctaattaaaaaaaaaaaattttttttgtagaaacagggtgttgtcatactgaccaggctggtcttgaactcctggcttcaagtgatcctcccaaaatgctgggattataggtatgaggcacaatgcccagcctacttgtctactttctacggttattggaaaaatcaaatgagattgatatgaaatgtttcataatctatagaatgccatgcaaatataaatcattattgctcatgtttgctgatttacatattagctaagcctgtgactctgtaacactatattagacttccataactgggttagcactttgctgatccatgaacatttgtcatggtgcatttgctttttagccagatgttggttcaactctaggtttgtcatgaaaaacaataaagacgctaaatgc

SEQ ID NO: 3371 - protein, 153 aa, Homo sapiens
MVNKDMNGFPVKKCSAFQFFKKRVRRWIKSPMVSVDKHQSPSLKYTGSSMVHIPPGEPDFESSLCQTCLGEHAFQRGVLPQENESCSWETQSGCEVSSCSLWIYSPGKILGLCFSCISARVYPKNNFLMHIYKASEEDLELWSLLAHYVIFLK

SEQ ID NO: 3372 - DNA, 984 bp, Homo sapiens
actgctcttcagtgtgccctgagccggctgtgccttctctccatccgctgctcagatattcatgaaccgttgcttcttccagcctcgccttctcgctccctctgcctttctggcgctgttctccctccctccctctggcttctgctctttcttactccttctctcagctgcttaactacagctcccactggaacttgcacaatcaaaaacaactctcctctctcaagccgcctccaggagcgcatcacctggagaagagcgactcgctccccgcgccggccgcggaagagcagccaggtagctgggggcggggaggcgtacccttctcccgctcggtaagagccacagcatctccccggagattggccgtatcccaccgtccggcccccagggtcctgcagcggtgatgcatatgtttcggagcaatgatggaaggagaaaagccgctgtcggtggcaactgaaagtggggagaggttgctgcagtagctggtgctgcagaatgcgcgagtgaagaactgagccccgctagattctccatcccgctcagtcttcattaactgtctgcaggaggtaaaccggggaaacagatatgcactaaccaggcgggtgccaacctggatctataactgtgaattccccacggtggaaaatggtaaacaaagacatgaatggattcccagtcaagaaatgctcagccttccaattttttaagaagcgggatcttgctctgtcccccagactggagagtagtggtgcgatgattgctcactttaaccttgaacttcaagactcaagtgatcctccctattgcccaggctggaatgcagtggtgcaatctccactcactgcaacctccgcctcccagattcaagcaattctcctgcctcagtctgccaccacacccggctaacttttatatctttagtagagacgtggtttcaccttgttggccttgctggtctcaaactcctgacctcgagtg

SEQ ID NO: 3373 - protein, 86 aa, Homo sapiens
MVNKDMNGFPVKKCSAFQFFKKRDLALSPRLESSGAMIAHFNLELQDSSDPPYCPGWNAVVQSPLTATSASQIQAILLPQSATTPG

SEQ ID NO: 3374 - DNA, 844 bp, Homo sapiens
aactgctcttcagtgtgccctgagccggctgtgccttctctccatccgctgctcagatattcatgaaccgttgcttcttccagcctcgccttctcgctccctctgcctttctggcgctgttctccctccctccctctggcttctgctctttcttactccttctctcagctgcttaactacagctcccactggaacttgcacaatcaaaaacaactctcctctctcaagccgcctccaggagcgcatcacctggagaagagcgactcgctccccgcgccggccgcggaagagcagccaggtagctgggggcggggaggcgtacccttctcccgctcggtaagagccacagcatctccccggagattggccgtatcccaccgtccggcccccagggtcctgcagcggtgatgcatatgtttcggagcaatgatggaaggagaaaagccgctgtcggtggcaactgaaagtggggagaggttgctgcagtagctggtgctgcagaatgcgcgagtgaagaactgagccccgctagattctccatcccgctcagtcttcattaactgtctgcaggaggtaaaccggggaaacagatatgcactaaccaggcgggtgccaacctggatctataactgtgaattccccacggtggaaaatggtaaacaaagacatgaatggattcccagtcaagaaatgctcagccttccaattttttaagaagcggagacggggtcttgctatattgcccagggtggtcttgaccttttgggctcaagtggtcctcctgcctcagcctcccaaattgctgggattacagatgtccaccaccaggcccagccctaatttt

SEQ ID NO: 3375 - protein, 63 aa, Homo sapiens
MVNKDMNGFPVKKCSAFQFFKKRRRGLAILPRVVLTFWAQVVLLPQPPKLLGLQMSTTRPSPN

SEQ ID NO: 3376 - DNA, 210 bp, Homo sapiens; identical to SEQ ID NO: 379

SEQ ID NO: 3377 - protein, 69 aa, Homo sapiens [sequence omitted]

SEQ ID NO: 3378 - DNA, 5476 bp, Homo sapiens
gcggcacagagccgcggcttgctttcaggacacgggtcgctggcgggttaggtggctgcgtggccgcctcacttcgcgcacgcgccgctaggctgggggagttgatttgcactgctccgggtgtcggctccggcgggacgggcggttctgcgtacccctctccgatcctgattgagtcaatgctttgcattctcagtcctctgcataaagctgagagatgcctacagctgagagtgaagcaaaagtaaaaaccaaagttcgctttgaagaattgcttaagacccacagtgatctaatgcgtgaaaagaaaaaactgaagaaaaaacttgtcaggtctgaagaaaacatctcacctgacactattagaagcaatcttcactatatgaaagaaactacaagtgatgatcccgacactattagaagcaatcttccccatattaaagaaactacaagtgatgatgtaagtgctgctaacactaacaacctgaagaagagcacgagagtcactaaaaacaaattgaggaacacacagttagcaactgaaaatcctaatggtgatgctagtgtagaggaagacaaacaaggaaagccaaataaaaaggtgataaagacggtgccccagttgactacacaagacctgaaaccggaaactcctgagaataaggttgattctacacaccagaaaacacatacaaagccacagccaggcgttgatcatcagaaaagtgagaaggcaaatgagggaagagaagagactgatttagaagaggatgaagaattgatgcaagcatatcagtgccatgtaactgaagaaatggcaaaggagattaagaggaaaataagaaagaaactgaaagaacagttgacttactttccctcagatactttattccatgatgacaaactaagcagtgaaaaaaggaaaaagaaaaaggaagttccagtcttctctaaagctgaaacaagtacattgaccatctctggtgacacagttgaaggtgaacaaaagaaagaatcttcagttagatcagtttcttcagattctcatcaagatgatgaaataagctcaatggaacaaagcacagaagacagcatgcaagatgatacaaaacctaaaccaaaaaaaacaaaaaagaagactaaagcagttgcagataataatgaagatgttgatggtgatggtgttcatgaaataacaagccgagatagcccggtttatcccaaatgtttgcttgatgatgaccttgtcttgggagtttacattcaccgaactgatagacttaagtcagattttatgatttctcacccaatggtaaaaattcatgtggttgatgagcatactggtcaatatgtcaagaaagatgatagtggacggcctgtttcatcttactatgaaaaagagaatgtggattatattcttcctattatgacccagccatatgattttaaacagttaaaatcaagacttccagagtgggaagaacaaattgtatttaatgaaaattttccctatttgcttcgaggctctgatgagagtcctaaagtcatcctgttctttgagattcttgatttcttaagcgtggatgaaattaagaataattctgaggttcaaaaccaagaatgtggctttcggaaaattgcctgggcatttcttaagcttctgggagccaatggaaatgcaaacatcaactcaaaacttcgcttgcagctatattacccacctactaagcctcgatccccattaagtgttgttgaggcatttgaatggtggtcaaaatgtccaagaaatcattacccatcaacactgtacgtaactgtaagaggactgaaagttccagactgtataaagccatcttaccgctctatgatggctcttcaggaggaaaaaggtaaaccagtgcattgtgaacgtcaccatgagtcaagctcagtagacacagaacctggattagaagagtcaaaggaagtaataaagtggaaacgactccctgggcaggcttgccgtatcccaaacaaacacctcttctcactaaatgcaggagaacgaggatgtttttgtcttgatttctcccacaatggaagaatattagcagcagcttgtgccagccgggatggatatccaattattttatatgaaattccttctggacgtttcatgagagaattgtgtggccacctcaatatcatttatgatctttcctggtcaaaagatgatcactacatccttacttcatcatctgatggcactgccaggatatggaaaaatgaaataaacaatacaaatactttcagagttttacctcatccttcttttgtttacacggctaaattccatccagctgtaagagagctagtagttacaggatgctatgattccatgatacggatatggaaagttgagatgagagaagattctgccatattggtccgacagtttgatgttcacaaaagttttatcaactcactttgttttgatactgaaggtcatcatatgtattcaggagattgtacaggggtgattgttgtttggaatacctatgtcaagattaatgatttggaacattcagtgcaccactggactataaataaggaaattaaagaaactgagtttaagggaattccaataagttatttggagattcatcccaatggaaaacgtttgttaatccataccaaagacagtactttgagaattatggatctccggatattagtagcaaggaagtttgtaggagcagcaaattatcgggagaagattcatagtactttgactccatgtgggacttttctgtttgctggaagtgaggatggtatagtgtatgtttggaacccagaaacaggagaacaagtagccatgtattctgacttgccattcaagtcacccattcgagacatttcttatcatccatttgaaaatatggttgcattctgtgcatttgggcaaaatgagccaattcttctgtatatttacgatttccatgttgcccagcaggaggctgaaatgttcaaacgctacaatggaacatttccattacctggaatacaccaaagtcaagatgccctatgtacctgtccaaaactaccccatcaaggctcttttcagattgatgaatttgtccacactgaaagttcttcaacgaagatgcagctagtaaaacagaggcttgaaactgtcacagaggtgatacgttcctgtgctgcaaaagtcaacaaaaatctctcatttacttcaccaccagcagtttcctcacaacagtctaagttaaagcagtcaaacatgctgaccgctcaagagattctacatcagtttggtttcactcagaccgggattatcagcatagaaagaaagccttgtaaccatcaggtagatacagcaccaacggtagtggctctttatgactacacagcgaatcgatcagatgaactaaccatccatcgcggagacattatccgagtgtttttcaaagataatgaagactggtggtatggcagcataggaaagggacaggaaggttattttccagctaatcatgtggctagtgaaacactgtatcaagaactgcctcctgagataaaggagcgatcccctcctttaagccctgaggaaaaaactaaaatagaaaaatctccagctcctcaaaagcaatcaatcaataagaacaagtcccaggacttcagactaggctcagaatctatgacacattctgaaatgagaaaagaacagagccatgaggaccaaggacacataatggatacacggatgaggaagaacaagcaagcaggcagaaaagtcactctaatagagtaaagaattgaagaaaagttaagagctgccgaaatgcacagaggtgaaaatgacaaaccaaatggaatttctcttcagagttcagaattttcagatactaaggaggaagaaaggatccactacttcttgttcttatgaatgactctagaaaaatcagaatcaagttgtgggtggaaaaatcaacgtggcctttgagttcagttgttataaaccattgtgactattgttggtcaaagtattggtacttatattgttagtaattgcatcataattacattaccagtgttggaaaactaatgaagaaaacactgtaattgctactcagcaaatgtgaataaaaggtgtttgcgttattaggatgtctgttaagtaatcatttaatattattatattggtaatggttgtatgtgtgatgctatgcccagaatatgaagtatctgtttttgaaattcactttatttaaaagataagcagctgactgggcacggtgcctcatgcctgtaatcctagcaccttgggaggctgaggcaggtggatcacctaaggtcaggagttcaacaacaccagcctgaccaacatggtgaaaccccatctctactaaaaatacaaaaatcagccgggtctcatggcaggcacctgtaatcccatctactgaggcaggagaattgcttgacccaggaggcagaggttgcagtgagccaagatcacgccattgcactccagcctgggggacagagcaagactctatctccaaaaaacaaaaaagataagcagctttagaatatggcgcattcaaaacagtctcagtaacaaagacattaaaagaaaacaatttactttctaattaaaattttgtgtttcttaagatcaaatcatataggtaacttcatagacctaaattaaaagtgatttttggctggactggcaacaatgttcccaatgtctttactttttaaaaaaggcttttcatatttaagcacatacctattttgtagacttacattgtttaatatttattttaatcttaatatttttacattattatattgcattatttattttttctaagttccagaataatagtgtcattattatagactatatgttttgaagtttgatattataatgggatattcattttttgttcttttcttgactcctttctcaagtgtgtgataaggtctgctgataaaatatttaaccccaagaaagtgaaaactaatataaaattagaaagacctatccaaattagacagtcaattccattaaaataagaagtgagaaaaacaatgttgggcattgaggtgtaaattttgcccagatgtatacccagtgtgaaatatcttctaataaaaatatatttggctcttatccctgcacatgtagaggcataaaaattggtaaacatgtcccgctgtgtagaactttaaaaaaaaggcatttttgaaagtgttgagtggcactgataactggtgaagcctacagccatccgcccaaaagtctgttctgatggcactgagttttcattgttctggatgtataagtctgtgtgtcaggtacagctgggcccagccagcttgagtcactcttgtacaagcttgtttttttctgtcttgtgaatgcacttgataatttaaaaataaaaatatctgtttctctgcagtttcagct

SEQ ID NO: 3379 - protein, 1196 aa, Homo sapiens; identical to SEQ ID NO: 382

SEQ ID NO: 3380 - DNA, 5558 bp, Homo sapiens
ggcggcgcgctgtccgcactgcggcacagagccgcggcttgctttcaggacacgggtcgctggcgggttaggtggctgcgtggccgcctcacttcgcgcacgcgccgctaggctgggggagttgatttgcactgctccgggtgtcggctccggcgggacgggcggttctgcgtacccctctccagtgtcaacctggggctgaatcttcaacctgtcaaagccttcttaattatgtctgagaaaaggatcctgattgagtcaatgctttgcattctcagtcctctgcataaagctgagagatgcctacagctgagagtgaagcaaaagtaaaaaccaaagttcgctttgaagaattgcttaagacccacagtgatctaatgcgtgaaaagaaaaaactgaagaaaaaacttgtcaggtctgaagaaaacatctcacctgacactattagaagcaatcttcactatatgaaagaaactacaagtgatgatcccgacactattagaagcaatcttccccatattaaagaaactacaagtgatgatgtaagtgctgctaacactaacaacctgaagaagagcacgagagtcactaaaaacaaattgaggaacacacagttagcaactgaaaatcctaatggtgatgctagtgtagaggaagacaaacaaggaaagccaaataaaaaggtgataaagacggtgccccagttgactacacaagacctgaaaccggaaactcctgagaataaggttgattctacacaccagaaaacacatacaaagccacagccaggcgttgatcatcagaaaagtgagaaggcaaatgagggaagagaagagactgatttagaagaggatgaagaattgatgcaagcatatcagtgccatgtaactgaagaaatggcaaaggagattaagaggaaaataagaaagaaactgaaagaacagttgacttactttccctcagatactttattccatgatgacaaactaagcagtgaaaaaaggaaaaagaaaaaggaagttccagtcttctctaaagctgaaacaagtacattgaccatctctggtgacacagttgaaggtgaacaaaagaaagaatcttcagttagatcagtttcttcagattctcatcaagatgatgaaataagctcaatggaacaaagcacagaagacagcatgcaagatgatacaaaacctaaaccaaaaaaaacaaaaaagaagactaaagcagttgcagataataatgaagatgttgatggtgatggtgttcatgaaataacaagccgagatagcccggtttatcccaaatgtttgcttgatgatgaccttgtcttgggagtttacattcaccgaactgatagacttaagtcagattttatgatttctcacccaatggtaaaaattcatgtggttgatgagcatactggtcaatatgtcaagaaagatgatagtggacggcctgtttcatcttactatgaaaaagagaatgtggattatattcttcctattatgacccagccatatgattttaaacagttaaaatcaagacttccagagtgggaagaacaaattgtatttaatgaaaattttccctatttgcttcgaggctctgatgagagtcctaaagtcatcctgttctttgagattcttgatttcttaagcgtggatgaaattaagaataattctgaggttcaaaaccaagaatgtggctttcggaaaattgcctgggcatttcttaagcttctgggagccaatggaaatgcaaacatcaactcaaaacttcgcttgcagctatattacccacctactaagcctcgatccccattaagtgttgttgaggcatttgaatggtggtcaaaatgtccaagaaatcattacccatcaacactgtacgtaactgtaagaggactgaaagttccagactgtataaagccatcttaccgctctatgatggctcttcaggaggaaaaaggtaaaccagtgcattgtgaacgtcaccatgagtcaagctcagtagacacagaacctggattagaagagtcaaaggaagtaataaagtggaaacgactccctgggcaggcttgccgtatcccaaacaaacacctcttctcactaaatgcaggagaacgaggatgtttttgtcttgatttctcccacaatggaagaatattagcagcagcttgtgccagccgggatggatatccaattattttatatgaaattccttctggacgtttcatgagagaattgtgtggccacctcaatatcatttatgatctttcctggtcaaaagatgatcactacatccttacttcatcatctgatggcactgccaggatatggaaaaatgaaataaacaatacaaatactttcagagttttacctcatccttcttttgtttacacggctaaattccatccagctgtaagagagctagtagttacaggatgctatgattccatgatacggatatggaaagttgagatgagagaagattctgccatattggtccgacagtttgatgttcacaaaagttttatcaactcactttgttttgatactgaaggtcatcatatgtattcaggagattgtacaggggtgattgttgtttggaatacctatgtcaagattaatgatttggaacattcagtgcaccactggactataaataaggaaattaaagaaactgagtttaagggaattccaataagttatttggagattcatcccaatggaaaacgtttgttaatccataccaaagacagtactttgagaattatggatctccggatattagtagcaaggaagtttgtaggagcagcaaattatcgggagaagattcatagtactttgactccatgtgggacttttctgtttgctggaagtgaggatggtatagtgtatgtttggaacccagaaacaggagaacaagtagccatgtattctgacttgccattcaagtcacccattcgagacatttcttatcatccatttgaaaatatggttgcattctgtgcatttgggcaaaatgagccaattcttctgtatatttacgatttccatgttgcccagcaggaggctgaaatgttcaaacgctacaatggaacatttccattacctggaatacaccaaagtcaagatgccctatgtacctgtccaaaactaccccatcaaggctcttttcagattgatgaatttgtccacactgaaagttcttcaacgaagatgcagctagtaaaacagaggcttgaaactgtcacagaggtgatacgttcctgtgctgcaaaagtcaacaaaaatctctcatttacttcaccaccagcagtttcctcacaacagtctaagttaaagcagtcaaacatgctgaccgctcaagagattctacatcagtttggtttcactcagaccgggattatcagcatagaaagaaagccttgtaaccatcaggtagatacagcaccaacggtagtggctctttatgactacacagcgaatcgatcagatgaactaaccatccatcgcggagacattatccgagtgtttttcaaagataatgaagactggtggtatggcagcataggaaagggacaggaaggttattttccagctaatcatgtggctagtgaaacactgtatcaagaactgcctcctgagataaaggagcgatcccctcctttaagccctgaggaaaaaactaaaatagaaaaatctccagctcctcaaaagcaatcaatcaataagaacaagtcccaggacttcagactaggctcagaatctatgacacattctgaaatgagaaaagaacagagccatgaggaccaaggacacataatggatacacggatgaggaagaacaagcaagcaggcagaaaagtcactctaatagagtaaagaattgaagaaaagttaagagctgccgaaatgcacagaggtgaaaatgacaaaccaaatggaatttctcttcagagttcagaattttcagatactaaggaggaagaaaggatccactacttcttgttcttatgaatgactctagaaaaatcagaatcaagttgtgggtggaaaaatcaacgtggcctttgagttcagttgttataaaccattgtgactattgttggtcaaagtattggtacttatattgttagtaattgcatcataattacattaccagtgttggaaaactaatgaagaaaacactgtaattgctactcagcaaatgtgaataaaaggtgtttgcgttattaggatgtctgttaagtaatcatttaatattattatattggtaatggttgtatgtgtgatgctatgcccagaatatgaagtatctgtttttgaaattcactttatttaaaagataagcagctgactgggcacggtgcctcatgcctgtaatcctagcaccttgggaggctgaggcaggtggatcacctaaggtcaggagttcaacaacaccagcctgaccaacatggtgaaaccccatctctactaaaaatacaaaaatcagccgggtctcatggcaggcacctgtaatcccatctactgaggcaggagaattgcttgacccaggaggcagaggttgcagtgagccaagatcacgccattgcactccagcctgggggacagagcaagactctatctccaaaaaacaaaaaagataagcagctttagaatatggcgcattcaaaacagtctcagtaacaaagacattaaaagaaaacaatttactttctaattaaaattttgtgtttcttaagatcaaatcatataggtaacttcatagacctaaattaaaagtgatttttggctggactggcaacaatgttcccaatgtctttactttttaaaaaaggcttttcatatttaagcacatacctattttgtagacttacattgtttaatatttattttaatcttaatatttttacattattatattgcattatttattttttctaagttccagaataatagtgtcattattatagactatatgttttgaagtttgatattataatgggatattcattttttgttcttttcttgactcctttctcaagtgtgtgataaggtctgctgataaaatatttaaccccaagaaagtgaaaactaatataaaattagaaagacctatccaaattagacagtcaattccattaaaataagaagtgagaaaaacaatgttgggcattgaggtgtaaattttgcccagatgtatacccagtgtgaaatatcttctaataaaaatatatttggctcttatccctgcacatgtagaggcataaaaattggtaaacatgtcccgctgtgtagaactttaaaaaaaaggcatttttgaaagtgttgagtggcactgataactggtgaagcctacagccatccgcccaaaagtctgttctgatggcactgagttttcattgttctggatgtataagtctgtgtgtcaggtacagctgggcccagccagcttgagtcactcttgtacaagcttgtttttttctgtcttgtgaatgcacttgataatttaaaaataaaaatatctgtttctctgcagtttcagct

SEQ ID NO: 3381 - protein, 1196 aa, Homo sapiens; identical to SEQ ID NO: 382

SEQ ID NO: 3382 - DNA, 3657 bp, Homo sapiens
ggcggcgcgctgtccgcactgcggcacagagccgcggcttgctttcaggacacgggtcgctggcgggttaggtggctgcgtggccgcctcacttcgcgcacgcgccgctaggctgggggagttgatttgcactgctccgggtgtcggctccggcgggacgggcggttctgcgtacccctctccagtgtcaacctggggctgaatcttcaacctgtcaaagccttcttaattatgtctgagaaaaggatcctgattgagtcaatgctttgcattctcagtcctctgcataaagctgagagatgcctacagctgagagtgaagcaaaagtaaaaaccaaagttcgctttgaagaattgcttaagacccacagtgatctaatgcgtgaaaagaaaaaactgaagaaaaaacttgtcaggtctgaagaaaacatctcacctgacactattagaagcaatcttcactatatgaaagaaactacaagtgatgatcccgacactattagaagcaatcttccccatattaaagaaactacaagtgatgatgtaagtgctgctaacactaacaacctgaagaagagcacgagagtcactaaaaacaaattgaggaacacacagttagcaactgaaaatcctaatggtgatgctagtgtagaggaagacaaacaaggaaagccaaataaaaaggtgataaagacggtgccccagttgactacacaagacctgaaaccggaaactcctgagaataaggttgattctacacaccagaaaacacatacaaagccacagccaggcgttgatcatcagaaaagtgagaaggcaaatgagggaagagaagagactgatttagaagaggatgaagaattgatgcaagcatatcagtgccatgtaactgaagaaatggcaaaggagattaagaggaaaataagaaagaaactgaaagaacagttgacttactttccctcagatactttattccatgatgacaaactaagcagtgaaaaaaggaaaaagaaaaaggaagttccagtcttctctaaagctgaaacaagtacattgaccatctctggtgacacagttgaaggtgaacaaaagaaagaatcttcagttagatcagtttcttcagattctcatcaagatgatgaaataagctcaatggaacaaagcacagaagacagcatgcaagatgatacaaaacctaaaccaaaaaaaacaaaaaagaagactaaagcagttgcagataataatgaagatgttgatggtgatggtgttcatgaaataacaagccgagatagcccggtttatcccaaatgtttgcttgatgatgaccttgtcttgggagtttacattcaccgaactgatagacttaagtcagattttatgatttctcacccaatggtaaaaattcatgtggttgatgagcatactggtcaatatgtcaagaaagatgatagtggacggcctgtttcatcttactatgaaaaagagaatgtggattatattcttcctattatgacccagccatatgattttaaacagttaaaatcaagacttccagagtgggaagaacaaattgtatttaatgaaaattttccctatttgcttcgaggctctgatgagagtcctaaagtcatcctgttctttgagattcttgatttcttaagcgtggatgaaattaagaataattctgaggttcaaaaccaagaatgtggctttcggaaaattgcctgggcatttcttaagcttctgggagccaatggaaatgcaaacatcaactcaaaacttcgcttgcagctatattacccacctactaagcctcgatccccattaagtgttgttgaggcatttgaatggtggtcaaaatgtccaagaaatcattacccatcaacactgtacgtaactgtaagaggactgaaagttccagactgtataaagccatcttaccgctctatgatggctcttcaggaggaaaaaggtaaaccagtgcattgtgaacgtcaccatgagtcaagctcagtagacacagaacctggattagaagagtcaaaggaagtaataaagtggaaacgactccctgggcaggcttgccgtatcccaaacaaacacctcttctcactaaatgcaggagaacgaggatgtttttgtcttgatttctcccacaatggaagaatattagcagcagcttgtgccagccgggatggatatccaattattttatatgaaattccttctggacgtttcatgagagaattgtgtggccacctcaatatcatttatgatctttcctggtcaaaagatgatcactacatccttacttcatcatctgatggcactgccaggatatggaaaaatgaaataaacaatacaaatactttcagagttttacctcatccttcttttgtttacacggctaaattccatccagctgtaagagagctagtagttacaggatgctatgattccatgatacggatatggaaagttgagatgagagaagattctgccatattggtccgacagtttgatgttcacaaaagttttatcaactcactttgttttgatactgaaggtcatcatatgtattcaggagattgtacaggggtgattgttgtttggaatacctatgtcaagattaatgatttggaacattcagtgcaccactggactataaataaggaaattaaagaaactgagtttaagggaattccaataagttatttggagattcatcccaatggaaaacgtttgttaatccataccaaagacagtactttgagaattatggatctccggatattagtagcaaggaagtttgtaggagcagcaaattatcgggagaagattcatagtactttgactccatgtgggacttttctgtttgctggaagtgaggatggtatagtgtatgtttggaacccagaaacaggagaacaagtagccatgtattctgacttgccattcaagtcacccattcgagacatttcttatcatccatttgaaaatatggttgcattctgtgcatttgggcaaaatgagccaattcttctgtatatttacgatttccatgttgcccagcaggaggctgaaatgttcaaacgctacaatggaacatttccattacctggaatacaccaaagtcaagatgccctatgtacctgtccaaaactaccccatcaaggctcttttcagattgatgaatttgtccacactgaaagttcttcaacgaagatgcagctagtaaaacagaggcttgaaactgtcacagaggtgatacgttcctgtgctgcaaaagtcaacaaaaatctctcatttacttcaccaccagcagtttcctcacaacagtctaagttaaagcagtcaaacatgctgaccgctcaagagattctacatcagtttggtttcactcagaccgacagtcactttgctgaattcaacacatgtatattatggtggaaaaagcactagactcagggtcagccagccagaagaactgagccgacctgggatcccaccacttcctaactgttttgttaggtagttcactttctctcttcggataaatgtctccacatttcctacttcatagaattgtcagaatcaacacaatacatttaatactttgaaactcataaaatattgggagaataaacagtatgaggtt

SEQ ID NO: 3383 - protein, 1053 aa, Homo sapiens
MPTAESEAKVKTKVRFEELLKTHSDLMREKKKLKKKLVRSEENISPDTIRSNLHYMKETTSDDPDTIRSNLPHIKETTSDDVSAANTNNLKKSTRVTKNKLRNTQLATENPNGDASVEEDKQGKPNKKVIKTVPQLTTQDLKPETPENKVDSTHQKTHTKPQPGVDHQKSEKANEGREETDLEEDEELMQAYQCHVTEEMAKEIKRKIRKKLKEQLTYFPSDTLFHDDKLSSEKRKKKKEVPVFSKAETSTLTISGDTVEGEQKKESSVRSVSSDSHQDDEISSMEQSTEDSMQDDTKPKPKKTKKKTKAVADNNEDVDGDGVHEITSRDSPVYPKCLLDDDLVLGVYIHRTDRLKSDFMISHPMVKIHVVDEHTGQYVKKDDSGRPVSSYYEKENVDYILPIMTQPYDFKQLKSRLPEWEEQIVFNENFPYLLRGSDESPKVILFFEILDFLSVDEIKNNSEVQNQECGFRKIAWAFLKLLGANGNANINSKLRLQLYYPPTKPRSPLSVVEAFEWWSKCPRNHYPSTLYVTVRGLKVPDCIKPSYRSMMALQEEKGKPVHCERHHESSSVDTEPGLEESKEVIKWKRLPGQACRIPNKHLFSLNAGERGCFCLDFSHNGRILAAACASRDGYPIILYEIPSGRFMRELCGHLNIIYDLSWSKDDHYILTSSSDGTARIWKNEINNTNTFRVLPHPSFVYTAKFHPAVRELVVTGCYDSMIRIWKVEMREDSAILVRQFDVHKSFINSLCFDTEGHHMYSGDCTGVIVVWNTYVKINDLEHSVHHWTINKEIKETEFKGIPISYLEIHPNGKRLLIHTKDSTLRIMDLRILVARKFVGAANYREKIHSTLTPCGTFLFAGSEDGIVYVWNPETGEQVAMYSDLPFKSPIRDISYHPFENMVAFCAFGQNEPILLYIYDFHVAQQEAEMFKRYNGTFPLPGIHQSQDALCTCPKLPHQGSFQIDEFVHTESSSTKMQLVKQRLETVTEVIRSCAAKVNKNLSFTSPPAVSSQQSKLKQSNMLTAQEILHQFGFTQTDSHFAEFNTCILWWKKH

SEQ ID NO: 3384 - DNA, 425 bp, Homo sapiens
atggaacatttccattacctggaatacaccaaagtcaagatgccctatgtacctgtccaaaactaccccatcaaggctcttttcagattgatgaatttgtccacactgaaagttcttcaacgaagatgcagctagtaaaacagaggcttgaaactgtcacagaggtgatacgttcctgtgctgcaaaagtcaacaaaaatctctcatttacttcaccaccagcagtttcctcacaacagtctaagttaaagcagtcaaacatgctgaccgctcaagagattctacatcagtttggtttcactcagaccggtgagcccctttcttactttgacaattcttttaaatgttcagatgcttgttgtgttgatgaatatcacttatttctttagaaataaagctcataatggtcggtttttacacttgac

SEQ ID NO: 3385 - protein, 87 aa, Homo sapiens
MQLVKQRLETVTEVIRSCAAKVNKNLSFTSPPAVSSQQSKLKQSNMLTAQEILHQFGFTQTGEPLSYFDNSFKCSDACCVDEYHLFL

SEQ ID NO: 3386 - DNA, 439 bp, Homo sapiens
tacaatggcatgatcttgtgtgaagaacgttttataatttttatttggaagttccatattacaaatacatctcctttgtttcgataggatcctgattgagtcaatgctttgcattctcagtcctctgcataaagctgagagatgcctacagctgagagtgaagcaaaagtaaaaaccaaagttcgctttgaagaattgcttaagacccacagtgatctaatgcgtgaaaagaaaaaactgaagaaaaaacttgtcaggtctgaagaaaacatctcagtaagtaaatgatcattgggtaatagtgatttacatatgcgcataaaatgcagatatggctgcattttatgttaaaattctaaggaattttgaaaattaaaaacagtaacactatgtcatggtcaataacatgtggtaaaaataaagtttatattagaatcaa

SEQ ID NO: 3387 - protein, 48 aa, Homo sapiens
MPTAESEAKVKTKVRFEELLKTHSDLMREKKKLKKKLVRSEENISVSK

SEQ ID NO: 3388 - DNA, 678 bp, Homo sapiens
gaacattttaccagggtgaaaattcaaggttgaggtagagggagctacaaagattaaggcaccctggaagcacagaagagaagttcttaaatgcccttcaaggtgagaatgctctctagagaagatatcatttgcctttaaaggatagtgaggagtttgttagagagacaaaggaggaagcacatttttcaggggaggggatatgtgtgtaatgatacaaaagcaagagagaacttggcacacgtgaaggcctgcaggtagtttcacatgtctggaacacagtggatgtgtgaaggggacatttcataaatggccttggacctcactggatcctgattgagtcaatgctttgcattctcagtcctctgcataaagctgagagatgcctacagctgagagtgaagcaaaagtaaaaaccaaagttcgctttgaagaattgcttaagacccacagtgatctaatgcgtgaaaagaaaaaactgaagaaaaaacttgtcaggtctgaagaaaacatctcagtaagtaaatgatcattgggtaatagtgatttacatatgcgcataaaatgcagatatggctgcattttatgttaaaattctaaggaattttgaaaattaaaaacagtaacactatgtcatggtcaataacatgtggtaaaaataaagtttatattagaatc

SEQ ID NO: 3389 - protein, 48 aa, Homo sapiens; identical to SEQ ID NO: 3387

SEQ ID NO: 3390 - DNA, 1062 bp, Homo sapiens
atgctcaactctccggggacacggagaccagtgaaagaagcgcaaaagtacggtgaggactctcagaaatcgcattcccccgggacacccggcccacgctcgtcggtcactacgctatcagcctccgcgctctcggactccagcagccccgacacgccgcccaggagagggccgggcaggccgagcaccccggcccgcgctcccgccaccagcgcacccatgatgtactcacggagaggggtacgcagaaccgcccgtcccgccggagccgacacccggagcagtgcaaatcaactcccccagcctagcggcgcgtgcgcgaatgcggacagcgcgccgcctgctgacgtcagcgcctgcctacgccgccgttcccatggcgaccgatgcgtcccgcgctctaggcgaagaccgcggccccgtccccgcgcctccaccgccttcttccaggaggaggggccgtgcggcgcctgcccgggggccctcaggccgcaggcgggcgcgagcttcagggaacttagggggctcccgcctccccggccacgcgagcgggaacagtctcctccactcggagcggcgccatcttcagctctgagtcaccagggctggaaaaatactagatgcgctactcgtggactcgtgaatacactcgtgaatacaggccatttcctgtacctacagccacccgctccactcatcatgccttacctggatgatgcagaagtccctggaaacagaaggtctcacccttctttatctttctcatggctttccaaggctctttatcatgttactttcctgctcagaattctttaatgacttgcctcaatgaccagatacatgtgatctacagtcagccttccagcctcatcattcctcttccatttcctccccagaaacactgtactttatgaagctcctccaagacgaacctgttggagaatgtactccttggaaataaggaagaaagaggatccagggaacaggagtttcaccacagaggagcaggaaagggaattcccagtatgatggcaagttgctaaattaaatgttttgcccatt

SEQ ID NO: 3391 - protein, 271 aa, Homo sapiens
MLNSPGTRRPVKEAQKYGEDSQKSHSPGTPGPRSSVTTLSASALSDSSSPDTPPRRGPGRPSTPARAPATSAPMMYSRRGVRRTARPAGADTRSSANQLPQPSGACANADSAPPADVSACLRRRSHGDRCVPRSRRRPRPRPRASTAFFQEEGPCGACPGALRPQAGASFRELRGLPPPRPREREQSPPLGAAPSSALSHQGWKNTRCATRGLVNTLVNTGHFLYLQPPAPLIMPYLDDAEVPGNRRSHPSLSFSWLSKALYHVTFLLRIL

SEQ ID NO: 3392 - DNA, 558 bp, Homo sapiens
gatgcgtcccgcgctctaggcgaagaccgcggccccgtccccgcgcctccaccgccttcttccaggaggaggggccgtgcggcgcctgcccgggggccctcaggccgcaggcgggcgcgagcttcagggaacttagggggctcccgcctccccggccacgcgagcgggaacagtctcctccactcggagcgattatagatccagactcctgtgcctgaccactgcccatggccaactctctgctgatgactggacttgactacacaagttgttggccatcttaaaaccactcaaagttgacggtctcctctcctgcctcctgcggcttccattaccatggcagagactgtggtgtctgaggtggtgtagcgtactgaagcaaggctgtcttgaagaagaggagacaactcaccataaacaacaactcatgcctgcagtgcgctgaaggtatagaaggcctttggtttagtgaatccaacttctcagctgcagcttcagcataatgacatcttagaagactccccagcttccagtagtttagttagaagtcctcctctg

SEQ ID NO: 3393 - protein, 71 aa, Homo sapiens
CVPRSRRRPRPRPRASTAFFQEEGPCGACPGALRPQAGASFRELRGLPPPRPREREQSPPLGAIIDPDSCA

SEQ ID NO: 3394 - DNA, 1582 bp, Homo sapiens
gcctccaccgccttcttccaggaggaggggccgtgcggcgcctgcccgggggccctcaggccgcaggcgggcgcgagcttcagggaacttagggggctcccgcctccccggccacgcgagcgggaacagtctcctccactcggagcgattatagatccagactcctgtgcctgaccactgcccatggccaactctctgctgatgactggacttgactacacaagttgttggccatcttaaaaccactcaaagttgacggtctcctctcctgcctcctgcggcttccattaccatggcagagactgtggtgtctgaggtggtgtagcgtactgaagcaaggctgtcttgaagaagaggagacaactcacaattctaccacctttgttgacctcttcttccccccaacttattgctgtagaggctacctgagctcattgtccctggagatggaccaaatagaagaataagcagtgcctgtgtggtgagcttcaagaggcatctgttctctggggagtgggtgggtggtaaagcaaagacgggagatgtgtatattagctatccattactgtataattaattatacacaaaactaaactatacactaaactaaaacttcacagcttaaaacaggaaatatgtattatctcacacaatttctgagagtcaggaatctgaaaatggcttagctagtttggttctggctcagggtgacctatggagttgcagccaagatgtcatctgggactactatcattggaaggctcagctggggctggaggctacacttccaagatggctcacttatagggctattggtgggaggcttcagttcctctccacatgaaactttcctcatgccatggaactggcttccctcagagtgaaagacccaagagagagactaagacagaagctgcaatgtttttatgacctagtcttggaagtgacttactgtcatttctactgtattttattcattagaagcaagtcattaagtccagcccacattcaaagtaagaggatttaagctgaacctcttgaaaaaatggtatcaaagtatttacggacattttaaaaactaccacaatacatataggtgaacttcacaaggtgtagacatgggctgagacagaatattggataatatctcattctgcaaacagcagcctcatctgtaataaaatcccagcattcagaaattatcacgatcaagtaggaaaagggcttgttggaaaaaacttatcaaagatgttacttcatttatccatttattctgagccatagcataatagcgacaaattgtgtgtcctgtgtaatttggatacctctgctcaataatagctgaacagattttatcctatttttagaatagttaatatatacacatggcacaaaatttaaaaggtataaaagtttctggttcaaaaataagattccctcattttctttttttctgattctttgaatgcaattcgatttactgatttctcatgtagccttagaaagtattctatgtacttacaaacatatatgtacacatattttttctttcccacaaataaaatactgtatgcattgtttt

SEQ ID NO: 3395 - protein, 55 aa, Homo sapiens
MELASLRVKDPRERLRQKLQCFYDLVLEVTYCHFYCILFIRSKSLSPAHIQSKRI

SEQ ID NO: 3396 - DNA, 437 bp, Homo sapiens
gtgcggcgcctgcccgggggccctcaggccgcaggcgggcgcgagcttcagggaacttagggggctcccgcctccccggccacgcgagcgggaacagtctcctccactcggagcgccactcatcatgccttacctggatgatgcagaagtccctggaaacagaaggtctcacccttctttatctttctcatggctttccaaggctctttatcatgttactttcctgctcagaattctttaatgacttgcctcaatgaccagatacatgtgatctacagtcagccttccagcctcatcattcctcttccatttcctccccagaaacactgtactttatgaagctcctccaagacattatagatccagactcctgtgcctgaccactgcccatggccaactctctgctgatgactggacttgactacacaagttgttgg

SEQ ID NO: 3397 - protein, 49 aa, Homo sapiens
MAFQGSLSCYFPAQNSLMTCLNDQIHVIYSQPSSLIIPLPFPPQKHCTL

SEQ ID NO: 3398 - DNA, 795 bp, Homo sapiens
gcggcgcctgcccgggggccctcaggccgcaggcgggcgcgagcttcagggaacttagggggctcccgcctccccggccacgcgagcgggaacagtctcctccactcggagcggcgccatcttcagctctgagtcaccagggctggaaaaatactagatgcgctactcgtggactcgtgaatacactcgtgaatacaggccatttcctgtacctacagccacccgctattatagatccagactcctgtgcctgaccactgcccatggccaactctctgctgatgactggacttgactacacaagttgttggccatcttaaaaccactcaaagttgacggtctcctctcctgcctcctgcggcttccattaccatggcagagactgtggtgtctgaggtggtgtagcgtactgaagcaaggctgtcttgaagaagaggagacaactcacaattctaccacctttgttgacctcttcttccccccaacttattgctgtagaggctacctgagctcattgtccctggagatggaccaaatagaagaataagcagtgcctgtgtgctgaaggtaaagaaatttcatgtggtggattcctacaaaagaaaaagctgcaaaagagtcaaccaggaaaggtgctagacacacatccaatggctgctgagtgatgaatgagaaagaaaccttcggtgtagtaagccattgaaatttgggggaaatttgtaatagctgttgctgtaaacctccgcactgcaaaacacacacatcctagataattaaaagacaacttctaccaga

SEQ ID NO: 3399 - protein, 45 aa, Homo sapiens
MRYSWTREYTREYRPFPVPTATRYYRSRLLCLTTAHGQLSADDWT

SEQ ID NO: 3400 - DNA, 681 bp, Homo sapiens
gcggcgcctgcccgggggccctcaggccgcaggcgggcgcgagcttcagggaacttagggggctcccgcctccccggccacgcgagcgggaacagtctcctccactcggagcgattatagatccagactcctgtgcctgaccactgcccatggccaactctctgctgatgactggacttgactacacaagttgttggccatcttaaaaccactcaaagttgacggtctcctctcctgcctcctgcggcttccattaccatggcagagactgtggtgtctgaggtggtgtagcgtactgaagcaaggctgtcttgaagaagaggagacaactcacaattctaccacctttgttgacctcttcttccccccaacttattgctgtagaggctacctgagctcattgtccctggagatggaccaaatagaagaataagcagtgcctgtgtgctgaaggtaaagaaatttcatgtggtggattcctacaaaagaaaaagctgcaaaagagtcaaccaggaaaggtgctagacacacatccaatggctgctgagtgatgaatgagaaagaaaccttcggtgtagtaagccattgaaatttgggggaaatttgtaatagctgttgctgtaaacctccgcactgcaaaacacacacatcctagataattaaaagacaacttctaccaga

SEQ ID NO: 3401 - protein, 46 aa, Homo sapiens
RLPELIVPGDGPNRRISSACVLKVKKFHVVDSYKRKSCKRVNQERC

SEQ ID NO: 3402 - DNA, 458 bp, Homo sapiens
aacttagggggctcccgcctccccggccacgcgagcgggaacagtctcctccactcggagcggcgccatcttcagctctgagtcaccagggctggaaaaatactagatgcgctactcgtggactcgtgaatacactcgtgaatacaggccatttcctgtacctacagccacccgcttttcttctcccagtgacctctattaacagagcctacatggaaccagccggcaaagacaagttccactgtcacaactagagaaaagaggatgggtttggaattgaaaggcttggctgttgttgatataaaggaatgcagctaaccagggagatggaaaatctctacagtgagagccacaaaacacttctcaaagaaatcagagatgacacagacaaatggaaaaacattacatgcttatggataggaagaatcaatatcattaaaatggccatactgcccaaa

SEQ ID NO: 3403 - protein, 31 aa, Homo sapiens
MRYSWTREYTREYRPFPVPTATRFSSPSDLY

SEQ ID NO: 3404 - DNA, 514 bp, Homo sapiens
gcgagcgggaacagtctcctccactcggagcggcgccatcttcagctctgagtcaccagggctggaaaaatactagatgcgctactcgtggactcgtgaatacactcgtgaatacaggccatttcctgtacctacagccacccgctggcatgggaagaggaccatagtttctgtggcctccctaagatggcctgccacctctcctgatgctggtgacttcttgtgatggtggggcaatattaagtgtttgaaaaaggaagaagttcttattcccaaagttgtattcagttatcaaaacaacaattattttgtataaactgcatcagagacaactgaagatgaaagaactaccatctccacatataactaatttgtgcagtgcaccagaaagaacctgtttaaatttccatgccaatttgcaacccccatactgtgccagattatagatccagactcctgtgcctgaccactgcccatggccaactctctgctgatgactggacttgactacaca

SEQ ID NO: 3405 - protein, 49 aa, Homo sapiens
MRYSWTREYTREYRPFPVPTATRWHGKRTIVSVASLRWPATSPDAGDFL

SEQ ID NO: 3406 - DNA, 400 bp, Homo sapiens
atgggaaagaagagaacgtatttgtaaagataacagacagccaaatgtcataatggtcagccttgcatacattaatgacattttctttctattatttttttcctatcttaaatggaaggtgtcagataaactgccgaatacttactgttaccctggaaacatgaaggacttgaatatttgtggaatcatgacagaacaggttgaaaaatattaagaggcgagagctagagagagaagattacctagtaaaaattcttttgaaataaactatatatgtgaaagtcaagattgtggactaaccacacacatttatattattttattcctaataacccagtaagtggttataaaggatacatacacacacacacacacattcacatacacaattattatatat

SEQ ID NO: 3407 - protein, 53 aa, Homo sapiens
MVSLAYINDIFFLLFFSYLKWKVSDKLPNTYCYPGNMKDLNICGIMTEQVEKY

SEQ ID NO: 3408 - DNA, 531 bp, Homo sapiens
tgaaattgtctgagttttgacaattataatattttatttctgattaatcagaaaatagtttgccataaaaatttatcacttctgatattagcacataaatttgtttttattgtaatttcaaaactaatgtcaagactgagcaaatcataagatggaagcacctgtgagtgcctgggaccctcaagatcatcaaatccagctttccctgcagagatggtctttcaacttttgcctgaacatcatccttgtgagggaaatcgtttcatcacaaagcaatccagtttactactggaacactgcaattatttgaagatttttggcatcacatgtcacaacattgcttcatatgaattggtacttaaaagaaaactcgacgccatagaactacaaaattaaatccaggaagaacctcagagacgatcttcttccaacatcctctttctcagataaggaaattaaggttttaaaagatcttgtgccaaaagtcacacagttgacttgtggcagttaagattaaattttaaaattcct

SEQ ID NO: 3409 - protein, 60 aa, Homo sapiens
MVFQLLPEHHPCEGNRFITKQSSLLLEHCNYLKIFGITCHNIASYELVLKRKLDAIELQN

SEQ ID NO: 3410 - DNA, 934 bp, Homo sapiens
gaaagaacctgtttaaatttccatgccaatttgcaacccccatactgtgccagattatagatccagactcctgtgcctgaccactgcccatggccaactctctgctgatgactggacttgactacacaagttgttgggtactttgactagaacaccaaccaagtcattggaaatataatgctttgttctttctagctccaagatatgaacatgtgacaacccaaacaaacaaaatcccaacaaggttgtcagatatgcaaattacagttgacccttgaacaacagagagggtagaggtgctgatcactggcacagttgaaaattcaaaagttttgactcccctaaaacttaattactaataacctactgttgactagaagcctactgataatataaacgatttattaacacatattttatatgttatatgtattaggtactgtattataataaagtaagctagagcaaagaaaatgttatggataaaatcataagaaagagaaaagatatttactctccattgaatagaaatggctcatcataaagatcttcattctcaccatcttcaaattgggtaggctgaagaggagcaataagagaaggggttggtcttgccatctcaggtgtggcagagacggaaaacaatccacgtataaatatggacccatgtagttcaaacctgtgttgttcaaaggtcaactgtatttactttaaattacttgtctgacctgagattttcctgaccataatccaagagattgacacctttctaaagtttgttcttatgttttccaaaatgacaacttgttttccagaagttagcagccaccatgttttaagacagaaacagcctgaggttctcccaaggtctattgagcataagagttttttgccttctagtaaaataaacccatattcgcagagtgtctggacc

SEQ ID NO: 3411 - protein, 32 aa, Homo sapiens
MPICNPHTVPDYRSRLLCLTTAHGQLSADDWT

SEQ ID NO: 3412 - DNA, 6854 bp, Homo sapiens
agtgctgaagaaagagggcactagtgtacagcccagatcgcatccttgcaccgtctggattagagctgaggcgtctgcaagccgagcgtggccacggtcctctggccccgggaccatagcgctgtctaccccgactcaggtactcagcatctagctcaccgctgccaacacgacttccactgtactcttgatcaatttaccttgatgcactaccggtgaagaacggggactcgaattcccttacaaacgcctccagcttgtagaggcggtcgtggaggacccagaggaggagacgaaggggaaggaggcggtggtggaggaggcaaaggccttggacgaccattgttggcgaggggcaccactccgggagaggcggcgctgggcgtcttgggggtgcgcgccgggagcctgcagcgggaccagcgtgggaacgcggctggcaggctgtggacctcgtcctcaccaccatggtcgggctccttttgttttttttcccagcgatctttttggaggtgtcccttctccccagaagccccggcaggaaagtgttgctggcaggagcgtcgtctcagcgctcggtggccagaatggacggagatgtcatcattggagccctcttctcagtccatcaccagcctccggccgagaaagtgcccgagaggaagtgtggggagatcagggagcagtatggcatccagagggtggaggccatgttccacacgttggataagatcaacgcggacccggtcctcctgcccaacatcaccctgggcagtgagatccgggactcctgctggcactcttccgtggctctggaacagagcattgagttcattagggactctctgatttccattcgagatgagaaggatgggatcaaccggtgtctgcctgacggccagtccctccccccaggcaggactaagaagcccattgcgggagtgatcggtcccggctccagctctgtagccattcaagtgcagaacctgctccagctcttcgacatcccccagatcgcttattcagccacaagcatcgacctgagtgacaaaactttgtacaaatacttcctgagggttgtcccttctgacactttgcaggcaagggccatgcttgacatagtcaaacgttacaattggacctatgtctctgcagtccacacggaagggaattatggggagagcggaatggacgctttcaaagagctggctgcccaggaaggcctctgtatcgcccattctgacaaaatctacagcaacgctggggagaagagctttgaccgactcttgcgcaaactccgagagaggcttcccaaggctagagtggtggtctgcttctgtgaaggcatgacagtgcgaggactcctgagcgccatgcggcgccttggcgtcgtgggcgagttctcactcattggaagtgatggatgggcagacagagatgaagtcattgaaggttatgaggtggaagccaacgggggaatcacgataaagctgcagtctccagaggtcaggtcatttgatgattatttcctgaaactgaggctggacactaacacgaggaatccctggttccctgagttctggcaacatcggttccagtgccgccttccaggacaccttctggaaaatcccaactttaaacgaatctgcacaggcaatgaaagcttagaagaaaactatgtccaggacagtaagatggggtttgtcatcaatgccatctatgccatggcacatgggctgcagaacatgcaccatgccctctgccctggccacgtgggcctctgcgatgccatgaagcccatcgacggcagcaagctgctggacttcctcatcaagtcctcattcattggagtatctggagaggaggtgtggtttgatgagaaaggagacgctcctggaaggtatgatatcatgaatctgcagtacactgaagctaatcgctatgactatgtgcacgttggaacctggcatgaaggagtgctgaacattgatgattacaaaatccagatgaacaagagtggagtggtgcggtctgtgtgcagtgagccttgcttaaagggccagattaaggttatacggaaaggagaagtgagctgctgctggatttgcacggcctgcaaagagaatgaatatgtgcaagatgagttcacctgcaaagcttgtgacttgggatggtggcccaatgcagatctaacaggctgtgagcccattcctgtgcgctatcttgagtggagcaacatcgaatccattatagccatcgccttttcatgcctgggaatccttgttaccttgtttgtcaccctaatctttgtactgtaccgggacacaccagtggtcaaatcctccagtcgggagctctgctacatcatcctagctggcatcttccttggttatgtgtgcccattcactctcattgccaaacctactaccacctcctgctacctccagcgcctcttggttggcctctcctctgcgatgtgctactctgctttagtgactaaaaccaatcgtattgcacgcatcctggctggcagcaagaagaagatctgcacccggaagcccaggttcatgagtgcctgggctcaggtgatcattgcctcaattctgattagtgtgcaactaaccctggtggtaaccctgatcatcatggaaccccctatgcccattctgtcctacccaagtatcaaggaagtctaccttatctgcaataccagcaacctgggtgtggtggcccctttgggctacaatggactcctcatcatgagctgtacctactatgccttcaagacccgcaacgtgcccgccaacttcaacgaggccaaatatatcgcgttcaccatgtacaccacctgtatcatctggctagcttttgtgcccatttactttgggagcaactacaagatcatcacaacttgctttgcagtgagtctcagtgtaacagtggctctggggtgcatgttcactcccaagatgtacatcattattgccaagcctgagaggaatgtccgcagtgccttcaccacctctgatgttgtccgcatgcatgttggcgatggcaagctgccctgccgctccaacactttcctcaacatcttccgaagaaagaaggcaggggcagggaatgccaattctaatggcaagtctgtgtcatggtctgaaccaggtggaggacaggtgcccaagggacagcatatgtggcaccgcctctctgtgcacgtgaagaccaatgagacggcctgcaaccaaacagccgtcatcaagcccctcactaaaagttaccaaggctctggcaagagcctgaccttttcagataccagcaccaagaccctttacaacgtagaggaggaggaggatgcccagccgattcgctttagcccgcctggtagcccttccatggtggtgcacaggcgcgtgccaagcgcggcgaccactccgcctctgccgtcccacctgaccgcagaggagacccccctcttcctggccgaaccagccctccccaagggcttgccccctcctctccagcagcagcagcaaccccctccacagcagaaatcgctgatggaccagctccagggagtggtcagcaacttcagtaccgcgatcccggattttcacgcggtgctggcaggccccggtggtcccgggaacgggctgcggtccctgtacccgcccccgccacctccgcagcacctgcagatgctgccgctgcagctgagcacctttggggaggagctggtctccccgcccgcggacgacgacgacgacagcgagaggtttaagctcctccaggagtacgtgtatgagcacgagcgggaagggaacacggaagaagacgaactggaagaggaggaggaggacctgcaggcggccagcaaactgaccccggatgattcgcctgcgctgacgcctccgtcgcctttccgcgactcggtggcctcgggcagctcggtgcccagctcccccgtgtccgagtcggtgctctgcacccctcccaacgtatcctacgcctctgtcattctgcgggactacaagcaaagctcttccaccctgtaagggggaagggtccacatagaaaagcaagacaagccagagatctcccacacctccagagatgtgcaaacagctgggaggaaaagcctgggagtggggggcctcgtcgggaggacaggagaccgctgctgctgctgccgctactgctgctgctgccttaagtaggaagagagggaaggacaccaagcaaaaaatgttccaggccaggattcggattcttgaattactcgaagccttctctgggaagaaagggaattctgacaaagcacaattccatatggtatgtaacttttatcacaaatcaaatagtgacatcacaaacataatgtcctcttttgcacaattgtgcatagatatatatatgcccacacacactgggccatgcttgccaaggaacagcccacgtggacatgccagtcggatcatgagttcacctgatggcattcggagtgagctggtggagccagacagagcaggtgcggggaagggaagggcccaggccagacccatcccaaacggatgatgggatgatgggacagcagctccttgctcagaagcccttctccccgctgggctgacagactcctcatcttcaggagactcaggaatggagcggcacaggggtctctcttcatccactgcaacccatccagtgccagctttgagattgcacttgaagaaaggtgcatggaccccctgctgctctgcagattccctttatttaggaaaacaggaataagagcaaaattatcaccaaaaagtgcttcatcaggcgtgctacaggaggaaggagctagaaatagaacaatccatcagcatgagactttgaaaaaaaaacacatgatcagcttctcatgttccatattcacttattggcgatttggggaaaaggccggaacaagagattgttacgagagtggcagaaacccttttgtagattgacttgtgtttgtgccaagcgggctttccattgaccttcagttaaagaacaaaccatgtgacaaaattgttaccttccacttactgtagcaaataatacctacaagttgaacttctaagatgcgtatatgtacaatttggtgccattatttctcctacgtattagagaaacaaatccatctttgaatctaatggtgtactcatagcaactattactggtttaaatgacaaataattctatcctattgtcactgaagtccttgtaactagcgagtgaatgtgttcctgtgtccttgtatatgtgcgatcgtaaaatttgtgcaatgtaatgtcaaattgactggtcaatgtcaacctagtagtcaatctaactgcaattagaaattgtcttttgaatatactatatatattttttatgttccaataatgttttgtacatcattgtcatcaatatctacagaagctctttgacggtttgaatactatggctcaaggttttcatatgcagctcggatggacatttttcttctaagatggaacttatttttcagatattttctgatgtggagatatgttattaatgaagtggtttgaaaatttgttatattaaaagtgcacaaaaactgagagtgaaaataaaaggtacattttataagcttgcacacattattaacacataagattgaacaaagcatttagattattccaggttatatcatttttttaaagattttccacagctacttgagtgtctaacatacagtaacatctaactcagctaataatttgtaaaatctttatcaatcacattttgccttcttttaatttttatgttcatggacttttattcctgtgtcttggctgtcataactttttatttctgctatttgctgttgtgtaatatccatggacatgtaatccacttactccatctttacaatccctttttaccaccaataaaaggatttttcttgctgttttgatttcttctattatttgtggaatgaattataccccccttaaatatctttgtttatgccttatgttcagtcatattttaatatgcttccttcatattgaagctgctgatttctcagccaaaaatcatcttagaatctttaaatatccattgcatcatttgttcagaatttaacatccattccaatgttggaggcttgtattacttatatttcatcatattctattgccaagtttagtcagttccacaccaagaatgaactgcatttcctttaaaaattattttaaaacacctttattgaaaagatctcatgactgagatgtggactttggttccatgttttcattgtaagaaagcagagagcggaaaatcaatggctccagtgattaatagatgggtttttagtaattgacaaattcatgagggaaagcatatgatctctttattagtgaatcatgcttattttttactcttaatgccactaatatacatccctaatatcacagggcttgtgcattcagatttttaaaaaattaggatagataaggaaacaacttatattcaagtgtaagatgatatcaggttggtctaagacttttggtgaacacgttcattcaactgtgatcactttattactctgaatgcctactattatcctgattatggggtctcctgaataaatagagtattagtccttatgtcatcattgttcaaaattggagatgtacacatacataccctataccaagagggccgaaactcttcaccttgatgtatgttctgatacaagttgttcagcttcttgtaaatgtgttttccttcggcttgttactgccttttgtcaaataatcttgacaatgctgtataataaatattttctatttatt

SEQ ID NO: 3413 - protein, 1194 aa, Homo sapiens
MVGLLLFFFPAIFLEVSLLPRSPGRKVLLAGASSQRSVARMDGDVIIGALFSVHHQPPAEKVPERKCGEIREQYGIQRVEAMFHTLDKINADPVLLPNITLGSEIRDSCWHSSVALEQSIEFIRDSLISIRDEKDGINRCLPDGQSLPPGRTKKPIAGVIGPGSSSVAIQVQNLLQLFDIPQIAYSATSIDLSDKTLYKYFLRVVPSDTLQARAMLDIVKRYNWTYVSAVHTEGNYGESGMDAFKELAAQEGLCIAHSDKIYSNAGEKSFDRLLRKLRERLPKARVVVCFCEGMTVRGLLSAMRRLGVVGEFSLIGSDGWADRDEVIEGYEVEANGGITIKLQSPEVRSFDDYFLKLRLDTNTRNPWFPEFWQHRFQCRLPGHLLENPNFKRICTGNESLEENYVQDSKMGFVINAIYAMAHGLQNMHHALCPGHVGLCDAMKPIDGSKLLDFLIKSSFIGVSGEEVWFDEKGDAPGRYDIMNLQYTEANRYDYVHVGTWHEGVLNIDDYKIQMNKSGVVRSVCSEPCLKGQIKVIRKGEVSCCWICTACKENEYVQDEFTCKACDLGWWPNADLTGCEPIPVRYLEWSNIESIIAIAFSCLGILVTLFVTLIFVLYRDTPVVKSSSRELCYIILAGIFLGYVCPFTLIAKPTTTSCYLQRLLVGLSSAMCYSALVTKTNRIARILAGSKKKICTRKPRFMSAWAQVIIASILISVQLTLVVTLIIMEPPMPILSYPSIKEVYLICNTSNLGVVAPLGYNGLLIMSCTYYAFKTRNVPANFNEAKYIAFTMYTTCIIWLAFVPIYFGSNYKIITTCFAVSLSVTVALGCMFTPKMYIIIAKPERNVRSAFTTSDVVRMHVGDGKLPCRSNTFLNIFRRKKAGAGNANSNGKSVSWSEPGGGQVPKGQHMWHRLSVHVKTNETACNQTAVIKPLTKSYQGSGKSLTFSDTSTKTLYNVEEEEDAQPIRFSPPGSPSMVVHRRVPSAATTPPLPSHLTAEETPLFLAEPALPKGLPPPLQQQQQPPPQQKSLMDQLQGVVSNFSTAIPDFHAVLAGPGGPGNGLRSLYPPPPPPQHLQMLPLQLSTFGEELVSPPADDDDDSERFKLLQEYVYEHEREGNTEEDELEEEEEDLQAASKLTPDDSPALTPPSPFRDSVASGSSVPSSPVSESVLCTPPNVSYASVILRDYKQSSSTL

SEQ ID NO: 3414 - DNA, 6836 bp, Homo sapiens
caggtactcaggtatgtctcaagtccatgtcctccaaacagactcagcatctagctcaccgctgccaacacgacttccactgtactcttgatcaatttaccttgatgcactaccggtgaagaacggggactcgaattcccttacaaacgcctccagcttgtagaggcggtcgtggaggacccagaggaggagacgaaggggaaggaggcggtggtggaggaggcaaaggccttggacgaccattgttggcgaggggcaccactccgggagaggcggcgctgggcgtcttgggggtgcgcgccgggagcctgcagcgggaccagcgtgggaacgcggctggcaggctgtggacctcgtcctcaccaccatggtcgggctccttttgttttttttcccagcgatctttttggaggtgtcccttctccccagaagccccggcaggaaagtgttgctggcaggagcgtcgtctcagcgctcggtggccagaatggacggagatgtcatcattggagccctcttctcagtccatcaccagcctccggccgagaaagtgcccgagaggaagtgtggggagatcagggagcagtatggcatccagagggtggaggccatgttccacacgttggataagatcaacgcggacccggtcctcctgcccaacatcaccctgggcagtgagatccgggactcctgctggcactcttccgtggctctggaacagagcattgagttcattagggactctctgatttccattcgagatgagaaggatgggatcaaccggtgtctgcctgacggccagtccctccccccaggcaggactaagaagcccattgcgggagtgatcggtcccggctccagctctgtagccattcaagtgcagaacctgctccagctcttcgacatcccccagatcgcttattcagccacaagcatcgacctgagtgacaaaactttgtacaaatacttcctgagggttgtcccttctgacactttgcaggcaagggccatgcttgacatagtcaaacgttacaattggacctatgtctctgcagtccacacggaagggaattatggggagagcggaatggacgctttcaaagagctggctgcccaggaaggcctctgtatcgcccattctgacaaaatctacagcaacgctggggagaagagctttgaccgactcttgcgcaaactccgagagaggcttcccaaggctagagtggtggtctgcttctgtgaaggcatgacagtgcgaggactcctgagcgccatgcggcgccttggcgtcgtgggcgagttctcactcattggaagtgatggatgggcagacagagatgaagtcattgaaggttatgaggtggaagccaacgggggaatcacgataaagctgcagtctccagaggtcaggtcatttgatgattatttcctgaaactgaggctggacactaacacgaggaatccctggttccctgagttctggcaacatcggttccagtgccgccttccaggacaccttctggaaaatcccaactttaaacgaatctgcacaggcaatgaaagcttagaagaaaactatgtccaggacagtaagatggggtttgtcatcaatgccatctatgccatggcacatgggctgcagaacatgcaccatgccctctgccctggccacgtgggcctctgcgatgccatgaagcccatcgacggcagcaagctgctggacttcctcatcaagtcctcattcattggagtatctggagaggaggtgtggtttgatgagaaaggagacgctcctggaaggtatgatatcatgaatctgcagtacactgaagctaatcgctatgactatgtgcacgttggaacctggcatgaaggagtgctgaacattgatgattacaaaatccagatgaacaagagtggagtggtgcggtctgtgtgcagtgagccttgcttaaagggccagattaaggttatacggaaaggagaagtgagctgctgctggatttgcacggcctgcaaagagaatgaatatgtgcaagatgagttcacctgcaaagcttgtgacttgggatggtggcccaatgcagatctaacaggctgtgagcccattcctgtgcgctatcttgagtggagcaacatcgaatccattatagccatcgccttttcatgcctgggaatccttgttaccttgtttgtcaccctaatctttgtactgtaccgggacacaccagtggtcaaatcctccagtcgggagctctgctacatcatcctagctggcatcttccttggttatgtgtgcccattcactctcattgccaaacctactaccacctcctgctacctccagcgcctcttggttggcctctcctctgcgatgtgctactctgctttagtgactaaaaccaatcgtattgcacgcatcctggctggcagcaagaagaagatctgcacccggaagcccaggttcatgagtgcctgggctcaggtgatcattgcctcaattctgattagtgtgcaactaaccctggtggtaaccctgatcatcatggaaccccctatgcccattctgtcctacccaagtatcaaggaagtctaccttatctgcaataccagcaacctgggtgtggtggcccctttgggctacaatggactcctcatcatgagctgtacctactatgccttcaagacccgcaacgtgcccgccaacttcaacgaggccaaatatatcgcgttcaccatgtacaccacctgtatcatctggctagcttttgtgcccatttactttgggagcaactacaagatcatcacaacttgctttgcagtgagtctcagtgtaacagtggctctggggtgcatgttcactcccaagatgtacatcattattgccaagcctgagaggaatgtccgcagtgccttcaccacctctgatgttgtccgcatgcatgttggcgatggcaagctgccctgccgctccaacactttcctcaacatcttccgaagaaagaaggcaggggcagggaatgccaagaagaggcagccagaattctcgcccaccagccaatgtccgtcggcacatgtgcagctttgaaaacccccacactgcagtgaatgtttctaatggcaagtctgtgtcatggtctgaaccaggtggaggacaggtgcccaagggacagcatatgtggcaccgcctctctgtgcacgtgaagaccaatgagacggcctgcaaccaaacagccgtcatcaagcccctcactaaaagttaccaaggctctggcaagagcctgaccttttcagataccagcaccaagaccctttacaacgtagaggaggaggaggatgcccagccgattcgctttagcccgcctggtagcccttccatggtggtgcacaggcgcgtgccaagcgcggcgaccactccgcctctgccgtcccacctgaccgcagaggagacccccctcttcctggccgaaccagccctccccaagggcttgccccctcctctccagcagcagcagcaaccccctccacagcagaaatcgctgatggaccagctccagggagtggtcagcaacttcagtaccgcgatcccggattttcacgcggtgctggcaggccccggtggtcccgggaacgggctgcggtccctgtacccgcccccgccacctccgcagcacctgcagatgctgccgctgcagctgagcacctttggggaggagctggtctccccgcccgcggacgacgacgacgacagcgagaggtttaagctcctccaggagtacgtgtatgagcacgagcgggaagggaacacggaagaagacgaactggaagaggaggaggaggacctgcaggcggccagcaaactgaccccggatgattcgcctgcgctgacgcctccgtcgcctttccgcgactcggtggcctcgggcagctcggtgcccagctcccccgtgtccgagtcggtgctctgcacccctcccaacgtatcctacgcctctgtcattctgcgggactacaagcaaagctcttccaccctgtaagggggaagggtccacatagaaaagcaagacaagccagagatctcccacacctccagagatgtgcaaacagctgggaggaaaagcctgggagtggggggcctcgtcgggaggacaggagaccgctgctgctgctgccgctactgctgctgctgccttaagtaggaagagagggaaggacaccaagcaaaaaatgttccaggccaggattcggattcttgaattactcgaagccttctctgggaagaaagggaattctgacaaagcacaattccatatggtatgtaacttttatcacaaatcaaatagtgacatcacaaacataatgtcctcttttgcacaattgtgcatagatatatatatgcccacacacactgggccatgcttgccaaggaacagcccacgtggacatgccagtcggatcatgagttcacctgatggcattcggagtgagctggtggagccagacagagcaggtgcggggaagggaagggcccaggccagacccatcccaaacggatgatgggatgatgggacagcagctccttgctcagaagcccttctccccgctgggctgacagactcctcatcttcaggagactcaggaatggagcggcacaggggtctctcttcatccactgcaacccatccagtgccagctttgagattgcacttgaagaaaggtgcatggaccccctgctgctctgcagattccctttatttaggaaaacaggaataagagcaaaattatcaccaaaaagtgcttcatcaggcgtgctacaggaggaaggagctagaaatagaacaatccatcagcatgagactttgaaaaaaaaacacatgatcagcttctcatgttccatattcacttattggcgatttggggaaaaggccggaacaagagattgttacgagagtggcagaaacccttttgtagattgacttgtgtttgtgccaagcgggctttccattgaccttcagttaaagaacaaaccatgtgacaaaattgttaccttccacttactgtagcaaataatacctacaagttgaacttctaagatgcgtatatgtacaatttggtgccattatttctcctacgtattagagaaacaaatccatctttgaatctaatggtgtactcatagcaactattactggtttaaatgacaaataattctatcctattgtcactgaagtccttgtaactagcgagtgaatgtgttcctgtgtccttgtatatgtgcgatcgtaaaatttgtgcaatgtaatgtcaaattgactggtcaatgtcaacctagtagtcaatctaactgcaattagaaattgtcttttgaatatactatatatattttttatgttccaataatgttttgtacatcattgtcatcaatatctacagaagctctttgacggtttgaatactatggctcaaggttttcatatgcagctcggatggacatttttcttctaagatggaacttatttttcagatattttctgatgtggagatatgttattaatgaagtggtttgaaaatttgttatattaaaagtgcacaaaaactgagagtgaaaataaaaggtacattttataagcttgcacacattattaacacataagattgaacaaagcatttagattattccaggttatatcatttttttaaagattttccacagctacttgagtgtctaacatacagtaacatctaactcagctaataatttgtaaaatctttatcaatcacattttgccttcttttaatttttatgttcatggacttttattcctgtgtcttggctgtcataactttttatttctgctatttgctgttgtgtaatatccatggacatgtaatccacttactccatctttacaatccctttttaccaccaataaaaggatttttcttgctgttttgatttcttctattatttgtggaatgaattataccccccttaaatatctttgtttatgccttatgttcagtcatattttaatatgcttccttcatattgaagctgctgatttctcagccaaaaatcatcttagaatctttaaatatccattgcatcatttgttcagaatttaacatccattccaatgttggaggcttgtattacttatatttcatcatattctattgccaagtttagtcagttccacaccaagaatgaactgcatttcctttaaaaattattttaaaacacctttattgaaaagatctcatgactgagatgtggactttggttccatgttttcattgtaagaaagcagagagcggaaaatcaatggctccagtgattaatagatgggtttttagtaattgacaaattcatgagggaaagcatatgatctctttattagtgaatcatgcttattttttactcttaatgccactaatatacatccctaatatcacagggcttgtgcattcagatttttaaaaaattaggatagataaggaaacaacttatattcaagtgtaagatgatatcaggttggtctaagacttttggtgaacacgttcattcaactgtgatcactttattactctgaatgcctactattatcctgattatggggtctcctgaataaatagagtattagtccttatgtcatcattgttcaaaattggagatgtacacatacataccctataccaagagggccgaaactcttcaccttgatgtatgttctgatacaagttgttcagcttcttgtaaatgtgttttccttcggcttgttactgccttttgtcaaataatcttgacaatgctgtataataaatattttctattt

SEQ ID NO: 3415 - protein, 906 aa, Homo sapiens
MVGLLLFFFPAIFLEVSLLPRSPGRKVLLAGASSQRSVARMDGDVIIGALFSVHHQPPAEKVPERKCGEIREQYGIQRVEAMFHTLDKINADPVLLPNITLGSEIRDSCWHSSVALEQSIEFIRDSLISIRDEKDGINRCLPDGQSLPPGRTKKPIAGVIGPGSSSVAIQVQNLLQLFDIPQIAYSATSIDLSDKTLYKYFLRVVPSDTLQARAMLDIVKRYNWTYVSAVHTEGNYGESGMDAFKELAAQEGLCIAHSDKIYSNAGEKSFDRLLRKLRERLPKARVVVCFCEGMTVRGLLSAMRRLGVVGEFSLIGSDGWADRDEVIEGYEVEANGGITIKLQSPEVRSFDDYFLKLRLDTNTRNPWFPEFWQHRFQCRLPGHLLENPNFKRICTGNESLEENYVQDSKMGFVINAIYAMAHGLQNMHHALCPGHVGLCDAMKPIDGSKLLDFLIKSSFIGVSGEEVWFDEKGDAPGRYDIMNLQYTEANRYDYVHVGTWHEGVLNIDDYKIQMNKSGVVRSVCSEPCLKGQIKVIRKGEVSCCWICTACKENEYVQDEFTCKACDLGWWPNADLTGCEPIPVRYLEWSNIESIIAIAFSCLGILVTLFVTLIFVLYRDTPVVKSSSRELCYIILAGIFLGYVCPFTLIAKPTTTSCYLQRLLVGLSSAMCYSALVTKTNRIARILAGSKKKICTRKPRFMSAWAQVIIASILISVQLTLVVTLIIMEPPMPILSYPSIKEVYLICNTSNLGVVAPLGYNGLLIMSCTYYAFKTRNVPANFNEAKYIAFTMYTTCIIWLAFVPIYFGSNYKIITTCFAVSLSVTVALGCMFTPKMYIIIAKPERNVRSAFTTSDVVRMHVGDGKLPCRSNTFLNIFRRKKAGAGNAKKRQPEFSPTSQCPSAHVQL

SEQ ID NO: 3416 - DNA, 27481 bp, Homo sapiens
agtgtgggcgagccagccagggtgagcgcgggcgccgggccgcggccgccggccgcagcgggctgagattgttgtcctctgtcaccagggcggctgggctcccgcagtcctgcagaccgcgcccgatcccggcgacagggcgggcggacagccgcgcatccccggggtcccgccgagcctgggcgcagagagccgggaggaagcgttcgctcgcttcgccttgctgctgggaaactgaacgaggccgagagagaaggttcttgagttcatgtaagaggacagtcttaaaacggaagaagaaaaagaagcagttcagtctttgggagagctgcctccttgttgagtgctgcaaaggcctggaattcatttatgacagaatagatctagaaaagtccaagcatgttttctagagtggtgtagccctgtgctgcctccagtgaagagtctcttggtgttggcttcgtgcttccggagggaccatggcaacctccagaggggcctcccggtgtcctcgggatatcgccaatgtgatgcagaggctgcaagatgagcaagagatagtacaaaaacgaactttcacaaaatggatcaactctcatctggccaagcggaaacctccaatggtggtggacgatctttttgaagacatgaaagatggtgttaaactgcttgcccttctggaggtcctgtctgggcagaaactgccttgtgaacaaggacgccggatgaagcgaatccatgctgtggctaacattggcacggcactcaagttcctcgaaggaagaaagtccatgcacagaggatcaccgattaaattagtcaacattaactccaccgatatagctgatggccgaccctcaatagttcttggattgatgtggaccattattctatatttccagattgaagagttgaccagcaacctgccccagctccagtctttgtccagcagcgcatcctccgtggacagcatagttagctctgagactcccagcccaccaagtaaacggaaggtgaccaccaagatccaaggaaatgctaagaaggctttattaaagtgggttcagtacacagctggcaagcagactggaatagaagtaaaagattttgggaagagttggagaagcggggttgcctttcattcagttattcatgccattcgaccggaattggtggacttggagacagtgaaaggcagatccaaccgagaaaatttggaggatgctttcactatcgccgaaacagaactggggatcccaagactgctagatcctgaagacgttgatgtggataaaccagatgagaaatctattatgacctatgtagcccagtttctgaaacattatcctgacatccacaatgcaagcactgatgggcaagaggatgatgaaatacttccaggtttcccatcttttgcaaattctgtacaaaattttaagagagaagacagagtaatttttaaggaaatgaaagtttggatagaacaatttgagagagatttgacaagagcacagatggtggaatcaaatttacaggataaatatcagtcatttaagcacttcagagttcaatatgaaatgaagaggaaacagattgaacatttaatacaaccattacacagagacggtaaattgtcacttgaccaagcattggtaaaacaatcttgggatagagtgacctccaggctctttgactggcatatacagcttgataaatctcttcctgcacctctgggcaccataggtgcctggctgtacagagcggaggtggccctgagagaggaaataaccgttcaacaggtccacgaggaaacagcaaacacgatacaacggaaacttgagcaacataaggatctgcttcaaaacacggatgcccacaaaagagcattccatgaaatctaccggaccaggtctgttaacgggattccagtgccacctgatcaattagaggacatggccgagaggtttcattttgtttcctccacatcagagctacacctaatgaaaatggaatttttagaattaaagtaccgtctgctctcactgctggttcttgcagagtcaaagctgaagtcttggatcattaagtacgggaggagagagtcagtggagcagcttctacaaaactacgtgtcttttatagaaaatagcaagttctttgaacaatatgaggtgacataccagatcttgaaacagacagctgagatgtatgtcaaagcagatggttcagtggaagaagctgagaatgtgatgaaattcatgaatgaaaccaccgctcagtggaggaatctctcagtagaagtgaggagtgtgaggagcatgctggaagaagtgatctctaactgggatcgctatggcaatacagtggctagtctgcaagcctggctagaggatgctgaaaaaatgctcaatcaatcagaaaatgccaaaaaggatttttttcgaaatttacctcattggattcagcagcatactgccatgaacgatgctggcaattttctaattgaaacctgtgatgagatggtttcccgtgacctgaagcagcaattactgttgctaaatgggcggtggagggagttgtttatggaagtcaagcaatatgctcaagctgatgagatggacagaatgaagaaggaatacacagactgtgttgttaccctgtctgcttttgcaacggaagcccataagaaactttctgaacccttagaagtctcttttatgaatgtcaagctattaattcaagacttggaggatattgagcagagggtgcctgtgatggatgcccaatacaagataattacaaagacagcacacctcattaccaaagaaagcccccaagaagaaggaaaagaaatgtttgcgaccatgtcaaagctcaaagagcagctaaccaaggtcaaagaatgttactccccactcctttatgagtctcagcagctgttgattccgttggaggaattagaaaagcagatgacgtccttttatgactcacttgggaaaatcaatgaaattatcacagttcttgagcgtgaggcacaatcgagtgccctttttaaacaaaaacatcaggaactgttagcttgtcaagaaaactgtaagaaaaccttgacacttattgagaaaggcagtcaaagtgttcaaaagtttgtgaccttgagcaacgtgttaaagcattttgatcagacgaggctacaaagacagattgcagatattcatgttgcttttcagagtatggtaaagaaaactggagattggaagaagcatgtggaaaccaacagtcgcttgatgaagaagtttgaggagtctcgagcagagttggagaaggtactgcggattgctcaggagggcctggaggaaaagggggatccagaggagctcctgcggagacacactgagtttttcagtcagctggatcagagggtgctcaatgctttcctgaaagcttgtgatgaactcaccgacatccttccagagcaggagcagcaggggctgcaggaagctgttcgaaagctccacaaacaatggaaggatcttcaaggagaagccccttatcatttgcttcatctgaagattgatgtggagaagaataggttcttagcctctgtagaagaatgcagaactgagctggatcgagagaccaagctgatgccccaggaaggcagtgaaaagataattaaagagcacagggttttcttcagtgacaaaggtcctcatcatctctgtgagaaaaggttacagctcatcgaggaactctgtgtgaaactcccagtgcgggacccagtaagggacacacctggaacctgtcacgtgactctcaaagagctcagagctgccattgacagcacctacaggaagctcatggaagacccagacaagtggaaggactacactagcagattctctgagttctcatcttggatatctacaaatgagacacaattaaaggggatcaagggtgaggccatcgatactgccaaccacggagaggttaaacgtgccgttgaagagatcagaaatggtgttaccaaaaggggtgagaccctcagctggctgaaatccaggctgaaagttttgacagaagtttcttctgagaatgaagcccaaaagcagggagatgagctggcaaaattatccagctctttcaaggctcttgtgacgctgctgtcagaggttgaaaagatgctaagcaattttggggactgtgtccagtacaaagaaatagtcaaaaattctctcgaagaattaatttctggctctaaagaagtccaggaacaagctgagaagatcttggatactgaaaatctgtttgaagcacagcagttacttcttcatcaccagcaaaagacaaagcggatctcagcaaagaagagagatgtgcagcagcagatcgcgcaggcgcagcagggagaaggggggctgcctgaccgaggccacgaggagctgcggaagctggagagcacactggatggcctggagcgcagccgggagaggcaggaacgccgcatccaggtcacattaagaaaatgggagcgatttgaaacaaacaaagaaacagtagtaagatacctttttcaaacaggttccagtcatgaacgcttcttgagttttagcagtttggaaagtttatcttcagaactggaacaaacaaaggagttttctaaacggacagaaagtattgcagtccaggctgagaaccttgtaaaggaagcttcagagataccgcttgggccccaaaataagcagctgcttcaacagcaggccaagtcaatcaaagaacaagtcaaaaaattagaagacacgcttgaagaagatattaaaaccatggaaatggtgaaaaccaagtgggatcattttggcagtaattttgagactctgtccgtctggataactgagaaagaaaaagaactcaatgccttggaaacttcgtcatctgccatggacatgcaaatcagccaaattaaggtcacaattcaggaaatagaaagtaagctcagcagcattgtaggattagaagaagaagcccagtcttttgctcagtttgttaccactggagaatctgctcgaattaaagccaagttgacacaaataagaagatacggggaagagcttcgagagcatgcacagtgtctggaaggaacaatcctgggacatttatctcagcagcaaaagtttgaagagaaccttagaaagatccagcaatctgtgtctgaatttgaagataaacttgctgttccaattaaaatatgttcttcagctacagaaacatacaaagttcttcaagaacatatggatctctgccaggccctggagtcactgagcagcgcgatcactgccttctcagccagtgccaggaaggttgtgaacagagattcctgtgttcaggaggctgcggctctacagcagcaatacgaggacatcctaaggagggcgaaggagagacagacggcgctggagaatctgctggcccactggcagaggctagagaaagaactatcatcctttttgacctggttagagcggggtgaagctaaagccagttccccagaaatggacatttctgcagacagagtcaaagtggaaggtgaacttcagttaatacaggcactgcaaaatgaagttgtatcccaggcctcattctatagcaaacttttgcaattgaaggaatcattgttctcagtagcctccaaagatgatgtgaaaatgatgaaactacatttggagcagttggatgagagatggagagatttaccacagatcattaacaaaaggattaattttcttcagtctgtggttgctgaacaccagcaatttgatgagctgctgctttccttttctgtctggattaaactgtttctcagtgaattacaaactacctctgagattagcataatggaccatcaagtagcccttactcggcataaggaccacgcagcagaagtagagagcaaaaagggcgaattgcagagtctgcagggtcacttagcaaagttgggttctctgggccgtgctgaggacctccacctcctgcagggaaaggctgaggactgcttccagctgtttgaggaggccagccaggttgtggagaggcggcagcttgccctgtcccatttggcagaattcctccagagccatgcctctctgtccggcattctccgccagctgaggcaaacagtggaagcaaccaacagtatgaataagaacgagtctgatttgatagaaaaggacctcaatgatgctcttcaaaatgctaaagcattagaatctgctgccgtcagtctggatggcattctttccaaagcccaataccatctgaaaatcgggagctctgagcaaaggacttcctgcagagccacggctgatcagctctgtggagaggtagagaggatccagaaccttctgggaaccaagcagagtgaggcagatgctctggcagtgttgaaaaaagcattccaagaccagaaagaggagcttctgaaaagcattgaggacattgaagaaaggactgacaaagagcgattgaaagaacctacccgccaagctcttcagcagaggttaagagtgtttaatcagctagaagatgaattgaattctcacgagcatgaactatgttggttgaaagacaaagccaagcaaattgcccagaaagatgtagcttttgcacctgaagttgacagggagataaaccgcttagaggtcacctgggatgataccaaaagactaattcatgaaaatcagggtcagtgctgtggacttattgacttaatgagagaatatcagaacctgaaatcagctgtatctaaagtcttagaaaatgccagcagtgtgattgtaaccagaactaccataaaagatcaggaggatcttaaatgggctttttccaagcatgaaactgccaagaacaaaatgaattacaaacagaaagacttggataactttaccagcaaaggaaaacacttgttatctgagctgaagaaaattcacagtagtgatttcagcttggtgaaaacagacatggagagcaccgtggacaaatggctggatgtatcagagaaacttgaagaaaacatggataggctgagagtaagcctgtccatttgggatgatgtactgtcaactagagatgagattgagggatggtcaaacaactgcgttccacagatggcagaaaacatcagcaacctggataaccacctcagagctgaagaactgcttaaagaatttgagtctgaagttaaaaacaaagcattgagattggaagaactgcattccaaagttaatgatctgaaagaattaactaaaaatctagaaacaccgccagaccttcagtttatagaagcagacttaatgcagaaactggagcatgccaaagaaataactgaagtagcaaaaggaaccctgaaggatttcacggctcaaagtacacaagtggagaagtttattaatgacataacaacatggttcacaaaagtggaagaatcgttgatgaactgtgcccaaaatgagacttgtgaagcattgaaaaaagtcaaggatatacaaaaagaacttcaaagtcaacaaagcaacatcagctctacccaagaaaatctcaatagcttgtgccgcaagtaccactcagctgagttggagagcctgggccgtgcaatgactggtctgataaagaaacatgaagccgtgagccagttgtgctccaaaacccaggccagcctgcaggaatctctggaaaaacacttcagtgagtctatgcaggaattccaagaatggtttttgggagcaaaggcagcagcaaaagaatcatcagatcgcaccggtgacagcaaagttctagaagcaaagctccatgatcttcagaacattttggactcagtcagtgatgggcagagcaaacttgatgcagtgactcaagaaggacaaactttgtatgcacatttgtctaaacaaattgtcagtagcattcaagaacaaatcacaaaggccaatgaagagtttcaagcatttctgaaacaatgccttaaagataagcaggctcttcaagactgtgcttcagaacttggaagctttgaagatcagcacagaaaactgaacttatggatccatgaaatggaagaaaggttcaatacggaaaacttgggagagagtaaacagcacattcctgagaagaaaaatgaagttcataaagttgaaatgtttttgggagaactgctggctgcaagagagtctcttgataagctttcccagagagggcagcttctgagtgaagaaggccacggtgctgggcaggagggccgcctgtgttcccagctcctcacaagccaccagaacctacttagaatgaccaaagagaaactccggagctgccaggtggcccttcaggagcacgaagccctggaggaagcactgcaaagcatgtggttctgggtgaaggccattcaggacagactggcctgtgcagagagcactcttgggagcaaagacaccctggagaaacggctgtcacaaatacaggatattctcctgatgaaaggtgaaggggaagttaagttgaatatggccattggcaagggggaacaggccttgagaagtagcaacaaagaaggtcagagggtgattcagactcagttagagacccttaaagaagtgtgggctgacatcatgagctcctccgtccacgctcaaagcactttagagtctgtgattagccaatggaatgactatgtagagaggaaaaaccagttggagcagtggatggaatcagtggatcaaaaaatagaacatcccttacaaccacagccaggtctgaaagagaagttcgtcctgcttgaccacctccagtccatcctgtctgaggcagaagatcacacgagagcccttcaccgtctaattgcgaagtccagggagctctacgaaaagacagaggatgagtctttcaaggacacagctcaagaggagctgaaaacacagtttaatgatataatgactgttgccaaggaaaaaatgaggaaagtggaagagattgtgaaagatcatctaatgtatttagatgcggtccacgagttcacagattggctccattcagcaaaggaagaacttcaccggtggtcagatatgtctggagattcatcagccacccagaaaaagttatcaaaaattaaggagctgatagattccagagagattggtgcaagccgtctcagcagagtggagtcgctggctcccgaagtgaaacagaacacaactgccagtgggtgtgagctcatgcacacggagatgcaggccctgcgtgccgactggaagcagtgggaagacagtgtattccaaacgcagagctgtttggagaacctggtcagccagatggccctttcggagcaggaattctcaggccaagtggctcaactggagcaggccctggaacagttcagtgcccttctgaaaacctgggctcagcagttaaccctcctggaaggcaagaacacggatgaggagatagtggaatgctggcacaaaggacaagagatactggatgctttgcaaaaagcagagcctagaacagaggatctcaagtctcagctgaatgaactttgtcgattttccagagacctgagtacctacagtggaaaagtttctggcttgattaaagagtataattgtctttgtttgcaagcatccaagggctgccagaataaagaacagattttacagcaaagatttcgaaaggccttcagggatttccagcagtggttggttaatgcaaaaatcactaccgccaagtgttttgatatacctcaaaatataagtgaagtttcaactagtcttcagaaaatacaggagtttttgtcagaaagtgaaaatggacagcacaagctaaacatgatgctgtctaaaggggaacttctgagtaccctgctgaccaaagagaaagcgaaagggatccaggccaaagttacagctgcaaaagaagattggaaaaattttcattcaaatctccaccaaaaagaatctgctctagagaatctaaagatccaaatgaaggactttgaagtaagtgctgagcctatccaggactggctgagtaaaactgagaagatggtccatgaaagcagcaatcgcctctatgatctgccagcaaagaggagggagcagcagaagctccagtctgtccttgaggaaatacactgctacgagcctcagctcaacaggctgaaagagaaagctcagcagctgtgggaaggacaagctgccagcaagagctttaggcacagagtgtcgcagctgtcttctcagtatctagcgctaagcaatttaacaaaggagaaagtgtcaagactggatagaatcgttgcagaacacaatcagttctctcttgggattaaagaattacaagactggatgacggatgcgattcacatgctggattcatactgccacccgacatccgacaaaagtgtgctggacagcaggacgctcaagctcgaggctctattatcagtcaaacaggaaaaagagattcagatgaaaatgatagtgaccaggggagaatctgtccttcagaatacttctccagaaggcattcccactattcagcagcagctgcagagtgtgaaggatatgtgggcatcccttttgtctgcagggattcgttgtaaaagccaactcgaaggagctctctccaagtggacaagttatcaggatggcgttcgacagttctccggttggatggatagtatggaagccaacctgaatgaatcagaaaggcagcatgcggagctgcgggataaaacaacgatgctcggaaaagccaagttattaaatgaagaagtgctgagttacagcagcttgctggagaccatcgaagtcaaaggggctggcatgacagaacactatgtcacccagctagaactccaggatctacaggaacgatacagagccatccaagagagggccaaggaagccgtaaccaagtctgaaaaacttgtccgcctgcaccaagagtatcagagagacctaaaggcatttgaagtttggttggggcaagaacaagaaaagctcgaccagtattcagttcttgaaggtgatgcccacactcatgagacaacattgcgtgatcttcaggagctacaggtacactgtgcagaggggcaggccctgttgaactcagtgctgcacaccagagaggatgtgatcccatcaggtatcccacaggcagaggaccgggctttagagtctctccggcaagactggcaggcttaccagcacaggctgtccgagactcgaactcagttcaataacgtggtgaacaaattgaggctaatggagcaaaagtttcagcaagtagatgaatggctcaaaacagcagaggagaaaaagtggcacgaagaagtgactgcatacagagatgaagttgaggaagtgggagctagagctcaggagatactggacgagagccacgtgaacagcagaatgggttgccaggccacccagctgacttccagataccaggccctgcttctccaagtgctggaacaaataaaattcctggaggaggagattcagagtttggaggaatcagaatcatccctcagttcctattctgattggtatggctctactcataaaaacttcaagaatgtggctaccaagattgacaaagtagatacagtaatgatggggaagaaattgaagacgttggaggttttgctcaaagacatggagaaaggtcacagtttgctgaaatcagcccgggagaaaggagagagggctgttaaatacttggaggaaggcgaggcagagaggttaagaaaggagattcatgatcacatggagcagttgaaggaactgaccagcactgtccggaaagaacacatgacgctggaaaaaggtcttcatttagcaaaggaattctcagataaatgcaaagcactgacacagtggatagcagaataccaggaaattctacatgttcctgaagaacccaaaatggaattatatgagaaaaaagctcagttatctaaatacaagtcacttcaacaaacggtgctgtcccatgaaccatcagtaaagtcagtgagagagaagggtgaagctcttttggaactggtgcaggacgtcactttaaaggacaaaatagatcaacttcaaagtgattaccaggacctgtgcagcataggaaaggcaatgatggaagaaattgctggttttgaagaccgtttgaacaatcttcaaatgaaaggtgatactttgattggccaatgtgcagaccacctgcaagcgaaacttaaacaaaacgtgcatgctcatctgcagggcacaaaggacagctactcagcgatctgcagcacagctcagaggatgtaccagagtttggaacacgaacttcagaagcacgtcagccgacaagacaccctgcagcagtgccaggcctggctttctgcagtccagccggatttagagccaagtcctcaaccacctcttagtagggcagaagccattaagcaggtcaaacacttcagagctttgcaagagcaggcaaggacctacctagatctcctttgctccatgtgtgacctgtcaaatgcttcggtgaaaaccacagcaaaagacattcaacaaacagagcaaacgattgaacaaaagcttgtccaggcccagaacttaactcagggctgggaagagatcaagcacctgaagtctgagctctggatttacctgcaagatgctgatcagcaactgcagaacatgaagaggaggcactctgagctggagctgaacattgcacagaacatggtttcacaagttaaggattttgttaagaaactacagagcaaacaggcatccgtgaacaccataatagaaaaggtgaataagttaacaaagaaggaggaatcgcctgaacacaaggaaataaatcatttaaatgatcagtggctcgatttgtgccgtcagtctaacaacctgtgcttgcaaagggaagaggatcttcagagaacaagagattaccatgactgtatgaatgttgttgaagtgttcctagaaaaatttactacagaatgggataacttggccagatctgatgcagagagtacagctgtccacctggaagctttgaaaaagttagcattggcattgcaggagagaaagtatgctattgaagatctgaaagatcaaaagcagaaaatgatagagcatctgaatttagatgacaaggagttagtcaaagaacagacgagtcatttagagcaacgttggtttcagcttgaggacctcattaaaaggaaaatccaagtgtcagtcaccaacttggaggagttaaatgtggtgcagtccagatttcaggagctaatggagtgggcagaagagcaacaacccaacatcgccgaggcccttaagcagagccctcctccagatatggctcagaaccttctcatggatcacctggccatctgcagtgaactggaggccaagcagatgctcctgaaatcgcttataaaggacgcagacagggtcatggcagatcttggtctcaatgagcgacaggtcatccagaaggctctctctgatgcacaaagccacgtgaattgtctcagtgacttagtgggccagcgaagaaagtacttaaacaaagccttgtccgagaaaacccagtttctcatggcagtgttccaggccaccagccaaattcagcaacatgagcgaaagataatgttccgtgaacacatctgtctgttaccagatgatgtgagcaaacaagtcaaaacatgtaagagtgcacaagccagcctcaagacttaccaaaatgaagtcactggactttgggcccagggtcgcgaactaatgaaggaagtcacagagcaggaaaagagtgaagtgctggggaagcttcaggaattgcagagtgtctatgacagtgttttacaaaagtgcagtcaccggttacaagaactagagaagaatttggtttctaggaagcattttaaggaagattttgataaagcttgccactggctaaaacaagcagatattgttacatttcctgaaatcaacctaatgaatgagagttctgagcttcatacacaactggctaaataccaaaacattcttgaacaatctccagaatatgaaaatcttctacttacgctgcagagaactgggcagaccatattaccatcgctgaatgaagtcgatcattcctacctcagtgaaaagctaaatgctttgcctcgacaatttaatgtaattgttgccttggctaaagacaagttctataaagtccaggaagcaattcttgctcggaaggaatatgcttccttgattgagttgacaacccagtctctgagtgaacttgaagcccaattcttgaggatgagcaaagttcccaccgacctggccgttgaggaggctctttctctgcaagatggttgcagagccattctggacgaggtggcgggccttggggaggcggtggatgaactgaaccagaaaaaagaaggttttcgcagcacaggtcagccttggcagccagacaagatgctgcaccttgtcaccttatatcacaggctgaagcgacaaacagaacagagggttagcttattagaagacaccaccagtgcttaccaagaacacgagaagatgtgccaacagctggagagacaactgaagtctgtaaaagaggagcagtccaaagtgaatgaggaaacgctgcctgcagaggagaagctcaaaatgtatcactccctggcaggaagtctccaggactcagggattgtactgaaacgagtaaccatacatcttgaagatcttgccccacaccttgaccccttggcttatgagaaagccaggcatcagatccagtcctggcaaggggagttaaaactgttgacttctgccattggtgagacggtgacagaatgtgagagccgaatggtgcagagtatagacttccagactgagatgagtcgctccctggactggctgaggagagtgaaggcagagctcagtgggccggtgtacctagacctcaacctgcaggacatccaagaggaaatcagaaaaatccaaattcatcaggaagaggtccagtccagcttgagaatcatgaatgcgctgagtcacaaggaaaaggagaagttcacaaaggccaaggagctgatttctgcggatttagaacacagcctcgctgagctctcagagctggatggagacatccaggaagccttacgcaccagacaggctaccttgactgaaatatatagccagtgtcaaaggtattatcaggtatttcaagcagccaatgactggcttgaggatgcccaagaattgttacagctggcaggcaatggcctagacgtggagagcgcagaggaaaatctcaaaagccacatggaatttttcagtacagaggatcagttccatagtaacctggaggagctccacagcctggtagccaccctggacccactcatcaagccaaccggcaaagaagacctagaacagaaagtggcttctctggaactcaggagccagaggatgagccgggactctggtgcccaagtggatctcttgcagagatgcacagctcaatggcacgattaccagaaagcaagggaagaggttattgaattgatgaatgatacagaaaagaaattgtctgagttttctttgttgaagacttcgtctagtcatgaagcggaagaaaaattgtcagaacacaaggctttagtgtcagtggttaactctttccatgagaaaattgtggcccttgaggaaaaagcttcacaactggagaaaaccggaaatgatgccagcaaagccaccctgagcaggtcaatgaccaccgtctggcagcgctggacacgccttcgagctgtggcccaggaccaggagaagatcctggaagatgcagtggatgagtggacgggctttaacaacaaggttaaaaaggccactgaaatgattgatcagctgcaagataagttacctggaagttcagcagagaaagcatcgaaagcagagctcttaactcttcttgaataccacgacacgttcgttctggagctggagcagcagcagtcggccttgggcatgctgcggcagcaaaccctgagcatgctccaggatggagccgccccaacccctggggaagagcctccgctcatgcaggaaatcaccgccatgcaagatcggtgcctgaacatgcaggagaaagtgaagactaatggaaagttggtgaagcaagagctgaaggaccgagaaatggtggagactcagatcaattctgtgaaatgttgggttcaggaaacgaaagaatatttagggaatccaacaatagaaatagatgctcaacttgaagaacttcagattctcctaacagaagccacaaatcaccgacagaacattgaaaaaatggcagaagaacagaaggagaagtacttaggtctttataccatattaccttctgaactctcccttcagttggctgaagtggcgttagatctaaagatccgagatcagatccaagacaaaataaaagaagttgagcagagcaaggccacgagccaggaactcagccggcaaattcagaagttagctaaagacctcacaactattctaactaagctgaaagcgaagacagataatgtagttcaagctaaaactgaccaaaaggtgctgggagaggaattagatggctgtaattcaaagttaatggaattagatgcagcagtacagaaattcttggaacagaatggccaactgggtaagccactggccaagaagataggaaaactgactgaacttcaccagcagaccattagacaagctgagaatcggctctccaagctcaatcaggcagcatcacatttagaagaatacaatgaaatgcttgaattaattttgaagtggattgaaaaagctaaagtcttggctcatggaactattgcatggaattctgcaagccagcttcgggaacaatatattttgcatcagaccctgctagaagaatccaaagaaattgacagtgagctggaagcaatgactgagaaattacagtacctcactagcgtgtactgtacagaaaaaatgtctcagcaagtggcagaactgggacgggagactgaggagttgcgacagatgatcaaaattcgtttgcagaacctccaagatgcagctaaggatatgaaaaaatttgaagcagagttgaaaaagttacaagctgccttggagcaagcccaggcaacactgacttctccagaagttggacgtctcagtctcaaggagcagctctctcatcggcagcatttgttgtctgagatggagtcactgaagccgaaggtgcaagcagtgcagctctgccagagtgccctccggatccccgaggatgtggttgccagcttacctctctgtcatgctgctctgcggctgcaggaagaggccagccggctgcagcacaccgccatccagcagtgtaacatcatgcaggcagctgtggtacaatatgaacaatatgagcaagaaatgaaacatctccagcaactgatagaaggagctcacagagagattgaggataaacctgttgccaccagtaacatacaggagctgcaggctcagatttctcggcatgaggagctggcgcagaaaattaagggctaccaggagcagatcgcttctttgaattccaagtgcaagatgctgacgatgaaagccaagcacgccaccatgctgctgacggtgaccgaggtcgaggggctggcggaagggacagaggacctggatggggagctcctccccacgccttcggcccacccctctgtggtcatgatgactgcaggtcgctgtcacactttgctgtcaccggtcactgaggagtctggggaggagggaaccaacagtgagatttcctctccacctgcctgtcgctccccttcacctgtggctaatacagatgcttctgttaaccaggacattgcatattaccaagccttgtctgctgagaggttgcagacagatgctgcaaaaattcaccccagcacatccgcatcccaggagttctatgaaccgggattggagccatccgctactgccaaactgggtgatttgcagcgttcttgggaaaccttaaagaatgtgatcagtgagaagcagcgcacactctatgaagctttggaacgccagcagaagtaccaggactccctccagtccatctctacgaagatggaggccattgagctgaaactcagtgagagcccagagcctggcaggagtccagaaagccagatggctgaacatcaggcattgatggatgagattctcatgctccaggatgaaatcaatgagctccagtcctctctcgcagaggagctggtatccgagtcttgtgaggccgaccctgcggagcagctggccttgcagtccacgctcactgtcttagccgagcgaatgtccaccatcaggatgaaagcctcggggaaacggcagcttttggaggagaagttgaatgatcagctggaggaacaaaggcaggaacaggccctgcagaggtatcgctgtgaagccgatgagctggacagctggctcttgagtaccaaggccactctggacactgcgctgagtccacccaaggagcccatggacatggaggcccagcttatggactgccagaatatgctggtggaaatagagcagaaggtggtggctttatcagaactgtcagtccacaatgagaacctgctgctggagggcaaagctcacaccaaggacgaggccgagcagctggctggaaagctgagaaggctcaaggggagcctgctggagctgcagagagccctgcatgataagcagctcaacatgcagggaacagcacaggagaaggaggagagcgatgttgacctaacagccacgcagagccccggcgtccaggaatggctggcccaagctcgcaccacatggacccagcagcggcagagcagtctccagcaacaaaaagagttagaacaggaattagccgagcagaagagtctccttcgctcagtagccagtcgtggagaggagattctaattcaacattcggcggcagagacctctggtgatgctggcgaaaaacctgatgtgttatcccaggagttggggatggaaggggagaaatcatccgctgaagaccagatgagaatgaaatgggaaagcctacatcaagaatttagtaccaagcagaaactactacagaatgttctggaacaggaacaagagcaagtgctttatagcaggccaaatcgactcttgtctggtgtgccactgtacaaaggggacgtgccaacccaagataaatctgcagttacatctttgctggatggactgaaccaagccttcgaggaggtttcatcccagagtggaggggcaaagaggcagagtatacacttggagcagaagttgtatgatggagtctcagccacctctacttggttggatgacgttgaagaacgtttatttgttgccacagcacttttaccagaagaaacagagacttgtctcttcaaccaagagattcttgccaaagacattaaggaaatgtctgaagaaatggataagaacaaaaacttgttttcccaagcttttccagagaatggtgataatcgagatgttattgaagatactttgggttgtcttttgggcaggttatccttgctagactcagtagtgaatcaacgatgtcatcagatgaaagaaagacttcagcaaatactaaatttccagaatgatctgaaagtgctgtttacatcactggctgacaacaaatacatcattctgcaaaaactggcaaatgtgtttgaacagcccgtagcagaacaaatagaggcaatacaacaggctgaagatggactcaaagaatttgatgcaggaatcattgaattaaagaggcgtggtgacaagctacaggtcgagcagccgtccatgcaagaactctccaagctccaggacatgtatgatgagctgatgatgatcattggctcccggaggagtggtctgaatcagaaccttacactcaagagtcagtatgagagggccctacaagatctggctgacctgctagaaactggtcaggagaagatggcaggagaccagaaaatcatcgtgtcttccaaagaggaaatccagcaactacttgacaaacataaggaatactttcagggcctggaatctcatatgatcttgactgaaacactcttcagaaagataatcagctttgcagtccaaaaggaaacccagttccatacagagctgatggctcaggcttctgctgtactgaaacgggctcacaagaggggtgtggagctggagtacattctagagacgtggtcccatctggatgaggaccagcaggagctcagcagacagctggaggtggtggaaagcagcatcccaagcgtgggtctggtggaggagaacgaggacaggcttattgaccgcataacactctaccagcatttaaaatctagccttaatgaataccagcccaaattatatcaagtattagatgatgggaaacgacttctgatatccatcagctgctcagatctagaaagccaactaaatcaacttggagagtgctggctaagtaacaccaataaaatgtctaaggaacttcacagactggaaacaatattgaaacactggaccagatatcaaagtgaatctgcagatctaattcactggttacaatctgcaaaagaccggctagaattttggactcagcaatctgtgacagtcccacaagagctggaaatggtccgtgatcatctaaatgctttcctggagttttctaaagaagtggatgcccaatcttccctgaaatcatctgttctgagtactggaaatcagctccttcgactaaaaaaggtggacacagccacgctgcgctctgagctgtcgcgcattgatagccagtggactgacctgctaaccaatatcccagccgtccaggagaagctccaccagctccagatggataaactgccttcccgccatgccatttctgaagtcatgagttggatttctctaatggaaaatgttattcagaaggatgaagataatattaaaaattccataggttacaaggcaattcatgaataccttcagaaatataagggttttaagatagacattaactgtaaacagctgacagtggattttgtgaaccagtccgtgctacaaatcagcagtcaggatgtggaaagtaagcgtagtgataagactgattttgctgagcaacttggagcaatgaataaaagttggcaaattctgcaaggtctagtaactgagaagatccagctgttggaaggcttattggaatcttggtcagaatatgaaaataatgtacaatgtctgaaaacatggtttgaaacccaggaaaagagactaaaacaacagcatcgaattggagatcaggcttctgttcaaaatgcactgaaagactgtcaggatctggaagatttgattaaagcaaaagaaaaagaagtagagaaaattgagcagaatggacttgctttgattcagaacaagaaagaagacgtctctagcattgtcatgagcacactgcgagagctcggccaaacctgggcaaatttagatcacatggttggacaattaaagatactgctgaaatcagtgcttgaccaatggagtagtcacaaagtggcctttgacaagataaacagttacctcatggaggccagatactctctttcccgattccgtctgctgactggctccttagaagctgtgcaagttcaggtggacaatcttcagaatctccaagatgatctggaaaaacaggaaaggagcttacagaaatttggctctatcaccaaccaattattaaaagagtgtcacccacccgtgacagaaactcttaccaatacactgaaagaagtcaacatgagatggaataacttgctggaagagattgctgagcagctacagtccagcaaggccctacttcagctttggcaaagatacaaggactactccaaacagtgtgcttcgacagttcagcagcaggaggatcgaaccaatgagctgttgaaggcagccacaaacaaggacattgccgatgatgaggttgccacatggattcaagattgcaacgacctcctcaaaggactgggcacagttaaagattccctcttttttctccatgagctgggagagcaactgaagcaacaagtggatgcttccgcagcatcagctattcaatcggatcaactctctttgagtcaacacttgtgtgccctggagcaagctctctgcaaacagcagacttcattacaggctggagttcttgattatgaaacctttgccaagagtttagaagctttggaggcctggatagtggaagctgaagaaatactacaagggcaggaccctagccactcatctgacctctccacaatccaggaaaggatggaagaacttaagggacagatgttaaaattcagcagcatggctccagatttagaccgtctaaatgagcttggatataggttacccttgaatgataaggaaatcaaaagaatgcagaatctgaaccgccattggtctctgatctcctctcagactacagaaagattcagcaagttgcagtcatttttgctacaacatcagactttcttggaaaaatgtgaaacatggatggaattcctagttcagacagaacaaaagttagcagtagagatttcaggaaattatcagcaccttttggaacagcagagagcacacgagttgtttcaagccgagatgttcagtcgtcagcagattttgcactcaatcattattgatgggcaacgtcttctagaacaaggtcaagttgatgacagggatgaattcaacctgaaattgacactcctcagtaatcaatggcagggagtgattcgcagggcccagcagaggcgggggatcattgacagccagattcgccagtggcagcgctatagggagatggcagaaaagcttcgtaaatggttggttgaagtgtcctacctccccatgagtggtctcggaagtgttcctataccactgcaacaagcaaggaccctctttgatgaagtgcagttcaaagaaaaagtgtttctgcggcaacaaggcagctacatcctgactgtggaggctggcaagcaactccttctctcggcggacagtggcgctgaggccgccttgcaggccgaactcgctgaaatccaagagaaatggaaatcagccagcatgcggctggaagaacagaagaaaaaactagccttcttgttgaaagactgggaaaaatgtgagaaaggaatagcagattccctggagaaactacgaactttcaaaaagaagctttcgcagtctctcccggatcaccatgaagagctccatgcagaacaaatgcgttgcaaggaattagaaaatgcagttgggagctggacagatgacttgacccagttgagcctgctgaaggacaccctctctgcctatatcagtgctgatgatatctccattcttaatgaacgcgtagagcttctgcaaaggcagtgggaagaactatgccaccagctctccttaaggcggcagcaaataggtgaaagattgaatgaatgggcagtcttcagtgaaaagaacaaggaactctgtgagtggttgactcaaatggaaagcaaagtttctcagaatggagacattctcattgaagaaatgatagagaagctcaagaaggattatcaagaggaaattgctattgctcaagagaacaaaatacagctccaacaaatgggagaacgacttgctaaagccagccatgaaagcaaagcatctgagattgaatacaagctgggaaaggtcaacgaccggtggcagcatctcctggacctcattgcagccagggtgaagaagctgaaggagaccctggtagccgtgcagcagcttgataagaacatgagcagcctgaggacctggctcgctcacatcgagtcagagctggccaagccaatagtctacgattcctgtaactcggaagaaatacagagaaagcttaatgagcagcaggagcttcagagagacatagagaagcacagtacaggtgttgcatctgtcctcaacctgtgtgaagtcctgctgcacgactgtgacgcctgtgccactgatgccgagtgtgactctatacagcaggctacgagaaacctggaccggcggtggagaaacatttgtgctatgtccatggaaaggaggctgaaaatcgaagagacgtggcgattgtggcagaaatttctggatgactattcacgttttgaagattggctgaagtcttcagaaaggacagctgcttttcccagctcttctggggtgatctatacagttgccaaggaagaactaaagaaatttgaggctttccagcgacaggtccacgagtgcctgacgcagctggaactgatcaacaagcagtaccgccgcctggccagggagaaccgcactgattcagcatgtagcctcaaacagatggttcacgaaggcaaccagagatgggacaacctgcaaaagcgtgtcacctccatcttgcgcagactcaagcattttattggccagcgtgaggagtttgagactgcgcgggacagcattctggtctggctcacagagatggatctgcagctcactaatattgaacatttttctgagtgtgatgttcaagctaaaataaagcaactcaaggccttccagcaggaaatttcactgaaccacaataagattgagcagataattgcccaaggagaacagctgatagaaaagagtgagcccttggatgcagcgatcatcgaggaggaactagatgagctccgacggtactgccaggaggtcttcgggcgtgtggaaagataccataagaaactgatccgcctgcctctcccagacgatgagcacgacctctcagacagggagctggagctggaagactctgcagctctgtcggacctgcactggcacgaccgctctgcagacagcctgctttctccacagccttcctccaatctctccctctcgctcgctcagcccctccggagcgagcggtcaggacgagacaccccggctagtgtggactccatccccctggagtgggatcacgactatgacctcagtcgggacctggagtctgcaatgtccagagctctgccctctgaggatgaagaaggtcaggatgacaaagatttctacctccggggagctgttggcttatcagatgtaatgatccccgaaagccctgaggcctatgtaaaactcacagaaaatgcaatcaaaaatacctccggggaccacagtgccctagagtcacagatccgacaactgggcaaagccctggatgatagccgttttcagatacagcaaaccgaaaatatcattcgcagcaaaactcccacggggccggagctagacaccagctacaaaggctacatgaaactgctgggcgaatgcagtagcagtatagactccgtgaagagactggagcacaaactgaaggaggaagaggagagccttcctggctttgttaacctgcatagtaccgaaacccaaacggctggtgtgattgaccgatgggagcttctccaggcccaggcattgagcaaggagttgaggatgaagcagaacctccagaagtggcagcagtttaactcagacttgaacagcatctgggcctggctgggggacacggaggaggagttggaacagctccagcgtctggaactcagcactgacatccagaccatcgagctccagatcaaaaagctcaaggagctccagaaagctgtggaccaccgcaaagccatcatcctctccatcaatctctgcagccctgagttcacccaggctgacagcaaggagagccgggacctgcaggatcgcttgtcgcagatgaatgggcgctgggaccgagtgtgctctctgctggaggagtggcggggcctgctgcaggatgccctgatgcagtgccagggtttccatgaaatgagccatggtttgcttcttatgctggagaacattgacagaaggaaaaatgaaattgtccctattgattctaaccttgatgcagagatacttcaggaccatcacaaacagcttatgcaaataaagcatgagctgttggaatcccaactcagagtagcctctttgcaagacatgtcttgccaactactggtgaatgctgaaggaacagactgtttagaagccaaagaaaaagtccatgttattggaaatcggctcaaacttctcttgaaggaggtcagtcgtcatatcaaggaactggagaagttattagacgtgtcaagtagtcagcaggatttgtcttcctggtcttctgctgatgaactggacacctcagggtctgtgagtcccacatcaggaaggagcaccccaaacagacagaaaacgccacgaggcaagtgtagtctctcacagcctggaccctctgtcagcagtccacatagcaggtccacaaaaggtggctccgattcctccctttctgagccagggccaggtcggtccggccgcggcttcctgttcagagtcctccgagcagctcttccccttcagcttctcctgctcctcctcatcgggcttgcctgccttgtaccaatgtcagaggaagactacagctgtgccctctccaacaactttgcccggtcattccaccccatgctcagatacacgaatggccctcctccactctgaactaagcagatgccatctgcagaagtgctggtagcataaggaggatcgggtcataagcaatcccaaactaccaacaagaggaccttgatcttggcgaaagccctcggtgtggcagctttagccctcctccagatcacatgtgtgcaaattatggcttcagaggtggaagataaacagtgacgggggaacaaacagacaacaagaaggtttggaagaaatctggtttgagactctgaaccttagcactaaggagattgagtaaggacctccaaagttccccggactcatgaattctgggcccttggcccattctgtgcacagccaaggacttcagtagaccatctgggcagctttcccatggtgctgctccaaccatcagataaatgaccctcccaagcaccatgtcagtgtcgtacaatctaccaaccaaccagtgctgaagagattttagaaccttgtaacatacaatttttaagagcttatatggcagcttcctttttaccttgttttcctttggggcatgatgttttaacctttgctttagaagcacaagctgtaaatctaaaaggcacttttttttagaggtataaagaaaaactagatgtaataaataagatcatggaaggctttatgtgaaaaaagttgaatgttatagtaaaaaaaaaaagatatttatgtatgtacagtttgctaaagccaagttttgtttgtattgatttctttgcatttattatagatattataaaatagtt

SEQ ID NO: 3417 - protein, 8749 aa, Homo sapiens; identical to SEQ ID NO: 387

SEQ ID NO: 3418 - DNA, 27748 bp, Homo sapiens
cccgggcagtggaaaccgtgggcaaaagttagctggcaggacagcgcagctcctccaggcagcggaggcagcgcgtcccggctctcagggacatttccttcccacctcgacccccgggaggtggtcccggtataaaggctcgctgagcgggtgggtcacagcacagctttgcagctgcggagaaacgcccaaggccgtgcatctccaggagggcggctgggctcccgcagtcctgcagaccgcgcccgatcccggcgacagggcgggcggacagccgcgcatccccggggtcccgccgagcctgggcgcagagagccgggaggaagcgttcgctcgcttcgccttgctgctgggaaactgaacgaggccgagagagaaggttcttgagttcatgtaagaggacagtcttaaaacggaagaagaaaaagaagcagttcagtctttgggagagctgcctccttgttgagtgctgcaaaggcctggaattcatttatgacagaatagatctagaaaagtccaagcatgttttctagagtggtgtagccctgtgctgcctccagtgaagagtctcttggtgttggcttcgtgcttccggagggaccatggcaacctccagaggggcctcccggtgtcctcgggatatcgccaatgtgatgcagaggctgcaagatgagcaagagatagtacaaaaacgaactttcacaaaatggatcaactctcatctggccaagcggaaacctccaatggtggtggacgatctttttgaagacatgaaagatggtgttaaactgcttgcccttctggaggtcctgtctgggcagaaactgccttgtgaacaaggacgccggatgaagcgaatccatgctgtggctaacattggcacggcactcaagttcctcgaaggaagaaagattaaattagtcaacattaactccaccgatatagctgatggccgaccctcaatagttcttggattgatgtggaccattattctatatttccagattgaagagttgaccagcaacctgccccagctccagtctttgtccagcagcgcatcctccgtggacagcatagttagctctgagactcccagcccaccaagtaaacggaaggtgaccaccaagatccaaggaaatgctaagaaggctttattaaagtgggttcagtacacagctggcaagcagactggaatagaagtaaaagattttgggaagagttggagaagcggggttgcctttcattcagttattcatgccattcgaccggaattggtggacttggagacagtgaaaggcagatccaaccgagaaaatttggaggatgctttcactatcgccgaaacagaactggggatcccaagactgctagatcctgaagacgttgatgtggataaaccagatgagaaatctattatgacctatgtagcccagtttctgaaacattatcctgacatccacaatgcaagcactgatgggcaagaggatgatgaaatacttccaggtttcccatcttttgcaaattctgtacaaaattttaagagagaagacagagtaatttttaaggaaatgaaagtttggatagaacaatttgagagagatttgacaagagcacagatggtggaatcaaatttacaggataaatatcagtcatttaagcacttcagagttcaatatgaaatgaagaggaaacagattgaacatttaatacaaccattacacagagacggtaaattgtcacttgaccaagcattggtaaaacaatcttgggatagagtgacctccaggctctttgactggcatatacagcttgataaatctcttcctgcacctctgggcaccataggtgcctggctgtacagagcggaggtggccctgagagaggaaataaccgttcaacaggtccacgaggaaacagcaaacacgatacaacggaaacttgagcaacataaggatctgcttcaaaacacggatgcccacaaaagagcattccatgaaatctaccggaccaggtctgttaacgggattccagtgccacctgatcaattagaggacatggccgagaggtttcattttgtttcctccacatcagagctacacctaatgaaaatggaatttttagaattaaagtaccgtctgctctcactgctggttcttgcagagtcaaagctgaagtcttggatcattaagtacgggaggagagagtcagtggagcagcttctacaaaactacgtgtcttttatagaaaatagcaagttctttgaacaatatgaggtgacataccagatcttgaaacagacagctgagatgtatgtcaaagcagatggttcagtggaagaagctgagaatgtgatgaaattcatgaatgaaaccaccgctcagtggaggaatctctcagtagaagtgaggagtgtgaggagcatgctggaagaagtgatctctaactgggatcgctatggcaatacagtggctagtctgcaagcctggctagaggatgctgaaaaaatgctcaatcaatcagaaaatgccaaaaaggatttttttcgaaatttacctcattggattcagcagcatactgccatgaacgatgctggcaattttctaattgaaacctgtgatgagatggtttcccgtgacctgaagcagcaattactgttgctaaatgggcggtggagggagttgtttatggaagtcaagcaatatgctcaagctgatgagatggacagaatgaagaaggaatacacagactgtgttgttaccctgtctgcttttgcaacggaagcccataagaaactttctgaacccttagaagtctcttttatgaatgtcaagctattaattcaagacttggaggatattgagcagagggtgcctgtgatggatgcccaatacaagataattacaaagacagcacacctcattaccaaagaaagcccccaagaagaaggaaaagaaatgtttgcgaccatgtcaaagctcaaagagcagctaaccaaggtcaaagaatgttactccccactcctttatgagtctcagcagctgttgattccgttggaggaattagaaaagcagatgacgtccttttatgactcacttgggaaaatcaatgaaattatcacagttcttgagcgtgaggcacaatcgagtgccctttttaaacaaaaacatcaggaactgttagcttgtcaagaaaactgtaagaaaaccttgacacttattgagaaaggcagtcaaagtgttcaaaagtttgtgaccttgagcaacgtgttaaagcattttgatcagacgaggctacaaagacagattgcagatattcatgttgcttttcagagtatggtaaagaaaactggagattggaagaagcatgtggaaaccaacagtcgcttgatgaagaagtttgaggagtctcgagcagagttggagaaggtactgcggattgctcaggagggcctggaggaaaagggggatccagaggagctcctgcggagacacactgagtttttcagtcagctggatcagagggtgctcaatgctttcctgaaagcttgtgatgaactcaccgacatccttccagagcaggagcagcaggggctgcaggaagctgttcgaaagctccacaaacaatggaaggatcttcaaggagaagccccttatcatttgcttcatctgaagattgatgtggagaagaataggttcttagcctctgtagaagaatgcagaactgagctggatcgagagaccaagctgatgccccaggaaggcagtgaaaagataattaaagagcacagggttttcttcagtgacaaaggtcctcatcatctctgtgagaaaaggttacagctcatcgaggaactctgtgtgaaactcccagtgcgggacccagtaagggacacacctggaacctgtcacgtgactctcaaagagctcagagctgccattgacagcacctacaggaagctcatggaagacccagacaagtggaaggactacactagcagattctctgagttctcatcttggatatctacaaatgagacacaattaaaggggatcaagggtgaggccatcgatactgccaaccacggagaggttaaacgtgccgttgaagagatcagaaatggtgttaccaaaaggggtgagaccctcagctggctgaaatccaggctgaaagttttgacagaagtttcttctgagaatgaagcccaaaagcagggagatgagctggcaaaattatccagctctttcaaggctcttgtgacgctgctgtcagaggttgaaaagatgctaagcaattttggggactgtgtccagtacaaagaaatagtcaaaaattctctcgaagaattaatttctggctctaaagaagtccaggaacaagctgagaagatcttggatactgaaaatctgtttgaagcacagcagttacttcttcatcaccagcaaaagacaaagcggatctcagcaaagaagagagatgtgcagcagcagatcgcgcaggcgcagcagggagaaggggggctgcctgaccgaggccacgaggagctgcggaagctggagagcacactggatggcctggagcgcagccgggagaggcaggaacgccgcatccaggtcacattaagaaaatgggagcgatttgaaacaaacaaagaaacagtagtaagatacctttttcaaacaggttccagtcatgaacgcttcttgagttttagcagtttggaaagtttatcttcagaactggaacaaacaaaggagttttctaaacggacagaaagtattgcagtccaggctgagaaccttgtaaaggaagcttcagagataccgcttgggccccaaaataagcagctgcttcaacagcaggccaagtcaatcaaagaacaagtcaaaaaattagaagacacgcttgaagaagatattaaaaccatggaaatggtgaaaaccaagtgggatcattttggcagtaattttgagactctgtccgtctggataactgagaaagaaaaagaactcaatgccttggaaacttcgtcatctgccatggacatgcaaatcagccaaattaaggtcacaattcaggaaatagaaagtaagctcagcagcattgtaggattagaagaagaagcccagtcttttgctcagtttgttaccactggagaatctgctcgaattaaagccaagttgacacaaataagaagatacggggaagagcttcgagagcatgcacagtgtctggaaggaacaatcctgggacatttatctcagcagcaaaagtttgaagagaaccttagaaagatccagcaatctgtgtctgaatttgaagataaacttgctgttccaattaaaatatgttcttcagctacagaaacatacaaagttcttcaagaacatatggatctctgccaggccctggagtcactgagcagcgcgatcactgccttctcagccagtgccaggaaggttgtgaacagagattcctgtgttcaggaggctgcggctctacagcagcaatacgaggacatcctaaggagggcgaaggagagacagacggcgctggagaatctgctggcccactggcagaggctagagaaagaactatcatcctttttgacctggttagagcggggtgaagctaaagccagttccccagaaatggacatttctgcagacagagtcaaagtggaaggtgaacttcagttaatacaggcactgcaaaatgaagttgtatcccaggcctcattctatagcaaacttttgcaattgaaggaatcattgttctcagtagcctccaaagatgatgtgaaaatgatgaaactacatttggagcagttggatgagagatggagagatttaccacagatcattaacaaaaggattaattttcttcagtctgtggttgctgaacaccagcaatttgatgagctgctgctttccttttctgtctggattaaactgtttctcagtgaattacaaactacctctgagattagcataatggaccatcaagtagcccttactcggcataaggaccacgcagcagaagtagagagcaaaaagggcgaattgcagagtctgcagggtcacttagcaaagttgggttctctgggccgtgctgaggacctccacctcctgcagggaaaggctgaggactgcttccagctgtttgaggaggccagccaggttgtggagaggcggcagcttgccctgtcccatttggcagaattcctccagagccatgcctctctgtccggcattctccgccagctgaggcaaacagtggaagcaaccaacagtatgaataagaacgagtctgatttgatagaaaaggacctcaatgatgctcttcaaaatgctaaagcattagaatctgctgccgtcagtctggatggcattctttccaaagcccaataccatctgaaaatcgggagctctgagcaaaggacttcctgcagagccacggctgatcagctctgtggagaggtagagaggatccagaaccttctgggaaccaagcagagtgaggcagatgctctggcagtgttgaaaaaagcattccaagaccagaaagaggagcttctgaaaagcattgaggacattgaagaaaggactgacaaagagcgattgaaagaacctacccgccaagctcttcagcagaggttaagagtgtttaatcagctagaagatgaattgaattctcacgagcatgaactatgttggttgaaagacaaagccaagcaaattgcccagaaagatgtagcttttgcacctgaagttgacagggagataaaccgcttagaggtcacctgggatgataccaaaagactaattcatgaaaatcagggtcagtgctgtggacttattgacttaatgagagaatatcagaacctgaaatcagctgtatctaaagtcttagaaaatgccagcagtgtgattgtaaccagaactaccataaaagatcaggaggatcttaaatgggctttttccaagcatgaaactgccaagaacaaaatgaattacaaacagaaagacttggataactttaccagcaaaggaaaacacttgttatctgagctgaagaaaattcacagtagtgatttcagcttggtgaaaacagacatggagagcaccgtggacaaatggctggatgtatcagagaaacttgaagaaaacatggataggctgagagtaagcctgtccatttgggatgatgtactgtcaactagagatgagattgagggatggtcaaacaactgcgttccacagatggcagaaaacatcagcaacctggataaccacctcagagctgaagaactgcttaaagaatttgagtctgaagttaaaaacaaagcattgagattggaagaactgcattccaaagttaatgatctgaaagaattaactaaaaatctagaaacaccgccagaccttcagtttatagaagcagacttaatgcagaaactggagcatgccaaagaaataactgaagtagcaaaaggaaccctgaaggatttcacggctcaaagtacacaagtggagaagtttattaatgacataacaacatggttcacaaaagtggaagaatcgttgatgaactgtgcccaaaatgagacttgtgaagcattgaaaaaagtcaaggatatacaaaaagaacttcaaagtcaacaaagcaacatcagctctacccaagaaaatctcaatagcttgtgccgcaagtaccactcagctgagttggagagcctgggccgtgcaatgactggtctgataaagaaacatgaagccgtgagccagttgtgctccaaaacccaggccagcctgcaggaatctctggaaaaacacttcagtgagtctatgcaggaattccaagaatggtttttgggagcaaaggcagcagcaaaagaatcatcagatcgcaccggtgacagcaaagttctagaagcaaagctccatgatcttcagaacattttggactcagtcagtgatgggcagagcaaacttgatgcagtgactcaagaaggacaaactttgtatgcacatttgtctaaacaaattgtcagtagcattcaagaacaaatcacaaaggccaatgaagagtttcaagcatttctgaaacaatgccttaaagataagcaggctcttcaagactgtgcttcagaacttggaagctttgaagatcagcacagaaaactgaacttatggatccatgaaatggaagaaaggttcaatacggaaaacttgggagagagtaaacagcacattcctgagaagaaaaatgaagttcataaagttgaaatgtttttgggagaactgctggctgcaagagagtctcttgataagctttcccagagagggcagcttctgagtgaagaaggccacggtgctgggcaggagggccgcctgtgttcccagctcctcacaagccaccagaacctacttagaatgaccaaagagaaactccggagctgccaggtggcccttcaggagcacgaagccctggaggaagcactgcaaagcatgtggttctgggtgaaggccattcaggacagactggcctgtgcagagagcactcttgggagcaaagacaccctggagaaacggctgtcacaaatacaggatattctcctgatgaaaggtgaaggggaagttaagttgaatatggccattggcaagggggaacaggccttgagaagtagcaacaaagaaggtcagagggtgattcagactcagttagagacccttaaagaagtgtgggctgacatcatgagctcctccgtccacgctcaaagcactttagagtctgtgattagccaatggaatgactatgtagagaggaaaaaccagttggagcagtggatggaatcagtggatcaaaaaatagaacatcccttacaaccacagccaggtctgaaagagaagttcgtcctgcttgaccacctccagtccatcctgtctgaggcagaagatcacacgagagcccttcaccgtctaattgcgaagtccagggagctctacgaaaagacagaggatgagtctttcaaggacacagctcaagaggagctgaaaacacagtttaatgatataatgactgttgccaaggaaaaaatgaggaaagtggaagagattgtgaaagatcatctaatgtatttagatgcggtccacgagttcacagattggctccattcagcaaaggaagaacttcaccggtggtcagatatgtctggagattcatcagccacccagaaaaagttatcaaaaattaaggagctgatagattccagagagattggtgcaagccgtctcagcagagtggagtcgctggctcccgaagtgaaacagaacacaactgccagtgggtgtgagctcatgcacacggagatgcaggccctgcgtgccgactggaagcagtgggaagacagtgtattccaaacgcagagctgtttggagaacctggtcagccagatggccctttcggagcaggaattctcaggccaagtggctcaactggagcaggccctggaacagttcagtgcccttctgaaaacctgggctcagcagttaaccctcctggaaggcaagaacacggatgaggagatagtggaatgctggcacaaaggacaagagatactggatgctttgcaaaaagcagagcctagaacagaggatctcaagtctcagctgaatgaactttgtcgattttccagagacctgagtacctacagtggaaaagtttctggcttgattaaagagtataattgtctttgtttgcaagcatccaagggctgccagaataaagaacagattttacagcaaagatttcgaaaggccttcagggatttccagcagtggttggttaatgcaaaaatcactaccgccaagtgttttgatatacctcaaaatataagtgaagtttcaactagtcttcagaaaatacaggagtttttgtcagaaagtgaaaatggacagcacaagctaaacatgatgctgtctaaaggggaacttctgagtaccctgctgaccaaagagaaagcgaaagggatccaggccaaagttacagctgcaaaagaagattggaaaaattttcattcaaatctccaccaaaaagaatctgctctagagaatctaaagatccaaatgaaggactttgaagtaagtgctgagcctatccaggactggctgagtaaaactgagaagatggtccatgaaagcagcaatcgcctctatgatctgccagcaaagaggagggagcagcagaagctccagtctgtccttgaggaaatacactgctacgagcctcagctcaacaggctgaaagagaaagctcagcagctgtgggaaggacaagctgccagcaagagctttaggcacagagtgtcgcagctgtcttctcagtatctagcgctaagcaatttaacaaaggagaaagtgtcaagactggatagaatcgttgcagaacacaatcagttctctcttgggattaaagaattacaagactggatgacggatgcgattcacatgctggattcatactgccacccgacatccgacaaaagtgtgctggacagcaggacgctcaagctcgaggctctattatcagtcaaacaggaaaaagagattcagatgaaaatgatagtgaccaggggagaatctgtccttcagaatacttctccagaaggcattcccactattcagcagcagctgcagagtgtgaaggatatgtgggcatcccttttgtctgcagggattcgttgtaaaagccaactcgaaggagctctctccaagtggacaagttatcaggatggcgttcgacagttctccggttggatggatagtatggaagccaacctgaatgaatcagaaaggcagcatgcggagctgcgggataaaacaacgatgctcggaaaagccaagttattaaatgaagaagtgctgagttacagcagcttgctggagaccatcgaagtcaaaggggctggcatgacagaacactatgtcacccagctagaactccaggatctacaggaacgatacagagccatccaagagagggccaaggaagccgtaaccaagtctgaaaaacttgtccgcctgcaccaagagtatcagagagacctaaaggcatttgaagtttggttggggcaagaacaagaaaagctcgaccagtattcagttcttgaaggtgatgcccacactcatgagacaacattgcgtgatcttcaggagctacaggtacactgtgcagaggggcaggccctgttgaactcagtgctgcacaccagagaggatgtgatcccatcaggtatcccacaggcagaggaccgggctttagagtctctccggcaagactggcaggcttaccagcacaggctgtccgagactcgaactcagttcaataacgtggtgaacaaattgaggctaatggagcaaaagtttcagcaagtagatgaatggctcaaaacagcagaggagaaagttagtcccaggaccagacgtcagtctaacagggcaaccaaggagatacaattacatcagatgaagaagtggcacgaagaagtgactgcatacagagatgaagttgaggaagtgggagctagagctcaggagatactggacgagagccacgtgaacagcagaatgggttgccaggccacccagctgacttccagataccaggccctgcttctccaagtgctggaacaaataaaattcctggaggaggagattcagagtttggaggaatcagaatcatccctcagttcctattctgattggtatggctctactcataaaaacttcaagaatgtggctaccaagattgacaaagtagatacagtaatgatggggaagaaattgaagacgttggaggttttgctcaaagacatggagaaaggtcacagtttgctgaaatcagcccgggagaaaggagagagggctgttaaatacttggaggaaggcgaggcagagaggttaagaaaggagattcatgatcacatggagcagttgaaggaactgaccagcactgtccggaaagaacacatgacgctggaaaaaggtcttcatttagcaaaggaattctcagataaatgcaaagcactgacacagtggatagcagaataccaggaaattctacatgttcctgaagaacccaaaatggaattatatgagaaaaaagctcagttatctaaatacaagtcacttcaacaaacggtgctgtcccatgaaccatcagtaaagtcagtgagagagaagggtgaagctcttttggaactggtgcaggacgtcactttaaaggacaaaatagatcaacttcaaagtgattaccaggacctgtgcagcataggaaaggagcatgtcttcagtctggaggcgaaagtcaaagaccatgaagactacaacagtgagctccaagaggtcgaaaagtggctgctgcagatgtctggcagactggtggcacctgacctcctggagacaagcagcctggagacaatcacccagcaattggcccaccacaaggcaatgatggaagaaattgctggttttgaagaccgtttgaacaatcttcaaatgaaaggtgatactttgattggccaatgtgcagaccacctgcaagcgaaacttaaacaaaacgtgcatgctcatctgcagggcacaaaggacagctactcagcgatctgcagcacagctcagaggatgtaccagagtttggaacacgaacttcagaagcacgtcagccgacaagacaccctgcagcagtgccaggcctggctttctgcagtccagccggatttagagccaagtcctcaaccacctcttagtagggcagaagccattaagcaggtcaaacacttcagagctttgcaagagcaggcaaggacctacctagatctcctttgctccatgtgtgacctgtcaaatgcttcggtgaaaaccacagcaaaagacattcaacaaacagagcaaacgattgaacaaaagcttgtccaggcccagaacttaactcagggctgggaagagatcaagcacctgaagtctgagctctggatttacctgcaagatgctgatcagcaactgcagaacatgaagaggaggcactctgagctggagctgaacattgcacagaacatggtttcacaagttaaggattttgttaagaaactacagagcaaacaggcatccgtgaacaccataatagaaaaggtgaataagttaacaaagaaggaggaatcgcctgaacacaaggaaataaatcatttaaatgatcagtggctcgatttgtgccgtcagtctaacaacctgtgcttgcaaagggaagaggatcttcagagaacaagagattaccatgactgtatgaatgttgttgaagtgttcctagaaaaatttactacagaatgggataacttggccagatctgatgcagagagtacagctgtccacctggaagctttgaaaaagttagcattggcattgcaggagagaaagtatgctattgaagatctgaaagatcaaaagcagaaaatgatagagcatctgaatttagatgacaaggagttagtcaaagaacagacgagtcatttagagcaacgttggtttcagcttgaggacctcattaaaaggaaaatccaagtgtcagtcaccaacttggaggagttaaatgtggtgcagtccagatttcaggagctaatggagtgggcagaagagcaacaacccaacatcgccgaggcccttaagcagagccctcctccagatatggctcagaaccttctcatggatcacctggccatctgcagtgaactggaggccaagcagatgctcctgaaatcgcttataaaggacgcagacagggtcatggcagatcttggtctcaatgagcgacaggtcatccagaaggctctctctgatgcacaaagccacgtgaattgtctcagtgacttagtgggccagcgaagaaagtacttaaacaaagccttgtccgagaaaacccagtttctcatggcagtgttccaggccaccagccaaattcagcaacatgagcgaaagataatgttccgtgaacacatctgtctgttaccagatgatgtgagcaaacaagtcaaaacatgtaagagtgcacaagccagcctcaagacttaccaaaatgaagtcactggactttgggcccagggtcgcgaactaatgaaggaagtcacagagcaggaaaagagtgaagtgctggggaagcttcaggaattgcagagtgtctatgacagtgttttacaaaagtgcagtcaccggttacaagaactagagaagaatttggtttctaggaagcattttaaggaagattttgataaagcttgccactggctaaaacaagcagatattgttacatttcctgaaatcaacctaatgaatgagagttctgagcttcatacacaactggctaaataccaaaacattcttgaacaatctccagaatatgaaaatcttctacttacgctgcagagaactgggcagaccatattaccatcgctgaatgaagtcgatcattcctacctcagtgaaaagctaaatgctttgcctcgacaatttaatgtaattgttgccttggctaaagacaagttctataaagtccaggaagcaattcttgctcggaaggaatatgcttccttgattgagttgacaacccagtctctgagtgaacttgaagcccaattcttgaggatgagcaaagttcccaccgacctggccgttgaggaggctctttctctgcaagatggttgcagagccattctggacgaggtggcgggccttggggaggcggtggatgaactgaaccagaaaaaagaaggttttcgcagcacaggtcagccttggcagccagacaagatgctgcaccttgtcaccttatatcacaggctgaagcgacaaacagaacagagggttagcttattagaagacaccaccagtgcttaccaagaacacgagaagatgtgccaacagctggagagacaactgaagtctgtaaaagaggagcagtccaaagtgaatgaggaaacgctgcctgcagaggagaagctcaaaatgtatcactccctggcaggaagtctccaggactcagggattgtactgaaacgagtaaccatacatcttgaagatcttgccccacaccttgaccccttggcttatgagaaagccaggcatcagatccagtcctggcaaggggagttaaaactgttgacttctgccattggtgagacggtgacagaatgtgagagccgaatggtgcagagtatagacttccagactgagatgagtcgctccctggactggctgaggagagtgaaggcagagctcagtgggccggtgtacctagacctcaacctgcaggacatccaagaggaaatcagaaaaatccaaattcatcaggaagaggtccagtccagcttgagaatcatgaatgcgctgagtcacaaggaaaaggagaagttcacaaaggccaaggagctgatttctgcggatttagaacacagcctcgctgagctctcagagctggatggagacatccaggaagccttacgcaccagacaggctaccttgactgaaatatatagccagtgtcaaaggtattatcaggtatttcaagcagccaatgactggcttgaggatgcccaagaattgttacagctggcaggcaatggcctagacgtggagagcgcagaggaaaatctcaaaagccacatggaatttttcagtacagaggatcagttccatagtaacctggaggagctccacagcctggtagccaccctggacccactcatcaagccaaccggcaaagaagacctagaacagaaagtggcttctctggaactcaggagccagaggatgagccgggactctggtgcccaagtggatctcttgcagagatgcacagctcaatggcacgattaccagaaagcaagggaagaggttattgaattgatgaatgatacagaaaagaaattgtctgagttttctttgttgaagacttcgtctagtcatgaagcggaagaaaaattgtcagaacacaaggctttagtgtcagtggttaactctttccatgagaaaattgtggcccttgaggaaaaagcttcacaactggagaaaaccggaaatgatgccagcaaagccaccctgagcaggtcaatgaccaccgtctggcagcgctggacacgccttcgagctgtggcccaggaccaggagaagatcctggaagatgcagtggatgagtggacgggctttaacaacaaggttaaaaaggccactgaaatgattgatcagctgcaagataagttacctggaagttcagcagagaaagcatcgaaagcagagctcttaactcttcttgaataccacgacacgttcgttctggagctggagcagcagcagtcggccttgggcatgctgcggcagcaaaccctgagcatgctccaggatggagccgccccaacccctggggaagagcctccgctcatgcaggaaatcaccgccatgcaagatcggtgcctgaacatgcaggagaaagtgaagactaatggaaagttggtgaagcaagagctgaaggaccgagaaatggtggagactcagatcaattctgtgaaatgttgggttcaggaaacgaaagaatatttagggaatccaacaatagaaatagatgctcaacttgaagaacttcagattctcctaacagaagccacaaatcaccgacagaacattgaaaaaatggcagaagaacagaaggagaagtacttaggtctttataccatattaccttctgaactctcccttcagttggctgaagtggcgttagatctaaagatccgagatcagatccaagacaaaataaaagaagttgagcagagcaaggccacgagccaggaactcagccggcaaattcagaagttagctaaagacctcacaactattctaactaagctgaaagcgaagacagataatgtagttcaagctaaaactgaccaaaaggtgctgggagaggaattagatggctgtaattcaaagttaatggaattagatgcagcagtacagaaattcttggaacagaatggccaactgggtaagccactggccaagaagataggaaaactgactgaacttcaccagcagaccattagacaagctgagaatcggctctccaagctcaatcaggcagcatcacatttagaagaatacaatgaaatgcttgaattaattttgaagtggattgaaaaagctaaagtcttggctcatggaactattgcatggaattctgcaagccagcttcgggaacaatatattttgcatcagaccctgctagaagaatccaaagaaattgacagtgagctggaagcaatgactgagaaattacagtacctcactagcgtgtactgtacagaaaaaatgtctcagcaagtggcagaactgggacgggagactgaggagttgcgacagatgatcaaaattcgtttgcagaacctccaagatgcagctaaggatatgaaaaaatttgaagcagagttgaaaaagttacaagctgccttggagcaagcccaggcaacactgacttctccagaagttggacgtctcagtctcaaggagcagctctctcatcggcagcatttgttgtctgagatggagtcactgaagccgaaggtgcaagcagtgcagctctgccagagtgccctccggatccccgaggatgtggttgccagcttacctctctgtcatgctgctctgcggctgcaggaagaggccagccggctgcagcacaccgccatccagcagtgtaacatcatgcaggcagctgtggtacaatatgaacaatatgagcaagaaatgaaacatctccagcaactgatagaaggagctcacagagagattgaggataaacctgttgccaccagtaacatacaggagctgcaggctcagatttctcggcatgaggagctggcgcagaaaattaagggctaccaggagcagatcgcttctttgaattccaagtgcaagatgctgacgatgaaagccaagcacgccaccatgctgctgacggtgaccgaggtcgaggggctggcggaagggacagaggacctggatggggagctcctccccacgccttcggcccacccctctgtggtcatgatgactgcaggtcgctgtcacactttgctgtcaccggtcactgaggagtctggggaggagggaaccaacagtgagatttcctctccacctgcctgtcgctccccttcacctgtggctaatacagatgcttctgttaaccaggacattgcatattaccaagccttgtctgctgagaggttgcagacagatgctgcaaaaattcaccccagcacatccgcatcccaggagttctatgaaccgggattggagccatccgctactgccaaactgggtgatttgcagcgttcttgggaaaccttaaagaatgtgatcagtgagaagcagcgcacactctatgaagctttggaacgccagcagaagtaccaggactccctccagtccatctctacgaagatggaggccattgagctgaaactcagtgagagcccagagcctggcaggagtccagaaagccagatggctgaacatcaggcattgatggatgagattctcatgctccaggatgaaatcaatgagctccagtcctctctcgcagaggagctggtatccgagtcttgtgaggccgaccctgcggagcagctggccttgcagtccacgctcactgtcttagccgagcgaatgtccaccatcaggatgaaagcctcggggaaacggcagcttttggaggagaagttgaatgatcagctggaggaacaaaggcaggaacaggccctgcagaggtatcgctgtgaagccgatgagctggacagctggctcttgagtaccaaggccactctggacactgcgctgagtccacccaaggagcccatggacatggaggcccagcttatggactgccagaatatgctggtggaaatagagcagaaggtggtggctttatcagaactgtcagtccacaatgagaacctgctgctggagggcaaagctcacaccaaggacgaggccgagcagctggctggaaagctgagaaggctcaaggggagcctgctggagctgcagagagccctgcatgataagcagctcaacatgcagggaacagcacaggagaaggaggagagcgatgttgacctaacagccacgcagagccccggcgtccaggaatggctggcccaagctcgcaccacatggacccagcagcggcagagcagtctccagcaacaaaaagagttagaacaggaattagccgagcagaagagtctccttcgctcagtagccagtcgtggagaggagattctaattcaacattcggcggcagagacctctggtgatgctggcgaaaaacctgatgtgttatcccaggagttggggatggaaggggagaaatcatccgctgaagaccagatgagaatgaaatgggaaagcctacatcaagaatttagtaccaagcagaaactactacagaatgttctggaacaggaacaagagcaagtgctttatagcaggccaaatcgactcttgtctggtgtgccactgtacaaaggggacgtgccaacccaagataaatctgcagttacatctttgctggatggactgaaccaagccttcgaggaggtttcatcccagagtggaggggcaaagaggcagagtatacacttggagcagaagttgtatgatggagtctcagccacctctacttggttggatgacgttgaagaacgtttatttgttgccacagcacttttaccagaagaaacagagacttgtctcttcaaccaagagattcttgccaaagacattaaggaaatgtctgaagaaatggataagaacaaaaacttgttttcccaagcttttccagagaatggtgataatcgagatgttattgaagatactttgggttgtcttttgggcaggttatccttgctagactcagtagtgaatcaacgatgtcatcagatgaaagaaagacttcagcaaatactaaatttccagaatgatctgaaagtgctgtttacatcactggctgacaacaaatacatcattctgcaaaaactggcaaatgtgtttgaacagcccgtagcagaacaaatagaggcaatacaacaggctgaagatggactcaaagaatttgatgcaggaatcattgaattaaagaggcgtggtgacaagctacaggtcgagcagccgtccatgcaagaactctccaagctccaggacatgtatgatgagctgatgatgatcattggctcccggaggagtggtctgaatcagaaccttacactcaagagtcagtatgagagggccctacaagatctggctgacctgctagaaactggtcaggagaagatggcaggagaccagaaaatcatcgtgtcttccaaagaggaaatccagcaactacttgacaaacataaggaatactttcagggcctggaatctcatatgatcttgactgaaacactcttcagaaagataatcagctttgcagtccaaaaggaaacccagttccatacagagctgatggctcaggcttctgctgtactgaaacgggctcacaagaggggtgtggagctggagtacattctagagacgtggtcccatctggatgaggaccagcaggagctcagcagacagctggaggtggtggaaagcagcatcccaagcgtgggtctggtggaggagaacgaggacaggcttattgaccgcataacactctaccagcatttaaaatctagccttaatgaataccagcccaaattatatcaagtattagatgatgggaaacgacttctgatatccatcagctgctcagatctagaaagccaactaaatcaacttggagagtgctggctaagtaacaccaataaaatgtctaaggaacttcacagactggaaacaatattgaaacactggaccagatatcaaagtgaatctgcagatctaattcactggttacaatctgcaaaagaccggctagaattttggactcagcaatctgtgacagtcccacaagagctggaaatggtccgtgatcatctaaatgctttcctggagttttctaaagaagtggatgcccaatcttccctgaaatcatctgttctgagtactggaaatcagctccttcgactaaaaaaggtggacacagccacgctgcgctctgagctgtcgcgcattgatagccagtggactgacctgctaaccaatatcccagccgtccaggagaagctccaccagctccagatggataaactgccttcccgccatgccatttctgaagtcatgagttggatttctctaatggaaaatgttattcagaaggatgaagataatattaaaaattccataggttacaaggcaattcatgaataccttcagaaatataagggttttaagatagacattaactgtaaacagctgacagtggattttgtgaaccagtccgtgctacaaatcagcagtcaggatgtggaaagtaagcgtagtgataagactgattttgctgagcaacttggagcaatgaataaaagttggcaaattctgcaaggtctagtaactgagaagatccagctgttggaaggcttattggaatcttggtcagaatatgaaaataatgtacaatgtctgaaaacatggtttgaaacccaggaaaagagactaaaacaacagcatcgaattggagatcaggcttctgttcaaaatgcactgaaagactgtcaggatctggaagatttgattaaagcaaaagaaaaagaagtagagaaaattgagcagaatggacttgctttgattcagaacaagaaagaagacgtctctagcattgtcatgagcacactgcgagagctcggccaaacctgggcaaatttagatcacatggttggacaattaaagatactgctgaaatcagtgcttgaccaatggagtagtcacaaagtggcctttgacaagataaacagttacctcatggaggccagatactctctttcccgattccgtctgctgactggctccttagaagctgtgcaagttcaggtggacaatcttcagaatctccaagatgatctggaaaaacaggaaaggagcttacagaaatttggctctatcaccaaccaattattaaaagagtgtcacccacccgtgacagaaactcttaccaatacactgaaagaagtcaacatgagatggaataacttgctggaagagattgctgagcagctacagtccagcaaggccctacttcagctttggcaaagatacaaggactactccaaacagtgtgcttcgacagttcagcagcaggaggatcgaaccaatgagctgttgaaggcagccacaaacaaggacattgccgatgatgaggttgccacatggattcaagattgcaacgacctcctcaaaggactgggcacagttaaagattccctcttttttctccatgagctgggagagcaactgaagcaacaagtggatgcttccgcagcatcagctattcaatcggatcaactctctttgagtcaacacttgtgtgccctggagcaagctctctgcaaacagcagacttcattacaggctggagttcttgattatgaaacctttgccaagagtttagaagctttggaggcctggatagtggaagctgaagaaatactacaagggcaggaccctagccactcatctgacctctccacaatccaggaaaggatggaagaacttaagggacagatgttaaaattcagcagcatggctccagatttagaccgtctaaatgagcttggatataggttacccttgaatgataaggaaatcaaaagaatgcagaatctgaaccgccattggtctctgatctcctctcagactacagaaagattcagcaagttgcagtcatttttgctacaacatcagactttcttggaaaaatgtgaaacatggatggaattcctagttcagacagaacaaaagttagcagtagagatttcaggaaattatcagcaccttttggaacagcagagagcacacgagttgtttcaagccgagatgttcagtcgtcagcagattttgcactcaatcattattgatgggcaacgtcttctagaacaaggtcaagttgatgacagggatgaattcaacctgaaattgacactcctcagtaatcaatggcagggagtgattcgcagggcccagcagaggcgggggatcattgacagccagattcgccagtggcagcgctatagggagatggcagaaaagcttcgtaaatggttggttgaagtgtcctacctccccatgagtggtctcggaagtgttcctataccactgcaacaagcaaggaccctctttgatgaagtgcagttcaaagaaaaagtgtttctgcggcaacaaggcagctacatcctgactgtggaggctggcaagcaactccttctctcggcggacagtggcgctgaggccgccttgcaggccgaactcgctgaaatccaagagaaatggaaatcagccagcatgcggctggaagaacagaagaaaaaactagccttcttgttgaaagactgggaaaaatgtgagaaaggaatagcagattccctggagaaactacgaactttcaaaaagaagctttcgcagtctctcccggatcaccatgaagagctccatgcagaacaaatgcgttgcaaggaattagaaaatgcagttgggagctggacagatgacttgacccagttgagcctgctgaaggacaccctctctgcctatatcagtgctgatgatatctccattcttaatgaacgcgtagagcttctgcaaaggcagtgggaagaactatgccaccagctctccttaaggcggcagcaaataggtgaaagattgaatgaatgggcagtcttcagtgaaaagaacaaggaactctgtgagtggttgactcaaatggaaagcaaagtttctcagaatggagacattctcattgaagaaatgatagagaagctcaagaaggattatcaagaggaaattgctattgctcaagagaacaaaatacagctccaacaaatgggagaacgacttgctaaagccagccatgaaagcaaagcatctgagattgaatacaagctgggaaaggtcaacgaccggtggcagcatctcctggacctcattgcagccagggtgaagaagctgaaggagaccctggtagccgtgcagcagcttgataagaacatgagcagcctgaggacctggctcgctcacatcgagtcagagctggccaagccaatagtctacgattcctgtaactcggaagaaatacagagaaagcttaatgagcagcaggagcttcagagagacatagagaagcacagtacaggtgttgcatctgtcctcaacctgtgtgaagtcctgctgcacgactgtgacgcctgtgccactgatgccgagtgtgactctatacagcaggctacgagaaacctggaccggcggtggagaaacatttgtgctatgtccatggaaaggaggctgaaaatcgaagagacgtggcgattgtggcagaaatttctggatgactattcacgttttgaagattggctgaagtcttcagaaaggacagctgcttttcccagctcttctggggtgatctatacagttgccaaggaagaactaaagaaatttgaggctttccagcgacaggtccacgagtgcctgacgcagctggaactgatcaacaagcagtaccgccgcctggccagggagaaccgcactgattcagcatgtagcctcaaacagatggttcacgaaggcaaccagagatgggacaacctgcaaaagcgtgtcacctccatcttgcgcagactcaagcattttattggccagcgtgaggagtttgagactgcgcgggacagcattctggtctggctcacagagatggatctgcagctcactaatattgaacatttttctgagtgtgatgttcaagctaaaataaagcaactcaaggccttccagcaggaaatttcactgaaccacaataagattgagcagataattgcccaaggagaacagctgatagaaaagagtgagcccttggatgcagcgatcatcgaggaggaactagatgagctccgacggtactgccaggaggtcttcgggcgtgtggaaagataccataagaaactgatccgcctgcctctcccagacgatgagcacgacctctcagacagggagctggagctggaagactctgcagctctgtcggacctgcactggcacgaccgctctgcagacagcctgctttctccacagccttcctccaatctctccctctcgctcgctcagcccctccggagcgagcggtcaggacgagacaccccggctagtgtggactccatccccctggagtgggatcacgactatgacctcagtcgggacctggagtctgcaatgtccagagctctgccctctgaggatgaagaaggtcaggatgacaaagatttctacctccggggagctgttggcttatcaggggaccacagtgccctagagtcacagatccgacaactgggcaaagccctggatgatagccgttttcagatacagcaaaccgaaaatatcattcgcagcaaaactcccacggggccggagctagacaccagctacaaaggctacatgaaactgctgggcgaatgcagtagcagtatagactccgtgaagagactggagcacaaactgaaggaggaagaggagagccttcctggctttgttaacctgcatagtaccgaaacccaaacggctggtgtgattgaccgatgggagcttctccaggcccaggcattgagcaaggagttgaggatgaagcagaacctccagaagtggcagcagtttaactcagacttgaacagcatctgggcctggctgggggacacggaggaggagttggaacagctccagcgtctggaactcagcactgacatccagaccatcgagctccagatcaaaaagctcaaggagctccagaaagctgtggaccaccgcaaagccatcatcctctccatcaatctctgcagccctgagttcacccaggctgacagcaaggagagccgggacctgcaggatcgcttgtcgcagatgaatgggcgctgggaccgagtgtgctctctgctggaggagtggcggggcctgctgcaggatgccctgatgcagtgccagggtttccatgaaatgagccatggtttgcttcttatgctggagaacattgacagaaggaaaaatgaaattgtccctattgattctaaccttgatgcagagatacttcaggaccatcacaaacagcttatgcaaataaagcatgagctgttggaatcccaactcagagtagcctctttgcaagacatgtcttgccaactactggtgaatgctgaaggaacagactgtttagaagccaaagaaaaagtccatgttattggaaatcggctcaaacttctcttgaaggaggtcagtcgtcatatcaaggaactggagaagttattagacgtgtcaagtagtcagcaggatttgtcttcctggtcttctgctgatgaactggacacctcagggtctgtgagtcccacatcaggaaggagcaccccaaacagacagaaaacgccacgaggcaagtgtagtctctcacagcctggaccctctgtcagcagtccacatagcaggtccacaaaaggtggctccgattcctccctttctgagccagggccaggtcggtccggccgcggcttcctgttcagagtcctccgagcagctcttccccttcagcttctcctgctcctcctcatcgggcttgcctgccttgtaccaatgtcagaggaagactacagctgtgccctctccaacaactttgcccggtcattccaccccatgctcagatacacgaatggccctcctccactctgaactaagcagatgccatctgcagaagtgctggtagcataaggaggatcgggtcataagcaatcccaaactaccaacaagaggaccttgatcttggcgaaagccctcggtgtggcagctttagccctcctccagatcacatgtgtgcaaattatggcttcagaggtggaagataaacagtgacgggggaacaaacagacaacaagaaggtttggaagaaatctggtttgagactctgaaccttagcactaaggagattgagtaaggacctccaaagttccccggactcatgaattctgggcccttggcccattctgtgcacagccaaggacttcagtagaccatctgggcagctttcccatggtgctgctccaaccatcagataaatgaccctcccaagcaccatgtcagtgtcgtacaatctaccaaccaaccagtgctgaagagattttagaaccttgtaacatacaatttttaagagcttatatggcagcttcctttttaccttgttttcctttggggcatgatgttttaacctttgctttagaagcacaagctgtaaatctaaaaggcacttttttttagaggtataaagaaaaactagatgtaataaataagatcatggaaggctttatgtgaaaaaagttgaatgttatagtaaaaaaaaaaagatatttatgtatgtacagtttgctaaagccaagttttgtttgtattgatttctttgcatttattatagatattataaaatagtt

SEQ ID NO: 3419 - protein, 8797 aa, Homo sapiens; identical to SEQ ID NO: 391

SEQ ID NO: 3420 - DNA, 27674 bp, Homo sapiens
cccgggcagtggaaaccgtgggcaaaagttagctggcaggacagcgcagctcctccaggcagcggaggcagcgcgtcccggctctcagggacatttccttcccacctcgacccccgggaggtggtcccggtataaaggctcgctgagcgggtgggtcacagcacagctttgcagctgcggagaaacgcccaaggccgtgcatctccaggagggcggctgggctcccgcagtcctgcagaccgcgcccgatcccggcgacagggcgggcggacagccgcgcatccccggggtcccgccgagcctgggcgcagagagccgggaggaagcgttcgctcgcttcgccttgctgctgggaaactgaacgaggccgagagagaaggttcttgagttcatgtaagaggacagtcttaaaacggaagaagaaaaagaagcagttcagtctttgggagagctgcctccttgttgagtgctgcaaaggcctggaattcatttatgacagaatagatctagaaaagtccaagcatgttttctagagtggtgtagccctgtgctgcctccagtgaagagtctcttggtgttggcttcgtgcttccggagggaccatggcaacctccagaggggcctcccggtgtcctcgggatatcgccaatgtgatgcagaggctgcaagatgagcaagagatagtacaaaaacgaactttcacaaaatggatcaactctcatctggccaagcggaaacctccaatggtggtggacgatctttttgaagacatgaaagatggtgttaaactgcttgcccttctggaggtcctgtctgggcagaaactgccttgtgaacaaggacgccggatgaagcgaatccatgctgtggctaacattggcacggcactcaagttcctcgaaggaagaaagattaaattagtcaacattaactccaccgatatagctgatggccgaccctcaatagttcttggattgatgtggaccattattctatatttccagattgaagagttgaccagcaacctgccccagctccagtctttgtccagcagcgcatcctccgtggacagcatagttagctctgagactcccagcccaccaagtaaacggaaggtgaccaccaagatccaaggaaatgctaagaaggctttattaaagtgggttcagtacacagctggcaagcagactggaatagaagtaaaagattttgggaagagttggagaagcggggttgcctttcattcagttattcatgccattcgaccggaattggtggacttggagacagtgaaaggcagatccaaccgagaaaatttggaggatgctttcactatcgccgaaacagaactggggatcccaagactgctagatcctgaagacgttgatgtggataaaccagatgagaaatctattatgacctatgtagcccagtttctgaaacattatcctgacatccacaatgcaagcactgatgggcaagaggatgatgaaatacttccaggtttcccatcttttgcaaattctgtacaaaattttaagagagaagacagagtaatttttaaggaaatgaaagtttggatagaacaatttgagagagatttgacaagagcacagatggtggaatcaaatttacaggataaatatcagtcatttaagcacttcagagttcaatatgaaatgaagaggaaacagattgaacatttaatacaaccattacacagagacggtaaattgtcacttgaccaagcattggtaaaacaatcttgggatagagtgacctccaggctctttgactggcatatacagcttgataaatctcttcctgcacctctgggcaccataggtgcctggctgtacagagcggaggtggccctgagagaggaaataaccgttcaacaggtccacgaggaaacagcaaacacgatacaacggaaacttgagcaacataaggatctgcttcaaaacacggatgcccacaaaagagcattccatgaaatctaccggaccaggtctgttaacgggattccagtgccacctgatcaattagaggacatggccgagaggtttcattttgtttcctccacatcagagctacacctaatgaaaatggaatttttagaattaaagtaccgtctgctctcactgctggttcttgcagagtcaaagctgaagtcttggatcattaagtacgggaggagagagtcagtggagcagcttctacaaaactacgtgtcttttatagaaaatagcaagttctttgaacaatatgaggtgacataccagatcttgaaacagacagctgagatgtatgtcaaagcagatggttcagtggaagaagctgagaatgtgatgaaattcatgaatgaaaccaccgctcagtggaggaatctctcagtagaagtgaggagtgtgaggagcatgctggaagaagtgatctctaactgggatcgctatggcaatacagtggctagtctgcaagcctggctagaggatgctgaaaaaatgctcaatcaatcagaaaatgccaaaaaggatttttttcgaaatttacctcattggattcagcagcatactgccatgaacgatgctggcaattttctaattgaaacctgtgatgagatggtttcccgtgacctgaagcagcaattactgttgctaaatgggcggtggagggagttgtttatggaagtcaagcaatatgctcaagctgatgagatggacagaatgaagaaggaatacacagactgtgttgttaccctgtctgcttttgcaacggaagcccataagaaactttctgaacccttagaagtctcttttatgaatgtcaagctattaattcaagacttggaggatattgagcagagggtgcctgtgatggatgcccaatacaagataattacaaagacagcacacctcattaccaaagaaagcccccaagaagaaggaaaagaaatgtttgcgaccatgtcaaagctcaaagagcagctaaccaaggtcaaagaatgttactccccactcctttatgagtctcagcagctgttgattccgttggaggaattagaaaagcagatgacgtccttttatgactcacttgggaaaatcaatgaaattatcacagttcttgagcgtgaggcacaatcgagtgccctttttaaacaaaaacatcaggaactgttagcttgtcaagaaaactgtaagaaaaccttgacacttattgagaaaggcagtcaaagtgttcaaaagtttgtgaccttgagcaacgtgttaaagcattttgatcagacgaggctacaaagacagattgcagatattcatgttgcttttcagagtatggtaaagaaaactggagattggaagaagcatgtggaaaccaacagtcgcttgatgaagaagtttgaggagtctcgagcagagttggagaaggtactgcggattgctcaggagggcctggaggaaaagggggatccagaggagctcctgcggagacacactgagtttttcagtcagctggatcagagggtgctcaatgctttcctgaaagcttgtgatgaactcaccgacatccttccagagcaggagcagcaggggctgcaggaagctgttcgaaagctccacaaacaatggaaggatcttcaaggagaagccccttatcatttgcttcatctgaagattgatgtggagaagaataggttcttagcctctgtagaagaatgcagaactgagctggatcgagagaccaagctgatgccccaggaaggcagtgaaaagataattaaagagcacagggttttcttcagtgacaaaggtcctcatcatctctgtgagaaaaggttacagctcatcgaggaactctgtgtgaaactcccagtgcgggacccagtaagggacacacctggaacctgtcacgtgactctcaaagagctcagagctgccattgacagcacctacaggaagctcatggaagacccagacaagtggaaggactacactagcagattctctgagttctcatcttggatatctacaaatgagacacaattaaaggggatcaagggtgaggccatcgatactgccaaccacggagaggttaaacgtgccgttgaagagatcagaaatggtgttaccaaaaggggtgagaccctcagctggctgaaatccaggctgaaagttttgacagaagtttcttctgagaatgaagcccaaaagcagggagatgagctggcaaaattatccagctctttcaaggctcttgtgacgctgctgtcagaggttgaaaagatgctaagcaattttggggactgtgtccagtacaaagaaatagtcaaaaattctctcgaagaattaatttctggctctaaagaagtccaggaacaagctgagaagatcttggatactgaaaatctgtttgaagcacagcagttacttcttcatcaccagcaaaagacaaagcggatctcagcaaagaagagagatgtgcagcagcagatcgcgcaggcgcagcagggagaaggggggctgcctgaccgaggccacgaggagctgcggaagctggagagcacactggatggcctggagcgcagccgggagaggcaggaacgccgcatccaggtcacattaagaaaatgggagcgatttgaaacaaacaaagaaacagtagtaagatacctttttcaaacaggttccagtcatgaacgcttcttgagttttagcagtttggaaagtttatcttcagaactggaacaaacaaaggagttttctaaacggacagaaagtattgcagtccaggctgagaaccttgtaaaggaagcttcagagataccgcttgggccccaaaataagcagctgcttcaacagcaggccaagtcaatcaaagaacaagtcaaaaaattagaagacacgcttgaagaagatattaaaaccatggaaatggtgaaaaccaagtgggatcattttggcagtaattttgagactctgtccgtctggataactgagaaagaaaaagaactcaatgccttggaaacttcgtcatctgccatggacatgcaaatcagccaaattaaggtcacaattcaggaaatagaaagtaagctcagcagcattgtaggattagaagaagaagcccagtcttttgctcagtttgttaccactggagaatctgctcgaattaaagccaagttgacacaaataagaagatacggggaagagcttcgagagcatgcacagtgtctggaaggaacaatcctgggacatttatctcagcagcaaaagtttgaagagaaccttagaaagatccagcaatctgtgtctgaatttgaagataaacttgctgttccaattaaaatatgttcttcagctacagaaacatacaaagttcttcaagaacatatggatctctgccaggccctggagtcactgagcagcgcgatcactgccttctcagccagtgccaggaaggttgtgaacagagattcctgtgttcaggaggctgcggctctacagcagcaatacgaggacatcctaaggagggcgaaggagagacagacggcgctggagaatctgctggcccactggcagaggctagagaaagaactatcatcctttttgacctggttagagcggggtgaagctaaagccagttccccagaaatggacatttctgcagacagagtcaaagtggaaggtgaacttcagttaatacaggcactgcaaaatgaagttgtatcccaggcctcattctatagcaaacttttgcaattgaaggaatcattgttctcagtagcctccaaagatgatgtgaaaatgatgaaactacatttggagcagttggatgagagatggagagatttaccacagatcattaacaaaaggattaattttcttcagtctgtggttgctgaacaccagcaatttgatgagctgctgctttccttttctgtctggattaaactgtttctcagtgaattacaaactacctctgagattagcataatggaccatcaagtagcccttactcggcataaggaccacgcagcagaagtagagagcaaaaagggcgaattgcagagtctgcagggtcacttagcaaagttgggttctctgggccgtgctgaggacctccacctcctgcagggaaaggctgaggactgcttccagctgtttgaggaggccagccaggttgtggagaggcggcagcttgccctgtcccatttggcagaattcctccagagccatgcctctctgtccggcattctccgccagctgaggcaaacagtggaagcaaccaacagtatgaataagaacgagtctgatttgatagaaaaggacctcaatgatgctcttcaaaatgctaaagcattagaatctgctgccgtcagtctggatggcattctttccaaagcccaataccatctgaaaatcgggagctctgagcaaaggacttcctgcagagccacggctgatcagctctgtggagaggtagagaggatccagaaccttctgggaaccaagcagagtgaggcagatgctctggcagtgttgaaaaaagcattccaagaccagaaagaggagcttctgaaaagcattgaggacattgaagaaaggactgacaaagagcgattgaaagaacctacccgccaagctcttcagcagaggttaagagtgtttaatcagctagaagatgaattgaattctcacgagcatgaactatgttggttgaaagacaaagccaagcaaattgcccagaaagatgtagcttttgcacctgaagttgacagggagataaaccgcttagaggtcacctgggatgataccaaaagactaattcatgaaaatcagggtcagtgctgtggacttattgacttaatgagagaatatcagaacctgaaatcagctgtatctaaagtcttagaaaatgccagcagtgtgattgtaaccagaactaccataaaagatcaggaggatcttaaatgggctttttccaagcatgaaactgccaagaacaaaatgaattacaaacagaaagacttggataactttaccagcaaaggaaaacacttgttatctgagctgaagaaaattcacagtagtgatttcagcttggtgaaaacagacatggagagcaccgtggacaaatggctggatgtatcagagaaacttgaagaaaacatggataggctgagagtaagcctgtccatttgggatgatgtactgtcaactagagatgagattgagggatggtcaaacaactgcgttccacagatggcagaaaacatcagcaacctggataaccacctcagagctgaagaactgcttaaagaatttgagtctgaagttaaaaacaaagcattgagattggaagaactgcattccaaagttaatgatctgaaagaattaactaaaaatctagaaacaccgccagaccttcagtttatagaagcagacttaatgcagaaactggagcatgccaaagaaataactgaagtagcaaaaggaaccctgaaggatttcacggctcaaagtacacaagtggagaagtttattaatgacataacaacatggttcacaaaagtggaagaatcgttgatgaactgtgcccaaaatgagacttgtgaagcattgaaaaaagtcaaggatatacaaaaagaacttcaaagtcaacaaagcaacatcagctctacccaagaaaatctcaatagcttgtgccgcaagtaccactcagctgagttggagagcctgggccgtgcaatgactggtctgataaagaaacatgaagccgtgagccagttgtgctccaaaacccaggccagcctgcaggaatctctggaaaaacacttcagtgagtctatgcaggaattccaagaatggtttttgggagcaaaggcagcagcaaaagaatcatcagatcgcaccggtgacagcaaagttctagaagcaaagctccatgatcttcagaacattttggactcagtcagtgatgggcagagcaaacttgatgcagtgactcaagaaggacaaactttgtatgcacatttgtctaaacaaattgtcagtagcattcaagaacaaatcacaaaggccaatgaagagtttcaagcatttctgaaacaatgccttaaagataagcaggctcttcaagactgtgcttcagaacttggaagctttgaagatcagcacagaaaactgaacttatggatccatgaaatggaagaaaggttcaatacggaaaacttgggagagagtaaacagcacattcctgagaagaaaaatgaagttcataaagttgaaatgtttttgggagaactgctggctgcaagagagtctcttgataagctttcccagagagggcagcttctgagtgaagaaggccacggtgctgggcaggagggccgcctgtgttcccagctcctcacaagccaccagaacctacttagaatgaccaaagagaaactccggagctgccaggtggcccttcaggagcacgaagccctggaggaagcactgcaaagcatgtggttctgggtgaaggccattcaggacagactggcctgtgcagagagcactcttgggagcaaagacaccctggagaaacggctgtcacaaatacaggatattctcctgatgaaaggtgaaggggaagttaagttgaatatggccattggcaagggggaacaggccttgagaagtagcaacaaagaaggtcagagggtgattcagactcagttagagacccttaaagaagtgtgggctgacatcatgagctcctccgtccacgctcaaagcactttagagtctgtgattagccaatggaatgactatgtagagaggaaaaaccagttggagcagtggatggaatcagtggatcaaaaaatagaacatcccttacaaccacagccaggtctgaaagagaagttcgtcctgcttgaccacctccagtccatcctgtctgaggcagaagatcacacgagagcccttcaccgtctaattgcgaagtccagggagctctacgaaaagacagaggatgagtctttcaaggacacagctcaagaggagctgaaaacacagtttaatgatataatgactgttgccaaggaaaaaatgaggaaagtggaagagattgtgaaagatcatctaatgtatttagatgcggtccacgagttcacagattggctccattcagcaaaggaagaacttcaccggtggtcagatatgtctggagattcatcagccacccagaaaaagttatcaaaaattaaggagctgatagattccagagagattggtgcaagccgtctcagcagagtggagtcgctggctcccgaagtgaaacagaacacaactgccagtgggtgtgagctcatgcacacggagatgcaggccctgcgtgccgactggaagcagtgggaagacagtgtattccaaacgcagagctgtttggagaacctggtcagccagatggccctttcggagcaggaattctcaggccaagtggctcaactggagcaggccctggaacagttcagtgcccttctgaaaacctgggctcagcagttaaccctcctggaaggcaagaacacggatgaggagatagtggaatgctggcacaaaggacaagagatactggatgctttgcaaaaagcagagcctagaacagaggatctcaagtctcagctgaatgaactttgtcgattttccagagacctgagtacctacagtggaaaagtttctggcttgattaaagagtataattgtctttgtttgcaagcatccaagggctgccagaataaagaacagattttacagcaaagatttcgaaaggccttcagggatttccagcagtggttggttaatgcaaaaatcactaccgccaagtgttttgatatacctcaaaatataagtgaagtttcaactagtcttcagaaaatacaggagtttttgtcagaaagtgaaaatggacagcacaagctaaacatgatgctgtctaaaggggaacttctgagtaccctgctgaccaaagagaaagcgaaagggatccaggccaaagttacagctgcaaaagaagattggaaaaattttcattcaaatctccaccaaaaagaatctgctctagagaatctaaagatccaaatgaaggactttgaagtaagtgctgagcctatccaggactggctgagtaaaactgagaagatggtccatgaaagcagcaatcgcctctatgatctgccagcaaagaggagggagcagcagaagctccagtctgtccttgaggaaatacactgctacgagcctcagctcaacaggctgaaagagaaagctcagcagctgtgggaaggacaagctgccagcaagagctttaggcacagagtgtcgcagctgtcttctcagtatctagcgctaagcaatttaacaaaggagaaagtgtcaagactggatagaatcgttgcagaacacaatcagttctctcttgggattaaagaattacaagactggatgacggatgcgattcacatgctggattcatactgccacccgacatccgacaaaagtgtgctggacagcaggacgctcaagctcgaggctctattatcagtcaaacaggaaaaagagattcagatgaaaatgatagtgaccaggggagaatctgtccttcagaatacttctccagaaggcattcccactattcagcagcagctgcagagtgtgaaggatatgtgggcatcccttttgtctgcagggattcgttgtaaaagccaactcgaaggagctctctccaagtggacaagttatcaggatggcgttcgacagttctccggttggatggatagtatggaagccaacctgaatgaatcagaaaggcagcatgcggagctgcgggataaaacaacgatgctcggaaaagccaagttattaaatgaagaagtgctgagttacagcagcttgctggagaccatcgaagtcaaaggggctggcatgacagaacactatgtcacccagctagaactccaggatctacaggaacgatacagagccatccaagagagggccaaggaagccgtaaccaagtctgaaaaacttgtccgcctgcaccaagagtatcagagagacctaaaggcatttgaagtttggttggggcaagaacaagaaaagctcgaccagtattcagttcttgaaggtgatgcccacactcatgagacaacattgcgtgatcttcaggagctacaggtacactgtgcagaggggcaggccctgttgaactcagtgctgcacaccagagaggatgtgatcccatcaggtatcccacaggcagaggaccgggctttagagtctctccggcaagactggcaggcttaccagcacaggctgtccgagactcgaactcagttcaataacgtggtgaacaaattgaggctaatggagcaaaagtttcagcaagtagatgaatggctcaaaacagcagaggagaaagttagtcccaggaccagacgtcagtctaacagggcaaccaaggagatacaattacatcagatgaagaagtggcacgaagaagtgactgcatacagagatgaagttgaggaagtgggagctagagctcaggagatactggacgagagccacgtgaacagcagaatgggttgccaggccacccagctgacttccagataccaggccctgcttctccaagtgctggaacaaataaaattcctggaggaggagattcagagtttggaggaatcagaatcatccctcagttcctattctgattggtatggctctactcataaaaacttcaagaatgtggctaccaagattgacaaagtagatacagtaatgatggggaagaaattgaagacgttggaggttttgctcaaagacatggagaaaggtcacagtttgctgaaatcagcccgggagaaaggagagagggctgttaaatacttggaggaaggcgaggcagagaggttaagaaaggagattcatgatcacatggagcagttgaaggaactgaccagcactgtccggaaagaacacatgacgctggaaaaaggtcttcatttagcaaaggaattctcagataaatgcaaagcactgacacagtggatagcagaataccaggaaattctacatgttcctgaagaacccaaaatggaattatatgagaaaaaagctcagttatctaaatacaagtcacttcaacaaacggtgctgtcccatgaaccatcagtaaagtcagtgagagagaagggtgaagctcttttggaactggtgcaggacgtcactttaaaggacaaaatagatcaacttcaaagtgattaccaggacctgtgcagcataggaaaggagcatgtcttcagtctggaggcgaaagtcaaagaccatgaagactacaacagtgagctccaagaggtcgaaaagtggctgctgcagatgtctggcagactggtggcacctgacctcctggagacaagcagcctggagacaatcacccagcaattggcccaccacaaggcaatgatggaagaaattgctggttttgaagaccgtttgaacaatcttcaaatgaaaggtgatactttgattggccaatgtgcagaccacctgcaagcgaaacttaaacaaaacgtgcatgctcatctgcagggcacaaaggacagctactcagcgatctgcagcacagctcagaggatgtaccagagtttggaacacgaacttcagaagcacgtcagccgacaagacaccctgcagcagtgccaggcctggctttctgcagtccagccggatttagagccaagtcctcaaccacctcttagtagggcagaagccattaagcaggtcaaacacttcagagctttgcaagagcaggcaaggacctacctagatctcctttgctccatgtgtgacctgtcaaatgcttcggtgaaaaccacagcaaaagacattcaacaaacagagcaaacgattgaacaaaagcttgtccaggcccagaacttaactcagggctgggaagagatcaagcacctgaagtctgagctctggatttacctgcaagatgctgatcagcaactgcagaacatgaagaggaggcactctgagctggagctgaacattgcacagaacatggtttcacaagttaaggattttgttaagaaactacagagcaaacaggcatccgtgaacaccataatagaaaaggtgaataagttaacaaagaaggaggaatcgcctgaacacaaggaaataaatcatttaaatgatcagtggctcgatttgtgccgtcagtctaacaacctgtgcttgcaaagggaagaggatcttcagagaacaagagattaccatgactgtatgaatgttgttgaagtgttcctagaaaaatttactacagaatgggataacttggccagatctgatgcagagagtacagctgtccacctggaagctttgaaaaagttagcattggcattgcaggagagaaagtatgctattgaagatctgaaagatcaaaagcagaaaatgatagagcatctgaatttagatgacaaggagttagtcaaagaacagacgagtcatttagagcaacgttggtttcagcttgaggacctcattaaaaggaaaatccaagtgtcagtcaccaacttggaggagttaaatgtggtgcagtccagatttcaggagctaatggagtgggcagaagagcaacaacccaacatcgccgaggcccttaagcagagccctcctccagatatggctcagaaccttctcatggatcacctggccatctgcagtgaactggaggccaagcagatgctcctgaaatcgcttataaaggacgcagacagggtcatggcagatcttggtctcaatgagcgacaggtcatccagaaggctctctctgatgcacaaagccacgtgaattgtctcagtgacttagtgggccagcgaagaaagtacttaaacaaagccttgtccgagaaaacccagtttctcatggcagtgttccaggccaccagccaaattcagcaacatgagcgaaagataatgttccgtgaacacatctgtctgttaccagatgatgtgagcaaacaagtcaaaacatgtaagagtgcacaagccagcctcaagacttaccaaaatgaagtcactggactttgggcccagggtcgcgaactaatgaaggaagtcacagagcaggaaaagagtgaagtgctggggaagcttcaggaattgcagagtgtctatgacagtgttttacaaaagtgcagtcaccggttacaagaactagagaagaatttggtttctaggaagcattttaaggaagattttgataaagcttgccactggctaaaacaagcagatattgttacatttcctgaaatcaacctaatgaatgagagttctgagcttcatacacaactggctaaataccaaaacattcttgaacaatctccagaatatgaaaatcttctacttacgctgcagagaactgggcagaccatattaccatcgctgaatgaagtcgatcattcctacctcagtgaaaagctaaatgctttgcctcgacaatttaatgtaattgttgccttggctaaagacaagttctataaagtccaggaagcaattcttgctcggaaggaatatgcttccttgattgagttgacaacccagtctctgagtgaacttgaagcccaattcttgaggatgagcaaagttcccaccgacctggccgttgaggaggctctttctctgcaagatggttgcagagccattctggacgaggtggcgggccttggggaggcggtggatgaactgaaccagaaaaaagaaggttttcgcagcacaggtcagccttggcagccagacaagatgctgcaccttgtcaccttatatcacaggctgaagcgacaaacagaacagagggttagcttattagaagacaccaccagtgcttaccaagaacacgagaagatgtgccaacagctggagagacaactgaagtctgtaaaagaggagcagtccaaagtgaatgaggaaacgctgcctgcagaggagaagctcaaaatgtatcactccctggcaggaagtctccaggactcagggattgtactgaaacgagtaaccatacatcttgaagatcttgccccacaccttgaccccttggcttatgagaaagccaggcatcagatccagtcctggcaaggggagttaaaactgttgacttctgccattggtgagacggtgacagaatgtgagagccgaatggtgcagagtatagacttccagactgagatgagtcgctccctggactggctgaggagagtgaaggcagagctcagtgggccggtgtacctagacctcaacctgcaggacatccaagaggaaatcagaaaaatccaaattcatcaggaagaggtccagtccagcttgagaatcatgaatgcgctgagtcacaaggaaaaggagaagttcacaaaggccaaggagctgatttctgcggatttagaacacagcctcgctgagctctcagagctggatggagacatccaggaagccttacgcaccagacaggctaccttgactgaaatatatagccagtgtcaaaggtattatcaggtatttcaagcagccaatgactggcttgaggatgcccaagaattgttacagctggcaggcaatggcctagacgtggagagcgcagaggaaaatctcaaaagccacatggaatttttcagtacagaggatcagttccatagtaacctggaggagctccacagcctggtagccaccctggacccactcatcaagccaaccggcaaagaagacctagaacagaaagtggcttctctggaactcaggagccagaggatgagccgggactctggtgcccaagtggatctcttgcagagatgcacagctcaatggcacgattaccagaaagcaagggaagaggttattgaattgatgaatgatacagaaaagaaattgtctgagttttctttgttgaagacttcgtctagtcatgaagcggaagaaaaattgtcagaacacaaggctttagtgtcagtggttaactctttccatgagaaaattgtggcccttgaggaaaaagcttcacaactggagaaaaccggaaatgatgccagcaaagccaccctgagcaggtcaatgaccaccgtctggcagcgctggacacgccttcgagctgtggcccaggaccaggagaagatcctggaagatgcagtggatgagtggacgggctttaacaacaaggttaaaaaggccactgaaatgattgatcagctgcaagataagttacctggaagttcagcagagaaagcatcgaaagcagagctcttaactcttcttgaataccacgacacgttcgttctggagctggagcagcagcagtcggccttgggcatgctgcggcagcaaaccctgagcatgctccaggatggagccgccccaacccctggggaagagcctccgctcatgcaggaaatcaccgccatgcaagatcggtgcctgaacatgcaggagaaagtgaagactaatggaaagttggtgaagcaagagctgaaggaccgagaaatggtggagactcagatcaattctgtgaaatgttgggttcaggaaacgaaagaatatttagggaatccaacaatagaaatagatgctcaacttgaagaacttcagattctcctaacagaagccacaaatcaccgacagaacattgaaaaaatggcagaagaacagaaggagaagtacttaggtctttataccatattaccttctgaactctcccttcagttggctgaagtggcgttagatctaaagatccgagatcagatccaagacaaaataaaagaagttgagcagagcaaggccacgagccaggaactcagccggcaaattcagaagttagctaaagacctcacaactattctaactaagctgaaagcgaagacagataatgtagttcaagctaaaactgaccaaaaggtgctgggagaggaattagatggctgtaattcaaagttaatggaattagatgcagcagtacagaaattcttggaacagaatggccaactgggtaagccactggccaagaagataggaaaactgactgaacttcaccagcagaccattagacaagctgagaatcggctctccaagctcaatcaggcagcatcacatttagaagaatacaatgaaatgcttgaattaattttgaagtggattgaaaaagctaaagtcttggctcatggaactattgcatggaattctgcaagccagcttcgggaacaatatattttgcatcagaccctgctagaagaatccaaagaaattgacagtgagctggaagcaatgactgagaaattacagtacctcactagcgtgtactgtacagaaaaaatgtctcagcaagtggcagaactgggacgggagactgaggagttgcgacagatgatcaaaattcgtttgcagaacctccaagatgcagctaaggatatgaaaaaatttgaagcagagttgaaaaagttacaagctgccttggagcaagcccaggcaacactgacttctccagaagttggacgtctcagtctcaaggagcagctctctcatcggcagcatttgttgtctgagatggagtcactgaagccgaaggtgcaagcagtgcagctctgccagagtgccctccggatccccgaggatgtggttgccagcttacctctctgtcatgctgctctgcggctgcaggaagaggccagccggctgcagcacaccgccatccagcagtgtaacatcatgcaggcagctgtggtacaatatgaacaatatgagcaagaaatgaaacatctccagcaactgatagaaggagctcacagagagattgaggataaacctgttgccaccagtaacatacaggagctgcaggctcagatttctcggcatgaggagctggcgcagaaaattaagggctaccaggagcagatcgcttctttgaattccaagtgcaagatgctgacgatgaaagccaagcacgccaccatgctgctgacggtgaccgaggtcgaggggctggcggaagggacagaggacctggatggggagctcctccccacgccttcggcccacccctctgtggtcatgatgactgcaggtcgctgtcacactttgctgtcaccggtcactgaggagtctggggaggagggaaccaacagtgagatttcctctccacctgcctgtcgctccccttcacctgtggctaatacagatgcttctgttaaccaggacattgcatattaccaagccttgtctgctgagaggttgcagacagatgctgcaaaaattcaccccagcacatccgcatcccaggagttctatgaaccgggattggagccatccgctactgccaaactgggtgatttgcagcgttcttgggaaaccttaaagaatgtgatcagtgagaagcagcgcacactctatgaagctttggaacgccagcagaagtaccaggactccctccagtccatctctacgaagatggaggccattgagctgaaactcagtgagagcccagagcctggcaggagtccagaaagccagatggctgaacatcaggcattgatggatgagattctcatgctccaggatgaaatcaatgagctccagtcctctctcgcagaggagctggtatccgagtcttgtgaggccgaccctgcggagcagctggccttgcagtccacgctcactgtcttagccgagcgaatgtccaccatcaggatgaaagcctcggggaaacggcagcttttggaggagaagttgaatgatcagctggaggaacaaaggcaggaacaggccctgcagaggtatcgctgtgaagccgatgagctggacagctggctcttgagtaccaaggccactctggacactgcgctgagtccacccaaggagcccatggacatggaggcccagcttatggactgccagaatatgctggtggaaatagagcagaaggtggtggctttatcagaactgtcagtccacaatgagaacctgctgctggagggcaaagctcacaccaaggacgaggccgagcagctggctggaaagctgagaaggctcaaggggagcctgctggagctgcagagagccctgcatgataagcagctcaacatgcagggaacagcacaggagaaggaggagagcgatgttgacctaacagccacgcagagccccggcgtccaggaatggctggcccaagctcgcaccacatggacccagcagcggcagagcagtctccagcaacaaaaagagttagaacaggaattagccgagcagaagagtctccttcgctcagtagccagtcgtggagaggagattctaattcaacattcggcggcagagacctctggtgatgctggcgaaaaacctgatgtgttatcccaggagttggggatggaaggggagaaatcatccgctgaagaccagatgagaatgaaatgggaaagcctacatcaagaatttagtaccaagcagaaactactacagaatgttctggaacaggaacaagagcaagtgctttatagcaggccaaatcgactcttgtctggtgtgccactgtacaaaggggacgtgccaacccaagataaatctgcagttacatctttgctggatggactgaaccaagccttcgaggaggtttcatcccagagtggaggggcaaagaggcagagtatacacttggagcagaagttgtatgatggagtctcagccacctctacttggttggatgacgttgaagaacgtttatttgttgccacagcacttttaccagaagaaacagagacttgtctcttcaaccaagagattcttgccaaagacattaaggaaatgtctgaagaaatggataagaacaaaaacttgttttcccaagcttttccagagaatggtgataatcgagatgttattgaagatactttgggttgtcttttgggcaggttatccttgctagactcagtagtgaatcaacgatgtcatcagatgaaagaaagacttcagcaaatactaaatttccagaatgatctgaaagtgctgtttacatcactggctgacaacaaatacatcattctgcaaaaactggcaaatgtgtttgaacagcccgtagcagaacaaatagaggcaatacaacaggctgaagatggactcaaagaatttgatgcaggaatcattgaattaaagaggcgtggtgacaagctacaggtcgagcagccgtccatgcaagaactctccaagctccaggacatgtatgatgagctgatgatgatcattggctcccggaggagtggtctgaatcagaaccttacactcaagagtcagtatgagagggccctacaagatctggctgacctgctagaaactggtcaggagaagatggcaggagaccagaaaatcatcgtgtcttccaaagaggaaatccagcaactacttgacaaacataaggaatactttcagggcctggaatctcatatgatcttgactgaaacactcttcagaaagataatcagctttgcagtccaaaaggaaacccagttccatacagagctgatggctcaggcttctgctgtactgaaacgggctcacaagaggggtgtggagctggagtacattctagagacgtggtcccatctggatgaggaccagcaggagctcagcagacagctggaggtggtggaaagcagcatcccaagcgtgggtctggtggaggagaacgaggacaggcttattgaccgcataacactctaccagcatttaaaatctagccttaatgaataccagcccaaattatatcaagtattagatgatgggaaacgacttctgatatccatcagctgctcagatctagaaagccaactaaatcaacttggagagtgctggctaagtaacaccaataaaatgtctaaggaacttcacagactggaaacaatattgaaacactggaccagatatcaaagtgaatctgcagatctaattcactggttacaatctgcaaaagaccggctagaattttggactcagcaatctgtgacagtcccacaagagctggaaatggtccgtgatcatctaaatgctttcctggagttttctaaagaagtggatgcccaatcttccctgaaatcatctgttctgagtactggaaatcagctccttcgactaaaaaaggtggacacagccacgctgcgctctgagctgtcgcgcattgatagccagtggactgacctgctaaccaatatcccagccgtccaggagaagctccaccagctccagatggataaactgccttcccgccatgccatttctgaagtcatgagttggatttctctaatggaaaatgttattcagaaggatgaagataatattaaaaattccataggttacaaggcaattcatgaataccttcagaaatataagggttttaagatagacattaactgtaaacagctgacagtggattttgtgaaccagtccgtgctacaaatcagcagtcaggatgtggaaagtaagcgtagtgataagactgattttgctgagcaacttggagcaatgaataaaagttggcaaattctgcaaggtctagtaactgagaagatccagctgttggaaggcttattggaatcttggtcagaatatgaaaataatgtacaatgtctgaaaacatggtttgaaacccaggaaaagagactaaaacaacagcatcgaattggagatcaggcttctgttcaaaatgcactgaaagactgtcaggatctggaagatttgattaaagcaaaagaaaaagaagtagagaaaattgagcagaatggacttgctttgattcagaacaagaaagaagacgtctctagcattgtcatgagcacactgcgagagctcggccaaacctgggcaaatttagatcacatggttggacaattaaagatactgctgaaatcagtgcttgaccaatggagtagtcacaaagtggcctttgacaagataaacagttacctcatggaggccagatactctctttcccgattccgtctgctgactggctccttagaagctgtgcaagttcaggtggacaatcttcagaatctccaagatgatctggaaaaacaggaaaggagcttacagaaatttggctctatcaccaaccaattattaaaagagtgtcacccacccgtgacagaaactcttaccaatacactgaaagaagtcaacatgagatggaataacttgctggaagagattgctgagcagctacagtccagcaaggccctacttcagctttggcaaagatacaaggactactccaaacagtgtgcttcgacagttcagcagcaggaggatcgaaccaatgagctgttgaaggcagccacaaacaaggacattgccgatgatgaggttgccacatggattcaagattgcaacgacctcctcaaaggactgggcacagttaaagattccctcttttttctccatgagctgggagagcaactgaagcaacaagtggatgcttccgcagcatcagctattcaatcggatcaactctctttgagtcaacacttgtgtgccctggagcaagctctctgcaaacagcagacttcattacaggctggagttcttgattatgaaacctttgccaagagtttagaagctttggaggcctggatagtggaagctgaagaaatactacaagggcaggaccctagccactcatctgacctctccacaatccaggaaaggatggaagaacttaagggacagatgttaaaattcagcagcatggctccagatttagaccgtctaaatgagcttggatataggttacccttgaatgataaggaaatcaaaagaatgcagaatctgaaccgccattggtctctgatctcctctcagactacagaaagattcagcaagttgcagtcatttttgctacaacatcagactttcttggaaaaatgtgaaacatggatggaattcctagttcagacagaacaaaagttagcagtagagatttcaggaaattatcagcaccttttggaacagcagagagcacacgagttgtttcaagccgagatgttcagtcgtcagcagattttgcactcaatcattattgatgggcaacgtcttctagaacaaggtcaagttgatgacagggatgaattcaacctgaaattgacactcctcagtaatcaatggcagggagtgattcgcagggcccagcagaggcgggggatcattgacagccagattcgccagtggcagcgctatagggagatggcagaaaagcttcgtaaatggttggttgaagtgtcctacctccccatgagtggtctcggaagtgttcctataccactgcaacaagcaaggaccctctttgatgaagtgcagttcaaagaaaaagtgtttctgcggcaacaaggcagctacatcctgactgtggaggctggcaagcaactccttctctcggcggacagtggcgctgaggccgccttgcaggccgaactcgctgaaatccaagagaaatggaaatcagccagcatgcggctggaagaacagaagaaaaaactagccttcttgttgaaagactgggaaaaatgtgagaaaggaatagcagattccctggagaaactacgaactttcaaaaagaagctttcgcagtctctcccggatcaccatgaagagctccatgcagaacaaatgcgttgcaaggaattagaaaatgcagttgggagctggacagatgacttgacccagttgagcctgctgaaggacaccctctctgcctatatcagtgctgatgatatctccattcttaatgaacgcgtagagcttctgcaaaggcagtgggaagaactatgccaccagctctccttaaggcggcagcaaataggtgaaagattgaatgaatgggcagtcttcagtgaaaagaacaaggaactctgtgagtggttgactcaaatggaaagcaaagtttctcagaatggagacattctcattgaagaaatgatagagaagctcaagaaggattatcaagaggaaattgctattgctcaagagaacaaaatacagctccaacaaatgggagaacgacttgctaaagccagccatgaaagcaaagcatctgagattgaatacaagctgggaaaggtcaacgaccggtggcagcatctcctggacctcattgcagccagggtgaagaagctgaaggagaccctggtagccgtgcagcagcttgataagaacatgagcagcctgaggacctggctcgctcacatcgagtcagagctggccaagccaatagtctacgattcctgtaactcggaagaaatacagagaaagcttaatgagcagcaggagcttcagagagacatagagaagcacagtacaggtgttgcatctgtcctcaacctgtgtgaagtcctgctgcacgactgtgacgcctgtgccactgatgccgagtgtgactctatacagcaggctacgagaaacctggaccggcggtggagaaacatttgtgctatgtccatggaaaggaggctgaaaatcgaagagacgtggcgattgtggcagaaatttctggatgactattcacgttttgaagattggctgaagtcttcagaaaggacagctgcttttcccagctcttctggggtgatctatacagttgccaaggaagaactaaagaaatttgaggctttccagcgacaggtccacgagtgcctgacgcagctggaactgatcaacaagcagtaccgccgcctggccagggagaaccgcactgattcagcatgtagcctcaaacagatggttcacgaaggcaaccagagatgggacaacctgcaaaagcgtgtcacctccatcttgcgcagactcaagcattttattggccagcgtgaggagtttgagactgcgcgggacagcattctggtctggctcacagagatggatctgcagctcactaatattgaacatttttctgagtgtgatgttcaagctaaaataaagcaactcaaggccttccagcaggaaatttcactgaaccacaataagattgagcagataattgcccaaggagaacagctgatagaaaagagtgagcccttggatgcagcgatcatcgaggaggaactagatgagctccgacggtactgccaggaggtcttcgggcgtgtggaaagataccataagaaactgatccgcctgcctctcccagacgatgagcacgacctctcagacagggagctggagctggaagactctgcagctctgtcggacctgcactggcacgaccgctctgcagacagcctgctttctccacagccttcctccaatctctccctctcgctcgctcagcccctccggagcgagcggtcaggacgagacaccccggctagtgtggactccatccccctggagtgggatcacgactatgacctcagtcgggacctggagtctgcaatgtccagagctctgccctctgaggatgaagaaggtcaggatgacaaagatttctacctccggggagctgttggcttatcaggggaccacagtgccctagagtcacagatccgacaactgggcaaagccctggatgatagccgttttcagatacagcaaaccgaaaatatcattcgcagcaaaactcccacggggccggagctagacaccagctacaaaggctacatgaaactgctgggcgaatgcagtagcagtatagactccgtgaagagactggagcacaaactgaaggaggaagaggagagccttcctggctttgttaacctgcatagtaccgaaacccaaacggctggtgtgattgaccgatgggagcttctccaggcccaggcattgagcaaggagttgaggatgaagcagaacctccagaagtggcagcagtttaactcagacttgaacagcatctgggcctggctgggggacacggaggaggagttggaacagctccagcgtctggaactcagcactgacatccagaccatcgagctccagatcaaaaagctcaaggagctccagaaagctgtggaccaccgcaaagccatcatcctctccatcaatctctgcagccctgagttcacccaggctgacagcaaggagagccgggacctgcaggatcgcttgtcgcagatgaatgggcgctgggaccgagtgtgctctctgctggaggagtggcggggcctgctgcaggatgccctgatgcagtgccagggtttccatgaaatgagccatggtttgcttcttatgctggagaacattgacagaaggaaaaatgaaattgtccctattgattctaaccttgatgcagagatacttcaggaccatcacaaacagcttatgcaaataaagcatgagctgttggaatcccaactcagagtagcctctttgcaagacatgtcttgccaactactggtgaatgctgaaggaacagactgtttagaagccaaagaaaaagtccatgttattggaaatcggctcaaacttctcttgaaggaggtcagtcgtcatatcaaggaactggagaagttattagacgtgtcaagtagtcagcaggatttgtcttcctggtcttctgctgatgaactggacacctcagggtctgtgagtcccacatcaggaaggagcaccccaaacagacagaaaacgccacgaggcaagtgtagtctctcacagcctggaccctctgtcagcagtccacatagcaggtccacaaaaggtggctccgattcctccctttctgagccagggccaggtcggtccggccgcggcttcctgttcagagtcctccgagcagctcttccccttcagcttctcctgctcctcctcatcgggcttgcctgccttgtaccaatgtcagaggaagactacagctgtgccctctccaacaactttgcccggtcattccaccccatgctcagatacacgaatggccctcctccactctgaactaagcagatgccatctgcagaagtgctggtagcataaggaggatcgggtcataagcaatcccaaactaccaacaagaggaccttgatcttggcgaaagccctcggtgtggcagctttagccctcctccagatcacatgtgtgcaaattatggcttcagaggtggaagataaacagtgacgggggaacaaacagacaacaagaaggtttggaagaaatctggtttgagactctgaaccttagcactaaggagattgagtaaggacctccaaagttccccggactcatgaattctgggcccttggcccattctgtgcacagccaaggacttcagtagaccatctgggcagctttcccatggtgctgctccaaccatcagataaatgaccctcccaagcaccatgtcagtgtcgtacaatctaccaaccaaccagtgctgaagagattttagaaccttgtaacatacaatttttaagagcttatatggcagcttcctttttaccttgttttcctttggggcatgatgttttaacctttgctttagaagcacaagctgtaaatctaaaaggcacttttttttagaggtataaagaaaaactagatgtaataaataagatcatggaaggctttatgtgaaaaaagttgaatgttatagtaaaaaaaaaaagatatttatgt

SEQ ID NO: 3421 - protein, 8797 aa, Homo sapiens; identical to SEQ ID NO: 391

SEQ ID NO: 3422 - DNA, 7372 bp, Homo sapiens
aggagctgatagattccagagagattggtgcaagccgtctcagcagagtggagtcgctggctcccgaagtgaaacagaacacaactgccagtgggtgtgagctcatgcacacggagatgcaggccctgcgtgccgactggaagcagtgggaagacagtgtattccaaacgcagagctgtttggagaacctggtcagccagatggccctttcggagcaggaattctcaggccaagtggctcaactggagcaggccctggaacagttcagtgcccttctgaaaacctgggctcagcagttaaccctcctggaaggcaagaacacggatgaggagatagtggaatgctggcacaaaggacaagagatactggatgctttgcaaaaagcagagcctagaacagaggatctcaagtctcagctgaatgaactttgtcgattttccagagacctgagtacctacagtggaaaagtttctggcttgattaaagagtataattgtctttgtttgcaagcatccaagggctgccagaataaagaacagattttacagcaaagatttcgaaaggccttcagggatttccagcagtggttggttaatgcaaaaatcactaccgccaagtgttttgatatacctcaaaatataagtgaagtttcaactagtcttcagaaaatacaggagtttttgtcagaaagtgaaaatggacagcacaagctaaacatgatgctgtctaaaggggaacttctgagtaccctgctgaccaaagagaaagcgaaagggatccaggccaaagttacagctgcaaaagaagattggaaaaattttcattcaaatctccaccaaaaagaatctgctctagagaatctaaagatccaaatgaaggactttgaagtaagtgctgagcctatccaggactggctgagtaaaactgagaagatggtccatgaaagcagcaatcgcctctatgatctgccagcaaagaggagggagcagcagaagctccaggtgatgagcccgcctccccgtagccccatctgacctagtctttgtccgtcctctgtcgaccttacagatgcatgctcagcacccttgagttagactgtgctgccgtgagacatagtgtgtttttccccatttctggtggattttatgttttctgactttccttggaagtatgatttgtttccttccatgatttgtgctccacggtgtgtagattggagataataaagcctccagggtacacggactgcctgccagtgttgatttccatgttctctgggccaaagcttcgtccgcgatgtgcttttccccagcctctgaatagtaacttgcttgtgcttttcagtctgtccttgaggaaatacactgctacgagcctcagctcaacaggctgaaagagaaagctcagcagctgtgggaaggacaagctgccagcaagagctttaggcacagagtgtcgcagctgtcttctcagtatctagcgctaagcaatttaacaaaggtaacgcctggcacgtgctgtgtgtgagtgtgatactgatgtcgcaaaattggagttgcagcaggttctgcagggtgtgcattgcatcctgacccgcccacagtgtgggtctccaggtcagcagtaaggggcgtgtgtgctgtttccttagccttgcaatctgagttcatcattgttgttgcataagcttgatgtggctctctgaaaaggccgaaggaggtttcaaagattgaggagactttcagtcttcattattgcacaagatattccttttaatactgaaatgatatgtttcccagggctttgatttggaagactcaaatcataaacatgattttttttgttctaaataatcccagagtttttgttctaaataatcccagattaaattactttagaaaaaacatggattctaaacagtttaaattttattagattaaatataatgatatttttaaaaaattcatctgaatctttgcattcattatatagtagtcaaggatgtgttgattgagagtttcagttcagattctagagcagagctcaaaattggcaatggttcagacaactgattaaacctcttttcaaatagcttagaagaaaataaatggaatcctactacaatctcatttagaacattcagccattttgacgtagatggtaacgtagacccattttgaactgtgtgttgcagacctatcttgagctttatgtggcttataacctttgtttcctatgtttttaactttcaggtgttagaatatagggacactggtataatttagtctttaatttggcctcatctgttctgtaagtgtgcatttacagagggtctgctcatttgggtcttcaatacacatcactgaagcagtcacactagcttaggtctgggagtaaatagtctatgtttacacccatttttattctatgattgttattttggatgtttttataaaatctggcacatacctaagttaagataaggaatgaatcatcttagaatgaatgaagaacatctttccattcctttgtatttacttagataccaaaagtaatcgatatatgaatattttgagagctgtagattattcttgcaaagtcttcactgtgttagatataacctataattgataaacaaaaccatgtgtatggtcccatgttttaaaatttagagatattacaaaaatctcagattattttttttttagaactctggctacaatgtaggtcatgtgggttgttgtgtcaggtgagcctaatgtgatatgtgaaaactagaaactactttgaccagtctcccagacaaggcattagggagaaattttactgatttaaaataatcatgatagtcataaagaattggagaggcataaaattgtaacttttttttttgcttttgacccagttattctaatagttttatgatttagaaagatctttaacatatctcatagatttaggccagacttgcctcgtatctgtgcagcgtatgaagccatgactgattgcctttgtttcaaacaaactgttagctttgcagtttgtctctgtgggatggacagctcgaaaaccatttctgtcatttccaggagaaagtgtcaagactggatagaatcgttgcagaacacaatcagttctctcttgggattaaagaattacaagactggatgacggatgcgattcacatgctggattcatactgccacccgacatccgacaaaagtgtgctggacagcaggacgctcaagctcgaggctctattatcagtcaaacaggaaaaagagattcagatgaaaatgatagtgaccaggggagaatctgtccttcagaatacttctccagaaggcattcccactattcagcagcagctgcagagtgtgaaggatatgtgggcatcccttttgtctgcagggattcgttgtaaaagccaactcgaaggagctctctccaagtggacaagttatcaggatggcgttcgacagttctccggttggatggatagtatggaagccaacctgaatgaatcagaaaggcagcatgcggagctgcgggataaaacaacgatgctcggaaaagccaagttattaaatgaagaagtgctgagttacagcagcttgctggagaccatcgaagtcaaaggggctggcatgacagaacactatgtcacccagctagaactccaggatctacaggaacgatacagagccatccaagagagggccaaggaagccgtaaccaagtctgaaaaacttgtccgcctgcaccaagagtatcagagagacctaaaggcatttgaagtttggttggggcaagaacaagaaaagctcgaccagtattcagttcttgaaggtgatgcccacactcatgagacaacattgcgtgatcttcaggagctacaggtacactgtgcagaggggcaggccctgttgaactcagtgctgcacaccagagaggatgtgatcccatcaggtatcccacaggcagaggaccgggctttagagtctctccggcaagactggcaggcttaccagcacaggctgtccgagactcgaactcagttcaataacgtggtgaacaaattgaggctaatggagcaaaagtttcagcaagtagatgaatggctcaaaacagcagaggagaaagttagtcccaggaccagacgtcagtctaacagggcaaccaaggagatacaattacatcagatgaagaagtggcacgaagaagtgactgcatacagagatgaagttgaggaagtgggagctagagctcaggagatactggacgagagccacgtgaacagcagaatgggttgccaggccacccagctgacttccagataccaggccctgcttctccaagtgctggaacaaataaaattcctggaggaggagattcagagtttggaggaatcagaatcatccctcagttcctattctgattggtatggctctactcataaaaacttcaagaatgtggctaccaagattgacaaagtagatacagtaatgatggggaagaaattgaagacgttggaggttttgctcaaagacatggagaaaggtcacagtttgctgaaatcagcccgggagaaaggagagagggctgttaaatacttggaggaaggcgaggcagagaggttaagaaaggagattcatgatcacatggagcagttgaaggaactgaccagcactgtccggaaagaacacatgacgctggaaaaaggtcttcatttagcaaaggaattctcagataaatgcaaagcactgacacagtggatagcagaataccaggaaattctacatgttcctgaagaacccaaaatggaattatatgagaaaaaagctcagttatctaaatacaagtcacttcaacaaacggtgctgtcccatgaaccatcagtaaagtcagtgagagagaagggtgaagctcttttggaactggtgcaggacgtcactttaaaggacaaaatagatcaacttcaaagtgattaccaggacctgtgcagcataggaaaggagcatgtcttcagtctggaggcgaaagtcaaagaccatgaagactacaacagtgagctccaagaggtcgaaaagtggctgctgcagatgtctggcagactggtggcacctgacctcctggagacaagcagcctggagacaatcacccagcaattggcccaccacaaggcaatgatggaagaaattgctggttttgaagaccgtttgaacaatcttcaaatgaaaggtgatactttgattggccaatgtgcagaccacctgcaagcgaaacttaaacaaaacgtgcatgctcatctgcagggcacaaaggacagctactcagcgatctgcagcacagctcagaggatgtaccagagtttggaacacgaacttcagaagcacgtcagccgacaagacaccctgcagcagtgccaggcctggctttctgcagtccagccggatttagagccaagtcctcaaccacctcttagtagggcagaagccattaagcaggtcaaacacttcagagctttgcaagagcaggcaaggacctacctagatctcctttgctccatgtgtgacctgtcaaatgcttcggtgaaaaccacagcaaaagacattcaacaaacagagcaaacgattgaacaaaagcttgtccaggcccagaacttaactcagggctgggaagagatcaagcacctgaagtctgagctctggatttacctgcaagatgctgatcagcaactgcagaacatgaagaggaggcactctgagctggagctgaacattgcacagaacatggtttcacaagttaaggtgggaattaatttgcccccaagggagataaaagaggccaacagagtagaaaacctgaaatgtgttcagtgtattcacttcaatatgcctgagtgtctgtcaatccttagacattaatacaactctttaaggcagaggtccccaagccccaggttatggacaagcacaagtccatgtcctgttaggaacctggccgcacagtgggaggcgagcaagcattaatgcctgaactccacctcctgtcagatcagaggccacatcagattctcataggagtgcaaaccctactgtgaactgcgcatgcaagggatctaggttgcatgctccttatgataatctaactaatatctgatgatttgaggtggaacagcttcatcctgaaaccatccccctccagccccattcacggaaaaattgttttccacaaaacccatcccaggtgccaaaaagtttggggaccgctgctttaaggaatagcaaatctgaacaaacatcatttggtgccagggaaaacagattataaagtagacattcaaatatattactgaagcttcagatggccactttcatcagaagacattcatactctacattattcctgagaaaagcaggtgtgatttagtctacagagtagactgcttagtcagaaaactctgtgactaagcaaacatggaacattattctttttttagattttcatcaccatattatgctaaaactgtaggactgtaagcttatcaattcattagttatatatttgagctatatgtaattaatttaaagtataatataaatgcagtttgtattacatatttatatataatttaaataatttaaaatatataggaaattgtggccgggtgtggtggctcatgcctgtaatcccagcactttgggaagctgaggtgggcagatcacttgaggccaggagtttgagaccaggctggccaacatggtgagaccacatctctattaaaaatacaaaaattagccttgcgtggcacatgcctataatctcagctacttgggaggctgaggcacgagaatcatttgaacttgggaggcggaggttgcagtgagccatgatcatgccactgcactccagcctgggccacagagtgagactctgtctcaaaaaaaagggaaaaaagaaaattataagtgtattaacttaattggaagttgggtcagattttaaataaacttaaagatgttttttctctgtgattatgagtcaataataatatattgtctactggagtgctgtttgcaagtacagagaaaaaagagaatagggatcgggataataagatttattttttctcagaagcatgaactcttttttaaaaaaatttgtgaaccatcctagaaatttaattttttaaaatgtattttataagaaaagttttgtttattataaaaggcttagaaaatacagaaatgtcttaataagcaaatttaaatcacaatcacttatgatactaccattcagagataataaacaatgccaatattttgctgtatttgttttagatatacacataataaaaacattcaagatg

SEQ ID NO: 3423 - protein, 919 aa, Homo sapiens
MTDAIHMLDSYCHPTSDKSVLDSRTLKLEALLSVKQEKEIQMKMIVTRGESVLQNTSPEGIPTIQQQLQSVKDMWASLLSAGIRCKSQLEGALSKWTSYQDGVRQFSGWMDSMEANLNESERQHAELRDKTTMLGKAKLLNEEVLSYSSLLETIEVKGAGMTEHYVTQLELQDLQERYRAIQERAKEAVTKSEKLVRLHQEYQRDLKAFEVWLGQEQEKLDQYSVLEGDAHTHETTLRDLQELQVHCAEGQALLNSVLHTREDVIPSGIPQAEDRALESLRQDWQAYQHRLSETRTQFNNVVNKLRLMEQKFQQVDEWLKTAEEKVSPRTRRQSNRATKEIQLHQMKKWHEEVTAYRDEVEEVGARAQEILDESHVNSRMGCQATQLTSRYQALLLQVLEQIKFLEEEIQSLEESESSLSSYSDWYGSTHKNFKNVATKIDKVDTVMMGKKLKTLEVLLKDMEKGHSLLKSAREKGERAVKYLEEGEAERLRKEIHDHMEQLKELTSTVRKEHMTLEKGLHLAKEFSDKCKALTQWIAEYQEILHVPEEPKMELYEKKAQLSKYKSLQQTVLSHEPSVKSVREKGEALLELVQDVTLKDKIDQLQSDYQDLCSIGKEHVFSLEAKVKDHEDYNSELQEVEKWLLQMSGRLVAPDLLETSSLETITQQLAHHKAMMEEIAGFEDRLNNLQMKGDTLIGQCADHLQAKLKQNVHAHLQGTKDSYSAICSTAQRMYQSLEHELQKHVSRQDTLQQCQAWLSAVQPDLEPSPQPPLSRAEAIKQVKHFRALQEQARTYLDLLCSMCDLSNASVKTTAKDIQQTEQTIEQKLVQAQNLTQGWEEIKHLKSELWIYLQDADQQLQNMKRRHSELELNIAQNMVSQVKVGINLPPREIKEANRVENLKCVQCIHFNMPECLSILRH

SEQ ID NO: 3424 - DNA, 1547 bp, Homo sapiens
aggagctgatagattccagagagattggtgcaagccgtctcagcagagtggagtcgctggctcccgaagtgaaacagaacacaactgccagtgggtgtgagctcatgcacacggagatgcaggccctgcgtgccgactggaagcagtgggaagacagtgtattccaaacgcagagctgtttggagaacctggtcagccagatggccctttcggagcaggaattctcaggccaagtggctcaactggagcaggccctggaacagttcagtgcccttctgaaaacctgggctcagcagttaaccctcctggaaggcaagaacacggatgaggagatagtggaatgctggcacaaaggacaagagatactggatgctttgcaaaaagcagagcctagaacagaggatctcaagtctcagctgaatgaactttgtcgattttccagagacctgagtacctacagtggaaaagtttctggcttgattaaagagtataattgtctttgtttgcaagcatccaagggctgccagaataaagaacagattttacagcaaagatttcgaaaggccttcagggatttccagcagtggttggttaatgcaaaaatcactaccgccaagtgttttgatatacctcaaaatataagtgaagtttcaactagtcttcagaaaatacaggagtttttgtcagaaagtgaaaatggacagcacaagctaaacatgatgctgtctaaaggggaacttctgagtaccctgctgaccaaagagaaagcgaaagggatccaggccaaagttacagctgcaaaagaagattggaaaaattttcattcaaatctccaccaaaaagaatctgctctagagaatctaaagatccaaatgaaggactttgaagtaagtgctgagcctatccaggactggctgagtaaaactgagaagatggtccatgaaagcagcaatcgcctctatgatctgccagcaaagaggagggagcagcagaagctccagtctgtccttgaggaaatacactgctacgagcctcagctcaacaggctgaaagagaaagctcagcagctgtgggaaggacaagctgccagcaagagctttaggcacagagtgtcgcagctgtcttctcagtatctagcgctaagcaatttaacaaaggagaaagtgtcaagactggatagaatcgttgcagaacacaatcagttctctcttgggattaaagaattacaagactggatgacggatgcgattcacatgctggattcatactgccacccgacatccgacaaaagtgtgctggacagcaggacgctcaagctcgaggtgtgcatctttacacagaaatatctccaacctacagaatttgtttttctcaaaatttcccgtctccatccacctggggtgatgatgtcacattctctccatgataaatctcagatgctttgtgagtgcaacgctgtctgccttgggtgcacatgccagagaattcctgaatcatctgaccccggatgttttccaaaaaataaaataaaataaagcccgaatgtg

SEQ ID NO: 3425 - protein, 476 aa, Homo sapiens
MHTEMQALRADWKQWEDSVFQTQSCLENLVSQMALSEQEFSGQVAQLEQALEQFSALLKTWAQQLTLLEGKNTDEEIVECWHKGQEILDALQKAEPRTEDLKSQLNELCRFSRDLSTYSGKVSGLIKEYNCLCLQASKGCQNKEQILQQRFRKAFRDFQQWLVNAKITTAKCFDIPQNISEVSTSLQKIQEFLSESENGQHKLNMMLSKGELLSTLLTKEKAKGIQAKVTAAKEDWKNFHSNLHQKESALENLKIQMKDFEVSAEPIQDWLSKTEKMVHESSNRLYDLPAKRREQQKLQSVLEEIHCYEPQLNRLKEKAQQLWEGQAASKSFRHRVSQLSSQYLALSNLTKEKVSRLDRIVAEHNQFSLGIKELQDWMTDAIHMLDSYCHPTSDKSVLDSRTLKLEVCIFTQKYLQPTEFVFLKISRLHPPGVMMSHSLHDKSQMLCECNAVCLGCTCQRIPESSDPGCFPKNKIK

SEQ ID NO: 3426 - DNA, 715 bp, Homo sapiens
aaaaccacacagaggagagctaatcggggagataactatttgctgtgctgtaggagattaccaagagggttaactgctgagcccaggttttcagaagggcactgaactgttccagggcctgctccagttgagccacttggcctgagaattcctgctccgaaagggccatctggctgaccaggttctccaaacagctctgcgtttggaatacactgtcttcccactgcttccagtcggcacgcagggcctgcatctccgtgtgcatgagctcacacccactggcagttgtgttctgtttcacttcgggagccagcgactccactctgctgagacggcttgcaccaatctctctggaatctatcagctcctgtaatggaatatcaccatggtaactgaagagcctgtgagtcacttggactgcaagttttcaactgtgtacacagggggaccctgtcctgccaggaagttttaacaagtgtgccacaaggacccagaatcaattcatctgtccactcttaaattataatagcgggagttgtcatcacgagtgcctaaggcttatggcaaaaaaatcccgagaatcctcaatatcctgaaacagactaaacagagaccctgaaatcaggcattattcgcacacgtgaaaatgtttagtgactcaagtgtttgcctgtggtggattgctcctgtgaatgattaaacccatatttccctc

SEQ ID NO: 3427 - protein, 42 aa, Homo sapiens
MSSHPLAVVFCFTSGASDSTLLRRLAPISLESISSCNGISPW

SEQ ID NO: 3428 - DNA, 617 bp, Homo sapiens
atttcttagagacaaatggttttaaactcatgacttatcactgactattttattaattaagaaatcatttatccacagcatgaaactgccaagaacaaaatgaattacaaacagaaagacttggataactttaccagcaaaggaaaacacttgttatctgagctgaagaaaattcacagtagtgatttcagcttggtgaaaacagacatggagagcaccgtggacaaatggctggatgtatcagagaaacttgaagaaaacatggataggctgagagtaagcctgtccatttgggatgatgtactgtcaactagagatgagattgagggatggtcaaacaactgcgttccacagatggcagaaaacatcagcaacctggataaccacctcagagctgaagaactgcttaaagaatttgagtctgaagttaaaaacaaagcattgagattggaagaactgcattccaaagttaatgatctgaaagaattaactaaaaatctagaaacaccgccagaccttcagtttatagaagcagacttaatgcagaaactggagcatgccaaagaaataactgaagtagcaaaaggaaccctgaaggatttcacggctcaaagtac

SEQ ID NO: 3429 - protein, 171 aa, Homo sapiens
MNYKQKDLDNFTSKGKHLLSELKKIHSSDFSLVKTDMESTVDKWLDVSEKLEENMDRLRVSLSIWDDVLSTRDEIEGWSNNCVPQMAENISNLDNHLRAEELLKEFESEVKNKALRLEELHSKVNDLKELTKNLETPPDLQFIEADLMQKLEHAKEITEVAKGTLKDFTAQ

SEQ ID NO: 3430 - DNA, 381 bp, Homo sapiens
tatcctcatatggtggtctcttcctttcttttcctctcctggttcatatttgggccagagtgacctctggcatttacctccaactaactttgaggtgcaggaccccacaagccatcatttatcctttggcaaatatagcagcagttagccagcctgtctgtcacttttaggattctttgggggatagagatcagactcccatgcctgccaaatgcaggggacaaatatcctgttcttcaggtggcactgccggaacccttctgccttgagtaacataaagaagaggaaagaagatcaaagaattatgaaacaaatgagatgcttgtaaacttcattagttatatgaaaccacaaaggggcatttaataaactattcctctc

SEQ ID NO: 3431 - protein, 38 aa, Homo sapiens
MQGTNILFFRWHCRNPSALSNIKKRKEDQRIMKQMRCL

SEQ ID NO: 3432 - DNA, 1801 bp, Homo sapiens
agttccagcatagtgttttaagtacaagcacccagctcctattcaaggatctgcttcaaaacacggatgcccacaaaagagcattccatgaaatctaccggaccaggtctgttaacgggattccagtgccacctgatcaattagaggacatggccgagagagtcaaagctgaagtcttggatcattaagtacgggaggagagagtcagtggagcagcttctacaaaactacgtgtcttttatagaaaatagcaagttctttgaacaatatgaggtgacataccagatcttgaaacagacagctgagatgtatgtcaaagcagatggttcagtggaagaagctgagaatgtgatgaaattcatgaatgaaaccaccgctcagtggaggaatctctcagtagaagtgaggagtgtgaggagcatgctggaagaagtgatctctaactgggatcgctatggcaatacagtggctagtctgcaagcctggctagaggatgctgaaaaaatgctcaatcaatcagaaaatgccaaaaaggatttttttcgaaatttacctcattggattcagcagcatactgccatgaacgatgctggcaattttctaattgaaacctgtgatgagatggtttcccgtgacctgaagcagcaattactgttgctaaatgggcggtggagggagttgtttatggaagtcaagcaatatgctcaagctgatgagatggacagaatgaagaaggaatacacagactgtgttgttaccctgtctgcttttgcaacggaagcccataagaaactttctgaacccttagaagtctcttttatgaatgtcaagctattaattcaagacttggaggatattgagcagagggtgcctgtgatggatgcccaatacaagataattacaaagacagcacacctcattaccaaagaaagcccccaagaagaaggaaaagaaatgtttgcgaccatgtcaaagctcaaagagcagctaaccaaggtcaaagaatgttactccccactcctttatgagtctcagcagctgttgattccgttggaggaattagaaaagcagatgacgtccttttatgactcacttgggaaaatcaatgaaattatcacagttcttgagcgtgaggcacaatcgagtgccctttttaaacaaaaacatcaggaactgttagcttgtcaagaaaactgtaagaaaaccttgacacttattgagaaaggcagtcaaagtgttcaaaagtttgtgaccttgagcaacgtgttaaagcattttgatcagacgaggctacaaagacagattgcagatattcatgttgcttttcagagtatggtaaagaaaactggagattggaagaagcatgtggaaaccaacagtcgcttgatgaagaagtttgaggagtctcgagcagagttggagaaggtactgcggattgctcaggagggcctggaggaaaagggggatccagaggagctcctgcggagacacactgagtttttcagtcagctggatcagagggtgctcaatgctttcctgaaagcttgtgatgaactcaccgacatccttccagagcaggagcagcaggggctgcaggaagctgttcgaaagctccacaaacaatggaaggtgagtcaggacaggacggagacaccgtgcatcctcaatgaagggagaagcttgagcgtgttaaggtccaaatgtaagagaaatttagaaattcctggaaagtcactgtaactatttcgctcatttaaaaactcaaaaaactggacttaaataaaacctgataatatatgat

SEQ ID NO: 3433 - protein, 477 aa, Homo sapiens
MYVKADGSVEEAENVMKFMNETTAQWRNLSVEVRSVRSMLEEVISNWDRYGNTVASLQAWLEDAEKMLNQSENAKKDFFRNLPHWIQQHTAMNDAGNFLIETCDEMVSRDLKQQLLLLNGRWRELFMEVKQYAQADEMDRMKKEYTDCVVTLSAFATEAHKKLSEPLEVSFMNVKLLIQDLEDIEQRVPVMDAQYKIITKTAHLITKESPQEEGKEMFATMSKLKEQLTKVKECYSPLLYESQQLLIPLEELEKQMTSFYDSLGKINEIITVLEREAQSSALFKQKHQELLACQENCKKTLTLIEKGSQSVQKFVTLSNVLKHFDQTRLQRQIADIHVAFQSMVKKTGDWKKHVETNSRLMKKFEESRAELEKVLRIAQEGLEEKGDPEELLRRHTEFFSQLDQRVLNAFLKACDELTDILPEQEQQGLQEAVRKLHKQWKVSQDRTETPCILNEGRSLSVLRSKCKRNLEIPGKSL

SEQ ID NO: 3434 - DNA, 702 bp, Homo sapiens
ggcaaatacacctcaataaaatattggaatgaaattgaaaaaatagacaaatgcagattgaatttcttcccacaaccaaatgacgtgaatacaaaggggaaaacaacagcaaaggcatacagtgacaaggaggtggtctcatttccccagaccttgagtctgggctggcattgagatctacattgatcaataatatgacagaagtgattttaagtgacatctgaggctgggccttaagaggacttgagattccactttggctatattggaattcaactctgctctgagacctctacacaaggaaactggtctaagatcctcgtgaataagaagtcacttggaggatagattctaaacctcaagaataagaaataaaagtacaaattggtgtgatgaaggtatattcctatttttggggattgggaggctttacttatttttaaaaactctattgaggtaaagagttaagctgtaacatacttcattgatttcctcacccttttcggctctgttttactatatcccctaatttgttggttgtgctaatatttgtagaaagaggtcttgtatttgctgcatcataatgacatttgtacttttttgactggtttaagtacaaatgaatgaaataaccatttttcctttagttgactttaccctgatttcacctagtgtttcaatgagtaaaaatacagctaaaag

SEQ ID NO: 3435 - protein, 57 aa, Homo sapiens
GKYTSIKYWNEIEKIDKCRLNFFPQPNDVNTKGKTTAKAYSDKEVVSFPQTLSLGWH

SEQ ID NO: 3436 - DNA, 7708 bp, Homo sapiens
atgggtggagtctcgctttttctttccagtgttggctgacttacagctcttataaactagtggcaatttctgaacccagccggctccatctcagcttctggtttctaagtccatgtgccaaaggctgccaggaaggagacgccttcctgagtcctggatctttcttccttctggaaatctttgactgtgggtagttatttatttctgaataagagcgtccacgcatcatggacctcgcgggactgctgaagtctcagttcctgtgccacctggtcttctgctacgtctttattgcctcagggctaatcatcaacaccattcagctcttcactctcctcctctggcccattaacaagcagctcttccggaagatcaactgcagactgtcctattgcatctcaagccggctccaaggtcctggccaagaaagagctggcctatgtcccaattatcggctggatgtggtacttcaccgagatggtcttctgttcgcgcaagtgggagcaggatcgcaagacggttgccaccagtttgcagcacctccgggactaccccgagaagtattttttcctgattcactgtgagggcacacggttcacggagaagaagcatgagatcagcatgcaggtggcccgggccaaggggctgcctcgcctcaagcatcacctgttgccacgaaccaagggcttcgccatcaccgtgaggagcttgagaaatgtagtttcagctgtatatgactgtacactcaatttcagaaataatgaaaatccaacactgctgggagtcctaaacggaaagaaataccatgcagatttgtatgttaggaggatcccactggaagacatccctgaagacgatgacgagtgctcggcctggctgcacaagctctaccaggagaaggatgcctttcaggaggagtactacaggacgggcaccttcccagagacgcccatggtgcccccccggcggccctggaccctcgtgaactggctgttttgggcctcgctggtgctctaccctttcttccagttcctggtcagcatgatcaggagcgggtcttccctgacgctggccagcttcatcctcgtcttctttgtggcctccgtgggagttcgatggatgattggtgtgacggaaattgacaagggctctgcctacggcaactctgacagcaagcagaaactgaatgactgactcagggaggtgtcaccatccgaagggaaccttggggaactggtggcctctgcatatcctccttagtgggacacggtgacaaaggctgggtgagcccctgctgggcacggcggaagtcacgacctctccagccagggagtctggtctcaaggccggatggggaggaagatgttttgtaatctttttttccccatgtgctttagtgggctttggttttctttttgtgcgagtgtgtgtgagaatggctgtgtggtgagtgtgaactttgttctgtgatcatagaaagggtattttaggctgcaggggagggcagggctggggaccgaaggggacaagttcccctttcatcctttggtgctgagttttctgtaacccttggttgccagagataaagtgaaaagtgctttaggtgagatgactaaattatgcctccaagaaaaaaaaattaaagtgcttttctgggtcatctgtggtgtatgttgacatggaccgctgcccctccatcctgcccttgcccgtggctttggtgtttcagatcctactcacgggaggcagctgccgcggaggtgtgggcagctgagaggggtgggcaggccagcacagctcctggcaggagacacaggtccaggagcccgtgagcatttgtgagagcagagatggcaagcacgtgcgtggagaccaacgaagcgtgtccctggcacacagcaagggagagtttcgctcggtctctgcagtgcagtctcctggcgtaagtcttgaagatggacccaactccctgaagaaatggatcttgaaattgaacacaaacatcatgaacgtacagcctgggcattctgcagtgatttgtgagatgagcttgcatcgactgttcctctcagcagtgacagccaaagtcacccctgataaaatgcagtttcactttataaaatgcctcgccccttcccagcatgtagagcttgtctgcagccctaaaggagccaggtcctgctctgatgagggtcaaatcagagccgacatcccatgtacaaaaaacccccaggcttctgccttccttccgggctcctgtctgctcccattttactccacggaatagttctgccctgtagcatctccagcggcctttgcagactgctgtcagccaacaggtgccaaaaatgcaaaagaagaagaaactaaaagcagtgctatttttgcagaacaaatgctagctattaaatcatcttaggccaagacaccaatggcacttggaccgataggtatttggagcatgagttaggaaggatatgtctttctccaggtgcgcagctgaaagttgctgagaaaagctgcctgtgttgctgtggtaacatgagaaggaatgaacagctctatacaaaaactggccacacattataaggcctattctatgcagttatgtttttggctatttgctcatttagtcattgtttatcaaccaaactaggtaagccaaggagttacaagacagctctagagaagctccctctgcttacaggacaataatgcattgtttgtttgttgatacaaatgaattatttgaatccacagaagtgaaaaagggaaaaaatcctggctgacttgtgggaagagcgtactgcagagcctagggcctgagttaactcgctggcggccctgcaggcaggcttgatgggagcgcccagcacatctgcccaccctgcacagggcatgaagcaccgtgtgcagagatctgtgggcaaaagcccaggacgtgaccttaggcaagaggggtccttggagaagtggaggtgtgcatggtgtgtagccttgcgtgtctgtgagcacgccctagtggacctgcgcctggattatcgggccagtctctcggaggggtccgtgatgctgagttacgccattcacctgaactctgcagctcatcggctgtaggatttgggtgagacacttttccttgctgactcatttccccatctgcaaaatgggggtgacgatatctacctcttggggtgtgtcaagggtaaaagagcacactttaagaatcctaaagcactaagccaaggatgaaagactagaaagctgcctctatgttgctactctcaaaaatgctcagaaattttcttgtcgtactaaaaatgtgttatttttctcattttcattcttccattcaacacagaagtaatctaagtaagttctaaaaacatagatccgggggcccacagacattcaattttcttctgaattggctctggtatcacacaacacacaagcaagcaaacagcctgcctgctagggccttgggttccaggctggaggaatgcaggcagaaatctcttaggaaataactaagtgagcgccaagttttgaattgccttagagccgaaagagaatgtggcgtgctggggagagatctggacctctttctcatcagtcatttgacctgtccacgaagaacaattttgttatgcagcctgggaacctggtttccttacaccctgcgcccttaatgacacagacaaccacgggtactcctggacggaagctcatcacgcctcctcaaataccttcacccatgttcaggtcacacggaggtcaccatctcctcagcacacaacaactgctttggttcccagggttattttttctacgagttgaaaacccacggagcctaagccatctttttgtcccctaaggagagccccatagactaagagctacacttcctgtctgtctttcccacctttccatctcattctagcttaaagcttatcacgctactgagagcctgttctgtagttcaaggtggcagagaaaaatacgaaccttgagtgaaatctggagagcagtgcagggtcatccccagacgtgacgggccatatcctaggcgactcctgcagcttatagaagcagggaatttaatggacttcttccaggaaagccagcccacggggactcttaaaaagacaccaaccatttggaagatgcagcttgaggtctgggggactggactgattctgccaccatatagtgaacacgattaatcgggaggaagaagtaaggcactctgtgagttagtctaccaccctattgactttgacagagagaaaaccaacttttttcatatgatcacacagtagtactggaatatctcgactgcaatatcctctaaacaaatgcatgcaaagctttgtaaaagcagctgatgattaaaaaaattttaaaacattagggtttttctaatatatccatatgtgggacagtgatttaaatgtcattaattgtccagccacaacttgtaacagtgatgtgaaagacacaaaaaaggccccactggagtggaggagtggtctggctggtccccaagcaaaacagaatgggcttcgcataggctttagaacttattcataaatattgaccaaagtgtgaagcaaggtatccagtgaagattctctagggtctctacttctgctcaagagatttaatccagctttctctaaagcagtggtccagacttgccacatactaggttaaagataaagtgagaaaaacaaatactttggtttgcacgtctcttgaggggccctaggctgtatggaggaatatttagaggaatatttgtgagctgccatttgtgtttaaaagaacatgaaagcaagacgggccctaacccgcctgtgtctgtagctgaccaggaggccactgcttccttcccccagagcttctaggagagccccccaaaatgcaactctccaaggtcctgtggagtagtcccctcataatgcctccaccacacctgtgtctcacgatgccttaactgacgtagctcctaagtgatgttcacagagaaggaaatacttaggcaagcccatgtgtaacatgctcacagatgtgctggctttgccaatgctttcggactccaccatgctttctgattcttctggtcctagtcacgccttggcacggggcagaagcggccgagctatgctgacaggtgctgctgagagccaacagccattcagccgagaaggcgtttctaggtgagggcatgagagctggcattccaggctgctgagtgcggcatctgcaggtgcaccacattgctccacggtgtgttcagaagagaccagcatcttgaatctcaggctctgggctcattctttgcctctgccaagggaccattcaggggcttcaagccagctgctgaaaatcccccttttctggatttttccccatctatataaggatatggtggctgtgtggacaagaaattggtttcatctcagaagggtgcttccctacaaagatcttcagaaatttaattgaaaacaattttttgaactttttttgtttggccaggatgaatgaagctgaagtcacatcctgaatgtgcatgccagacaaagggtaagcaagcagtctttacaaatgccaatccctctgcactccaaaaccggagcccgtaatgaaggcccaggttccagtcatcacaggatcccccaagccagcacagtgcctgatgcctccctaggcattagcacatcccagcactctaattcacatcctcagcatccctgcctcctgcatccagggcttaggttgagtgtttccagagtgtcaagtacatttaaacacaaaccaaatactccagggttttgacctgtcacaatggcttttgaaaacaacagacgtacaatttgagagaaggactcgatggacttcttaggctgaggactaaggacatgttgctgttcctcttggtccaggacattcaataccattcacagcattcatcaccaactgacatagtatcgatcacgacattcaactgtttgaaattactgctattttggtcaaaaactaagaaatcagaaattgcacctacatagtgtgtctcctcattggagtcccatctctctgagcacagggatgggctcctgagctcacagccctgccctgcccccccagcagggcctcaccctcatggccctcagtgaatagtgactacatgaagggggcacttactagaggcctgagtaatggaatttcaattagcttctgcttcccttttctaaaaaagaaccacctttcttaagaataattaggccaaaataaacttgagtaatttgtacagtcaatattttgaagtttcggagttaccagtgaaatagcaaagctgttctccaggaaaggacatccaggttcccacccaggccttccttcctcagctcctgcagcctcatcctagtttaatatgaaggttgtgaatgggttaaaaagcagttcttaagcacctacttagatcttttcagtatctggaaatagcacccagggctgtgttagtaaagcttttcactgggtaagagtcatacaatttttacatttaatttgtttttttaaaacaaggcagtcttgttttacatattggaatgactagatattttttgacatttctggcacctctggttctgctgaattttaagggaggtgagtggtatgtacacaaagttaagattgctgcataataattcctttgcatttccaaaataaattacacaaatgtcacttttccttttctattccatagtactagttttagccagatctttgccaaacattctaggacattcagaaaagtcatccatggaattttggaatgccattctctctgtatctttgcagatcatgaggaaggaaagttgatgaactagtacgggatggctcagacttgtaaagtgtctaagtcacaacgctgcagagccagcttccgggtagcaatggcatggcctcagctgtgccaaggctacaactggagcttccttactcgcatctgaggcaaacacagcaaggctggcccaggccgcccacagtcaacagatgttcacgggagatggatcagcccctcttttgcttgttctatcaaggaaagagatctaaccatgggcaagggtggaacacacccggttcaggtcagggaatgagttgctctaagtgaacagtgaattcttacttctcagcctgtatcaattgtacccagggttcatgattactgtgacccactaagggatgatctttgaggaaacagacctggagggaggtaatttaaggagggaaagcgagtgggttttacagactgctttgtggcgacattcaggaacagaccattcaatggatgacttttcagtacataaaagcaagcagtaatggccaggagagagcaaagatgccctaagaatgacatcagactgaccaaatgtgccttttcaaataagttatgagaacgaatgaattggaattagagcaaggtattggacagaaccatgctagtctttgagagaacgtgtggattgggtggatgtttggaccgaatgaatggtaactttttaatgtgaaacagagaactgatatatgggctgtcatgtcaccctagggtactgtcgctctgtcatgtgtagcaatctttccaaatttttgttggtgggctgaacaaagataaaactaataaagtatgtgtggataccactag

SEQ ID NO: 3437 - protein, 244 aa, Homo sapiens
MWYFTEMVFCSRKWEQDRKTVATSLQHLRDYPEKYFFLIHCEGTRFTEKKHEISMQVARAKGLPRLKHHLLPRTKGFAITVRSLRNVVSAVYDCTLNFRNNENPTLLGVLNGKKYHADLYVRRIPLEDIPEDDDECSAWLHKLYQEKDAFQEEYYRTGTFPETPMVPPRRPWTLVNWLFWASLVLYPFFQFLVSMIRSGSSLTLASFILVFFVASVGVRWMIGVTEIDKGSAYGNSDSKQKLND

SEQ ID NO: 3438 - DNA, 8015 bp, Homo sapiens
atgggtggagtctcgctttttctttccagtgttggctgacttacagctcttataaactagtggcaatttctgaacccagccggctccatctcagcttctggtttctaagtccatgtgccaaaggctgccaggaaggagacgccttcctgagtcctggatctttcttccttctggaaatctttgactgtgggtagttatttatttctgaataagagcgtccacgcatcatggacctcgcgggactgctgaagtctcagttcctgtgccacctggtcttctgctacgtctttattgcctcagggctaatcatcaacaccattcagctcttcactctcctcctctggcccattaacaagcagctcttccggaagatcaactgcagactgtcctattgcatctcaagccagctggtgatgctgctggagtggtggtcgggcacggaatgcaccatcttcacggacccgcgcgcctacctcaagtatgggaaggaaaatgccatcgtggttctcaaccacaagtttgaaattgactttctgtgtggctggagcctgtccgaacgctttgggctgttagggtttgacctcttgcacgtagcttgcatgcctttggaactgggtctcttcagttgacttttgtcgtcttcaacacactgcagcgtgtagcggttgagcctgtgtcacatagctgaatcagagtcatctgcggtactcagggctccaaggtcctggccaagaaagagctggcctatgtcccaattatcggctggatgtggtacttcaccgagatggtcttctgttcgcgcaagtgggagcaggatcgcaagacggttgccaccagtttgcagcacctccgggactaccccgagaagtattttttcctgattcactgtgagggcacacggttcacggagaagaagcatgagatcagcatgcaggtggcccgggccaaggggctgcctcgcctcaagcatcacctgttgccacgaaccaagggcttcgccatcaccgtgaggagcttgagaaatgtagtttcagctgtatatgactgtacactcaatttcagaaataatgaaaatccaacactgctgggagtcctaaacggaaagaaataccatgcagatttgtatgttaggaggatcccactggaagacatccctgaagacgatgacgagtgctcggcctggctgcacaagctctaccaggagaaggatgcctttcaggaggagtactacaggacgggcaccttcccagagacgcccatggtgcccccccggcggccctggaccctcgtgaactggctgttttgggcctcgctggtgctctaccctttcttccagttcctggtcagcatgatcaggagcgggtcttccctgacgctggccagcttcatcctcgtcttctttgtggcctccgtgggagttcgatggatgattggtgtgacggaaattgacaagggctctgcctacggcaactctgacagcaagcagaaactgaatgactgactcagggaggtgtcaccatccgaagggaaccttggggaactggtggcctctgcatatcctccttagtgggacacggtgacaaaggctgggtgagcccctgctgggcacggcggaagtcacgacctctccagccagggagtctggtctcaaggccggatggggaggaagatgttttgtaatctttttttccccatgtgctttagtgggctttggttttctttttgtgcgagtgtgtgtgagaatggctgtgtggtgagtgtgaactttgttctgtgatcatagaaagggtattttaggctgcaggggagggcagggctggggaccgaaggggacaagttcccctttcatcctttggtgctgagttttctgtaacccttggttgccagagataaagtgaaaagtgctttaggtgagatgactaaattatgcctccaagaaaaaaaaattaaagtgcttttctgggtcatctgtggtgtatgttgacatggaccgctgcccctccatcctgcccttgcccgtggctttggtgtttcagatcctactcacgggaggcagctgccgcggaggtgtgggcagctgagaggggtgggcaggccagcacagctcctggcaggagacacaggtccaggagcccgtgagcatttgtgagagcagagatggcaagcacgtgcgtggagaccaacgaagcgtgtccctggcacacagcaagggagagtttcgctcggtctctgcagtgcagtctcctggcgtaagtcttgaagatggacccaactccctgaagaaatggatcttgaaattgaacacaaacatcatgaacgtacagcctgggcattctgcagtgatttgtgagatgagcttgcatcgactgttcctctcagcagtgacagccaaagtcacccctgataaaatgcagtttcactttataaaatgcctcgccccttcccagcatgtagagcttgtctgcagccctaaaggagccaggtcctgctctgatgagggtcaaatcagagccgacatcccatgtacaaaaaacccccaggcttctgccttccttccgggctcctgtctgctcccattttactccacggaatagttctgccctgtagcatctccagcggcctttgcagactgctgtcagccaacaggtgccaaaaatgcaaaagaagaagaaactaaaagcagtgctatttttgcagaacaaatgctagctattaaatcatcttaggccaagacaccaatggcacttggaccgataggtatttggagcatgagttaggaaggatatgtctttctccaggtgcgcagctgaaagttgctgagaaaagctgcctgtgttgctgtggtaacatgagaaggaatgaacagctctatacaaaaactggccacacattataaggcctattctatgcagttatgtttttggctatttgctcatttagtcattgtttatcaaccaaactaggtaagccaaggagttacaagacagctctagagaagctccctctgcttacaggacaataatgcattgtttgtttgttgatacaaatgaattatttgaatccacagaagtgaaaaagggaaaaaatcctggctgacttgtgggaagagcgtactgcagagcctagggcctgagttaactcgctggcggccctgcaggcaggcttgatgggagcgcccagcacatctgcccaccctgcacagggcatgaagcaccgtgtgcagagatctgtgggcaaaagcccaggacgtgaccttaggcaagaggggtccttggagaagtggaggtgtgcatggtgtgtagccttgcgtgtctgtgagcacgccctagtggacctgcgcctggattatcgggccagtctctcggaggggtccgtgatgctgagttacgccattcacctgaactctgcagctcatcggctgtaggatttgggtgagacacttttccttgctgactcatttccccatctgcaaaatgggggtgacgatatctacctcttggggtgtgtcaagggtaaaagagcacactttaagaatcctaaagcactaagccaaggatgaaagactagaaagctgcctctatgttgctactctcaaaaatgctcagaaattttcttgtcgtactaaaaatgtgttatttttctcattttcattcttccattcaacacagaagtaatctaagtaagttctaaaaacatagatccgggggcccacagacattcaattttcttctgaattggctctggtatcacacaacacacaagcaagcaaacagcctgcctgctagggccttgggttccaggctggaggaatgcaggcagaaatctcttaggaaataactaagtgagcgccaagttttgaattgccttagagccgaaagagaatgtggcgtgctggggagagatctggacctctttctcatcagtcatttgacctgtccacgaagaacaattttgttatgcagcctgggaacctggtttccttacaccctgcgcccttaatgacacagacaaccacgggtactcctggacggaagctcatcacgcctcctcaaataccttcacccatgttcaggtcacacggaggtcaccatctcctcagcacacaacaactgctttggttcccagggttattttttctacgagttgaaaacccacggagcctaagccatctttttgtcccctaaggagagccccatagactaagagctacacttcctgtctgtctttcccacctttccatctcattctagcttaaagcttatcacgctactgagagcctgttctgtagttcaaggtggcagagaaaaatacgaaccttgagtgaaatctggagagcagtgcagggtcatccccagacgtgacgggccatatcctaggcgactcctgcagcttatagaagcagggaatttaatggacttcttccaggaaagccagcccacggggactcttaaaaagacaccaaccatttggaagatgcagcttgaggtctgggggactggactgattctgccaccatatagtgaacacgattaatcgggaggaagaagtaaggcactctgtgagttagtctaccaccctattgactttgacagagagaaaaccaacttttttcatatgatcacacagtagtactggaatatctcgactgcaatatcctctaaacaaatgcatgcaaagctttgtaaaagcagctgatgattaaaaaaattttaaaacattagggtttttctaatatatccatatgtgggacagtgatttaaatgtcattaattgtccagccacaacttgtaacagtgatgtgaaagacacaaaaaaggccccactggagtggaggagtggtctggctggtccccaagcaaaacagaatgggcttcgcataggctttagaacttattcataaatattgaccaaagtgtgaagcaaggtatccagtgaagattctctagggtctctacttctgctcaagagatttaatccagctttctctaaagcagtggtccagacttgccacatactaggttaaagataaagtgagaaaaacaaatactttggtttgcacgtctcttgaggggccctaggctgtatggaggaatatttagaggaatatttgtgagctgccatttgtgtttaaaagaacatgaaagcaagacgggccctaacccgcctgtgtctgtagctgaccaggaggccactgcttccttcccccagagcttctaggagagccccccaaaatgcaactctccaaggtcctgtggagtagtcccctcataatgcctccaccacacctgtgtctcacgatgccttaactgacgtagctcctaagtgatgttcacagagaaggaaatacttaggcaagcccatgtgtaacatgctcacagatgtgctggctttgccaatgctttcggactccaccatgctttctgattcttctggtcctagtcacgccttggcacggggcagaagcggccgagctatgctgacaggtgctgctgagagccaacagccattcagccgagaaggcgtttctaggtgagggcatgagagctggcattccaggctgctgagtgcggcatctgcaggtgcaccacattgctccacggtgtgttcagaagagaccagcatcttgaatctcaggctctgggctcattctttgcctctgccaagggaccattcaggggcttcaagccagctgctgaaaatcccccttttctggatttttccccatctatataaggatatggtggctgtgtggacaagaaattggtttcatctcagaagggtgcttccctacaaagatcttcagaaatttaattgaaaacaattttttgaactttttttgtttggccaggatgaatgaagctgaagtcacatcctgaatgtgcatgccagacaaagggtaagcaagcagtctttacaaatgccaatccctctgcactccaaaaccggagcccgtaatgaaggcccaggttccagtcatcacaggatcccccaagccagcacagtgcctgatgcctccctaggcattagcacatcccagcactctaattcacatcctcagcatccctgcctcctgcatccagggcttaggttgagtgtttccagagtgtcaagtacatttaaacacaaaccaaatactccagggttttgacctgtcacaatggcttttgaaaacaacagacgtacaatttgagagaaggactcgatggacttcttaggctgaggactaaggacatgttgctgttcctcttggtccaggacattcaataccattcacagcattcatcaccaactgacatagtatcgatcacgacattcaactgtttgaaattactgctattttggtcaaaaactaagaaatcagaaattgcacctacatagtgtgtctcctcattggagtcccatctctctgagcacagggatgggctcctgagctcacagccctgccctgcccccccagcagggcctcaccctcatggccctcagtgaatagtgactacatgaagggggcacttactagaggcctgagtaatggaatttcaattagcttctgcttcccttttctaaaaaagaaccacctttcttaagaataattaggccaaaataaacttgagtaatttgtacagtcaatattttgaagtttcggagttaccagtgaaatagcaaagctgttctccaggaaaggacatccaggttcccacccaggccttccttcctcagctcctgcagcctcatcctagtttaatatgaaggttgtgaatgggttaaaaagcagttcttaagcacctacttagatcttttcagtatctggaaatagcacccagggctgtgttagtaaagcttttcactgggtaagagtcatacaatttttacatttaatttgtttttttaaaacaaggcagtcttgttttacatattggaatgactagatattttttgacatttctggcacctctggttctgctgaattttaagggaggtgagtggtatgtacacaaagttaagattgctgcataataattcctttgcatttccaaaataaattacacaaatgtcacttttccttttctattccatagtactagttttagccagatctttgccaaacattctaggacattcagaaaagtcatccatggaattttggaatgccattctctctgtatctttgcagatcatgaggaaggaaagttgatgaactagtacgggatggctcagacttgtaaagtgtctaagtcacaacgctgcagagccagcttccgggtagcaatggcatggcctcagctgtgccaaggctacaactggagcttccttactcgcatctgaggcaaacacagcaaggctggcccaggccgcccacagtcaacagatgttcacgggagatggatcagcccctcttttgcttgttctatcaaggaaagagatctaaccatgggcaagggtggaacacacccggttcaggtcagggaatgagttgctctaagtgaacagtgaattcttacttctcagcctgtatcaattgtacccagggttcatgattactgtgacccactaagggatgatctttgaggaaacagacctggagggaggtaatttaaggagggaaagcgagtgggttttacagactgctttgtggcgacattcaggaacagaccattcaatggatgacttttcagtacataaaagcaagcagtaatggccaggagagagcaaagatgccctaagaatgacatcagactgaccaaatgtgccttttcaaataagttatgagaacgaatgaattggaattagagcaaggtattggacagaaccatgctagtctttgagagaacgtgtggattgggtggatgtttggaccgaatgaatggtaactttttaatgtgaaacagagaactgatatatgggctgtcatgtcaccctagggtactgtcgctctgtcatgtgtagcaatctttccaaatttttgttggtgggctgaacaaagataaaactaataaagtatgtgtggataccactag

SEQ ID NO: 3439 - protein, 244 aa, Homo sapiens; identical to SEQ ID NO: 3437

SEQ ID NO: 3440 - DNA, 7887 bp, Homo sapiens
gtccaccccatgggtggagtctcgctttttctttccagtgttggctgacttacagctcttataaactagtggcaatttctgaacccagccggctccatctcagcttctggtttctaagtccatgtgccaaaggctgccaggaaggagacgccttcctgagtcctggatctttcttccttctggaaatctttgactgtgggtagttatttatttctgaataagagcgtccacgcatcatggacctcgcgggactgctgaagtctcagttcctgtgccacctggtcttctgctacgtctttattgcctcagggctaatcatcaacaccattcagctcttcactctcctcctctggcccattaacaagcagctcttccggaagatcaactgcagactgtcctattgcatctcaagccagctggtgatgctgctggagtggtggtcgggcacggaatgcaccatcttcacggacccgcgcgcctacctcaagtatgggaaggaaaatgccatcgtggttctcaaccacaagtttgaaattgactttctgtgtggctggagcctgtccgaacgctttgggctgttagggggctccaaggtcctggccaagaaagagctggcctatgtcccaattatcggctggatgtggtacttcaccgagatggtcttctgttcgcgcaagtgggagcaggatcgcaagacggttgccaccagtttgcagcacctccgggactaccccgagaagtattttttcctgattcactgtgagggcacacggttcacggagaagaagcatgagatcagcatgcaggtggcccgggccaaggggctgcctcgcctcaagcatcacctgttgccacgaaccaagggcttcgccatcaccgtgaggagcttgagaaatgtagtttcagctgtatatgactgtacactcaatttcagaaataatgaaaatccaacactgctgggagtcctaaacggaaagaaataccatgcagatttgtatgttaggaggatcccactggaagacatccctgaagacgatgacgagtgctcggcctggctgcacaagctctaccaggagaaggatgcctttcaggaggagtactacaggacgggcaccttcccagagacgcccatggtgcccccccggcggccctggaccctcgtgaactggctgttttgggcctcgctggtgctctaccctttcttccagttcctggtcagcatgatcaggagcgggtcttccctgacgctggccagcttcatcctcgtcttctttgtggcctccgtgggagttcgatggatgattggtgtgacggaaattgacaagggctctgcctacggcaactctgacagcaagcagaaactgaatgactgactcagggaggtgtcaccatccgaagggaaccttggggaactggtggcctctgcatatcctccttagtgggacacggtgacaaaggctgggtgagcccctgctgggcacggcggaagtcacgacctctccagccagggagtctggtctcaaggccggatggggaggaagatgttttgtaatctttttttccccatgtgctttagtgggctttggttttctttttgtgcgagtgtgtgtgagaatggctgtgtggtgagtgtgaactttgttctgtgatcatagaaagggtattttaggctgcaggggagggcagggctggggaccgaaggggacaagttcccctttcatcctttggtgctgagttttctgtaacccttggttgccagagataaagtgaaaagtgctttaggtgagatgactaaattatgcctccaagaaaaaaaaattaaagtgcttttctgggtcatctgtggtgtatgttgacatggaccgctgcccctccatcctgcccttgcccgtggctttggtgtttcagatcctactcacgggaggcagctgccgcggaggtgtgggcagctgagaggggtgggcaggccagcacagctcctggcaggagacacaggtccaggagcccgtgagcatttgtgagagcagagatggcaagcacgtgcgtggagaccaacgaagcgtgtccctggcacacagcaagggagagtttcgctcggtctctgcagtgcagtctcctggcgtaagtcttgaagatggacccaactccctgaagaaatggatcttgaaattgaacacaaacatcatgaacgtacagcctgggcattctgcagtgatttgtgagatgagcttgcatcgactgttcctctcagcagtgacagccaaagtcacccctgataaaatgcagtttcactttataaaatgcctcgccccttcccagcatgtagagcttgtctgcagccctaaaggagccaggtcctgctctgatgagggtcaaatcagagccgacatcccatgtacaaaaaacccccaggcttctgccttccttccgggctcctgtctgctcccattttactccacggaatagttctgccctgtagcatctccagcggcctttgcagactgctgtcagccaacaggtgccaaaaatgcaaaagaagaagaaactaaaagcagtgctatttttgcagaacaaatgctagctattaaatcatcttaggccaagacaccaatggcacttggaccgataggtatttggagcatgagttaggaaggatatgtctttctccaggtgcgcagctgaaagttgctgagaaaagctgcctgtgttgctgtggtaacatgagaaggaatgaacagctctatacaaaaactggccacacattataaggcctattctatgcagttatgtttttggctatttgctcatttagtcattgtttatcaaccaaactaggtaagccaaggagttacaagacagctctagagaagctccctctgcttacaggacaataatgcattgtttgtttgttgatacaaatgaattatttgaatccacagaagtgaaaaagggaaaaaatcctggctgacttgtgggaagagcgtactgcagagcctagggcctgagttaactcgctggcggccctgcaggcaggcttgatgggagcgcccagcacatctgcccaccctgcacagggcatgaagcaccgtgtgcagagatctgtgggcaaaagcccaggacgtgaccttaggcaagaggggtccttggagaagtggaggtgtgcatggtgtgtagccttgcgtgtctgtgagcacgccctagtggacctgcgcctggattatcgggccagtctctcggaggggtccgtgatgctgagttacgccattcacctgaactctgcagctcatcggctgtaggatttgggtgagacacttttccttgctgactcatttccccatctgcaaaatgggggtgacgatatctacctcttggggtgtgtcaagggtaaaagagcacactttaagaatcctaaagcactaagccaaggatgaaagactagaaagctgcctctatgttgctactctcaaaaatgctcagaaattttcttgtcgtactaaaaatgtgttatttttctcattttcattcttccattcaacacagaagtaatctaagtaagttctaaaaacatagatccgggggcccacagacattcaattttcttctgaattggctctggtatcacacaacacacaagcaagcaaacagcctgcctgctagggccttgggttccaggctggaggaatgcaggcagaaatctcttaggaaataactaagtgagcgccaagttttgaattgccttagagccgaaagagaatgtggcgtgctggggagagatctggacctctttctcatcagtcatttgacctgtccacgaagaacaattttgttatgcagcctgggaacctggtttccttacaccctgcgcccttaatgacacagacaaccacgggtactcctggacggaagctcatcacgcctcctcaaataccttcacccatgttcaggtcacacggaggtcaccatctcctcagcacacaacaactgctttggttcccagggttattttttctacgagttgaaaacccacggagcctaagccatctttttgtcccctaaggagagccccatagactaagagctacacttcctgtctgtctttcccacctttccatctcattctagcttaaagcttatcacgctactgagagcctgttctgtagttcaaggtggcagagaaaaatacgaaccttgagtgaaatctggagagcagtgcagggtcatccccagacgtgacgggccatatcctaggcgactcctgcagcttatagaagcagggaatttaatggacttcttccaggaaagccagcccacggggactcttaaaaagacaccaaccatttggaagatgcagcttgaggtctgggggactggactgattctgccaccatatagtgaacacgattaatcgggaggaagaagtaaggcactctgtgagttagtctaccaccctattgactttgacagagagaaaaccaacttttttcatatgatcacacagtagtactggaatatctcgactgcaatatcctctaaacaaatgcatgcaaagctttgtaaaagcagctgatgattaaaaaaattttaaaacattagggtttttctaatatatccatatgtgggacagtgatttaaatgtcattaattgtccagccacaacttgtaacagtgatgtgaaagacacaaaaaaggccccactggagtggaggagtggtctggctggtccccaagcaaaacagaatgggcttcgcataggctttagaacttattcataaatattgaccaaagtgtgaagcaaggtatccagtgaagattctctagggtctctacttctgctcaagagatttaatccagctttctctaaagcagtggtccagacttgccacatactaggttaaagataaagtgagaaaaacaaatactttggtttgcacgtctcttgaggggccctaggctgtatggaggaatatttagaggaatatttgtgagctgccatttgtgtttaaaagaacatgaaagcaagacgggccctaacccgcctgtgtctgtagctgaccaggaggccactgcttccttcccccagagcttctaggagagccccccaaaatgcaactctccaaggtcctgtggagtagtcccctcataatgcctccaccacacctgtgtctcacgatgccttaactgacgtagctcctaagtgatgttcacagagaaggaaatacttaggcaagcccatgtgtaacatgctcacagatgtgctggctttgccaatgctttcggactccaccatgctttctgattcttctggtcctagtcacgccttggcacggggcagaagcggccgagctatgctgacaggtgctgctgagagccaacagccattcagccgagaaggcgtttctaggtgagggcatgagagctggcattccaggctgctgagtgcggcatctgcaggtgcaccacattgctccacggtgtgttcagaagagaccagcatcttgaatctcaggctctgggctcattctttgcctctgccaagggaccattcaggggcttcaagccagctgctgaaaatcccccttttctggatttttccccatctatataaggatatggtggctgtgtggacaagaaattggtttcatctcagaagggtgcttccctacaaagatcttcagaaatttaattgaaaacaattttttgaactttttttgtttggccaggatgaatgaagctgaagtcacatcctgaatgtgcatgccagacaaagggtaagcaagcagtctttacaaatgccaatccctctgcactccaaaaccggagcccgtaatgaaggcccaggttccagtcatcacaggatcccccaagccagcacagtgcctgatgcctccctaggcattagcacatcccagcactctaattcacatcctcagcatccctgcctcctgcatccagggcttaggttgagtgtttccagagtgtcaagtacatttaaacacaaaccaaatactccagggttttgacctgtcacaatggcttttgaaaacaacagacgtacaatttgagagaaggactcgatggacttcttaggctgaggactaaggacatgttgctgttcctcttggtccaggacattcaataccattcacagcattcatcaccaactgacatagtatcgatcacgacattcaactgtttgaaattactgctattttggtcaaaaactaagaaatcagaaattgcacctacatagtgtgtctcctcattggagtcccatctctctgagcacagggatgggctcctgagctcacagccctgccctgcccccccagcagggcctcaccctcatggccctcagtgaatagtgactacatgaagggggcacttactagaggcctgagtaatggaatttcaattagcttctgcttcccttttctaaaaaagaaccacctttcttaagaataattaggccaaaataaacttgagtaatttgtacagtcaatattttgaagtttcggagttaccagtgaaatagcaaagctgttctccaggaaaggacatccaggttcccacccaggccttccttcctcagctcctgcagcctcatcctagtttaatatgaaggttgtgaatgggttaaaaagcagttcttaagcacctacttagatcttttcagtatctggaaatagcacccagggctgtgttagtaaagcttttcactgggtaagagtcatacaatttttacatttaatttgtttttttaaaacaaggcagtcttgttttacatattggaatgactagatattttttgacatttctggcacctctggttctgctgaattttaagggaggtgagtggtatgtacacaaagttaagattgctgcataataattcctttgcatttccaaaataaattacacaaatgtcacttttccttttctattccatagtactagttttagccagatctttgccaaacattctaggacattcagaaaagtcatccatggaattttggaatgccattctctctgtatctttgcagatcatgaggaaggaaagttgatgaactagtacgggatggctcagacttgtaaagtgtctaagtcacaacgctgcagagccagcttccgggtagcaatggcatggcctcagctgtgccaaggctacaactggagcttccttactcgcatctgaggcaaacacagcaaggctggcccaggccgcccacagtcaacagatgttcacgggagatggatcagcccctcttttgcttgttctatcaaggaaagagatctaaccatgggcaagggtggaacacacccggttcaggtcagggaatgagttgctctaagtgaacagtgaattcttacttctcagcctgtatcaattgtacccagggttcatgattactgtgacccactaagggatgatctttgaggaaacagacctggagggaggtaatttaaggagggaaagcgagtgggttttacagactgctttgtggcgacattcaggaacagaccattcaatggatgacttttcagtacataaaagcaagcagtaatggccaggagagagcaaagatgccctaagaatgacatcagactgaccaaatgtgccttttcaaataagttatgagaacgaatgaattggaattagagcaaggtattggacagaaccatgctagtctttgagagaacgtgtggattgggtggatgtttggaccgaatgaatggtaactttttaatgtgaaacagagaactgatatatgggctgtcatgtcaccctagggtactgtcgctctgtcatgtgtagcaatctttccaaatttttgttggtgggctgaacaaagataaaactaataaagtatgtgtggataccactag

SEQ ID NO: 3441 - protein, 378 aa, Homo sapiens
MDLAGLLKSQFLCHLVFCYVFIASGLIINTIQLFTLLLWPINKQLFRKINCRLSYCISSQLVMLLEWWSGTECTIFTDPRAYLKYGKENAIVVLNHKFEIDFLCGWSLSERFGLLGGSKVLAKKELAYVPIIGWMWYFTEMVFCSRKWEQDRKTVATSLQHLRDYPEKYFFLIHCEGTRFTEKKHEISMQVARAKGLPRLKHHLLPRTKGFAITVRSLRNVVSAVYDCTLNFRNNENPTLLGVLNGKKYHADLYVRRIPLEDIPEDDDECSAWLHKLYQEKDAFQEEYYRTGTFPETPMVPPRRPWTLVNWLFWASLVLYPFFQFLVSMIRSGSSLTLASFILVFFVASVGVRWMIGVTEIDKGSAYGNSDSKQKLND

SEQ ID NO: 3442 - DNA, 2031 bp, Homo sapiens
ggaggtatgtggtcctggtgccgttcgcaggcaccttccccgctgggtgtggctgatgtttgcattcctcttcccagcatatttttctctcctgggctggatttccttaggacctctggaagggacgccttcctgagtcctggatctttcttccttctggaaatctttgactgtgggtagttatttatttctgaataagagcgtccacgcatcatggacctcgcgggactgctgaagtctcagttcctgtgccacctggtcttctgctacgtctttattgcctcagggctaatcatcaacaccattcagctcttcactctcctcctctggcccattaacaagcagctcttccggaagatcaactgcagactgtcctattgcatctcaagccagctggtgatgctgctggagtggtggtcgggcacggaatgcaccatcttcacggacccgcgcgcctacctcaagtatgggaaggaaaatgccatcgtggttctcaaccacaagtttgaaattgactttctgtgtggctggagcctgtccgaacgctttgggctgttagggggctccaaggtcctggccaagaaagagctggcctatgtcccaattatcggctggatgtggtacttcaccgagatggtcttctgttcgcgcaagtgggagcaggatcgcaagacggttgccaccagtttgcagcacctccgggactaccccgagaagtattttttcctgattcactgtgagggcacacggttcacggagaagaagcatgagatcagcatgcaggtggcccgggccaaggggctgcctcgcctcaagcatcacctgttgccacgaaccaagggcttcgccatcaccgtgaggagcttgagaaatgtagtttcagctgtatatgactgtacactcaatttcagaaataatgaaaatccaacactgctgggagtcctaaacggaaagaaataccatgcagatttgtatgttaggaggatcccactggaagacatccctgaagacgatgacgagtgctcggcctggctgcacaagctctaccaggagaaggatgcctttcaggaggagtactacaggacgggcaccttcccagagacgcccatggtgcccccccggcggccctggaccctcgtgaactggctgttttgggcctcgctggtgctctaccctttcttccagttcctggtcagcatgatcaggagcgggtcttccctgacgctggccagcttcatcctcgtcttctttgtggcctccgtgggagttcgatggatgattggtgtgacggaaattgacaagggctctgcctacggcaactctgacagcaagcagaaactgaatgactgactcagggaggtgtcaccatccgaagggaaccttggggaactggtggcctctgcatatcctccttagtgggacacggtgacaaaggctgggtgagcccctgctgggcacggcggaagtcacgacctctccagccagggagtctggtctcaaggccggatggggaggaagatgttttgtaatctttttttccccatgtgctttagtgggctttggttttctttttgtgcgagtgtgtgtgagaatggctgtgtggtgagtgtgaactttgttctgtgatcatagaaagggtattttaggctgcaggggagggcagggctggggaccgaaggggacaagttcccctttcatcctttggtgctgagttttctgtaacccttggttgccagagataaagtgaaaagtgctttaggtgagatgactaaattatgcctccaagaaaaaaaaattaaagtgcttttctgggtcatctgtggtgtatgttgacatggaccgctgcccctccatcctgcccttgcccgtggctttggtgtttcagatcctactcacgggaggcagctgccgcggaggtgtgggcagctgagaggggtgggcaggccagcacagctcctggcaggagacacaggtccaggagcccgtgagcatttgtgagagcagagatggcaagcacgtgcgtggagacca

SEQ ID NO: 3443 - protein, 378 aa, Homo sapiens; identical to SEQ ID NO: 3441

SEQ ID NO: 3444 - DNA, 1442 bp, Homo sapiens
gctttttctttccagtgttggctgacttacagctcttataaactagtggcaatttctgaacccagccggctccatctcagcttctggtttctaagtccatgtgccaaaggctgccaggaaggagacgccttcctgagtcctggatctttcttccttctggaaatctttgactgtgggtagttatttatttctgaataagagcgtccacgcatcatggacctcgcgggactgctgaagtctcagttcctgtgccacctggtcttctgctacgtctttattgcctcagggctaatcatcaacaccattcagctcttcactctcctcctctggcccattaacaagcagctcttccggaagatcaactgcagactgtcctattgcatctcaagccgaggatcccactggaagacatccctgaagacgatgacgagtgctcggcctggctgcacaagctctaccaggagaaggatgcctttcaggaggagtactacaggacgggcaccttcccagagacgcccatggtgcccccccggcggccctggaccctcgtgaactggctgttttgggcctcgctggtgctctaccctttcttccagttcctggtcagcatgatcaggagcgggtcttccctgacgctggccagcttcatcctcgtcttctttgtggcctccgtgggagttcgatggatgattggtgtgacggaaattgacaagggctctgcctacggcaactctgacagcaagcagaaactgaatgactgactcagggaggtgtcaccatccgaagggaaccttggggaactggtggcctctgcatatcctccttagtgggacacggtgacaaaggctgggtgagcccctgctgggcacggcggaagtcacgacctctccagccagggagtctggtctcaaggccggatggggaggaagatgttttgtaatctttttttccccatgtgctttagtgggctttggttttctttttgtgcgagtgtgtgtgagaatggctgtgtggtgagtgtgaactttgttctgtgatcatagaaagggtattttaggctgcaggggagggcagggctggggaccgaaggggacaagttcccctttcatcctttggtgctgagttttctgtaacccttggttgccagagataaagtgaaaagtgctttaggtgagatgactaaattatgcctccaagaaaaaaaaattaaagtgcttttctgggtcatctgtggtgtatgttgacatggaccgctgcccctccatcctgcccttgcccgtggctttggtgtttcagatcctactcacgggaggcagctgccgcggaggtgtgggcagctgagaggggtgggcaggccagcacagctcctggcaggagacacaggtccaggagcccgtgagcatttgtgagagcagagatggcaagcacgtgcgtggagacca

SEQ ID NO: 3445 - protein, 112 aa, Homo sapiens
MDLAGLLKSQFLCHLVFCYVFIASGLIINTIQLFTLLLWPINKQLFRKINCRLSYCISSRGSHWKTSLKTMTSARPGCTSSTRRRMPFRRSTTGRAPSQRRPWCPPGGPGPS

SEQ ID NO: 3446 - DNA, 1815 bp, Homo sapiens
ggaggtatgtggtcctggtgccgttcgcaggcaccttccccgctgggtgtggctgatgtttgcattcctcttcccagcatatttttctctcctgggctggatttccttaggacctctggaagggacgccttcctgagtcctggatctttcttccttctggaaatctttgactgtgggtagttatttatttctgaataagagcgtccacgcatcatggacctcgcgggactgctgaagtctcagttcctgtgccacctggtcttctgctacgtctttattgcctcagggctaatcatcaacaccattcagctcttcactctcctcctctggcccattaacaagcagctcttccggaagatcaactgcagactgtcctattgcatctcaagccagctggtgatgctgctggagtggtggtcgggcacggaatgcaccatcttcacggacccgcgcgcctacctcaagtatgggaaggaaaatgccatcgtggttctcaaccacaagtttgaaattgactttctgtgtggctggagcctgtccgaacgctttgggctgttagggggctccaaggtcctggccaagaaagagctggcctatgtcccaattatcggctggatgtggtacttcaccgagatggtcttctgttcgcgcaagtgggagcaggatcgcaagacggttgccaccagtttgcagcacctccgggactaccccgagaagtattttttcctgattcactgtgagggcacacggttcacggagaagaagcatgagatcagcatgcaggtggcccgggccaaggggctgcctcgcctcaagcatcacctgttgccacgaaccaagggcttcgccatcaccgtgaggagcttgagaaatgtagtttcagctgtatatgactgtacactcaatttcagaaataatgaaaatccaacactgctgggagtcctaaacggaaagaaataccatgcagatttgtatgttaggaggatcccactggaagacatccctgaagacgatgacgagtgctcggcctggctgcacaagctctaccaggagaaggatgcctttcaggaggagtactacaggacgggcaccttcccagagacgcccatggtgcccccccggcggccctggaccctcgtgaactggctgttttgggcctcgctggtgctctaccctttcttccagttcctggtcagcatgatcaggagcgggtcttccctgacgctggccagcttcatcctcgtcttctttgtggcctccgtgggagttcgatggatgattggtgtgacggaaattgacaagggctctgcctacggcaactctgacagcaagcagaaactgaatgactgactcagggaggtgtcaccatccgaagggaaccttggggaactggtggcctctgcatatcctccttagtgggacacggtgacaaaggctgggtgagcccctgctgggcacggcggaagtcacgacctctccagccagggagtctggtctcaaggccggatggggaggaagatgttttgtaatctttttttccccatgtgctttagtgggctttggttttctttttgtgcgagtgtgtgtgagaatggctgtgtggtgagtgtgaactttgttctgtgatcatagaaagggtattttaggctgcaggggagggcagggctggggaccgaaggggacaagttcccctttcatcctttggtgctgagttttctgtaacccttggttgccagagataaagtgaaaagtgctttaggtgagatgactaaattatgcctccaagaaaaaaaaattaaagtgcttttctgggtc

SEQ ID NO: 3447 - protein, 378 aa, Homo sapiens; identical to SEQ ID NO: 3441

SEQ ID NO: 3448 - DNA, 1226 bp, Homo sapiens
gctttttctttccagtgttggctgacttacagctcttataaactagtggcaatttctgaacccagccggctccatctcagcttctggtttctaagtccatgtgccaaaggctgccaggaaggagacgccttcctgagtcctggatctttcttccttctggaaatctttgactgtgggtagttatttatttctgaataagagcgtccacgcatcatggacctcgcgggactgctgaagtctcagttcctgtgccacctggtcttctgctacgtctttattgcctcagggctaatcatcaacaccattcagctcttcactctcctcctctggcccattaacaagcagctcttccggaagatcaactgcagactgtcctattgcatctcaagccgaggatcccactggaagacatccctgaagacgatgacgagtgctcggcctggctgcacaagctctaccaggagaaggatgcctttcaggaggagtactacaggacgggcaccttcccagagacgcccatggtgcccccccggcggccctggaccctcgtgaactggctgttttgggcctcgctggtgctctaccctttcttccagttcctggtcagcatgatcaggagcgggtcttccctgacgctggccagcttcatcctcgtcttctttgtggcctccgtgggagttcgatggatgattggtgtgacggaaattgacaagggctctgcctacggcaactctgacagcaagcagaaactgaatgactgactcagggaggtgtcaccatccgaagggaaccttggggaactggtggcctctgcatatcctccttagtgggacacggtgacaaaggctgggtgagcccctgctgggcacggcggaagtcacgacctctccagccagggagtctggtctcaaggccggatggggaggaagatgttttgtaatctttttttccccatgtgctttagtgggctttggttttctttttgtgcgagtgtgtgtgagaatggctgtgtggtgagtgtgaactttgttctgtgatcatagaaagggtattttaggctgcaggggagggcagggctggggaccgaaggggacaagttcccctttcatcctttggtgctgagttttctgtaacccttggttgccagagataaagtgaaaagtgctttaggtgagatgactaaattatgcctccaagaaaaaaaaattaaagtgcttttctgggtc

SEQ ID NO: 3449 - protein, 112 aa, Homo sapiens; identical to SEQ ID NO: 3445

SEQ ID NO: 3450 - DNA, 1838 bp, Homo sapiens
gtccaccccatgggtggagtctcgctttttctttccagtgttggctgacttacagctcttataaactagtggcaatttctgaacccagccggctccatctcagcttctggtttctaagtccatgtgccaaaggctgccaggaaggagacgccttcctgagtcctggatctttcttccttctggaaatctttgactgtgggtagttatttatttctgaataagagcgtccacgcatcatggacctcgcgggactgctgaagtctcagttcctgtgccacctggtcttctgctacgtctttattgcctcagggctaatcatcaacaccattcagctcttcactctcctcctctggcccattaacaagcagctcttccggaagatcaactgcagactgtcctattgcatctcaagccagctggtgatgctgctggagtggtggtcgggcacggaatgcaccatcttcacggacccgcgcgcctacctcaagtatgggaaggaaaatgccatcgtggttctcaaccacaagtttgaaattgactttctgtgtggctggagcctgtccgaacgctttgggctgttagggggctccaaggtcctggccaagaaagagctggcctatgtcccaattatcggctggatgtggtacttcaccgagatggtcttctgttcgcgcaagtgggagcaggatcgcaagacggttgccaccagtttgcagcacctccgggactaccccgagaagtattttttcctgattcactgtgagggcacacggttcacggagaagaagcatgagatcagcatgcaggtggcccgggccaaggggctgcctcgcctcaagcatcacctgttgccacgaaccaagggcttcgccatcaccgtgaggagcttgagaaatgtagtttcagctgtatatgactgtacactcaatttcagaaataatgaaaatccaacactgctgggagtcctaaacggaaagaaataccatgcagatttgtatgttaggaggatcccactggaagacatccctgaagacgatgacgagtgctcggcctggctgcacaagctctaccaggagaaggatgcctttcaggaggagtactacaggacgggcaccttcccagagacgcccatggtgcccccccggcggccctggaccctcgtgaactggctgttttgggcctcgctggtgctctaccctttcttccagttcctggtcagcatgatcaggagcgggtcttccctgacgctggccagcttcatcctcgtcttctttgtggcctccgtgggagttcgatggatgattggtgtgacggaaattgacaagggctctgcctacggcaactctgacagcaagcagaaactgaatgactgactcagggaggtgtcaccatccgaagggaaccttggggaactggtggcctctgcatatcctccttagtgggacacggtgacaaaggctgggtgagcccctgctgggcacggcggaagtcacgacctctccagccagggagtctggtctcaaggccggatggggaggaagatgttttgtaatctttttttccccatgtgctttagtgggctttggttttctttttgtgcgagtgtgtgtgagaatggctgtgtggtgagtgtgaactttgttctgtgatcatagaaagggtattttaggctgcaggggagggcagggctggggaccgaaggggacaagttcccctttcatcctttggtgctgagttttctgtaacccttggttgccagagataaagtgaaaagtgctttaggtgagatgactaaattatgcctccaagaaaaaaaaattaaagtgcttttctgggtc

SEQ ID NO: 3451 - protein, 378 aa, Homo sapiens; identical to SEQ ID NO: 3441

SEQ ID NO: 3452 - DNA, 1181 bp, Homo sapiens
gctttttctttccagtgttggctgacttacagctcttataaactagtggcaatttctgaacccagccggctccatctcagcttctggtttctaagtccatgtgccaaaggctgccaggaaggagacgccttcctgagtcctggatctttcttccttctggaaatctttgactgtgggtagttatttatttctgaataagagcgtccacgcatcatggacctcgcgggactgctgaagtctcagttcctgtgccacctggtcttctgctacgtctttattgcctcagggctaatcatcaacaccattcagctcttcactctcctcctctggcccattaacaagcagctcttccggaagatcaactgcagactgtcctattgcatctcaagccgaggatcccactggaagacatccctgaagacgatgacgagtgctcggcctggctgcacaagctctaccaggagaaggatgcctttcaggaggagtactacaggacgggcaccttcccagagacgcccatggtgcccccccggcggccctggaccctcgtgaactggctgttttgggcctcgctggtgctctaccctttcttccagttcctggtcagcatgatcaggagcgggtcttccctgacgctggccagcttcatcctcgtcttctttgtggcctccgtgggagttcgatggatgattggtgtgacggaaattgacaagggctctgcctacggcaactctgacagcaagcagaaactgaatgactgactcagggaggtgtcaccatccgaagggaaccttggggaactggtggcctctgcatatcctccttagtgggacacggtgacaaaggctgggtgagcccctgctgggcacggcggaagtcacgacctctccagccagggagtctggtctcaaggccggatggggaggaagatgttttgtaatctttttttccccatgtgctttagtgggctttggttttctttttgtgcgagtgtgtgtgagaatggctgtgtggtgagtgtgaactttgttctgtgatcatagaaagggtattttaggctgcaggggagggcagggctggggaccgaaggggacaagttcccctttcatcctttggtgctgagttttctgtaacccttggttgccagagataaagtgaaaagtgctttaggtgagatgact

SEQ ID NO: 3453 - protein, 112 aa, Homo sapiens; identical to SEQ ID NO: 3445

SEQ ID NO: 3454 - DNA, 1793 bp, Homo sapiens
gtccaccccatgggtggagtctcgctttttctttccagtgttggctgacttacagctcttataaactagtggcaatttctgaacccagccggctccatctcagcttctggtttctaagtccatgtgccaaaggctgccaggaaggagacgccttcctgagtcctggatctttcttccttctggaaatctttgactgtgggtagttatttatttctgaataagagcgtccacgcatcatggacctcgcgggactgctgaagtctcagttcctgtgccacctggtcttctgctacgtctttattgcctcagggctaatcatcaacaccattcagctcttcactctcctcctctggcccattaacaagcagctcttccggaagatcaactgcagactgtcctattgcatctcaagccagctggtgatgctgctggagtggtggtcgggcacggaatgcaccatcttcacggacccgcgcgcctacctcaagtatgggaaggaaaatgccatcgtggttctcaaccacaagtttgaaattgactttctgtgtggctggagcctgtccgaacgctttgggctgttagggggctccaaggtcctggccaagaaagagctggcctatgtcccaattatcggctggatgtggtacttcaccgagatggtcttctgttcgcgcaagtgggagcaggatcgcaagacggttgccaccagtttgcagcacctccgggactaccccgagaagtattttttcctgattcactgtgagggcacacggttcacggagaagaagcatgagatcagcatgcaggtggcccgggccaaggggctgcctcgcctcaagcatcacctgttgccacgaaccaagggcttcgccatcaccgtgaggagcttgagaaatgtagtttcagctgtatatgactgtacactcaatttcagaaataatgaaaatccaacactgctgggagtcctaaacggaaagaaataccatgcagatttgtatgttaggaggatcccactggaagacatccctgaagacgatgacgagtgctcggcctggctgcacaagctctaccaggagaaggatgcctttcaggaggagtactacaggacgggcaccttcccagagacgcccatggtgcccccccggcggccctggaccctcgtgaactggctgttttgggcctcgctggtgctctaccctttcttccagttcctggtcagcatgatcaggagcgggtcttccctgacgctggccagcttcatcctcgtcttctttgtggcctccgtgggagttcgatggatgattggtgtgacggaaattgacaagggctctgcctacggcaactctgacagcaagcagaaactgaatgactgactcagggaggtgtcaccatccgaagggaaccttggggaactggtggcctctgcatatcctccttagtgggacacggtgacaaaggctgggtgagcccctgctgggcacggcggaagtcacgacctctccagccagggagtctggtctcaaggccggatggggaggaagatgttttgtaatctttttttccccatgtgctttagtgggctttggttttctttttgtgcgagtgtgtgtgagaatggctgtgtggtgagtgtgaactttgttctgtgatcatagaaagggtattttaggctgcaggggagggcagggctggggaccgaaggggacaagttcccctttcatcctttggtgctgagttttctgtaacccttggttgccagagataaagtgaaaagtgctttaggtgagatgact

SEQ ID NO: 3455 - protein, 378 aa, Homo sapiens; identical to SEQ ID NO: 3441

SEQ ID NO: 3456 - DNA, 1224 bp, Homo sapiens
tctcgctttttctttccagtgttggctgacttacagctcttataaactagtggcaatttctgaacccagccggctccatctcagcttctggtttctaagtccatgtgccaaaggctgccaggaaggagacgccttcctgagtcctggatctttcttccttctggaaatctttgactgtgggtagttatttatttctgaataagagcgtccacgcatcatggacctcgcgggactgctgaagtctcagttcctgtgccacctggtcttctgctacgtctttattgcctcagggctaatcatcaacaccattcagctcttcactctcctcctctggcccattaacaagcagctcttccggaagatcaactgcagactgtcctattgcatctcaagccagctggtgatgctgctggagtggtggtcgggcacggaatgcaccatcttcacggacccgcgcgcctacctcaagtatgggaaggaaaatgccatcgtggttctcaaccacaagtttgaaattgactttctgtgtggctggagcctgtccgaacgctttgggctgttagggggctccaaggtcctggccaagaaagagctggcctatgtcccaattatcggctggatgtggtacttcaccgagatggtcttctgttcgcgcaagtgggagcaggatcgcaagacggttgccaccagtttgcagcacctccgggactaccccgagaagtattttgtatgtaggcaccagagcagctgtgtcccaagggctcctgcaggactgtgaccgtgggacccccatgtgacttccacaggacacgtgactgtgtggtcctgtgcgactccagggctgtgtgtgaccatagggctgtgtataacctcagggatgtatgtgaccatggggccgtgtgtgaccgtggggccacgtatgactgtggggccgtgtatgaccatggggccgtgtgtgaccccagggctgtgtgtgaccccagggctgtgtgtgaccatggggccgtgtgtgatcatgtggccatatgtgaccctggggctatgtgtgaccccagggctgtgtgtgaccccagggctatgtgtgacctcagggctgtatgtaaccatggggccctgtgtgatcgtgtggccatatgtgcccctggggctgtgtgtgaccccagggccaggcatgacaccagggctgtgtgtgaccccagggctgtatgtgaccccagggctgtg

SEQ ID NO: 3457 - protein, 186 aa, Homo sapiens
MDLAGLLKSQFLCHLVFCYVFIASGLIINTIQLFTLLLWPINKQLFRKINCRLSYCISSQLVMLLEWWSGTECTIFTDPRAYLKYGKENAIVVLNHKFEIDFLCGWSLSERFGLLGGSKVLAKKELAYVPIIGWMWYFTEMVFCSRKWEQDRKTVATSLQHLRDYPEKYFVCRHQSSCVPRAPAGL

SEQ ID NO: 3458 - DNA, 1055 bp, Homo sapiens
gtctcgctttttctttccagtgttggctgacttacagctcttataaactagtggcaatttctgaacccagccggctccatctcagcttctggtttctaagtccatgtgccaaaggctgccaggaaggagacgccttcctgagtcctggatctttcttccttctggaaatctttgactgtgggtagttatttatttctgaataagagcgtccacgcatcatggacctcgcgggactgctgaagtctcagttcctgtgccacctggtcttctgctacgtctttattgcctcagggctaatcatcaacaccattcagctcttcactctcctcctctggcccattaacaagcagctcttccggaagatcaactgcagactgtcctattgcatctcaagccggctccaaggtcctggccaagaaagagctggcctatgtcccaattatcggctggatgtggtacttcaccgagatggtcttctgttcgcgcaagtgggagcaggatcgcaagacggttgccaccagtttgcagcacctccgggactaccccgagaagtattttgtatgtaggcaccagagcagctgtgtcccaagggctcctgcaggactgtgaccgtgggacccccatgtgacttccacaggacacgtgactgtgtggtcctgtgcgactccagggctgtgtgtgaccatagggctgtgtataacctcagggatgtatgtgaccatggggccgtgtgtgaccgtggggccacgtatgactgtggggccgtgtatgaccatggggccgtgtgtgaccccagggctgtgtgtgaccccagggctgtgtgtgaccatggggccgtgtgtgatcatgtggccatatgtgaccctggggctatgtgtgaccccagggctgtgtgtgaccccagggctatgtgtgacctcagggctgtatgtaaccatggggccctgtgtgatcgtgtggccatatgtgcccctggggctgtgtgtgaccccagggccaggcatgacaccagggctgtgtgtgaccccagggctgtatgtgaccccagggctgtg

SEQ ID NO: 3459 - protein, 115 aa, Homo sapiens [sequence omitted]

SEQ ID NO: 3460 - DNA, 782 bp, Homo sapiens
gctttttctttccagtgttggctgacttacagctcttataaactagtggcaatttctgaacccagccggctccatctcagcttctggtttctaagtccatgtgccaaaggctgccaggaaggagacgccttcctgagtcctggatctttcttccttctggaaatctttgactgtgggtagttatttatttctgaataagagcgtccacgcatcatggacctcgcgggactgctgaagtctcagttcctgtgccacctggtcttctgctacgtctttattgcctcagggctaatcatcaacaccattcagctcttcactctcctcctctggcccattaacaagcagctcttccggaagatcaactgcagactgtcctattgcatctcaagccagctggtgatgctgctggagtggtggtcgggcacggaatgcaccatcttcacggacccgcgcgcctacctcaagtatgggaaggaaaatgccatcgtggttctcaaccacaagtttgaaattgactttctgtgtggctggagcctgtccgaacgctttgggctgttaggggtaagtcagaagtgcattcccccctgcctcacacatttctctggttcagccccaccacttgtctttttgctcctggtcattcagaacttgcagaagaatcaacagagtttctacttgatgaaatggtcctaataaactgctttttattcttgctgggagtcagtcttaacagcttcttatgggcaatcataagaggtactcaacaattgctacctgccggc

SEQ ID NO: 3461 - protein, 159 aa, Homo sapiens
MDLAGLLKSQFLCHLVFCYVFIASGLIINTIQLFTLLLWPINKQLFRKINCRLSYCISSQLVMLLEWWSGTECTIFTDPRAYLKYGKENAIVVLNHKFEIDFLCGWSLSERFGLLGVSQKCIPPCLTHFSGSAPPLVFLLLVIQNLQKNQQSFYLMKWS

SEQ ID NO: 3462 - DNA, 718 bp, Homo sapiens
gctttttctttccagtgttggctgacttacagctcttataaactagtggcaatttctgaacccagccggctccatctcagcttctggtttctaagtccatgtgccaaaggctgccaggaaggagacgccttcctgagtcctggatctttcttccttctggaaatctttgactgtgggtagttatttatttctgaataagagcgtccacgcatcatggacctcgcgggactgctgaagtctcagttcctgtgccacctggtcttctgctacgtctttattgcctcagggctaatcatcaacaccattcagctcttcactctcctcctctggcccattaacaagcagctcttccggaagatcaactgcagactgtcctattgcatctcaagccagctggtgatgctgctggagtggtggtcgggcacggaatgcaccatcttcacggacccgcgcgcctacctcaagtatgggaaggaaaatgccatcgtggttctcaaccacaagtttgaaattgactttctgtgtggctggagcctgtccgaacgctttgggctgttaggggtaagtcagaagtgcattcccccctgcctcacacatttctctggttcagccccaccacttgtctttttgctcctggtcattcagaacttgcagaagaatcaacagagtttctacttgatgaaatggtcctaataaactgctttttattcttgctggg

SEQ ID NO: 3463 - protein, 159 aa, Homo sapiens; identical to SEQ ID NO: 3461

SEQ ID NO: 3464 - DNA, 571 bp, Homo sapiens
gctttttctttccagtgttggctgacttacagctcttataaactagtggcaatttctgaacccagccggctccatctcagcttctggtttctaagtccatgtgccaaaggctgccaggaaggagacgccttcctgagtcctggatctttcttccttctggaaatctttgactgtgggtagttatttatttctgaataagagcgtccacgcatcatggacctcgcgggactgctgaagtctcagttcctgtgccacctggtcttctgctacgtctttattgcctcagggctaatcatcaacaccattcagctcttcactctcctcctctggcccattaacaagcagctcttccggaagatcaactgcagactgtcctattgcatctcaagccctacacaactgctgctgtcacccatactgttggattccaatatttcttgagacccatggttgggcaaaccctgccttgcatgctgtgggcagcaacaacaacgaaatgaacaagacaagaccctgctgttgaggaaagcacactctatggtagaagaatactgaacaagacaaaacgtgc

SEQ ID NO: 3465 - protein, 75 aa, Homo sapiens
MDLAGLLKSQFLCHLVFCYVFIASGLIINTIQLFTLLLWPINKQLFRKINCRLSYCISSPTQLLLSPILLDSNIS

SEQ ID NO: 3466 - DNA, 1112 bp, Homo sapiens
gctttttctttccagtgttggctgacttacagctcttataaactagtggcaatttctgaacccagccggctccatctcagcttctggtttctaagtccatgtgccaaaggctgccaggaaggagacgccttcctgagtcctggatctttcttccttctggaaatctttgactgtgggtagttatttatttctgaataagagcgtccacgcatcatggacctcgcgggactgctgaagtctcagttcctgtgccacctggtcttctgctacgtctttattgcctcagggctaatcatcaacaccattcagctcttcactctcctcctctggcccattaacaagcagctcttccggaagatcaactgcagactgtcctattgcatctcaagccgtaagatacttaagattctatattttcgtctccattgtggatgtgtgtatcagaattatggctcttgatatggattcactaggctttcgttgtgtgccgagctgtttttttgttttgtttttgttttaggtttgaaatggctattttgttctcaatcccccaaaattattttttgaatgaataatgccagtagctcaaaattcaacagccacagacaggtatactatgaaaagtaaatacgcattccattagtttctttagttctcctcagaaccaatcagtattaatgatttcttagttatccttacagaaatagtatacatatagctcttatacttgtaaatgcatgtgcgtctttctgtgtatatatctatatagatacatatacatacgtatttttttttaaaaaactaagtggcagtatactatattgttttcttccttgccttttttcttcagctttttattttgagataatagattcacatgaagctgtaacaaataatactgagaaattctgtacactccttggccagtttctccctatggtagcatcttgcaccactggaatagcatattccaatgagaaaattgacattgatacaatccacaaccctactcctatttctccacttttaagtacactcatttgtgtgtgtgtatgtgtccgtgtatgtttgattatgctaggttatttcatacatgactaatttgactggcc

SEQ ID NO: 3467 - protein, 81 aa, Homo sapiens [sequence omitted]

SEQ ID NO: 3468 - DNA, 3827 bp, Homo sapiens
agtgtttgtcaggttcaactccagccatggtttcccagtggaggtcgattctgacaccagcatcttccagctcaaggaggtggttgctaagcgacagggggttccggctgaccagttgcgtgtgattttcgcagggaaggagctgaggaatgactggactgtgcagcaggtagatcaatctacaacagcttttatgtgtattgcaaaggcccctgtcaaagagtgcagccgggaaaactcagggtacagtgcagcacctgcaggcaggcaacgctcaccttgacccagggtccatcttgctgggatgatgttttaattccaaaccggatgagtggtgaatgccaatccccacactgccctgggactagtgcagaatttttctttaaatgtggagcacaccccacctctgacaaggaaacatcagtagctttgcacctgatcgcaacaaatagtcggaacatcacttgcattacgtgcacagacgtcaggagccccgtcctggttttccagtgcaactcccgccacgtgatttgcttagactgtttccacttatactgtgtgacaagactcaatgatcggcagtttgttcacgaccctcaacttggctactccctgccttgtgtggctggctgtcccaactccttgattaaagagctccatcacttcaggattctgggagaagagcagtacaaccggtaccagcagtatggtgcagaggagtgtgtcctgcagatggggggcgtgttatgcccccgccctggctgtggagcggggctgctgccggagcctgaccagaggaaagtcacctgcgaagggggcaatggcctgggctgtgggtttgccttctgccgggaatgtaaagaagcgtaccatgaaggggagtgcagtgccgtatttgaagcctcaggaacaactactcaggcctacagagtcgatgaaagagccgccgagcaggctcgttgggaagcagcctccaaagaaaccatcaagaaaaccaccaagccctgtccccgctgccatgtaccagtggaaaaaaatggaggctgcatgcacatgaagtgtccgcagccccagtgcaggctcgagtggtgctggaactgtggctgcgagtggaaccgcgtctgcatgggggaccactggttcgacgtgtagccagggcggccgggcgccccatcgccacatcctgggggagcatacccagtgtctaccttcattttctaattctcttttcaaacacacacacacacgcgcgcgcgcgcacacacactcttcaagtttttttcaaagtccaactacagccaaattgcagaagaaactcctggatccctttcactatgtccatgaaaaacagcagagtaaaattacagaagaagctcctgaatccctttcagtttgtccacacaagacagcagagccatctgcgacaccaccaacaggcgttctcagcctccggatgacacaaataccagagcacagattcaagtgcaatccatgtatctgtatgggtcattctcacctgaattcgagacaggcagaatcagtagctggagagagagttctcacatttaatatcctgccttttaccttcagtaaacaccatgaagatgccattgacaaggtgtttctctgtaaaatgaactgcagtgggttctccaaactagattcatggctttaacagtaatgttcttatttaaattttcagaaagcatctattcccaaagaaccccaggcaatagtcaaaaacatttgtttatccttaagaattccatctatataaatcgcattaatgaaataccaactatgcgtaaatcaacttgtcacaaagtgagaaattatgaaagttaatttgaatgttgaatgtttgaattacagggaagaaatcaagttaatgtactttcattccctttcatgatttgcaactttagaaagaaattgtttttctgaaagtatcaccaaaaaatctatagtttgattctgagtattcattttgcaacttggagattttgctaatacatttggctccactgtaaatttaatagataaagtgcctataaaggaaacacgtttagaaatgatttcaaaatgatattcaatcttaacaaaagtgaacattattaaatcagaatctttaaagaggagcctttccagaactaccaaaatgaagacacgcccgactctctccatcagaagggtttatacccctttggcacaccctctctgtccaatctgcaagtcccagggagctctgcataccaggggttccccaggagagaccttctcttaggacagtaaactcactagaatattccttatgttgacatggattggatttcagttcaatcaaactttcagcttttttttcagccattcacaacacaatcaaaagattaacaacactgcatgcggcaaaccgcatgctcttacccacactacgcagaagagaaagtacaaccactatcttttgttctacctgtattgtctgacttctcaggaagatcgtgaacataactgagggcatgagtctcactagcacatggaggcccttttggatttagagactgtaaattattaaatcggcaacagggcttctctttttagatgtagcactgaaatccttgctggagggaagagaggggatgaactcaagttttccacatcctgggacacctgtccctcttttcctaactgcctaagataacccatttcttccaaccatctgaggacagtcccgtcgtctcagaggccctgcaccggggagagactgggctctgcagcagccacatcagcattcacagcttcatgtggcttcactgtctgaaaatctaccgactccaacatggccccacggtgacaacagacctgtgacaggaagcccaaagctcacatagaaatggtggacagatcaaagtctctatagtaagggaaaaaaagagaggtggcaggcatgagccccctgcacccagtggctcgtgtccatactgagtccagaccctgatcaaggcctgacttagtgtcactggcagtcccactaaattacacttccttacactggcccgatgcgacaaatcaggtggctcccttctgtcacgtggagcacacagtgttttccatcatccatagctttcttcctgatggtgtttgcattattgcgccttcccaatctgcatgctgcgttgggcttgcggtgcctgaacaaggtttgctcccatgagctcaggcaccctaggatcccctgttagactattaggctgtccagcatggtctcctttcccttcttggtggtggtcttttccctttccagaatagaacagtgattcttaaaataagttagagcaggccgggcgcggtggctcatgcctgtaatcccagcactttgggaggccgaggtgggtggatcacgaggtcaggagttcaagaccagcctggccaagatgatgaaaccccgtctctattaaaaatacaaaaattagctgggcgtggtggcaggcacctgtaatcccagcttcctgggaggctgaggcaggagaatcacttgaacccggggggcagaggttgcagtgagccgagatcacgccactgaactccagcctgggcaacagagtgagactctgtctcaaaaaaaaaaaaaaaacaaaaacaaaaaagcaagatcatccactacacatgaacatgaatcacagtattatttgcacaggaagggtgtaacaaaatatgaatgtatcaaaaaatagaaataaagtctttgcagaaaaagtctgtttttctctgaagtgtgttgagattatctgacaactctaagattgtacttaaattgtcaataaagcatc

SEQ ID NO: 3469 - protein, 274 aa, Homo sapiens
MSGECQSPHCPGTSAEFFFKCGAHPTSDKETSVALHLIATNSRNITCITCTDVRSPVLVFQCNSRHVICLDCFHLYCVTRLNDRQFVHDPQLGYSLPCVAGCPNSLIKELHHFRILGEEQYNRYQQYGAEECVLQMGGVLCPRPGCGAGLLPEPDQRKVTCEGGNGLGCGFAFCRECKEAYHEGECSAVFEASGTTTQAYRVDERAAEQARWEAASKETIKKTTKPCPRCHVPVEKNGGCMHMKCPQPQCRLEWCWNCGCEWNRVCMGDHWFDV

SEQ ID NO: 3470 - DNA, 3873 bp, Homo sapiens
ctgaagccggaaagggcggcggtggggggctgggggcaggaggcgtgaggagaaactacgcgttagaactacgactcccagcaggccctgggccgcgccctccgcgcgtgcgcattcctagggccgggcgcgggggcggggaggcctggaggatttaacccaggagagccgctggtgggaggcgcggctggcgccgctgcgcgcatgggcctgttcctggcccgcagccgccacctacccagtgaccatgatagtgtttgtcaggttcaactccagccatggtttcccagtggaggtcgattctgacaccagcatcttccagctcaaggaggtggttgctaagcgacagggggttccggctgaccagttgcgtgtgattttcgcagggaaggagctgaggaatgactggactgtgcaggaatttttctttaaatgtggagcacaccccacctctgacaaggaaacatcagtagctttgcacctgatcgcaacaaatagtcggaacatcacttgcattacgtgcacagacgtcaggagccccgtcctggttttccagtgcaactcccgccacgtgatttgcttagactgtttccacttatactgtgtgacaagactcaatgatcggcagtttgttcacgaccctcaacttggctactccctgccttgtgtggctggctgtcccaactccttgattaaagagctccatcacttcaggattctgggagaagagcagtacaaccggtaccagcagtatggtgcagaggagtgtgtcctgcagatggggggcgtgttatgcccccgccctggctgtggagcggggctgctgccggagcctgaccagaggaaagtcacctgcgaagggggcaatggcctgggctgtgggtttgccttctgccgggaatgtaaagaagcgtaccatgaaggggagtgcagtgccgtatttgaagcctcaggaacaactactcaggcctacagagtcgatgaaagagccgccgagcaggctcgttgggaagcagcctccaaagaaaccatcaagaaaaccaccaagccctgtccccgctgccatgtaccagtggaaaaaaatggaggctgcatgcacatgaagtgtccgcagccccagtgcaggctcgagtggtgctggaactgtggctgcgagtggaaccgcgtctgcatgggggaccactggttcgacgtgtagccagggcggccgggcgccccatcgccacatcctgggggagcatacccagtgtctaccttcattttctaattctcttttcaaacacacacacacacgcgcgcgcgcgcacacacactcttcaagtttttttcaaagtccaactacagccaaattgcagaagaaactcctggatccctttcactatgtccatgaaaaacagcagagtaaaattacagaagaagctcctgaatccctttcagtttgtccacacaagacagcagagccatctgcgacaccaccaacaggcgttctcagcctccggatgacacaaataccagagcacagattcaagtgcaatccatgtatctgtatgggtcattctcacctgaattcgagacaggcagaatcagtagctggagagagagttctcacatttaatatcctgccttttaccttcagtaaacaccatgaagatgccattgacaaggtgtttctctgtaaaatgaactgcagtgggttctccaaactagattcatggctttaacagtaatgttcttatttaaattttcagaaagcatctattcccaaagaaccccaggcaatagtcaaaaacatttgtttatccttaagaattccatctatataaatcgcattaatgaaataccaactatgcgtaaatcaacttgtcacaaagtgagaaattatgaaagttaatttgaatgttgaatgtttgaattacagggaagaaatcaagttaatgtactttcattccctttcatgatttgcaactttagaaagaaattgtttttctgaaagtatcaccaaaaaatctatagtttgattctgagtattcattttgcaacttggagattttgctaatacatttggctccactgtaaatttaatagataaagtgcctataaaggaaacacgtttagaaatgatttcaaaatgatattcaatcttaacaaaagtgaacattattaaatcagaatctttaaagaggagcctttccagaactaccaaaatgaagacacgcccgactctctccatcagaagggtttatacccctttggcacaccctctctgtccaatctgcaagtcccagggagctctgcataccaggggttccccaggagagaccttctcttaggacagtaaactcactagaatattccttatgttgacatggattggatttcagttcaatcaaactttcagcttttttttcagccattcacaacacaatcaaaagattaacaacactgcatgcggcaaaccgcatgctcttacccacactacgcagaagagaaagtacaaccactatcttttgttctacctgtattgtctgacttctcaggaagatcgtgaacataactgagggcatgagtctcactagcacatggaggcccttttggatttagagactgtaaattattaaatcggcaacagggcttctctttttagatgtagcactgaaatccttgctggagggaagagaggggatgaactcaagttttccacatcctgggacacctgtccctcttttcctaactgcctaagataacccatttcttccaaccatctgaggacagtcccgtcgtctcagaggccctgcaccggggagagactgggctctgcagcagccacatcagcattcacagcttcatgtggcttcactgtctgaaaatctaccgactccaacatggccccacggtgacaacagacctgtgacaggaagcccaaagctcacatagaaatggtggacagatcaaagtctctatagtaagggaaaaaaagagaggtggcaggcatgagccccctgcacccagtggctcgtgtccatactgagtccagaccctgatcaaggcctgacttagtgtcactggcagtcccactaaattacacttccttacactggcccgatgcgacaaatcaggtggctcccttctgtcacgtggagcacacagtgttttccatcatccatagctttcttcctgatggtgtttgcattattgcgccttcccaatctgcatgctgcgttgggcttgcggtgcctgaacaaggtttgctcccatgagctcaggcaccctaggatcccctgttagactattaggctgtccagcatggtctcctttcccttcttggtggtggtcttttccctttccagaatagaacagtgattcttaaaataagttagagcaggccgggcgcggtggctcatgcctgtaatcccagcactttgggaggccgaggtgggtggatcacgaggtcaggagttcaagaccagcctggccaagatgatgaaaccccgtctctattaaaaatacaaaaattagctgggcgtggtggcaggcacctgtaatcccagcttcctgggaggctgaggcaggagaatcacttgaacccggggggcagaggttgcagtgagccgagatcacgccactgaactccagcctgggcaacagagtgagactctgtctcaaaaaaaaaaaaaaaacaaaaacaaaaaagcaagatcatccactacacatgaacatgaatcacagtattatttgcacaggaagggtgtaacaaaatatgaatgtatcaaaaaatagaaataaagtctttgcagaaaaagtctgtttttctctgaagtgtgttgagattatctgacaactctaagattgtacttaaattgtcaataaagcatc

SEQ ID NO: 3471 - protein, 316 aa, Homo sapiens
MIVFVRFNSSHGFPVEVDSDTSIFQLKEVVAKRQGVPADQLRVIFAGKELRNDWTVQEFFFKCGAHPTSDKETSVALHLIATNSRNITCITCTDVRSPVLVFQCNSRHVICLDCFHLYCVTRLNDRQFVHDPQLGYSLPCVAGCPNSLIKELHHFRILGEEQYNRYQQYGAEECVLQMGGVLCPRPGCGAGLLPEPDQRKVTCEGGNGLGCGFAFCRECKEAYHEGECSAVFEASGTTTQAYRVDERAAEQARWEAASKETIKKTTKPCPRCHVPVEKNGGCMHMKCPQPQCRLEWCWNCGCEWNRVCMGDHWFDV

SEQ ID NO: 3472 - DNA, 4320 bp, Homo sapiens
ctgaagccggaaagggcggcggtggggggctgggggcaggaggcgtgaggagaaactacgcgttagaactacgactcccagcaggccctgggccgcgccctccgcgcgtgcgcattcctagggccgggcgcgggggcggggaggcctggaggatttaacccaggagagccgctggtgggaggcgcggctggcgccgctgcgcgcatgggcctgttcctggcccgcagccgccacctacccagtgaccatgatagtgtttgtcaggttcaactccagccatggtttcccagtggaggtcgattctgacaccagcatcttccagctcaaggaggtggttgctaagcgacagggggttccggctgaccagttgcgtgtgattttcgcagggaaggagctgaggaatgactggactgtgcagaattgtgacctggatcagcagagcattgttcacattgtgcagagaccgtggagaaaaggtcaagaaatgaatgcaactggaggcgacgaccccagaaacgcggcgggaggctgtgagcgggagccccagagcttgactcgggtggacctcagcagctcagtcctcccaggagactctgtggggctggctgtcattctgcacactgacagcaggaaggactcaccaccagctggaagtccagcaggtagatcaatctacaacagcttttatgtgtattgcaaaggcccctgtcaaagagtgcagccgggaaaactcagggtacagtgcagcacctgcaggcaggcaacgctcaccttgacccagggtccatcttgctgggatgatgttttaattccaaaccggatgagtggtgaatgccaatccccacactgccctgggactagtgcagaatttttctttaaatgtggagcacaccccacctctgacaaggaaacatcagtagctttgcacctgatcgcaacaaatagtcggaacatcacttgcattacgtgcacagacgtcaggagccccgtcctggttttccagtgcaactcccgccacgtgatttgcttagactgtttccacttatactgtgtgacaagactcaatgatcggcagtttgttcacgaccctcaacttggctactccctgccttgtgtggctggctgtcccaactccttgattaaagagctccatcacttcaggattctgggagaagagcagtacaaccggtaccagcagtatggtgcagaggagtgtgtcctgcagatggggggcgtgttatgcccccgccctggctgtggagcggggctgctgccggagcctgaccagaggaaagtcacctgcgaagggggcaatggcctgggctgtgggtttgccttctgccgggaatgtaaagaagcgtaccatgaaggggagtgcagtgccgtatttgaagcctcaggaacaactactcaggcctacagagtcgatgaaagagccgccgagcaggctcgttgggaagcagcctccaaagaaaccatcaagaaaaccaccaagccctgtccccgctgccatgtaccagtggaaaaaaatggaggctgcatgcacatgaagtgtccgcagccccagtgcaggctcgagtggtgctggaactgtggctgcgagtggaaccgcgtctgcatgggggaccactggttcgacgtgtagccagggcggccgggcgccccatcgccacatcctgggggagcatacccagtgtctaccttcattttctaattctcttttcaaacacacacacacacgcgcgcgcgcgcacacacactcttcaagtttttttcaaagtccaactacagccaaattgcagaagaaactcctggatccctttcactatgtccatgaaaaacagcagagtaaaattacagaagaagctcctgaatccctttcagtttgtccacacaagacagcagagccatctgcgacaccaccaacaggcgttctcagcctccggatgacacaaataccagagcacagattcaagtgcaatccatgtatctgtatgggtcattctcacctgaattcgagacaggcagaatcagtagctggagagagagttctcacatttaatatcctgccttttaccttcagtaaacaccatgaagatgccattgacaaggtgtttctctgtaaaatgaactgcagtgggttctccaaactagattcatggctttaacagtaatgttcttatttaaattttcagaaagcatctattcccaaagaaccccaggcaatagtcaaaaacatttgtttatccttaagaattccatctatataaatcgcattaatgaaataccaactatgcgtaaatcaacttgtcacaaagtgagaaattatgaaagttaatttgaatgttgaatgtttgaattacagggaagaaatcaagttaatgtactttcattccctttcatgatttgcaactttagaaagaaattgtttttctgaaagtatcaccaaaaaatctatagtttgattctgagtattcattttgcaacttggagattttgctaatacatttggctccactgtaaatttaatagataaagtgcctataaaggaaacacgtttagaaatgatttcaaaatgatattcaatcttaacaaaagtgaacattattaaatcagaatctttaaagaggagcctttccagaactaccaaaatgaagacacgcccgactctctccatcagaagggtttatacccctttggcacaccctctctgtccaatctgcaagtcccagggagctctgcataccaggggttccccaggagagaccttctcttaggacagtaaactcactagaatattccttatgttgacatggattggatttcagttcaatcaaactttcagcttttttttcagccattcacaacacaatcaaaagattaacaacactgcatgcggcaaaccgcatgctcttacccacactacgcagaagagaaagtacaaccactatcttttgttctacctgtattgtctgacttctcaggaagatcgtgaacataactgagggcatgagtctcactagcacatggaggcccttttggatttagagactgtaaattattaaatcggcaacagggcttctctttttagatgtagcactgaaatccttgctggagggaagagaggggatgaactcaagttttccacatcctgggacacctgtccctcttttcctaactgcctaagataacccatttcttccaaccatctgaggacagtcccgtcgtctcagaggccctgcaccggggagagactgggctctgcagcagccacatcagcattcacagcttcatgtggcttcactgtctgaaaatctaccgactccaacatggccccacggtgacaacagacctgtgacaggaagcccaaagctcacatagaaatggtggacagatcaaagtctctatagtaagggaaaaaaagagaggtggcaggcatgagccccctgcacccagtggctcgtgtccatactgagtccagaccctgatcaaggcctgacttagtgtcactggcagtcccactaaattacacttccttacactggcccgatgcgacaaatcaggtggctcccttctgtcacgtggagcacacagtgttttccatcatccatagctttcttcctgatggtgtttgcattattgcgccttcccaatctgcatgctgcgttgggcttgcggtgcctgaacaaggtttgctcccatgagctcaggcaccctaggatcccctgttagactattaggctgtccagcatggtctcctttcccttcttggtggtggtcttttccctttccagaatagaacagtgattcttaaaataagttagagcaggccgggcgcggtggctcatgcctgtaatcccagcactttgggaggccgaggtgggtggatcacgaggtcaggagttcaagaccagcctggccaagatgatgaaaccccgtctctattaaaaatacaaaaattagctgggcgtggtggcaggcacctgtaatcccagcttcctgggaggctgaggcaggagaatcacttgaacccggggggcagaggttgcagtgagccgagatcacgccactgaactccagcctgggcaacagagtgagactctgtctcaaaaaaaaaaaaaaaacaaaaacaaaaaagcaagatcatccactacacatgaacatgaatcacagtattatttgcacaggaagggtgtaacaaaatatgaatgtatcaaaaaatagaaataaagtctttgcagaaaaagtctgtttttctctgaagtgtgttgagattatctgacaactctaagattgtacttaaattgtcaataaagcatc

SEQ ID NO: 3473 - protein, 465 aa, Homo sapiens
MIVFVRFNSSHGFPVEVDSDTSIFQLKEVVAKRQGVPADQLRVIFAGKELRNDWTVQNCDLDQQSIVHIVQRPWRKGQEMNATGGDDPRNAAGGCEREPQSLTRVDLSSSVLPGDSVGLAVILHTDSRKDSPPAGSPAGRSIYNSFYVYCKGPCQRVQPGKLRVQCSTCRQATLTLTQGPSCWDDVLIPNRMSGECQSPHCPGTSAEFFFKCGAHPTSDKETSVALHLIATNSRNITCITCTDVRSPVLVFQCNSRHVICLDCFHLYCVTRLNDRQFVHDPQLGYSLPCVAGCPNSLIKELHHFRILGEEQYNRYQQYGAEECVLQMGGVLCPRPGCGAGLLPEPDQRKVTCEGGNGLGCGFAFCRECKEAYHEGECSAVFEASGTTTQAYRVDERAAEQARWEAASKETIKKTTKPCPRCHVPVEKNGGCMHMKCPQPQCRLEWCWNCGCEWNRVCMGDHWFDV

SEQ ID NO: 3474 - DNA, 4236 bp, Homo sapiens
ctgaagccggaaagggcggcggtggggggctgggggcaggaggcgtgaggagaaactacgcgttagaactacgactcccagcaggccctgggccgcgccctccgcgcgtgcgcattcctagggccgggcgcgggggcggggaggcctggaggatttaacccaggagagccgctggtgggaggcgcggctggcgccgctgcgcgcatgggcctgttcctggcccgcagccgccacctacccagtgaccatgatagtgtttgtcaggttcaactccagccatggtttcccagtggaggtcgattctgacaccagcatcttccagctcaaggaggtggttgctaagcgacagggggttccggctgaccagttgcgtgtgattttcgcagggaaggagctgaggaatgactggactgtgcagaattgtgacctggatcagcagagcattgttcacattgtgcagagaccgtggagaaaaggtcaagaaatgaatgcaactggaggcgacgaccccagaaacgcggcgggaggctgtgagcgggagccccagagcttgactcgggtggacctcagcagctcagtcctcccaggagactctgtggggctggctgtcattctgcacactgacagcaggaaggactcaccaccagctggaagtccagcaggtagatcaatctacaacagcttttatgtgtattgcaaaggcccctgtcaaagagtgcagccgggaaaactcagggtacagtgcagcacctgcaggcaggcaacgctcaccttgacccaggaatttttctttaaatgtggagcacaccccacctctgacaaggaaacatcagtagctttgcacctgatcgcaacaaatagtcggaacatcacttgcattacgtgcacagacgtcaggagccccgtcctggttttccagtgcaactcccgccacgtgatttgcttagactgtttccacttatactgtgtgacaagactcaatgatcggcagtttgttcacgaccctcaacttggctactccctgccttgtgtggctggctgtcccaactccttgattaaagagctccatcacttcaggattctgggagaagagcagtacaaccggtaccagcagtatggtgcagaggagtgtgtcctgcagatggggggcgtgttatgcccccgccctggctgtggagcggggctgctgccggagcctgaccagaggaaagtcacctgcgaagggggcaatggcctgggctgtgggtttgccttctgccgggaatgtaaagaagcgtaccatgaaggggagtgcagtgccgtatttgaagcctcaggaacaactactcaggcctacagagtcgatgaaagagccgccgagcaggctcgttgggaagcagcctccaaagaaaccatcaagaaaaccaccaagccctgtccccgctgccatgtaccagtggaaaaaaatggaggctgcatgcacatgaagtgtccgcagccccagtgcaggctcgagtggtgctggaactgtggctgcgagtggaaccgcgtctgcatgggggaccactggttcgacgtgtagccagggcggccgggcgccccatcgccacatcctgggggagcatacccagtgtctaccttcattttctaattctcttttcaaacacacacacacacgcgcgcgcgcgcacacacactcttcaagtttttttcaaagtccaactacagccaaattgcagaagaaactcctggatccctttcactatgtccatgaaaaacagcagagtaaaattacagaagaagctcctgaatccctttcagtttgtccacacaagacagcagagccatctgcgacaccaccaacaggcgttctcagcctccggatgacacaaataccagagcacagattcaagtgcaatccatgtatctgtatgggtcattctcacctgaattcgagacaggcagaatcagtagctggagagagagttctcacatttaatatcctgccttttaccttcagtaaacaccatgaagatgccattgacaaggtgtttctctgtaaaatgaactgcagtgggttctccaaactagattcatggctttaacagtaatgttcttatttaaattttcagaaagcatctattcccaaagaaccccaggcaatagtcaaaaacatttgtttatccttaagaattccatctatataaatcgcattaatgaaataccaactatgcgtaaatcaacttgtcacaaagtgagaaattatgaaagttaatttgaatgttgaatgtttgaattacagggaagaaatcaagttaatgtactttcattccctttcatgatttgcaactttagaaagaaattgtttttctgaaagtatcaccaaaaaatctatagtttgattctgagtattcattttgcaacttggagattttgctaatacatttggctccactgtaaatttaatagataaagtgcctataaaggaaacacgtttagaaatgatttcaaaatgatattcaatcttaacaaaagtgaacattattaaatcagaatctttaaagaggagcctttccagaactaccaaaatgaagacacgcccgactctctccatcagaagggtttatacccctttggcacaccctctctgtccaatctgcaagtcccagggagctctgcataccaggggttccccaggagagaccttctcttaggacagtaaactcactagaatattccttatgttgacatggattggatttcagttcaatcaaactttcagcttttttttcagccattcacaacacaatcaaaagattaacaacactgcatgcggcaaaccgcatgctcttacccacactacgcagaagagaaagtacaaccactatcttttgttctacctgtattgtctgacttctcaggaagatcgtgaacataactgagggcatgagtctcactagcacatggaggcccttttggatttagagactgtaaattattaaatcggcaacagggcttctctttttagatgtagcactgaaatccttgctggagggaagagaggggatgaactcaagttttccacatcctgggacacctgtccctcttttcctaactgcctaagataacccatttcttccaaccatctgaggacagtcccgtcgtctcagaggccctgcaccggggagagactgggctctgcagcagccacatcagcattcacagcttcatgtggcttcactgtctgaaaatctaccgactccaacatggccccacggtgacaacagacctgtgacaggaagcccaaagctcacatagaaatggtggacagatcaaagtctctatagtaagggaaaaaaagagaggtggcaggcatgagccccctgcacccagtggctcgtgtccatactgagtccagaccctgatcaaggcctgacttagtgtcactggcagtcccactaaattacacttccttacactggcccgatgcgacaaatcaggtggctcccttctgtcacgtggagcacacagtgttttccatcatccatagctttcttcctgatggtgtttgcattattgcgccttcccaatctgcatgctgcgttgggcttgcggtgcctgaacaaggtttgctcccatgagctcaggcaccctaggatcccctgttagactattaggctgtccagcatggtctcctttcccttcttggtggtggtcttttccctttccagaatagaacagtgattcttaaaataagttagagcaggccgggcgcggtggctcatgcctgtaatcccagcactttgggaggccgaggtgggtggatcacgaggtcaggagttcaagaccagcctggccaagatgatgaaaccccgtctctattaaaaatacaaaaattagctgggcgtggtggcaggcacctgtaatcccagcttcctgggaggctgaggcaggagaatcacttgaacccggggggcagaggttgcagtgagccgagatcacgccactgaactccagcctgggcaacagagtgagactctgtctcaaaaaaaaaaaaaaaacaaaaacaaaaaagcaagatcatccactacacatgaacatgaatcacagtattatttgcacaggaagggtgtaacaaaatatgaatgtatcaaaaaatagaaataaagtctttgcagaaaaagtctgtttttctctgaagtgtgttgagattatctgacaactctaagattgtacttaaattgtcaataaagcatc

SEQ ID NO: 3475 - protein, 437 aa, Homo sapiens
MIVFVRFNSSHGFPVEVDSDTSIFQLKEVVAKRQGVPADQLRVIFAGKELRNDWTVQNCDLDQQSIVHIVQRPWRKGQEMNATGGDDPRNAAGGCEREPQSLTRVDLSSSVLPGDSVGLAVILHTDSRKDSPPAGSPAGRSIYNSFYVYCKGPCQRVQPGKLRVQCSTCRQATLTLTQEFFFKCGAHPTSDKETSVALHLIATNSRNITCITCTDVRSPVLVFQCNSRHVICLDCFHLYCVTRLNDRQFVHDPQLGYSLPCVAGCPNSLIKELHHFRILGEEQYNRYQQYGAEECVLQMGGVLCPRPGCGAGLLPEPDQRKVTCEGGNGLGCGFAFCRECKEAYHEGECSAVFEASGTTTQAYRVDERAAEQARWEAASKETIKKTTKPCPRCHVPVEKNGGCMHMKCPQPQCRLEWCWNCGCEWNRVCMGDHWFDV

SEQ ID NO: 3476 - DNA, 1713 bp, Homo sapiens
ctgaagccggaaagggcggcggtggggggctgggggcaggaggcgtgaggagaaactacgcgttagaactacgactcccagcaggccctgggccgcgccctccgcgcgtgcgcattcctagggccgggcgcgggggcggggaggcctggaggatttaacccaggagagccgctggtgggaggcgcggctggcgccgctgcgcgcatgggcctgttcctggcccgcagccgccacctacccagtgaccatgatagtgtttgtcaggttcaactccagccatggtttcccagtggaggtcgattctgacaccagcatcttccagctcaaggaggtggttgctaagcgacagggggttccggctgaccagttgcgtgtgattttcgcagggaaggagctgaggaatgactggactgtgcagaattgtgacctggatcagcagagcattgttcacattgtgcagagaccgtggagaaaaggtcaagaaatgaatgcaactggaggcgacgaccccagaaacgcggcgggaggctgtgagcgggagccccagagcttgactcgggtggacctcagcagctcagtcctcccaggagactctgtggggctggctgtcattctgcacactgacagcaggaaggactcaccaccagctggaagtccagcaggtagatcaatctacaacagcttttatgtgtattgcaaaggcccctgtcaaagagtgcagccgggaaaactcagggtacagtgcagcacctgcaggcaggcaacgctcaccttgacccagggtccatcttgctgggatgatgttttaattccaaaccggatgagtggtgaatgccaatccccacactgccctgggactagtgcagaatttttctttaaatgtggagcacaccccacctctgacaaggaaacatcagtagctttgcacctgatcgcaacaaatagtcggaacatcacttgcattacgtgcacagacgtcaggagccccgtcctggttttccagtgcaactcccgccacgtgatttgcttagactgtttccacttatactgtgtgacaagactcaatgatcggcagtttgttcacgaccctcaacttggctactccctgccttgtgtgggaactggagacacagtggtgcttagaggagctctggggggattcaggagaggagtcgctggctgtcccaactccttgattaaagagctccatcacttcaggattctgggagaagagcagtacaaccggtaccagcagtatggtgcagaggagtgtgtcctgcagatggggggcgtgttatgcccccgccctggctgtggagcggggctgctgccggagcctgaccagaggaaagtcacctgcgaagggggcaatggcctgggctgtgggtatggacaacgaagaacaaaataagctgcctcagggagaagtgagtgcctcattcaatacatcgttcaaggaaaagtcattggtagcaaagctatagaagaattacagagttccagatgtggaaaaagccctagacgtcattaactccagtgattatcaggatgtggttcacagatttattgtaagatgcctgtgaattcacccgtgcttaatttttttttccctcaattatcaagatagaaaaagtacaactcttaccatgtgggtatgcaagaaatgttagctgttacaaaaaaaatcgcgtataaaaaagttgaaaaccaaat

SEQ ID NO: 3477 - protein, 387 aa, Homo sapiens
MIVFVRFNSSHGFPVEVDSDTSIFQLKEVVAKRQGVPADQLRVIFAGKELRNDWTVQNCDLDQQSIVHIVQRPWRKGQEMNATGGDDPRNAAGGCEREPQSLTRVDLSSSVLPGDSVGLAVILHTDSRKDSPPAGSPAGRSIYNSFYVYCKGPCQRVQPGKLRVQCSTCRQATLTLTQGPSCWDDVLIPNRMSGECQSPHCPGTSAEFFFKCGAHPTSDKETSVALHLIATNSRNITCITCTDVRSPVLVFQCNSRHVICLDCFHLYCVTRLNDRQFVHDPQLGYSLPCVGTGDTVVLRGALGGFRRGVAGCPNSLIKELHHFRILGEEQYNRYQQYGAEECVLQMGGVLCPRPGCGAGLLPEPDQRKVTCEGGNGLGCGYGQRRTK

SEQ ID NO: 3478 - DNA, 382 bp, Homo sapiens
ctgaagccggaaagggcggcggtggggggctgggggcaggaggcgtgaggagaaactacgcgttagaactacgactcccagcaggccctgggccgcgccctccgcgcgtgcgcattcctagggccgggcgcgggggcggggaggcctggaggatttaacccaggagagccgctggtgggaggcgcggctggcgccgctgcgcgcatgggcctgttcctggcccgcagccgccacctacccagtgaccatgatagtccagcaggtagatcaatctacaacagcttttatgtgtattgcaaaggcccctgtcaaagagtgcagccgggaaaactcagggtacagtgcagcacctgcaggcaggcaacgctcaccttgacccagg

SEQ ID NO: 3479 - protein, 58 aa, Homo sapiens
MGLFLARSRHLPSDHDSPAGRSIYNSFYVYCKGPCQRVQPGKLRVQCSTCRQATLTLT

SEQ ID NO: 3480 - DNA, 647 bp, Homo sapiens
aacaaaacactgaccttggtccacagacaacacccacgtccacgtggtgggtgggactggctccgtcagaggatgggaagatgagaagtgcttgtcgcaggcctggagatggggaccacccaggcatgcaggggatgctgcctctcctccatccaacaacaagcctgcgtgtgcccagccccctctggtacacgcattgctccccatcctcggcattgatcaattgaaaataagaccttggaagaaccccttgcaaagctgacattgtacgagccaaggcagtggccccggagagggtcagcgaggggcctccactgtctgagtccgctcctggcaacgcctgctctctgcactcagaggcccggtcccggcagctgccacgttgctcagaagttctggcagggggagcctgaaacccctgtctgctggcgacactcccggagcagcaggaaatctctacattttattttttttcttaacagacaaaagtatttgactccagaatgatttccaggaattacagtatgagaacttagtctttgagatttttattttcttcttaaaaaaataaaaatgaaatcaaagcagaagacactggttgagcagacagcacactagcacattccacttcgcaacaaaacctgcgt

SEQ ID NO: 3481 - protein, 48 aa, Homo sapiens
MRSACRRPGDGDHPGMQGMLPLLHPTTSLRVPSPLWYTHCSPSSALIN

SEQ ID NO: 3482 - DNA, 568 bp, Homo sapiens
gtccacagacaacacccacgtccacgtggtgggtgggactggctccgtcagaggatgggaagatgagaagtgcttgtcgcaggcctggagatggggaccacccaggcatgcaggggatgctgcctctcctccatccaacaacaagcctgcgtgtgcccagccccctctggtacacgcattgctccccatcctcggcattgatcaattgaaaataagaccttggaagaaccccttgcaaagctgacattgtacgagccaaggcagtggccccggagagggtcagcgaggggcctccactgtctgagtccgctcctggcaacgcctgctctctgcactcagaggcccggtcccggcagctgccacgttgctcagaagttctggcagggggagcctgaaacccctgtctgctggcgacactcccggagcagcaggaaatctctacattttattttttttcttaacagacaaaagtatttgactccagaatgatttccaggaattacagtatgagaacttagtctttgagatttttattttcttcttaaaaaaataaaaatgaaatcaaagc

SEQ ID NO: 3483 - protein, 48 aa, Homo sapiens; identical to SEQ ID NO: 3481

SEQ ID NO: 3484 - DNA, 603 bp, Homo sapiens
cctggccgtggggtcagctgcacaggccaggagctcgagggtggtggctggcagaaagtgcagtccaaagtactctgttttgttttgattgtgttttaaaatgggacaaataacagcatgtgtgtttgctgatggggagaatccaggagaaaaacagtgaagttgaggtgagcctcacagggtcagggggaagacaggggatcccgaagataacgtctgctacgaactcaattgcatccgccccgggccctaagttgaagccctaatccccacgttgactgcatttggagaaggaccttcagcacatgatggagggaccgagatgcccaaatcctggccctcctgctggactttcattttaaagaacaataaaattaatgttaacttctagcagcttccaagctctgtggccccggagagggtcagcgaggggcctccactgtctgagtccgctcctggcaacgcctgctctctgcactcagaggcccggtcccggcagctgccacgttgctcagaagttctggcagggggagcctgaaacccctgtctgctggcgacactcccggagcagcaggaaatctctacattttattttttttctta

SEQ ID NO: 3485 - protein, 74 aa, Homo sapiens
MLTSSSFQALWPRRGSARGLHCLSPLLATPALCTQRPGPGSCHVAQKFWQGEPETPVCWRHSRSSRKSLHFIFF

SEQ ID NO: 3486 - DNA, 544 bp, Homo sapiens
aagaagtgcctttcacctctcatcatgattctgtggcctccccagccatgtggaacttttttctcttgctgctaccatgtaagaagtgcctttcacctcgtgccatgattatgagacttccccagccatgtggaactgttaagtccaattaaacatctttttcttcttagtcccaggttgttctcattcgtggctggatcacaccagcaagaaggattttaaaggacaactccttggggccgtccaacactgaaaccgcctgaccgctgctgtctttgtgcttgcagaaaatcacggtgggcacaaaattttggacacgatttcgagagcgtgagagctactgttcacgaatccagggccagcctcgtgtctgtcttcctttaaagcacctggcttggtacctaaaatgttccttttttttttttttttgaaattcaataacttcagaacaggcgttgatgtagacagatctccatctttttggttttttgagtgagtttttgctctgtaggctgaattctttggaatttagttctgaaatcac

SEQ ID NO: 3487 - protein, 34 aa, Homo sapiens
MWNFFLLLLPCKKCLSPRAMIMRLPQPCGTVKSN

SEQ ID NO: 3488 - DNA, 683 bp, Homo sapiens
gtctagggtatatttttatcagcaacatgaaaacagactaatacagtaaattggaaccagcagagtggggcgttgctgaaaagatactcgaaaatgtggcaactcaacactctttatcaagagcaatctgtgaattttgaagaaagaacagacatcagaaaaaggaaatctccatctaaagataaattcacctaaaattgcctagaacatgatgaaaactcatgctttgctccctggctataagcatttctcttggggtggttgcacattttactttctggcttcccaccgctaggatgcatgccacactgaacttaaattccgtgactaactgccatgcacagatgtcctggagacgaatacacaccagaaaatatgccaagtatcaaattcacacaaaacattatagaactagcaaatatttgctgcttttggctgtgttggaaattatcttctgtgagataaatcttttggctaaaatatgatttttaaagattctcaaatgttcgagtcttcatttctgcattaattaaattaagatggagccagcgtctctgagaaagctcacaagctcttaactcacgaggttgctccgaagtatctcactctgtttttactcatcctcctgcgtggcaaggaagagaaagagccaataaataaatgaaataaacgaacagtccttc

SEQ ID NO: 3489 - protein, 33 aa, Homo sapiens [sequence omitted]

SEQ ID NO: 3490 - DNA, 1018 bp, Homo sapiens
gggacgccccgacccaagccctgcagtccgcgcgcgtcaggggtgtgcgctggaggccggaaagtcgaatatcacttcccatcctgcatttgatgtgctttggggttgaaaaagcccttatgtggtaaaaaaaaaaaaaaaaaaaaagtcagaaaagtggcaaaagtcttcaacggcctgaaaaaggccgagacaggaactgagaagctggcagtaggtcctgctactgctgcaggggcggcgggcgccctgggtgggccacgaggcagggacagccgaggctccgcgctcaccccacccgcaaggggccaagcgcagactcaggggagccagaggggccggaccgctgagcaagggctggggaaggatcccacgcttggatacttgggagtgaagatgtgttatttcacccaccgactcgttccacacgaccaaggcctgtgcctgccctgagggcgagttggttgagccttgtacagacaactctcagagcgtgggcctgggccgaacctttccctgtgagcagcagcatcagcgtctagaacgacggccctcccggtccacggtggaaggtgcggagctcccgtggtgtgctggcagcgattcgcagaagggagatggagggccacagggcaggtgctcgcacggagtcatcgaggtccagggacaccttcctcccaggagtgtgtgtacagtgatcacttgctgccataacacagtcacagatctacgtgtgttctctgactctcagctggggctccatcggggcctgctctgggctcacctgcgtgaccactgggctcagcttcctcgtctgagaagcatcaggactggccttcccacccccgcgttcccagggcttccacactcctttctagccatgagtcagtcctcagtggatgaccagtggcctggggtggccctctgattctctcacctgtactcagggggctgaacctcactcttctctgccaaaaccaaccaatgaataaataaacaaacaagcatggaattccta

SEQ ID NO: 3491 - protein, 30 aa, Homo sapiens
MTSGLGWPSDSLTCTQGAEPHSSLPKPTNE

SEQ ID NO: 3492 - DNA, 860 bp, Homo sapiens
catatagaataatgaggagtttatgatggaaccttaaatatataatgttgccagcgattttagttcaatatttgttactgttatctatctgctgtatatggaattcttttaattcaaacgctgaaaagaatcagcatttagtcttgccaggcacacccaataatcagtcatgtgtaatatgcacaagtttgtttttgtttttgttttttttgttggttggtttgtttttttgctttaagttgcatgatctttctgcaggaaatagtcactcatcccactccacataaggggtttagtaagagaagtctgtctgtctgatgatggatagggggcaaatctttttcccctttctgttaatagtcatcacatttctatgccaaacaggaacaatccataactttagtcttaatgtacacattgcattttgataaaattaattttgttgtttcctttgaggttgatcgttgtgttgttgttttgctgcactttttacttttttgcgtgtggagctgtattcccgagaccaacgaagcgttgggatacttcattaaatgtagcgactgtcaacagcgtgcaggttttctgtttctgtgttgtggggtcaaccgtacaatggtgtgggagtgacgatgatgtgagtatttagaatgtaccatattttttgtaaattatttatgtttttctaaacaaatttatcgtataggttgatgaaacgtcatgtgttttgccaaagactgtaaatatttatttatgtgttcacatggtcaaaatttcaccactgaaaccctgcacttagctagaacctcatttttaaagattaacaacaggaaataaattgtaaaaaaggttttctatacatg

SEQ ID NO: 3493 - protein, 80 aa, Homo sapiens
MLPAILVQYLLLLSICCIWNSFNSNAEKNQHLVLPGTPNNQSCVICTSLFLFLFFLLVGLFFCFKLHDLSAGNSHSSHST

SEQ ID NO: 3494 - DNA, 1368 bp, Homo sapiens
aatactgtgcataagccattatgataaattaagcatgaaaaatattgctgaactacttttggtgcttaaagttgtcactattcttgaattagagttgctctacaatgacacacaaatcccattaaataaattataaacaagggtcaattcaaatttgaagtaatgttttagtaaggagagattagaagacaacaggcatagcaaatgacataagctaccgattaactaatcggaacatgtaaaacagttacaaaaataaacgaactctcctcttgtcctacaatgaaagccctcatgtgcagtagagatgcagtttcatcaaagaacaaacatccttgcaaatgggtgtgacgcggttccagatgtggatttggcaaaacctcatttaagtaaaaggttagcagagcaaagtgcggtgctttagctgctgcttgtgccgctgtggcgtcggggaggctcctgcctgagcttccttccccagctttgctgcctgagaggaaccagagcagacgcacaggccggaaaaggcgcatctaacgcgtatctaggctttggtaactgcggacaagttgcttttacctgatttgatgatacatttcattaaggttccagttataaatattttgttaatatttattaagtgactatagaatgcaactccatttaccagtaacttattttaaatatgcctagtaacacatatgtagtataatttctagaaacaaacatctaataagtatataatcctgtgaaaatatgaggcttgataatattaggttgtcacgatgaagcatgctagaagctgtaacagaatacatagagaataatgaggagtttatgatggaaccttaaatatataatgttgccagcgattttagttcaatatttgttactgttatctatctgctgtatatggaattcttttaattcaaacgctgaaaagaatcagcatttagtcttgccaggcacacccaataatcagtcatgtgtaatatgcacaagtttgtttttgtttttgttttttttgttggttggtttgtttttttgctttaagttgcatgatctttctgcaggaaatagtcactcatcccactccacataaggggtttagtaagagaagtctgtctgtctgatgatggatagggggcaaatctttttcccctttctgttaatagtcatcacatttctatgccaaacaggaacaatccataactttagtcttaatgtacacattgcattttgataaaattaattttgttgtttcctttgaggttgatcgttgtgttgttgttttgctgcattagctagaacctcatttttaaagattaacaacaggaaataaattgtaaaaaaggttttctatacatg

SEQ ID NO: 3495 - protein, 80 aa, Homo sapiens; identical to SEQ ID NO: 3493

SEQ ID NO: 3496 - DNA, 5880 bp, Homo sapiens
aaaagtgagtccctgccttccctctctccgtctggctcctcccaggcctgtctggcaggggccggggtgcaggaggaggagacggcatccagtacagaggggctggacttggacccctgcagcagccctgcacaggagaagcggcatataaagccgcgctgcccgggagccgctcggccacgtccaccggagcatcctgcactgcagggccggtctctcgctccagcagagcctgcgcctttctgactcggtccggaacactgaaaccagtcatcactgcatctttttggcaaaccaggagctcagctgcaggaggcaggatggtctggaggctggtcctgctggctctgtgggtgtggcccagcacgcaagctggtcaccaggacaaagacacgaccttcgaccttttcagtatcagcaacatcaaccgcaagaccattggcgccaagcagttccgcgggcccgaccccggcgtgccggcttaccgcttcgtgcgctttgactacatcccaccggtgaacgcagatgacctcagcaagatcaccaagatcatgcggcagaaggagggcttcttcctcacggcccagctcaagcaggacggcaagtccaggggcacgctgttggctctggagggccccggtctctcccagaggcagttcgagatcgtctccaacggccccgcggacacgctggatctcacctactggattgacggcacccggcatgtggtctccctggaggacgtcggcctggctgactcgcagtggaagaacgtcaccgtgcaggtggctggcgagacctacagcttgcacgtgggctgcgacctcatagacagcttcgctctggacgagcccttctacgagcacctgcaggcggaaaagagccggatgtacgtggccaaaggctctgccagagagagtcacttcaggggtttgcttcagaacgtccacctagtgtttgaaaactctgtggaagatattctaagcaagaagggttgccagcaaggccagggagctgagatcaacgccatcagtgagaacacagagacgctgcgcctgggtccgcatgtcaccaccgagtacgtgggccccagctcggagaggaggcccgaggtgtgcgaacgctcgtgcgaggagctgggaaacatggtccaggagctctcggggctccacgtcctcgtgaaccagctcagcgagaacctcaagagagtgtcgaatgataaccagtttctctgggagctcattggtggccctcctaagacaaggaacatgtcagcttgctggcaggatggccggttctttgcggaaaatgaaacgtgggtggtggacagctgcaccacgtgtacctgcaagaaatttaaaaccatttgccaccaaatcacctgcccgcctgcaacctgcgccagtccatcctttgtggaaggcgaatgctgcccttcctgcctccactcggtggacggtgaggagggctggtctccgtgggcagagtggacccagtgctccgtgacgtgtggctctgggacccagcagagaggccggtcctgtgacgtcaccagcaacacctgcttggggccctccatccagacacgggcttgcagtctgagcaagtgtgacacccgcatccggcaggacggcggctggagccactggtcaccttggtcttcatgctctgtgacctgtggagttggcaatatcacacgcatccgtctctgcaactccccagtgccccagatggggggcaagaattgcaaagggagtggccgggagaccaaagcctgccagggcgccccatgcccaatcgatggccgctggagcccctggtccccgtggtcggcctgcactgtcacctgtgccggtgggatccgggagcgcacccgggtctgcaacagccctgagcctcagtacggagggaaggcctgcgtgggggatgtgcaggagcgtcagatgtgcaacaagaggagctgccccgtggatggctgtttatccaacccctgcttcccgggagcccagtgcagcagcttccccgatgggtcctggtcatgcggctcctgccctgtgggcttcttgggcaatggcacccactgtgaggacctggacgagtgtgccctggtccccgacatctgcttctccaccagcaaggtgcctcgctgtgtcaacactcagcctggcttccactgcctgccctgcccgccccgatacagagggaaccagcccgtcggggtcggcctggaagcagccaagacggaaaagcaagtgtgtgagcccgaaaacccatgcaaggacaagacacacaactgccacaagcacgcggagtgcatctacctgggccacttcagcgaccccatgtacaagtgcgagtgccagacaggctacgcgggcgacgggctcatctgcggggaggactcggacctggacggctggcccaacctcaatctggtctgcgccaccaacgccacctaccactgcatcaaggataactgcccccatctgccaaattctgggcaggaagactttgacaaggacgggattggcgatgcctgtgatgatgacgatgacaatgacggtgtgaccgatgagaaggacaactgccagctcctcttcaatccccgccaggctgactatgacaaggatgaggttggggaccgctgtgacaactgcccttacgtgcacaaccctgcccagatcgacacagacaacaatggagagggtgacgcctgctccgtggacattgatggggacgatgtcttcaatgaacgagacaattgtccctacgtctacaacactgaccagagggacacggatggtgacggtgtgggggatcactgtgacaactgccccctggtgcacaaccctgaccagaccgacgtggacaatgaccttgttggggaccagtgtgacaacaacgaggacatagatgacgacggccaccagaacaaccaggacaactgcccctacatctccaacgccaaccaggctgaccatgacagagacggccagggcgacgcctgtgaccctgatgatgacaacgatggcgtccccgatgacagggacaactgccggcttgtgttcaacccagaccaggaggacttggacggtgatggacggggtgatatttgtaaagatgattttgacaatgacaacatcccagatattgatgatgtgtgtcctgaaaacaatgccatcagtgagacagacttcaggaacttccagatggtccccttggatcccaaagggaccacccaaattgatcccaactgggtcattcgccatcaaggcaaggagctggttcagacagccaactcggaccccggcatcgctgtaggttttgacgagtttgggtctgtggacttcagtggcacattctacgtaaacactgaccgggacgacgactatgccggcttcgtctttggttaccagtcaagcagccgcttctatgtggtgatgtggaagcaggtgacgcagacctactgggaggaccagcccacgcgggcctatggctactccggcgtgtccctcaaggtggtgaactccaccacggggacgggcgagcacctgaggaacgcgctgtggcacacggggaacacgccggggcaggtgcgaaccttatggcacgaccccaggaacattggctggaaggactacacggcctataggtggcacctgactcacaggcccaagactggctacatcagagtcttagtgcatgaaggaaaacaggtcatggcagactcaggacctatctatgaccaaacctacgctggcgggcggctgggtctatttgtcttctctcaagaaatggtctatttctcagacctcaagtacgaatgcagagatatttaaacaagatttgctgcatttccggcaatgccctgtgcatgccatggtccctagacacctcagttcattgtggtccttgtggcttctctctctagcagcacctcctgtcccttgaccttaactctgatggttcttcacctcctgccagcaaccccaaacccaagtgccttcagaggataaatatcaatggaactcagagatgaacatctaacccactagaggaaaccagtttggtgatatatgagactttatgtggagtgaaaattgggcatgccattacattgctttttcttgtttgtttaaaaagaatgacgtttacatataaaatgtaattacttattgtatttatgtgtatatggagttgaagggaatactgtgcataagccattatgataaattaagcatgaaaaatattgctgaactacttttggtgcttaaagttgtcactattcttgaattagagttgctctacaatgacacacaaatcccattaaataaattataaacaagggtcaattcaaatttgaagtaatgttttagtaaggagagattagaagacaacaggcatagcaaatgacataagctaccgattaactaatcggaacatgtaaaacagttacaaaaataaacgaactctcctcttgtcctacaatgaaagccctcatgtgcagtagagatgcagtttcatcaaagaacaaacatccttgcaaatgggtgtgacgcggttccagatgtggatttggcaaaacctcatttaagtaaaaggttagcagagcaaagtgcggtgctttagctgctgcttgtgccgctgtggcgtcggggaggctcctgcctgagcttccttccccagctttgctgcctgagaggaaccagagcagacgcacaggccggaaaaggcgcatctaacgcgtatctaggctttggtaactgcggacaagttgcttttacctgatttgatgatacatttcattaaggttccagttataaatattttgttaatatttattaagtgactatagaatgcaactccatttaccagtaacttattttaaatatgcctagtaacacatatgtagtataatttctagaaacaaacatctaataagtatataatcctgtgaaaatatgaggcttgataatattaggttgtcacgatgaagcatgctagaagctgtaacagaatacatagagaataatgaggagtttatgatggaaccttaaatatataatgttgccagcgattttagttcaatatttgttactgttatctatctgctgtatatggaattcttttaattcaaacgctgaaaagaatcagcatttagtcttgccaggcacacccaataatcagtcatgtgtaatatgcacaagtttgtttttgtttttgttttttttgttggttggtttgtttttttgctttaagttgcatgatctttctgcaggaaatagtcactcatcccactccacataaggggtttagtaagagaagtctgtctgtctgatgatggatagggggcaaatctttttcccctttctgttaatagtcatcacatttctatgccaaacaggaacaatccataactttagtcttaatgtacacattgcattttgataaaattaattttgttgtttcctttgaggttgatcgttgtgttgttgttttgctgcactttttacttttttgcgtgtggagctgtattcccgagaccaacgaagcgttgggatacttcattaaatgtagcgactgtcaacagcgtgcaggttttctgtttctgtgttgtggggtcaaccgtacaatggtgtgggagtgacgatgatgtgagtatttagaatgtaccatattttttgtaaattatttatgtttttctaaacaaatttatcgtataggttgatgaaacgtcatgtgttttgccaaagactgtaaatatttatttatgtgttcacatggtcaaaatttcaccactgaaaccctgcacttagctagaacctcatttttaaagattaacaacaggaaataaattgtaaaaaaggttttctatacatg

SEQ ID NO: 3497 - protein, 1172 aa, Homo sapiens; identical to SEQ ID NO: 393

SEQ ID NO: 3498 - DNA, 1271 bp, Homo sapiens
cccaaacccaagtgccttcagaggataaatatcaatggaactcagagatgaacatctaacccactagaggaaaccagtttggtgatatatgagactttatgtggagtgaaaattgggcatgccattacattgctttttcttgtttgtttaaaaagaatgacgtttacatataaaatgtaattacttattgtatttatgtgtatatggagttgaagggaatactgtgcataagccattatgataaattaagcatgaaaaatattgctgaactacttttggtgcttaaagttgtcactattcttgaattagagttgctctacaatgacacacaaatcccattaaataaattataaacaagggtcaattcaaatttgaagtaatgttttagtaaggagagattagaagacaacaggcatagcaaatgacataagctaccgattaactaatcggaacatgtaaaacagttacaaaaataaacgaactctcctcttgtcctacaatgaaagccctcatgtgcagtagagatgcagtttcatcaaagaacaaacatccttgcaaatgggtgtgacgcggttccagatgtggatttggcaaaacctcatttaagtaaaaggttagcagagcaaagtgcggtgctttagctgctgcttgtgccgctgtggcgtcggggaggctcctgcctgagcttccttccccagctttgctgcctgagaggaaccagagcagacgcacaggccggaaaaggcgcatctaacgcgtatctaggctttggtaactgcggacaagttgcttttacctgatttgatgatacatttcattaaggttccagttataaatattttgttaatatttattaagtgactatagaatgcaactccatttaccagtaacttattttaaatatgcctagtaacacatatgtagtataatttctagaaacaaacatctaataagtatataatcctgtgaaaatatgaggcttgataatattaggttttctgtttctgtgttgtggggtcaaccgtacaatggtgtgggagtgacgatgatgtgagtatttagaatgtaccatattttttgtaaattatttatgtttttctaaacaaatttatcgtataggttgatgaaacgtcatgtgttttgccaaagactgtaaatatttatttatgtgttcacatggtcaaaatttcaccactgaaaccctgcacttagctagaacctcatttttaaagattaacaacaggaaataaattgtaaaaaaggttttctat

SEQ ID NO: 3499 - protein, 49 aa, Homo sapiens [sequence omitted]

SEQ ID NO: 3500 - DNA, 572 bp, Homo sapiens
catatagaataatgaggagtttatgatggaaccttaaatatataatgttgccagcgattttagttcaatatttgttactgttatctatctgctgtatatggaattcttttaattcaaacgctgaaaagaatcagcatttagtcttgccaggcacacccaataatcagtcatgtgtaatatgcacaagtttgtttttgtttttgttttttttgttggttggtttgtttttttgctttaagttgcatgatctttctgcaggaaatagtcactcatcccactccacataaggggtttagtaagagaagtctgtctgtctgatgatggatagggggcaaatctttttcccctttctgttaatagtcatcacatttctatgccaaacaggaacaatccataactttagtcttaatgtacacattgcattttgataaaattaattttgttgtttcctttgaggttgatcgttgtgttgttgttttgctgcactttttacttttttgcgtgtggagctgtattcccgagaccaacgaagcgttgggatacttcattaaatgtagcgactgtcaacagcg

SEQ ID NO: 3501 - protein, 80 aa, Homo sapiens; identical to SEQ ID NO: 3493

SEQ ID NO: 3502 - DNA, 748 bp, Homo sapiens
aaggcacaccgcttacaggcaaatacccctctaggcggcacagcctgatctctctccgcttcttgtgttagtccggcaggacggcggctggagccactggtcaccttggtcttcatgctctgtgacctgtggagttggcaatatcacacgcatccgtctctgcaactccccagtgccccagatggggggcaagaattgcaaagggagtggccgggagaccaaagcctgccagggcgccccatgcccaatcgatggccgctggagcccctggtccccgtggtcggcctgcactgtcacctgtgccggtgggatccgggagcgcacccgggtctgcaacagccctgagcctcagtacggagggaaggcctgcgtgggggatgtgcaggagcgtcagatgtgcaacaagaggagctgccccgtgggtgagtgaggggtagaagcgggggcactgaaacccgggcttccattctgatgaaaagcacaaacgctttgggaaactagatgaaaaacacagaaaagaaaaatcaattttagttgcacacgcaaagataactacttttaacatctgtgtttcagtcctcctgtatttctaatgtaaaaacaaaaaagatgccaggtggcgtggcctgtggaatgtgggtagttgtgtggcgtggaatgtggtgtgtgggtaattgtgtggtgtggcctgtggaatgtgggtagttgtgtggcgtggcctgtggaatgtgggcagttgtgtggcatg

SEQ ID NO: 3503 - protein, 82 aa, Homo sapiens
MGGKNCKGSGRETKACQGAPCPIDGRWSPWSPWSACTVTCAGGIRERTRVCNSPEPQYGGKACVGDVQERQMCNKRSCPVGE

SEQ ID NO: 3504 - DNA, 2896 bp, Homo sapiens
ggcaggagtgcagatgtgatctcggcacaccgcaacctctgcctcttggattcaagcaattctcctgcctcagcctcccaagtggctgggattacaggcatgcgccaccacgcccagggtttggcaaatggattctgcagagtcagatgccttaacttcgtgtagtggtcttgtggatggcttactgccttggagttaatttcgttccttctcgtttctgctaccagcttcacaggcttctgctaaggtgtaccttccggtttcccagcacggccatcaagatccagttcacgtcgctctatcacaaagaagaggccccagcctccccgctgcggccactgtacccccagatctcccctctgaagatccacatcccggagccggacctccggagcatggtcagccccgtcccctccccgacgggcaccatcagtgtccccaactcctgcccagccagtccacgcggtgccggctcctccagttaccgctttgtgcagaacgtgacctcggacctgcagctggcagcagagtttgcagcaaaggccgcgtcggagcagcaggcagacacgtctggaggagacagccccaaggatgagtcaaagccgccgttctcctacgcgcagctgatcgtgcaggccatctcctccgcccaggaccggcagctgaccctgagcgggatctacgcccacatcaccaagcattacccctactaccggacggccgacaaaggctggcagaattctatccggcacaacctctctttgaaccgttactttatcaaagtcccacgttcccaggaggagcctgggaaggggtccttttggcgaatagaccctgcctctgaagccaagctcgtggaacaggcattccggaaacggaggcagaggggtgtctcctgcttccgcacccccttcgggcctctgtcctcaaggagcgctccagcttcgcccacacaccccgggctgatgtcccctcgctccggcggcctgcagaccccagagtgcctgtctcgggagggctcccccattccacacgaccctgagtttgggtccaagttagcttctgtcccagagtaccggtattcccaaagcgcacccggctcccccgtcagcgcccagccagtgatcatggccgtgcctccccgaccgtccagcctcgtggccaagcccgtggcctacatgcccgcctccatcgtaacctcacagcagcccgcgggccacgccatccacgtcgtgcagcaggcccccaccgtcaccatggtcagggtggtcaccacatctgccaactcggccaacggatacatcctcaccagccagggcgcggcggggggctcccatgatgcggcgggcgcagccgtgctggacctgggcagcgaggccagaggcctggaggagaaacccaccattgcgtttgccacaatccccgcggctggtggagtcatccagacggtggccagccagatggcccccggggtccccggacacacggtcaccatcctgcagcccgccacacccgtgaccctcgggcagcaccaccttccagtccgggccgtgacccagaacggaaagcatgcggttcccacgaacagtttagccggcaacgcttacgccctcaccagccctttgcagctccttgcgacccaagcgagttcatccgcgccggtggtggtcacccgggtgtgcgaggtggggcccaaggagccagcagcagccgtcgcggccacggccaccaccaccccagccactgccaccaccgcctctgcctccgcctcttccactggagagcccgaggtcaaaaggtcccgggtggaggagcccagtggtgctgtaaccacaccggctggagtgatcgcagctgccggcccccaggggccaggcaccggggagtgaggtcacctgcaacgcgggggagtgggactcacccagcggcgaccccgaagctggacccggcagctcaggcggccgcacccacagacggaggagaacagcccgcggcggcctgtgggcatcggcggcacctggacacacccagccctttccatttgatcgcctgccttcccgtggtttaagacaaaaacacataaacaagttcagacaactgattgtatgattctgggaattctttgctttcctttccttctccctcggcaccacctcctctccccaggcctccctgtcgggcatggggaggaggttggagctcagcatcttgaggaatgtgtcaagacagcccctccgctccgcgctgcacggccagccgcctttgtccgggaggacagacagaaacgcagcaaggcacacaccaaggctgccggggaggcccgggcaccggacagatgcctgttgggaagccaggagctgccgagccacggaccacctaacagcctctccgcccggaacgtgacatagagagtgttggcattaactcggggggtgtccgatttcacttcagaccccaagtttttctttgtttgtttaaacatggaattcagacttcattgtacacctgagacagacacaaaagggatcatgtatttttgaggattttacctgttgacgtctgatgaccggccgtaggtccagggttcccgctgggtttaatcccctcgaagagtaaacctgccgctctgtctgataacttcaagtaagagcagcggcttcctgggttggcgttcgcggtggaaggttcctaggatgaaaggtgagcctggatccgccggccgcagacatcgcgctgctggggacgattggggccgctgctctgcagaccagaccttcccgaattatccgtggctccgatgtcccggtgctgacggccacatggggacctaacagtgccaaacgccatctgctccagctgctttttcacccagttgcagagtcctcaccactcccac

SEQ ID NO: 3505 - protein, 570 aa, Homo sapiens
MAYCLGVNFVPSRFCYQLHRLLLRCTFRFPSTAIKIQFTSLYHKEEAPASPLRPLYPQISPLKIHIPEPDLRSMVSPVPSPTGTISVPNSCPASPRGAGSSSYRFVQNVTSDLQLAAEFAAKAASEQQADTSGGDSPKDESKPPFSYAQLIVQAISSAQDRQLTLSGIYAHITKHYPYYRTADKGWQNSIRHNLSLNRYFIKVPRSQEEPGKGSFWRIDPASEAKLVEQAFRKRRQRGVSCFRTPFGPLSSRSAPASPTHPGLMSPRSGGLQTPECLSREGSPIPHDPEFGSKLASVPEYRYSQSAPGSPVSAQPVIMAVPPRPSSLVAKPVAYMPASIVTSQQPAGHAIHVVQQAPTVTMVRVVTTSANSANGYILTSQGAAGGSHDAAGAAVLDLGSEARGLEEKPTIAFATIPAAGGVIQTVASQMAPGVPGHTVTILQPATPVTLGQHHLPVRAVTQNGKHAVPTNSLAGNAYALTSPLQLLATQASSSAPVVVTRVCEVGPKEPAAAVAATATTTPATATTASASASSTGEPEVKRSRVEEPSGAVTTPAGVIAAAGPQGPGTGE

SEQ ID NO: 3506 - DNA, 391 bp, Homo sapiens
gctgcatgagaagggctggccgctccttaaagcaaagcctgactcctgttagcagaaggggcaatgaatgctgagcaggcgaaaactagatgttcactgcctcattccagccagatgtcgtcagtgacctgtgctcccgagcttcatttttgttttttaaaagactctttagtttatctttatttatttattttagagatggggtcccactctctcacccaggctggagcacagtgctgcgatcatagctcactgcagccttgaactcctgggtgctagtggtcctcctgactacaggcacgtgccaccaggcccgctaatttgttttgttttgtttcgttttttgagaagagtgagaatctgtctcaaaaaaaatttttttttaaatagt

SEQ ID NO: 3507 - protein, 66 aa, Homo sapiens
MNAEQAKTRCSLPHSSQMSSVTCAPELHFCFLKDSLVYLYLFILEMGSHSLTQAGAQCCDHSSLQP

SEQ ID NO: 3508 - DNA, 11191 bp, Homo sapiens
ccgcgcgaacatggccgaagtcggcgaggacagcggcgcccgcgccctgctcgcgctgcgctcggcgccctgcagcccagtgctgtgcgccgcagccgccgccgccgccttccccgcggccgcacccccgccggcccccgcgcagccccagcctccgcccgggccgccgccgccgccgccaccgccgctgcctccgggcgcgatcgcgggcgcgggctcctccgggggctcctccggggtatccggggactccgcggtcgcgggcgcggcgccggccctggtggccgcggcggccgcctcggtacggcagagcccggggccggcgctggcgcggctggagggccgcgagttcgagttcctcatgcgccagcccagcgtcaccatcggccgcaactcgtcgcagggctcggtggacttgagcatgggcctgtccagcttcatctcgcggcgccacctgcagctcagcttccaggagccgcacttctacctgcgctgcctcggcaagaacggcgtcttcgtggacggggccttccagagacgcggcgcgcccgccctgcagctgcccaagcagtgtaccttccggtttcccagcacggccatcaagatccagttcacgtcgctctatcacaaagaagaggccccagcctccccgctgcggccactgtacccccagatctcccctctgaagatccacatcccggagccggacctccggagcatggtcagccccgtcccctccccgacgggcaccatcagtgtccccaactcctgcccagccagtccacgcggtgccggctcctccagttaccgctttgtgcagaacgtgacctcggacctgcagctggcagcagagtttgcagcaaaggccgcgtcggagcagcaggcagacacgtctggaggagacagccccaaggatgagtcaaagccgccgttctcctacgcgcagctgatcgtgcaggccatctcctccgcccaggaccggcagctgaccctgagcgggatctacgcccacatcaccaagcattacccctactaccggacggccgacaaaggctggcagaattctatccggcacaacctctctttgaaccgttactttatcaaagtcccacgttcccaggaggagcctgggaaggggtccttttggcgaatagaccctgcctctgaagccaagctcgtggaacaggcattccggaaacggaggcagaggggtgtctcctgcttccgcacccccttcgggcctctgtcctcaaggagcgctccagcttcgcccacacaccccgggctgatgtcccctcgctccggcggcctgcagaccccagagtgcctgtctcgggagggctcccccattccacacgaccctgagtttgggtccaagttagcttctgtcccagagtaccggtattcccaaagcgcacccggctcccccgtcagcgcccagccagtgatcatggccgtgcctccccgaccgtccagcctcgtggccaagcccgtggcctacatgcccgcctccatcgtaacctcacagcagcccgcgggccacgccatccacgtcgtgcagcaggcccccaccgtcaccatggtcagggtggtcaccacatctgccaactcggccaacggatacatcctcaccagccagggcgcggcggggggctcccatgatgcggcgggcgcagccgtgctggacctgggcagcgaggccagaggcctggaggagaaacccaccattgcgtttgccacaatccccgcggctggtggagtcatccagacggtggccagccagatggcccccggggtccccggacacacggtcaccatcctgcagcccgccacacccgtgaccctcgggcagcaccaccttccagtccgggccgtgacccagaacggaaagcatgcggttcccacgaacagtttagccggcaacgcttacgccctcaccagccctttgcagctccttgcgacccaagcgagttcatccgcgccggtggtggtcacccgggtgtgcgaggtggggcccaaggagccagcagcagccgtcgcggccacggccaccaccaccccagccactgccaccaccgcctctgcctccgcctcttccactggagagcccgaggtcaaaaggtcccgggtggaggagcccagtggtgctgtaaccacaccggctggagtgatcgcagctgccggcccccaggggccaggcaccggggagtgaggtcacctgcaacgcgggggagtgggactcacccagcggcgaccccgaagctggacccggcagctcaggcggccgcacccacagacggaggagaacagcccgcggcggcctgtgggcatcggcggcacctggacacacccagccctttccatttgatcgcctgccttcccgtggtttaagacaaaaacacataaacaagttcagacaactgattgtatgattctgggaattctttgctttcctttccttctccctcggcaccacctcctctccccaggcctccctgtcgggcatggggaggaggttggagctcagcatcttgaggaatgtgtcaagacagcccctccgctccgcgctgcacggccagccgcctttgtccgggaggacagacagaaacgcagcaaggcacacaccaaggctgccggggaggcccgggcaccggacagatgcctgttgggaagccaggagctgccgagccacggaccacctaacagcctctccgcccggaacgtgacatagagagtgttggcattaactcggggggtgtccgatttcacttcagaccccaagtttttctttgtttgtttaaacatggaattcagacttcattgtacacctgagacagacacaaaagggatcatgtatttttgaggattttacctgttgacgtctgatgaccggccgtaggtccagggttcccgctgggtttaatcccctcgaagagtaaacctgccgctctgtctgataacttcaagtaagagcagcggcttcctgggttggcgttcgcggtggaaggttcctaggatgaaaggtgagcctggatccgccggccgcagacatcgcgctgctggggacgattggggccgctgctctgcagaccagaccttcccgaattatccgtggctccgatgtcccggtgctgacggccacatggggacctaacagtgccaaacgccatctgctccagctgctttttcacccagttgcagagtcctcaccactcccacattgatctgctgttttcaattggaaccatttctcctgcctgaaactccagggcccctccctgggctgtccgtgagcaggagaccccaccccagcagcagtggtgagcaggcctgtgcctccacgcccagcccccgccaacgcgactggttttgtttgccacacggtgagaaccggaggacgggatgctccagccagttgggtggttctggggtccctgaggaagccccctcctgcacttccattaagacagccagtggttcctggatctttgtcaccaagcagcgttgagccagagctgtctaatgctgagcccagctcaggaaggagagaggagtccttcagtgtgtcttggagatgcgaagtgcgtcctcgtaaaggtcagctgtcagttttgctggccgctccggcgctggctctcctgtccgggaccacaacgagaaacagcgacagattcgacgcagagctccggaagtgcctgaggagcagtggttcttggaaatcgcccgtcctccgcatcacagcctctcaccagcaaagcagcctctgcccaggccctggcgggagagctgcagagggacccaggtgcctggagggcatttgagggaggtggctggacaggtgtctccctgaagaagaagggagaacacttttcaaagtgattccgaggcagtgcgggaggacacacgtgctgtgcagtggagtggggtcgcccgtggcccccatcagagtccccgtcccccaggacaagtgcagaacctctgtgggccccctccttccacctagatagagaaaaccccttgttcggtttccttcccgtgtcccgttgtttttctaagccccccgaattgagtcgtttctatggcactaacctttccatgggaaataagctctttgtggaagtccgtacctgttgccctgggtgaggtttcagagaaacgggggcaggatgaacacagccggctgtcctgggtgcagttacgtccgtggagggtgagagattgcgccccgttccacacttgtgtcgcctgctgttgtctgtgggccttttctttccgtggtgcctggtgtgtgcgtgcatggcgtgagagaacggggggtgggggttggaggtggctccccgacaccggtgcctgtgtggcctgagccggcgccctcccgggagcgcccgtcacggggggcctctgtgattacctgctgctgctctctcccgcgtggtgactatatgtcctcagggctgcctgtggccaccctgatgggagacctctgtttgcttctgggccactgcaggttggcctcctcaatacaagctgatgtctgcagggagcgccgcgtgctgggattgcaccacgtgttggtcacaaatcgaggtcgccttttggcctggtctgctcaggctggccctgacccacgtggtttcctggcttctgagacgcagcgcattcttcctgttagcggtagcgttctctgatttcactgcttcattgccaagggcgtggaaagggggtggtggatggagccgggaggtggcgagcacaggaccccggggctgcattctgccgtgtggggttctgcactgtctagcttctgcggggactgcaaagagggatgaagggacgtggtcctaggggtcggctcagactcggagcagggcagggagaggagggcaaggagaggaggcctgggtcctggatccactgctctgggctcataaccatgagattttgaaagagtttttggtcatctgagcaggtaccatgcctggctcatgccggaacttgtcttggaaccggtagccagaggcccaggaagggacagggcccaaaagggttgcatgtcccggccacaaagccctccctgtgtgccctgagccagcccagcaagcgcctcccagccaggcgctttcgcagaagcaagagcacaggccagggggaccgggagagcctcagcccccagcctgggcggcctgtgaccctgagccgtgtggagccaggacccaagaaccttctctaggttctcaagggtgagctgacccgggcaatgtgcaggaatgtggggagcaaaagtagctgattccagccccgttctggggtcactggggaggcagaggctgagggcctgttctctggtcaccagggactgggggcacggtccacagcggatgagaacagcaggtcacagtagtggctttgggaagggcccctcctgctttgccctgttcggaaaggggctccctcagagcccctgggcccagtaacccgcttctgtctcctgactcctgctggataaattgccaggtttatcaaatacaagaaaacacctgctttggctaggaggtaagtcccaaaaagaacgtcttaagtagagcaaaggcatccaccgaggccatttggtggcccctgggaagtggggaagcagggcctgagcgtccccaggctgctagggcagcagctggctcagggcacactctctcgtgccagcttctgccaccagcccagtgtccacggagccgcggggccagaggagctcagggagacctggctgtctagggcatggtacccagtatcccggtgtgtgcccatcctcagccacttgtgtctttctttccatgtgggagttctcccggtgacacctgccctccgttgagggtggaatctgtcactcatgcctttgagggacccagatggaccatccctcttctgcttgctttctacattcctaaaaacctcaacgttaatccctcaccagtcgggccgagtgtggcctcatggttctgccgcggcccagtcttctcccactggcttcacgctagagggcgccatgcgctctgggtgaaatgagacgctggtgtggggtccccatgtagagaccctcaggtccctatccagagaccctccaggcagtgctgggaagacactggtggcggggaccatgaccaggcgggtggagccatgtgtgtctcacacctgccgcccctcactttccttcccgaggtctggtaggtcctctttgggatttgctgtttatttgtatctcccttttctttgatttaagaacaatgccaagtgaaaaagctgggaatgaatttctgagttgctgagtgttccctgctcctaggtaccacgctctgtgcttctcaggcagggaggagatggattcggtggagttgggccaggacgggggcttcaccctgccccctccagactgccgaagcccccaagaagttttgagcccagctgggcctcgcctccccggctcctgggtccattttctgtactggtttgagatcacaggcatcattcagcgaatgctcttgtgtcctctgcataaagagggccctccctggagcacccccggggagctgggactctccagaaagccccgggtgagggctccgtcttgagagagagagaaatcccttctttgggcgattcagtgagttcaggaggaggaggaagcttttccttggctttgaaatcagtgtttttatggagacaaagaacagacctcagtgggaaaaatgaaaacgtaatggaacacggggaggtgtcggagaagaaaggattttccccttcgctttcagagccggcgggagtgcaggtctgttttgcttcagaagcctcacattctgctttgcccttgagtgacttcatgcgggatgaggaactgttgacccctctagagaggacaccccaagtccatcctgggctcctcctcacccctctgagaaagcccccctaaaaaaaggcttcagagtcaccggcatgccgcctcacgttgcaggacggaatcgcgcgctcctcacgctggagtaagttacgaaacatgatcgtcaggctctttgcaaacgcagagccccagaacgctggatggaggcctcctcggccctgcgggcggcctggctgcggtaggtctgctgcaaggagccaccacggggactgcgccacactcctgatgaaaacgtgtttacccacagcctcgcctcgagcctccttgacaataccgctgcttcaaagcaatattatttaatgagaatactttacattgctcacatgtgctgctatgaagacaggattagtctgtagacgggactcagctccagaggttcctgggtaatgtattgtggctcttggaaatgagggtagaatttgaaatataacaaatggtctctcgcccggttctgtcccttatttttagattgttttcctgcatcttacaatttccttttcttttcaaagttcctttctccaggcctgtttttcagtgctcaggacacggttttcatcacatacttactgtttttttggttgggttttgatacgaaaagctgctacgtttggtgaccagagggagggtttggaatctgtgctttgcaggggatctcggtgggtaccgcggcccctcgcagggtggcgagtggggtccgtgcctcgagaagggggcccttacccacaccgtgcggcttgaattctgtcggagttgaatctgtggaaaggattgtcccattagagctgctgcgtcctttcctctgtcctccctgtcacccaaaccccgaagtcacagctgcttagaagaatgggattttggggatacaaccacacacatttccctctggactgaaattttaaaaacagacccatttcactgacttctttttttttttttttttttttttttttttgagacggagtctcgctctgtcgcccaggctggagtgcagtggcgtgatctcggctcactgcaagctccgcctcccgggttcacgccattctcctgcctcagcctcccgagtagctgggactacaggcgcccgctaccacgcccggctaattttttgtatttttagtagagacggggtttcaccgtgttagccaggatggtctcgatctcctgacctcgtgatccgcccgcctcggcctcccaaagtgctgggattacaggcgtgagccaccgcgcccggcccactgacttctttagggaaaatagtttcagtcttgggttgtcttgtgagcccacgggcatgggaccctgtctctgctgggcttttccggccccgtcccagctcctcctcaggcagaggctgcagccctcagctctgctgctggatggaacatttcaaccccctccgggaaggtgggcagggtggagggcccagggctaggcctgccatgcaccatgagcaggggtgctacctgggtgtgtgaagttgggctggcttttcctggaggtgggtgagaaggctctccgggcaaatcagaaggccacgagagagagaggagcggggagagtggtgaggaggattcgtctctgactgatgaacctcgccgtgcctgtctgtcacatccaagtctgtgccagctgctgggaggtcagactcctgccctgagaaacagcccagtccttggagaatgaaaccctgagggtcagtgagtggaggccttccctcggggccagccattcccgggaggcctgagtgtgacctggaagctctgtgggtcaccaagactggcattttccttgtatttttgtgcagggctgaagtgagcgttcctcctctgaattggtgaggctttggaaattttttgtttcttctactcatcctaatggctggttttggctgcccggagtatcagagaatatcactaagagggcagtcagtttatttttaggcatctttctttctgtccagggagaaacccctcggaagaatcttagtcactctttgcacctgccctgtcattctcgccatggggaaaatgcgttgaaaagaaaaataccggggccagggagaagccgtgaatgtatttatttgctttggtgaagctgctgaacactggctgcggagggccccccgcccccatcccgcttcaggccccagtgacccagttgcgtcttaagttccatcgtccagatttcaggccaccagaggctgccaaaggtgactgaagcggtctccaagtcactctgtcaccactttttttttttttgagatggagtctcgctctatcgcccaggctggagtgcagtggcccaatctcggctcactgcaacctccgcctcccaggttcgagcgaattctcctgcctcaacctcccaagtagctgggattacaggcacctgccaccacacccggctaatttttgtatttctaatagagatgagagtgttaccatgttggtcaggctggtcttgaactcctgacctcaggtgatctgcccacctcaacctcccaaagtgctgggattataggcatgagccaccgcgcctggcctctgtcactttttttgctccttacccagtttttgttttttgttgttttgttttgttttagcgtgatactacaatggaaagactcctagttggttattctttatctcggattcttttttctggaattgtttgctcatttgagtggttggtggtttgccctgtgtcagacacggtgaaaagagtgcaggaaagctggggccaggggaagcgaagtggcttcaatccgggctgacagccaagaagagttttcctcccttcggtgacagggcctgcccctccgagtctagaggtaaaagcagcttctagaactggcccctaagtctccaaatgtgttggctaagctgaaatgagagactctgaattagagtttttgtttgtttgtttgttctctgcatgaagttcacaggcctgtatggatgttaaattgtgtctatagcctctaaatctccaggttaactggtccagattttttttttttaatcagtaacaatgggaatttaaaatcaaatatttggccaggtgcggtggctcatgcccgtaatcccagcactttgggaggccgaggcaggcgcatcacctgaggagtttgagaccagcctgaccaacatggtgaaatcctgtctctactaaaaatacaaaaaattagccaggcgtggtggcgtgtgcctgtaatcccagctaccagggaggctgaggcatgagaatcgcttgaacctgggagatggaggttgcagtgagccgagatcatgccactgcactccagcctgggcaacagagggagactctgtctcaaaaataataatcaaatcaagtattttaagtttggctcttctttttttcaagaaaggctttttggatacctagaataccttcatgtatgtggcttgatttctgtttcaggaaaaggggggcgggaggagagacaacagccgtgttccagagtctgtcctgagatgtcgctgagtccagacacttgggctgcacgtgccctgcagatgacaaaggccggcagctcagcacacgtgcaggaggggttaaagccaatattgagtttttgttcttgttgttttaatctgaacgattattctcctgtaaaaataatttgggaggggcgggtgttgttcggtgtgtgtgtgtgtgtgtgtgtgtgtgtgtgtgtgtgtatttttttttttacagtggcgcctgtctaaagtatttttcacaacatgtttgataatcagtgctttaaaaagcagcagtgtcctatgaagtggaaatgtcagttctagagcattggatgtgaagttctggtcatgtcaccttgcgtgtctcaccctggaggagtgaaggtgggcgcccggcgggggggtgtggctgcaccccagcaccgggagggggcacgcacgacaccagaggaagggacagccccacccatgtcaacagcaggcaacctgtgttttcatttcaagtgggatacagtatttttttaataaggagccatacttttttttaagagtttgagatctgaatgtgatttctaattgtatcagacgttaatgttttaaagctataacaaagtttaaaatttctactttttgtttttcatttattttaactgttcttttatctattaaattgttgtatgtggatggggaagttttgtttctcctcttagcatttgtttctataaccagaaataaaattctatattaaagaaatgac

SEQ ID NO: 3509 - protein, 733 aa, Homo sapiens; identical to SEQ ID NO: 395

SEQ ID NO: 3510 - DNA, 11560 bp, Homo sapiens
ccgcgcgaacatggccgaagtcggcgaggacagcggcgcccgcgccctgctcgcgctgcgctcggcgccctgcagcccagtgctgtgcgccgcagccgccgccgccgccttccccgcggccgcacccccgccggcccccgcgcagccccagcctccgcccgggccgccgccgccgccgccaccgccgctgcctccgggcgcgatcgcgggcgcgggctcctccgggggctcctccggggtatccggggactccgcggtcgcgggcgcggcgccggccctggtggccgcggcggccgcctcggtacggcagagcccggggccggcgctggcgcggctggagggccgcgagttcgagttcctcatgcgccagcccagcgtcaccatcggccgcaactcgtcgcagggctcggtggacttgagcatgggcctgtccagcttcatctcgcggcgccacctgcagctcagcttccaggagccgcacttctacctgcgctgcctcggcaagaacggcgtcttcgtggacggggccttccagagacgcggcgcgcccgccctgcagctgcccaagcagtgtaccttccggtttcccagcacggccatcaagatccagttcacgtcgctctatcacaaagaagaggccccagcctccccgctgcggccactgtacccccagatctcccctctgaagatccacatcccggagccggacctccggagcatggtcagccccgtcccctccccgacgggcaccatcagtgtccccaactcctgcccagccagtccacgcggtgccggctcctccagttaccgctttgtgcagaacgtgacctcggacctgcagctggcagcagagtttgcagcaaaggccgcgtcggagcagcaggcagacacgtctggaggagacagccccaaggatgagtcaaagccgccgttctcctacgcgcagctgatcgtgcaggccatctcctccgcccaggaccggcagctgaccctgagcgggatctacgcccacatcaccaagcattacccctactaccggacggccgacaaaggctggcagaattctatccggcacaacctctctttgaaccgttactttatcaaagtcccacgttcccaggaggagcctgggaaggggtccttttggcgaatagaccctgcctctgaagccaagctcgtggaacaggcattccggaaacggaggcagaggggtgtctcctgcttccgcacccccttcgggcctctgtcctcaaggagcgctccagcttcgcccacacaccccgggctgatgtcccctcgctccggcggcctgcagaccccagagtgcctgtctcgggagggctcccccattccacacgaccctgagtttgggtccaagttagcttctgtcccagagtaccggtattcccaaagcgcacccggctcccccgtcagcgcccagccagtgatcatggccgtgcctccccgaccgtccagcctcgtggccaagcccgtggcctacatgcccgcctccatcgtaacctcacagcagcccgcgggccacgccatccacgtcgtgcagcaggcccccaccgtcaccatggtcagggtggtcaccacatctgccaactcggccaacggatacatcctcaccagccagggcgcggcggggggctcccatgatgcggcgggcgcagccgtgctggacctgggcagcgaggccagaggcctggaggagaaacccaccattgcgtttgccacaatccccgcggctggtggagtcatccagacggtggccagccagatggcccccggggtccccggacacacggtcaccatcctgcagcccgccacacccgtgaccctcgggcagcaccaccttccagtccgggccgtgacccagaacggaaagcatgcggttcccacgaacagtttagccggcaacgcttacgccctcaccagccctttgcagctccttgcgacccaagcgagttcatccgcgccggtggtggtcacccgggtgtgcgaggtggggcccaaggagccagcagcagccgtcgcggccacggccaccaccaccccagccactgccaccaccgcctctgcctccgcctcttccactggagagcccgaggtcaaaaggtcccgggtggaggagcccagtggtgctgtaaccacaccggctggagtgatcgcagctgccggcccccaggggccaggcaccggggagtgaggtcacctgcaacgcgggggagtgggactcacccagcggcgaccccgaagctggacccggcagctcaggcggccgcacccacagacggaggagaacagcccgcggcggcctgtgggcatcggcggcacctggacacacccagccctttccatttgatcgcctgccttcccgtggtttaagacaaaaacacataaacaagttcagacaactgattgtatgattctgggaattctttgctttcctttccttctccctcggcaccacctcctctccccaggcctccctgtcgggcatggggaggaggttggagctcagcatcttgaggaatgtgtcaagacagcccctccgctccgcgctgcacggccagccgcctttgtccgggaggacagacagaaacgcagcaaggcacacaccaaggctgccggggaggcccgggcaccggacagatgcctgttgggaagccaggagctgccgagccacggaccacctaacagcctctccgcccggaacgtgacatagagagtgttggcattaactcggggggtgtccgatttcacttcagaccccaagtttttctttgtttgtttaaacatggaattcagacttcattgtacacctgagacagacacaaaagggatcatgtatttttgaggattttacctgttgacgtctgatgaccggccgtaggtccagggttcccgctgggtttaatcccctcgaagagtaaacctgccgctctgtctgataacttcaagtaagagcagcggcttcctgggttggcgttcgcggtggaaggttcctaggatgaaaggtgagcctggatccgccggccgcagacatcgcgctgctggggacgattggggccgctgctctgcagaccagaccttcccgaattatccgtggctccgatgtcccggtgctgacggccacatggggacctaacagtgccaaacgccatctgctccagctgctttttcacccagttgcagagtcctcaccactcccacattgatctgctgttttcaattggaaccatttctcctgcctgaaactccagggcccctccctgggctgtccgtgagcaggagaccccaccccagcagcagtggtgagcaggcctgtgcctccacgcccagcccccgccaacgcgactggttttgtttgccacacggtgagaaccggaggacgggatgctccagccagttgggtggttctggggtccctgaggaagccccctcctgcacttccattaagacagccagtggttcctggatctttgtcaccaagcagcgttgagccagagctgtctaatgctgagcccagctcaggaaggagagaggagtccttcagtgtgtcttggagatgcgaagtgcgtcctcgtaaaggtcagctgtcagttttgctggccgctccggcgctggctctcctgtccgggaccacaacgagaaacagcgacagattcgacgcagagctccggaagtgcctgaggagcagtggttcttggaaatcgcccgtcctccgcatcacagcctctcaccagcaaagcagcctctgcccaggccctggcgggagagctgcagagggacccaggtgcctggagggcatttgagggaggtggctggacaggtgtctccctgaagaagaagggagaacacttttcaaagtgattccgaggcagtgcgggaggacacacgtgctgtgcagtggagtggggtcgcccgtggcccccatcagagtccccgtcccccaggacaagtgcagaacctctgtgggccccctccttccacctagatagagaaaaccccttgttcggtttccttcccgtgtcccgttgtttttctaagccccccgaattgagtcgtttctatggcactaacctttccatgggaaataagctctttgtggaagtccgtacctgttgccctgggtgaggtttcagagaaacgggggcaggatgaacacagccggctgtcctgggtgcagttacgtccgtggagggtgagagattgcgccccgttccacacttgtgtcgcctgctgttgtctgtgggccttttctttccgtggtgcctggtgtgtgcgtgcatggcgtgagagaacggggggtgggggttggaggtggctccccgacaccggtgcctgtgtggcctgagccggcgccctcccgggagcgcccgtcacggggggcctctgtgattacctgctgctgctctctcccgcgtggtgactatatgtcctcagggctgcctgtggccaccctgatgggagacctctgtttgcttctgggccactgcaggttggcctcctcaatacaagctgatgtctgcagggagcgccgcgtgctgggattgcaccacgtgttggtcacaaatcgaggtcgccttttggcctggtctgctcaggctggccctgacccacgtggtttcctggcttctgagacgcagcgcattcttcctgttagcggtagcgttctctgatttcactgcttcattgccaagggcgtggaaagggggtggtggatggagccgggaggtggcgagcacaggaccccggggctgcattctgccgtgtggggttctgcactgtctagcttctgcggggactgcaaagagggatgaagggacgtggtcctaggggtcggctcagactcggagcagggcagggagaggagggcaaggagaggaggcctgggtcctggatccactgctctgggctcataaccatgagattttgaaagagtttttggtcatctgagcaggtaccatgcctggctcatgccggaacttgtcttggaaccggtagccagaggcccaggaagggacagggcccaaaagggttgcatgtcccggccacaaagccctccctgtgtgccctgagccagcccagcaagcgcctcccagccaggcgctttcgcagaagcaagagcacaggccagggggaccgggagagcctcagcccccagcctgggcggcctgtgaccctgagccgtgtggagccaggacccaagaaccttctctaggttctcaagggtgagctgacccgggcaatgtgcaggaatgtggggagcaaaagtagctgattccagccccgttctggggtcactggggaggcagaggctgagggcctgttctctggtcaccagggactgggggcacggtccacagcggatgagaacagcaggtcacagtagtggctttgggaagggcccctcctgctttgccctgttcggaaaggggctccctcagagcccctgggcccagtaacccgcttctgtctcctgactcctgctggataaattgccaggtttatcaaatacaagaaaacacctgctttggctaggaggtaagtcccaaaaagaacgtcttaagtagagcaaaggcatccaccgaggccatttggtggcccctgggaagtggggaagcagggcctgagcgtccccaggctgctagggcagcagctggctcagggcacactctctcgtgccagcttctgccaccagcccagtgtccacggagccgcggggccagaggagctcagggagacctggctgtctagggcatggtacccagtatcccggtgtgtgcccatcctcagccacttgtgtctttctttccatgtgggagttctcccggtgacacctgccctccgttgagggtggaatctgtcactcatgcctttgagggacccagatggaccatccctcttctgcttgctttctacattcctaaaaacctcaacgttaatccctcaccagtcgggccgagtgtggcctcatggttctgccgcggcccagtcttctcccactggcttcacgctagagggcgccatgcgctctgggtgaaatgagacgctggtgtggggtccccatgtagagaccctcaggtccctatccagagaccctccaggcagtgctgggaagacactggtggcggggaccatgaccaggcgggtggagccatgtgtgtctcacacctgccgcccctcactttccttcccgaggtctggtaggtcctctttgggatttgctgtttatttgtatctcccttttctttgatttaagaacaatgccaagtgaaaaagctgggaatgaatttctgagttgctgagtgttccctgctcctaggtaccacgctctgtgcttctcaggcagggaggagatggattcggtggagttgggccaggacgggggcttcaccctgccccctccagactgccgaagcccccaagaagttttgagcccagctgggcctcgcctccccggctcctgggtccattttctgtactggtttgagatcacaggcatcattcagcgaatgctcttgtgtcctctgcataaagagggccctccctggagcacccccggggagctgggactctccagaaagccccgggtgagggctccgtcttgagagagagagaaatcccttctttgggcgattcagtgagttcaggaggaggaggaagcttttccttggctttgaaatcagtgtttttatggagacaaagaacagacctcagtgggaaaaatgaaaacgtaatggaacacggggaggtgtcggagaagaaaggattttccccttcgctttcagagccggcgggagtgcaggtctgttttgcttcagaagcctcacattctgctttgcccttgagtgacttcatgcgggatgaggaactgttgacccctctagagaggacaccccaagtccatcctgggctcctcctcacccctctgagaaagcccccctaaaaaaaggcttcagagtcaccggcatgccgcctcacgttgcaggacggaatcgcgcgctcctcacgctggagtaagttacgaaacatgatcgtcaggctctttgcaaacgcagagccccagaacgctggatggaggcctcctcggccctgcgggcggcctggctgcggtaggtctgctgcaaggagccaccacggggactgcgccacactcctgatgaaaacgtgtttacccacagcctcgcctcgagcctccttgacaataccgctgcttcaaagcaatattatttaatgagaatactttacattgctcacatgtgctgctatgaagacaggattagtctgtagacgggactcagctccagaggttcctgggtaatgtattgtggctcttggaaatgagggtagaatttgaaatataacaaatggtctctcgcccggttctgtcccttatttttagattgttttcctgcatcttacaatttccttttcttttcaaagttcctttctccaggcctgtttttcagtgctcaggacacggttttcatcacatacttactgtttttttggttgggttttgatacgaaaagctgctacgtttggtgaccagagggagggtttggaatctgtgctttgcaggggatctcggtgggtaccgcggcccctcgcagggtggcgagtggggtccgtgcctcgagaagggggcccttacccacaccgtgcggcttgaattctgtcggagttgaatctgtggaaaggattgtcccattagagctgctgcgtcctttcctctgtcctccctgtcacccaaaccccgaagtcacagctgcttagaagaatgggattttggggatacaaccacacacatttccctctggactgaaattttaaaaacagacccatttcactgacttctttttttttttttttttttttttttttttgagacggagtctcgctctgtcgcccaggctggagtgcagtggcgtgatctcggctcactgcaagctccgcctcccgggttcacgccattctcctgcctcagcctcccgagtagctgggactacaggcgcccgctaccacgcccggctaattttttgtatttttagtagagacggggtttcaccgtgttagccaggatggtctcgatctcctgacctcgtgatccgcccgcctcggcctcccaaagtgctgggattacaggcgtgagccaccgcgcccggcccactgacttctttagggaaaatagtttcagtcttgggttgtcttgtgagcccacgggcatgggaccctgtctctgctgggcttttccggccccgtcccagctcctcctcaggcagaggctgcagccctcagctctgctgctggatggaacatttcaaccccctccgggaaggtgggcagggtggagggcccagggctaggcctgccatgcaccatgagcaggggtgctacctgggtgtgtgaagttgggctggcttttcctggaggtgggtgagaaggctctccgggcaaatcagaaggccacgagagagagaggagcggggagagtggtgaggaggattcgtctctgactgatgaacctcgccgtgcctgtctgtcacatccaagtctgtgccagctgctgggaggtcagactcctgccctgagaaacagcccagtccttggagaatgaaaccctgagggtcagtgagtggaggccttccctcggggccagccattcccgggaggcctgagtgtgacctggaagctctgtgggtcaccaagactggcattttccttgtatttttgtgcagggctgaagtgagcgttcctcctctgaattggtgaggctttggaaattttttgtttcttctactcatcctaatggctggttttggctgcccggagtatcagagaatatcactaagagggcagtcagtttatttttaggcatctttctttctgtccagggagaaacccctcggaagaatcttagtcactctttgcacctgccctgtcattctcgccatggggaaaatgcgttgaaaagaaaaataccggggccagggagaagccgtgaatgtatttatttgctttggtgaagctgctgaacactggctgcggagggccccccgcccccatcccgcttcaggccccagtgacccagttgcgtcttaagttccatcgtccagatttcaggccaccagaggctgccaaaggtgactgaagcggtctccaagtcactctgtcaccactttttttttttttgagatggagtctcgctctatcgcccaggctggagtgcagtggcccaatctcggctcactgcaacctccgcctcccaggttcgagcgaattctcctgcctcaacctcccaagtagctgggattacaggcacctgccaccacacccggctaatttttgtatttctaatagagatgagagtgttaccatgttggtcaggctggtcttgaactcctgacctcaggtgatctgcccacctcaacctcccaaagtgctgggattataggcatgagccaccgcgcctggcctctgtcactttttttgctccttacccagtttttgttttttgttgttttgttttgttttagcgtgatactacaatggaaagactcctagttggttattctttatctcggattcttttttctggaattgtttgctcatttgagtggttggtggtttgccctgtgtcagacacggtgaaaagagtgcaggaaagctggggccaggggaagcgaagtggcttcaatccgggctgacagccaagaagagttttcctcccttcggtgacagggcctgcccctccgagtctagaggtaaaagcagcttctagaactggcccctaagtctccaaatgtgttggctaagctgaaatgagagactctgaattagagtttttgtttgtttgtttgttctctgcatgaagttcacaggcctgtatggatgttaaattgtgtctatagcctctaaatctccaggttaactggtccagattttttttttttaatcagtaacaatgggaatttaaaatcaaatatttggccaggtgcggtggctcatgcccgtaatcccagcactttgggaggccgaggcaggcgcatcacctgaggagtttgagaccagcctgaccaacatggtgaaatcctgtctctactaaaaatacaaaaaattagccaggcgtggtggcgtgtgcctgtaatcccagctaccagggaggctgaggcatgagaatcgcttgaacctgggagatggaggttgcagtgagccgagatcatgccactgcactccagcctgggcaacagagggagactctgtctcaaaaataataatcaaatcaagtattttaagtttggctcttctttttttcaagaaaggctttttggatacctagaataccttcatgtatgtggcttgatttctgtttcaggaaaaggggggcgggaggagagacaacagccgtgttccagagtctgtcctgagatgtcgctgagtccagacacttgggctgcacgtgccctgcagatgacaaaggccggcagctcagcacacgtgcaggaggggttaaagccaatattgagtttttgttcttgttgttttaatctgaacgattattctcctgtaaaaataatttgggaggggcgggtgttgttcggtgtgtgtgtgtgtgtgtgtgtgtgtgtgtgtgtgtgtatttttttttttacagtggcgcctgtctaaagtatttttcacaacatgtttgataatcagtgctttaaaaagcagcagtgtcctatgaagtggaaatgtcagttctagagcattggatgtgaagttctggtcatgtcaccttgcgtgtctcaccctggaggagtgaaggtgggcgcccggcgggggggtgtggctgcaccccagcaccgggagggggcacgcacgacaccagaggaagggacagccccacccatgtcaacagcaggcaacctgtgttttcatttcaagtgggatacagtatttttttaataaggagccatacttttttttaagagtttgagatctgaatgtgatttctaattgtatcagacgttaatgttttaaagctataacaaagtttaaaatttctactttttgtttttcatttattttaactgttcttttatctattaaattgttgtatgtggatggggaagttttgtttctcctcttagcatttgtttctataaccagaaataaaattctatattaaagaaatgaccctgcggctccggtgtggtccttctgcgcaggtggctactgaaggtggcggacggacagacggcctggacacacagacaccaggcccctggacacataggctcccgaccccctggatacacaaacacctgaccccctggacacacaggctcctgacccccggacacacagacccctgagcccctagacatacaggcacctggccccctggacacagaggctcccgaccccctagacatacaggctcccggccccctggacacacaggcccctgaccccctggacacacaggcccctgaccccctggacacacagacccctgacccctggacacacagacccctgagcccctggacatacaggctcccgg

SEQ ID NO: 3511 - protein, 733 aa, Homo sapiens; identical to SEQ ID NO: 395

SEQ ID NO: 3512 - DNA, 342 bp, Homo sapiens
ctgctccttcagcacagcccacactcctagggacctcgcacttcccggagcaacaccctcccactgtcctggctgcagggcgggcgcgccgcgtctctggaaggccccgtccacgaagacgccgttcttgccgaggcagcgcaggtagaagtgcggctcctggaagctgagctgcaggtggcgccgcgagatgaagctggacaggcccatgctcaagtccaccgagccctgcgacgagttgcggccgatggtgacgctgggctggcgcatgaggaactcgaactcgcggccctccagccgcgccagcgccggccccgggctctgccgtaccgaggcggccgc

SEQ ID NO: 3513 - protein, 49 aa, Homo sapiens
MKLDRPMLKSTEPCDELRPMVTLGWRMRNSNSRPSSRASAGPGLCRTEA

SEQ ID NO: 3514 - DNA, 503 bp, Homo sapiens
tagtaaatgtggatggcttgaataattacaatgagaacaagacttctgtttgtggtaactttgagtggtaagattcatatgggtgtctttttttctttatacttttctgtgttttccatgttttctgaatgctgggattacaggcatgagccaccgcacccggccagcattcattgtttagttcacgcgagttttcaggtttgcgttagtggtgtcgtgacatcttcttcatgatcctgtttgtgttttccacttctctggaaagaccgcttcataggttggtgccatcagacatgcgtaaccctagtgggtgtagccccccatcctggacggggccttgacggggcctctggcctcctcccctgccttcctcttctcagctctgaccagaggggatggaagcttgtgtccctctgggtgacagacccagcctgcccgccctacccagctcgggttctgggttcctttgtcctcgtccccagggctgcgtgtcctgctcgtcc

SEQ ID NO: 3515 - protein, 67 aa, Homo sapiens
MRTRLLFVVTLSGKIHMGVFFSLYFSVFSMFSECWDYRHEPPHPASIHCLVHASFQVCVSGVVTSSS

SEQ ID NO: 3516 - DNA, 1928 bp, Homo sapiens
ttcttagaagtggaaatgtgtgtagcaataggaacggttcctaaggccaagaataaatggattgcggttgtgggtcttttggtagcactaagctttctgttgcagtgtgtgagaggacccggggagagcccaatcttcgaagggacagatgaggggtatgacctggggagcccacaaccgcctttgcttttcgcagatgctgggaacgcagctctgctgccggcggggtggacagaccctcccccagccattgctgcccacctgctgcgtcagggcctcccctgcccagctcagtcttggccaagcccagtctggaggagcatgcaccgcctgtgagcggtctgggcagcgcttcccaggttgcccatcagatgagcccgtcccaggtgtcgaggaggagatctcctgagcggcagtctcggaaatccttccccgtggaaggacacgttaacctctcgtgcttcccatttcaaaattctgtttccaacacgatttgatgaaagattgaaatatctgaaaattcatttcgagcacagggtctggcattgtgattctcaggtgaactgggcgtatggttgaggtaggacttcaaaaaagtgttcgaacgtcatttgcagcatttaaactgagctccaaatgacgttcaaacacccctctcgggtagagttttcatggtggaacggttgcgcccaccaaacagaagcttatgtttttggcacagaaggcctgggccattttcatggacacctggctggacctcggtggaagtgaactccgtaggttgttgcgttcactgcagcacctcacatgataccgtcccctctcatggaacggagcctcccccatgcagcccccactcaaatggagttttaaaggctgggttcaggttacgggggcgtttctcaccgtctgaatgcggaggacagagacgagctccagggagcgtgggcgggtgacggcgctgagatgcgtgatgtctcggaaacgtcctcgcatccctcagcgcgggcgctgactgccgcggcccttgcctgtcttccaggagcgctccagcttcgcccacacaccccgggctgatgtcccctcgctccggcggcctgcagaccccagagtgcctgtctcgggagggctcccccattccacacgaccctgagtttgggtccaagttagcttctgtcccagagtaccggtattcccaaagcgcacccggctcccccgtcagcgcccagccagtgatcatggccgtgcctccccgaccgtccagcctcgtggccaagcccgtggcctacatgcccgcctccatcgtaacctcacagcagcccgcgggccacgccatccacgtcgtgcagcaggcccccaccgtcaccatggtcagggtggtcaccacatctgccaactcggccaacggatacatcctcaccagccagggcgcggcggggggctcccatgatgcggcgggcgcagccgtgctggacctgggcagcgaggccagaggtaatgcagccgcggctggcagccttcgcaggaccctttgtggtggtcccggccggcaagtccccaaggcagcgccattggcctgggcctggggcttgaggaggatgattctctgcttctgcctctcgctgccttgtccctttaaatcagcatgagctgggcaggtggctcatgcttataatcccagtgctttgggaggccaaagcgggtggattacttgaggtccggagttcgaggtcagcctggccaacatactgaaaccccgtctctactgaaaatacaaaaattagccaggcatgatgatgcgctcctgtagtcccagctactcaggaggctgagggaggagaatcgcttgaagcctggaggcagaggttgcagtgagctagactgcgccactgcactccagcctgggcgacagagcaaaaccctgtctc

SEQ ID NO: 3517 - protein, 190 aa, Homo sapiens
MSPRSGGLQTPECLSREGSPIPHDPEFGSKLASVPEYRYSQSAPGSPVSAQPVIMAVPPRPSSLVAKPVAYMPASIVTSQQPAGHAIHVVQQAPTVTMVRVVTTSANSANGYILTSQGAAGGSHDAAGAAVLDLGSEARGNAAAAGSLRRTLCGGPGRQVPKAAPLAWAWGLRRMILCFCLSLPCPFKSA

SEQ ID NO: 3518 - DNA, 486 bp, Homo sapiens
agggagaacacttttcaaagtgattccgaggcagtgcgggaggacacacgtgctgtgcagtggagtggggtcgcccgtggcccccatcagagtccccgtcccccaggacaagtgcagaacctccggcgggggggtgtggctgcaccccagcaccgggagggggcacgcacgacaccagaggaagggacagccccacccatgtcaacagcaggcaacctgtgttttcatttcaagtgggatacagtatttttttaataaggagccatacttttttttaagagtttgagatctgaatgtgatttctaattgtatcagacgttaatgttttaaagctataacaaagtttaaaatttctactttttgtttttcatttattttaactgttcttttatctattaaattgttgtatgtggatggggaagttttgtttctcctcttagcatttgtttctataaccagaaataaaattctatattaaagaaatga

SEQ ID NO: 3519 - protein, 94 aa, Homo sapiens
GRTLFKVIPRQCGRTHVLCSGVGSPVAPIRVPVPQDKCRTSGGGVWLHPSTGRGHARHQRKGQPHPCQQQATCVFISSGIQYFFNKEPYFFLRV

SEQ ID NO: 3520 - DNA, 676 bp, Homo sapiens
ggaactttgaaaagaaaaggaaattgtaagatgcaggaaaacaatctaaaaataagggacagaaccgggcgagagaccatttgttatatttcaaattctaccctcatttccaagagccacaatacattacccaggaacctctggagctgagtcccgtctacagactaatcctgtcttcatagcagcacatgtgagcaatgtaaagtattctcattaaataatattgctttgaagcagcggtattgtcaaggaggctcgaggcgaggctgtgggtaaacacgttttcatcaggacagtgaaatcagagaacgctaccgctaacaggaagaatgcgctgcgtctcagaagccaggaaaccacgtgggtcagggccagcctgagcagaccaggccaaaaggcgacctcgatttgtgaccaacacgtggtgcaatcccagcacgcggcgctccctgcagacatcagcttgtattgaggaggccaacctgcagtggcccagaagcaaacagaggtctcccatcagggtggccacaggcagccctgaggacatatagtcaccacgcgggagagagcagcagcaggtaatcacagaggccccccgtgacgggcgctcccgggagggcgccggctcaggccacacaggcaccggtgtcggggagccacctccaacccccacccc

SEQ ID NO: 3521 - protein, 39 aa, Homo sapiens [sequence omitted]

SEQ ID NO: 3522 - DNA, 2428 bp, Homo sapiens
gcgcattcttcctgttagcggtagcgttctctgatttcactgcttcattgccaagggcgtggaaagggggtggtggatggagccgggaggtggcgagcacaggacccaagaaccttctctaggttctcaagggtgagctgacccgggcaatgtgcaggaatgtggggagcaaaagtagctgattccagccccgttctggggtcactggggaggcagaggctgagggcctgttctctggtcaccagggactgggggcacggtccacagcggatgagaacagcaggtcacagtagtggctttgggaagggcccctcctgctttgccctgttcggaaaggggctccctcagagcccctgggcccagtaacccgcttctgtctcctgactcctgctggataaattgccaggtttatcaaatacaagaaaacacctgctttggctaggaggtaagtcccaaaaagaacgtcttaagtagagcaaaggcatccaccgaggccatttggtggcccctgggaagtggggaagcagggcctgagcgtccccaggctgctagggcagcagctggctcagggcacactctctcgtgccagcttctgccaccagcccagtgtccacggagccgcggggccagaggagctcagggagacctggctgtctagggcatggtacccagtatcccggtgtgtgcccatcctcagccacttgtgtctttctttccatgtgggagttctcccggtgacacctgccctccgttgagggtggaatctgtcactcatgcctttgagggacccagatggaccatccctcttctgcttgctttctacattcctaaaaacctcaacgttaatccctcaccagtcgggccgagtgtggcctcatggttctgccgcggcccagtcttctcccactggcttcacgctagagggcgccatgcgctctgggtgaaatgagacgctggtgtggggtccccatgtagagaccctcaggtccctatccagagaccctccaggcagtgctgggaagacactggtggcggggaccatgaccaggcgggtggagccatgtgtgtctcacacctgccgcccctcactttccttcccgaggtctggtaggtcctctttgggatttgctgtttatttgtatctcccttttctttgatttaagaacaatgccaagtgaaaaagctgggaatgaatttctgagttgctgagtgttccctgctcctaggtaccacgctctgtgcttctcaggcagggaggagatggattcggtggagttgggccaggacgggggcttcaccctgccccctccagactgccgaagcccccaagaagttttgagcccagctgggcctcgcctccccggctcctgggtccattttctgtactggtttgagatcacaggcatcattcagcgaatgctcttgtgtcctctgcataaagagggccctccctggagcacccccggggagctgggactctccagaaagccccgggtgagggctccgtcttgagagagagagaaatcccttctttgggcgattcagtgagttcaggaggaggaggaagcttttccttggctttgaaatcagtgtttttatggagacaaagaacagacctcagtgggaaaaatgaaaacgtaatggaacacggggaggtgtcggagaagaaaggattttccccttcgctttcagagccggcgggagtgcaggtctgttttgcttcagaagcctcacattctgctttgcccttgagtgacttcatgcgggatgaggaactgttgacccctctagagaggacaccccaagtccatcctgggctcctcctcacccctctgagaaagcccccctaaaaaaaggcttcagagtcaccggcatgccgcctcacgttgcaggacggaatcgcgcgctcctcacgctggagtaagttacgaaacatgatcgtcaggctctttgcaaacgcagagccccagaacgctggatggaggcctcctcggccctgcgggcggcctggctgcggtaggtctgctgcaaggagccaccacggggactgcgccacactcctgatgaaaacgtgtttacccacagcctcgcctcgagcctccttgacaataccgctgcttcaaagcaatattatttaatgagaatactttacattgctcacatgtgctgctatgaagacaggattagtctgtagacgggactcagctccagaggttcctgggtaatgtattgtggctcttggaaatgagggtagaatttgaaatataacaaatggtctctcgcccggttctgtcccttatttttagattgttttcctgcatcttacaatttccttttcttttcaaagttcctttctccaggcctgtttttcagtgctcaggacacggttttcatcacatacttactgtttttttggttgggttttgat

SEQ ID NO: 3523 - protein, 95 aa, Homo sapiens
MVPSIPVCAHPQPLVSFFPCGSSPGDTCPPLRVESVTHAFEGPRWTIPLLLAFYIPKNLNVNPSPVGPSVASWFCRGPVFSHWLHARGRHALWVK

SEQ ID NO: 3524 - DNA, 3079 bp, Homo sapiens
aatcagtgtttttatggagacaaagaacagacctcagtgggaaaaatgaaaacgtaatggaacacggggaggtgtcggagaagaaaggattttccccttcgctttcagagccggcgggagtgcaggtctgttttgcttcagaagcctcacattctgctttgcccttgagtgacttcatgcgggatgaggaactgttgacccctctagagaggacaccccaagtccatcctgggctcctcctcacccctctgagaaagcccccctaaaaaaaggcttcagagtcaccggcatgccgcctcacgttgcaggacggaatcgcgcgctcctcacgctggagtaagttacgaaacatgatcgtcaggctctttgcaaacgcagagccccagaacgctggatggaggcctcctcggccctgcgggcggcctggctgcggtaggtctgctgcaaggagccaccacggggactgcgccacactcctgatgaaaacgtgtttacccacagcctcgcctcgagcctccttgacaataccgctgcttcaaagcaatattatttaatgagaatactttacattgctcacatgtgctgctatgaagacaggattagtctgtagacgggactcagctccagaggttcctgggtaatgtattgtggctcttggaaatgagggtagaatttgaaatataacaaatggtctctcgcccggttctgtcccttatttttagattgttttcctgcatcttacaatttccttttcttttcaaagttcctttctccaggcctgtttttcagtgctcaggacacggttttcatcacatacttactgtttttttggttgggttttgatacgaaaagctgctacgtttggtgaccagagggagggtttggaatctgtgctttgcaggggatctcggtgggtaccgcggcccctcgcagggtggcgagtggggtccgtgcctcgagaagggggcccttacccacaccgtgcggcttgaattctgtcggagttgaatctgtggaaaggattgtcccattagagctgctgcgtcctttcctctgtcctccctgtcacccaaaccccgaagtcacagctgcttagaagaatgggattttggggatacaaccacacacatttccctctggactgaaattttaaaaacagacccatttcatgacttctttagggaaaatagtttcagtcttgggttgtcttgtgagcccacgggcatgggaccctgtctctgctgggcttttccggccccgtcccagctcctcctcaggcagaggctgcagccctcagctctgctgctggatggaacatttcaaccccctccgggaaggtgggcagggtggagggcccagggctaggcctgccatgcaccatgagcaggggtgctacctgggtgtgtgaagttgggctggcttttcctggaggtgggtgagaaggctctccgggcaaatcagaaggccacgagagagagaggagcggggagagtggtgaggaggattcgtctctgactgatgaacctcgccgtgcctgtctgtcacatccaagtctgtgccagctgctgggaggtcagactcctgccctgagaaacagcccagtccttggagaatgaaaccctgagggtcagtgagtggaggccttccctcggggccagccattcccgggaggcctgagtgtgacctggaagctctgtgggtcaccaagactggcattttccttgtatttttgtgcagggctgaagtgagcgttcctcctctgaattggtgaggctttggaaattttttgtttcttctactcatcctaatggctggttttggctgcccggagtatcagagaatatcactaagagggcagtcagtttatttttaggcatctttctttctgtccagggagaaacccctcggaagaatcttagtcactctttgcacctgccctgtcattctcgccatggggaaaatgcgttgaaaagaaaaataccggggccagggagaagccgtgaatgtatttatttgctttggtgaagctgctgaacactggctgcggagggccccccgcccccatcccgcttcaggccccagtgacccagttgcgtcttaagttccatcgtccagatttcaggccaccagaggctgccaaaggtgactgaagcggtctccaagtcactctgtcaccatcaaatcaagtattttaagtttggctcttctttttttcaagaaaggctttttggatacctagaataccttcatgtatgtggcttgatttctgtttcaggaaaaggggggcgggaggagagacaacagccgtgttccagagtctgtcctgagatgtcgctgagtccagacacttgggctgcacgtgccctgcagatgacaaaggccggcagctcagcacacgtgcaggaggggttaaagccaatattgagtttttgttcttgttgttttaatctgaacgattattctcctgtaaaaataatttgggaggggcgggtgttgttcggtgtgtgtgtgtgtgtgtgtgtgtgtgtgtgtgtgtgtatttttttttttacagtggcgcctgtctaaagtatttttcacaacatgtttgataatcagtgctttaaaaagcagcagtgtcctatgaagtggaaatgtcagttctagagcattggatgtgaagttctggtcatgtcaccttgcgtgtctcaccctggaggagtgaaggtgggcgcccggcgggggggtgtggctgcaccccagcaccgggagggggcacgcacgacaccagaggaagggacagccccacccatgtcaacagcaggcaacctgtgttttcatttcaagtgggatacagtatttttttaataaggagccatacttttttttaagagtttgagatctgaatgtgatttctaattgtatcagacgttaatgttttaaagctataacaaagtttaaaatttctactttttgtttttcatttattttaactgttcttttatctattaaattgttgtatgtggatggggaagttttgtttctcctcttagcatttgtttctataaccagaaataaaattctatattaaagaaatgac

SEQ ID NO: 3525 - protein, 79 aa, Homo sapiens
MTSLGKIVSVLGCLVSPRAWDPVSAGLFRPRPSSSSGRGCSPQLCCWMEHFNPLREGGQGGGPRARPAMHHEQGCYLGV

SEQ ID NO: 3526 - DNA, 3448 bp, Homo sapiens
aatcagtgtttttatggagacaaagaacagacctcagtgggaaaaatgaaaacgtaatggaacacggggaggtgtcggagaagaaaggattttccccttcgctttcagagccggcgggagtgcaggtctgttttgcttcagaagcctcacattctgctttgcccttgagtgacttcatgcgggatgaggaactgttgacccctctagagaggacaccccaagtccatcctgggctcctcctcacccctctgagaaagcccccctaaaaaaaggcttcagagtcaccggcatgccgcctcacgttgcaggacggaatcgcgcgctcctcacgctggagtaagttacgaaacatgatcgtcaggctctttgcaaacgcagagccccagaacgctggatggaggcctcctcggccctgcgggcggcctggctgcggtaggtctgctgcaaggagccaccacggggactgcgccacactcctgatgaaaacgtgtttacccacagcctcgcctcgagcctccttgacaataccgctgcttcaaagcaatattatttaatgagaatactttacattgctcacatgtgctgctatgaagacaggattagtctgtagacgggactcagctccagaggttcctgggtaatgtattgtggctcttggaaatgagggtagaatttgaaatataacaaatggtctctcgcccggttctgtcccttatttttagattgttttcctgcatcttacaatttccttttcttttcaaagttcctttctccaggcctgtttttcagtgctcaggacacggttttcatcacatacttactgtttttttggttgggttttgatacgaaaagctgctacgtttggtgaccagagggagggtttggaatctgtgctttgcaggggatctcggtgggtaccgcggcccctcgcagggtggcgagtggggtccgtgcctcgagaagggggcccttacccacaccgtgcggcttgaattctgtcggagttgaatctgtggaaaggattgtcccattagagctgctgcgtcctttcctctgtcctccctgtcacccaaaccccgaagtcacagctgcttagaagaatgggattttggggatacaaccacacacatttccctctggactgaaattttaaaaacagacccatttcatgacttctttagggaaaatagtttcagtcttgggttgtcttgtgagcccacgggcatgggaccctgtctctgctgggcttttccggccccgtcccagctcctcctcaggcagaggctgcagccctcagctctgctgctggatggaacatttcaaccccctccgggaaggtgggcagggtggagggcccagggctaggcctgccatgcaccatgagcaggggtgctacctgggtgtgtgaagttgggctggcttttcctggaggtgggtgagaaggctctccgggcaaatcagaaggccacgagagagagaggagcggggagagtggtgaggaggattcgtctctgactgatgaacctcgccgtgcctgtctgtcacatccaagtctgtgccagctgctgggaggtcagactcctgccctgagaaacagcccagtccttggagaatgaaaccctgagggtcagtgagtggaggccttccctcggggccagccattcccgggaggcctgagtgtgacctggaagctctgtgggtcaccaagactggcattttccttgtatttttgtgcagggctgaagtgagcgttcctcctctgaattggtgaggctttggaaattttttgtttcttctactcatcctaatggctggttttggctgcccggagtatcagagaatatcactaagagggcagtcagtttatttttaggcatctttctttctgtccagggagaaacccctcggaagaatcttagtcactctttgcacctgccctgtcattctcgccatggggaaaatgcgttgaaaagaaaaataccggggccagggagaagccgtgaatgtatttatttgctttggtgaagctgctgaacactggctgcggagggccccccgcccccatcccgcttcaggccccagtgacccagttgcgtcttaagttccatcgtccagatttcaggccaccagaggctgccaaaggtgactgaagcggtctccaagtcactctgtcaccatcaaatcaagtattttaagtttggctcttctttttttcaagaaaggctttttggatacctagaataccttcatgtatgtggcttgatttctgtttcaggaaaaggggggcgggaggagagacaacagccgtgttccagagtctgtcctgagatgtcgctgagtccagacacttgggctgcacgtgccctgcagatgacaaaggccggcagctcagcacacgtgcaggaggggttaaagccaatattgagtttttgttcttgttgttttaatctgaacgattattctcctgtaaaaataatttgggaggggcgggtgttgttcggtgtgtgtgtgtgtgtgtgtgtgtgtgtgtgtgtgtgtatttttttttttacagtggcgcctgtctaaagtatttttcacaacatgtttgataatcagtgctttaaaaagcagcagtgtcctatgaagtggaaatgtcagttctagagcattggatgtgaagttctggtcatgtcaccttgcgtgtctcaccctggaggagtgaaggtgggcgcccggcgggggggtgtggctgcaccccagcaccgggagggggcacgcacgacaccagaggaagggacagccccacccatgtcaacagcaggcaacctgtgttttcatttcaagtgggatacagtatttttttaataaggagccatacttttttttaagagtttgagatctgaatgtgatttctaattgtatcagacgttaatgttttaaagctataacaaagtttaaaatttctactttttgtttttcatttattttaactgttcttttatctattaaattgttgtatgtggatggggaagttttgtttctcctcttagcatttgtttctataaccagaaataaaattctatattaaagaaatgaccctgcggctccggtgtggtccttctgcgcaggtggctactgaaggtggcggacggacagacggcctggacacacagacaccaggcccctggacacataggctcccgaccccctggatacacaaacacctgaccccctggacacacaggctcctgacccccggacacacagacccctgagcccctagacatacaggcacctggccccctggacacagaggctcccgaccccctagacatacaggctcccggccccctggacacacaggcccctgaccccctggacacacaggcccctgaccccctggacacacagacccctgacccctggacacacagacccctgagcccctggacatacaggctcccgg

SEQ ID NO: 3527 - protein, 79 aa, Homo sapiens; identical to SEQ ID NO: 3525

SEQ ID NO: 3528 - DNA, 1660 bp, Homo sapiens
tttagggaaaatagtttcagtcttgggttgtcttgtgagcccacgggcatgggaccctgtctctgctgggcttttccggccccgtcccagctcctcctcaggcagaggctgcagccctcagctctgctgctggatggaacatttcaaccccctccgggaaggtgggcagggtggagggcccagggctaggcctgccatgcaccatgagcaggggtgctacctgggtgtgtgaagttgggctggcttttcctggaggtgggtgagaaggctctccgggcaaatcagaaggccacgagagagagaggagcggggagagtggtgaggaggattcgtctctgactgatgaacctcgccgtgcctgtctgtcacatccaagtctgtgccagctgctgggaggtcagactcctgccctgagaaacagcccagtccttggagaatgaaaccctgagggtcagtgagtggaggccttccctcggggccagccattcccgggaggcctgagtgtgacctggaagctctgtgggtcaccaagactggcattttccttgtatttttgtgcagggctgaagtgagcgttcctcctctgaattggtgaggctttggaaattttttgtttcttctactcatcctaatggctggttttggctgcccggagtatcagagaatatcactaagagggcagtcagtttatttttaggcatctttctttctgtccagggagaaacccctcggaagaatcttagtcactctttgcacctgccctgtcattctcgccatggggaaaatgcgttgaaaagaaaaataccggggccagggagaagccgtgaatgtatttatttgctttggtgaagctgctgaacactggctgcggaggagagacaacagccgtgttccagagtctgtcctgagatgtcgctgagtccagacacttgggctgcacgtgccctgcagatgacaaaggccggcagctcagcacacgtgcaggaggggttaaagccaatattgagtttttgttcttgttgttttaatctgaacgattattctcctgtaaaaataatttgggaggggcgggtgttgttcggtgtgtgtgtgtgtgtgtgtgtgtgtgtgtgtgtgtgtatttttttttttacagtggcgcctgtctaaagtatttttcacaacatgtttgataatcagtgctttaaaaagcagcagtgtcctatgaagtggaaatgtcagttctagagcattggatgtgaagttctggtcatgtcaccttgcgtgtctcaccctggaggagtgaaggtgggcgcccggcgggggggtgtggctgcaccccagcaccgggagggggcacgcacgacaccagaggaagggacagccccacccatgtcaacagcaggcaacctgtgttttcatttcaagtgggatacagtatttttttaataaggagccatacttttttttaagagtttgagatctgaatgtgatttctaattgtatcagacgttaatgttttaaagctataacaaagtttaaaatttctactttttgtttttcatttattttaactgttcttttatctattaaattgttgtatgtggatggggaagttttgtttctcctcttagcatttgtttctataaccagaaataaaattctatattaaagaaatgac

SEQ ID NO: 3529 - protein, 79 aa, Homo sapiens
MSLSPDTWAARALQMTKAGSSAHVQEGLKPILSFCSCCFNLNDYSPVKIIWEGRVLFGVCVCVCVCVCVCIFFFTVAPV

SEQ ID NO: 3530 - DNA, 1967 bp, Homo sapiens
tttagggaaaatagtttcagtcttgggttgtcttgtgagcccacgggcatgggaccctgtctctgctgggcttttccggccccgtcccagctcctcctcaggcagaggctgcagccctcagctctgctgctggatggaacatttcaaccccctccgggaaggtgggcagggtggagggcccagggctaggcctgccatgcaccatgagcaggggtgctacctgggtgtgtgaagttgggctggcttttcctggaggtgggtgagaaggctctccgggcaaatcagaaggccacgagagagagaggagcggggagagtggtgaggaggattcgtctctgactgatgaacctcgccgtgcctgtctgtcacatccaagtctgtgccagctgctgggaggtcagactcctgccctgagaaacagcccagtccttggagaatgaaaccctgagggtcagtgagtggaggccttccctcggggccagccattcccgggaggcctgagtgtgacctggaagctctgtgggtcaccaagactggcattttccttgtatttttgtgcagggctgaagtgagcgttcctcctctgaattggtgaggctttggaaattttttgtttcttctactcatcctaatggctggttttggctgcccggagtatcagagaatatcactaagagggcagtcagtttatttttaggcatctttctttctgtccagggagaaacccctcggaagaatcttagtcactctttgcacctgccctgtcattctcgccatggggaaaatgcgttgaaaagaaaaataccggggccagggagaagccgtgaatgtatttatttgctttggtgaagctgctgaacactggctgcggagggccccccgcccccatcccgcttcaggccccagtgacccagttgcgtcttaagttccatcgtccagatttcaggccaccagaggctgccaaaggtgactgaagcggtctccaagtcactctgtcaccacttttttctgtcactttttttgctccttacccactgaaatgagagactctgaattagagtttttgtttatcaagtattttaagtttggctcttctttttttcaagaaaggctttttggatacctagaataccttcatgtatgtggcttgatttctgtttcaggaaaaggggggcgggaggagagacaacagccgtgttccagagtctgtcctgagatgtcgctgagtccagacacttgggctgcacgtgccctgcagatgacaaaggccggcagctcagcacacgtgcaggaggggttaaagccaatattgagtttttgttcttgttgttttaatctgaacgattattctcctgtaaaaataatttgggaggggcgggtgttgttcggtgtgtgtgtgtgtgtgtgtgtgtgtgtgtgtgtgtgtatttttttttttacagtggcgcctgtctaaagtatttttcacaacatgtttgataatcagtgctttaaaaagcagcagtgtcctatgaagtggaaatgtcagttctagagcattggatgtgaagttctggtcatgtcaccttgcgtgtctcaccctggaggagtgaaggtgggcgcccggcgggggggtgtggctgcaccccagcaccgggagggggcacgcacgacaccagaggaagggacagccccacccatgtcaacagcaggcaacctgtgttttcatttcaagtgggatacagtatttttttaataaggagccatacttttttttaagagtttgagatctgaatgtgatttctaattgtatcagacgttaatgttttaaagctataacaaagtttaaaatttctactttttgtttttcatttattttaactgttcttttatctattaaattgttgtatgtggatggggaagttttgtttctcctcttagcatttgtttctataaccagaaataaaattctatattaaagaaatgac

SEQ ID NO: 3531 - protein, 138 aa, Homo sapiens
MRDSELEFLFIKYFKFGSSFFQERLFGYLEYLHVCGLISVSGKGGREERQQPCSRVCPEMSLSPDTWAARALQMTKAGSSAHVQEGLKPILSFCSCCFNLNDYSPVKIIWEGRVLFGVCVCVCVCVCVCIFFFTVAPV

SEQ ID NO: 3532 - DNA, 2336 bp, Homo sapiens
tttagggaaaatagtttcagtcttgggttgtcttgtgagcccacgggcatgggaccctgtctctgctgggcttttccggccccgtcccagctcctcctcaggcagaggctgcagccctcagctctgctgctggatggaacatttcaaccccctccgggaaggtgggcagggtggagggcccagggctaggcctgccatgcaccatgagcaggggtgctacctgggtgtgtgaagttgggctggcttttcctggaggtgggtgagaaggctctccgggcaaatcagaaggccacgagagagagaggagcggggagagtggtgaggaggattcgtctctgactgatgaacctcgccgtgcctgtctgtcacatccaagtctgtgccagctgctgggaggtcagactcctgccctgagaaacagcccagtccttggagaatgaaaccctgagggtcagtgagtggaggccttccctcggggccagccattcccgggaggcctgagtgtgacctggaagctctgtgggtcaccaagactggcattttccttgtatttttgtgcagggctgaagtgagcgttcctcctctgaattggtgaggctttggaaattttttgtttcttctactcatcctaatggctggttttggctgcccggagtatcagagaatatcactaagagggcagtcagtttatttttaggcatctttctttctgtccagggagaaacccctcggaagaatcttagtcactctttgcacctgccctgtcattctcgccatggggaaaatgcgttgaaaagaaaaataccggggccagggagaagccgtgaatgtatttatttgctttggtgaagctgctgaacactggctgcggagggccccccgcccccatcccgcttcaggccccagtgacccagttgcgtcttaagttccatcgtccagatttcaggccaccagaggctgccaaaggtgactgaagcggtctccaagtcactctgtcaccacttttttctgtcactttttttgctccttacccactgaaatgagagactctgaattagagtttttgtttatcaagtattttaagtttggctcttctttttttcaagaaaggctttttggatacctagaataccttcatgtatgtggcttgatttctgtttcaggaaaaggggggcgggaggagagacaacagccgtgttccagagtctgtcctgagatgtcgctgagtccagacacttgggctgcacgtgccctgcagatgacaaaggccggcagctcagcacacgtgcaggaggggttaaagccaatattgagtttttgttcttgttgttttaatctgaacgattattctcctgtaaaaataatttgggaggggcgggtgttgttcggtgtgtgtgtgtgtgtgtgtgtgtgtgtgtgtgtgtgtatttttttttttacagtggcgcctgtctaaagtatttttcacaacatgtttgataatcagtgctttaaaaagcagcagtgtcctatgaagtggaaatgtcagttctagagcattggatgtgaagttctggtcatgtcaccttgcgtgtctcaccctggaggagtgaaggtgggcgcccggcgggggggtgtggctgcaccccagcaccgggagggggcacgcacgacaccagaggaagggacagccccacccatgtcaacagcaggcaacctgtgttttcatttcaagtgggatacagtatttttttaataaggagccatacttttttttaagagtttgagatctgaatgtgatttctaattgtatcagacgttaatgttttaaagctataacaaagtttaaaatttctactttttgtttttcatttattttaactgttcttttatctattaaattgttgtatgtggatggggaagttttgtttctcctcttagcatttgtttctataaccagaaataaaattctatattaaagaaatgaccctgcggctccggtgtggtccttctgcgcaggtggctactgaaggtggcggacggacagacggcctggacacacagacaccaggcccctggacacataggctcccgaccccctggatacacaaacacctgaccccctggacacacaggctcctgacccccggacacacagacccctgagcccctagacatacaggcacctggccccctggacacagaggctcccgaccccctagacatacaggctcccggccccctggacacacaggcccctgaccccctggacacacaggcccctgaccccctggacacacagacccctgacccctggacacacagacccctgagcccctggacatacaggctcccgg

SEQ ID NO: 3533 - protein, 138 aa, Homo sapiens; identical to SEQ ID NO: 3531

SEQ ID NO: 3534 - DNA, 2029 bp, Homo sapiens
tttagggaaaatagtttcagtcttgggttgtcttgtgagcccacgggcatgggaccctgtctctgctgggcttttccggccccgtcccagctcctcctcaggcagaggctgcagccctcagctctgctgctggatggaacatttcaaccccctccgggaaggtgggcagggtggagggcccagggctaggcctgccatgcaccatgagcaggggtgctacctgggtgtgtgaagttgggctggcttttcctggaggtgggtgagaaggctctccgggcaaatcagaaggccacgagagagagaggagcggggagagtggtgaggaggattcgtctctgactgatgaacctcgccgtgcctgtctgtcacatccaagtctgtgccagctgctgggaggtcagactcctgccctgagaaacagcccagtccttggagaatgaaaccctgagggtcagtgagtggaggccttccctcggggccagccattcccgggaggcctgagtgtgacctggaagctctgtgggtcaccaagactggcattttccttgtatttttgtgcagggctgaagtgagcgttcctcctctgaattggtgaggctttggaaattttttgtttcttctactcatcctaatggctggttttggctgcccggagtatcagagaatatcactaagagggcagtcagtttatttttaggcatctttctttctgtccagggagaaacccctcggaagaatcttagtcactctttgcacctgccctgtcattctcgccatggggaaaatgcgttgaaaagaaaaataccggggccagggagaagccgtgaatgtatttatttgctttggtgaagctgctgaacactggctgcggaggagagacaacagccgtgttccagagtctgtcctgagatgtcgctgagtccagacacttgggctgcacgtgccctgcagatgacaaaggccggcagctcagcacacgtgcaggaggggttaaagccaatattgagtttttgttcttgttgttttaatctgaacgattattctcctgtaaaaataatttgggaggggcgggtgttgttcggtgtgtgtgtgtgtgtgtgtgtgtgtgtgtgtgtgtgtatttttttttttacagtggcgcctgtctaaagtatttttcacaacatgtttgataatcagtgctttaaaaagcagcagtgtcctatgaagtggaaatgtcagttctagagcattggatgtgaagttctggtcatgtcaccttgcgtgtctcaccctggaggagtgaaggtgggcgcccggcgggggggtgtggctgcaccccagcaccgggagggggcacgcacgacaccagaggaagggacagccccacccatgtcaacagcaggcaacctgtgttttcatttcaagtgggatacagtatttttttaataaggagccatacttttttttaagagtttgagatctgaatgtgatttctaattgtatcagacgttaatgttttaaagctataacaaagtttaaaatttctactttttgtttttcatttattttaactgttcttttatctattaaattgttgtatgtggatggggaagttttgtttctcctcttagcatttgtttctataaccagaaataaaattctatattaaagaaatgaccctgcggctccggtgtggtccttctgcgcaggtggctactgaaggtggcggacggacagacggcctggacacacagacaccaggcccctggacacataggctcccgaccccctggatacacaaacacctgaccccctggacacacaggctcctgacccccggacacacagacccctgagcccctagacatacaggcacctggccccctggacacagaggctcccgaccccctagacatacaggctcccggccccctggacacacaggcccctgaccccctggacacacaggcccctgaccccctggacacacagacccctgacccctggacacacagacccctgagcccctggacatacaggctcccgg

SEQ ID NO: 3535 - protein, 79 aa, Homo sapiens; identical to SEQ ID NO: 3529

SEQ ID NO: 3536 - DNA, 2847 bp, Homo sapiens
cccggaagttgaccggggtgcggagctcctgggctgcagctcctggagtttccgaggttcgtgcgcgtctggtggcggcggcgtgatgttctcggcaggagcggagagtttgctccaccaggccagggagatccaggacgaggagctgaagaagttctgttcccggatctgtaaactgctgcaggcggaggacttggggccggacaccctcgactccctgcagaggctcttcctcatcatctcagccacgaagtacagccggaggctggagaagacatgcgtagacctgctgcaggccaccctcggcctgcctgcatgccccgagcagctccaggtgctttgcgccgccatcctgcgagagatgtccccctctgacagcctcagcctggcctgggaccacacgcagaacagccggcagctgagcctggtggcctccgttctcttggcccagggtgacagaaacgaggaggtcagagccgtgggccagggcgtgctacgagcgctggagagccggcagcctgagggacccagcctcagacacctcctccccgtcatggccaagaccaggccaccctgctcagcaagcggctggtcgactggctgcgctacgccagcctccagcaagggctcccacactccggcggcttcttctccacgcccagggcccggcagccgggccccgtcaccgaggtggacggggcggtagccacagacttcttcacggtgctctccagcggccaccgcttcacagacgaccagtggctgaacgtgcaggccttctctatgctgcgggcgtggctgctgcacagcggccccgagggcccgggcaccctggacacagatgacaggtcagagcaggagggctccactctgtcggtgatctccgccacctcctctgccggccgcctgctgccgccccgggagcggcttcgggaggtggccttcgagtactgccagcgcctcattgagcaaagtaaccgacgagccctgaggaagggggactccgacctgcagaaagcttgcctggtggaggccgtgctggtgctggacgtgctgtgccggcaggacccgtccttcctgtaccgaagtctctcctgcctgaaggccctgcacgggcgggtgcgcggggacccggcctctgtgcgggtgctgctgcccctcgcccacttcttcctgagccacggggaagcggctgcagtggactcggaagccgtctaccagcacctgttcaccaggatcccggtggagcagttccacagccccatgctggcctttgaattcatccagttctgcagggacaacctccacctgttcagcgggcacctcagcaccctcagattgagcttccccaacctctttaagttcctggcctggaacagcccacccctcacctccgagtttgtggcgctcctcccggccctggtggacgctggcacagccctggagatgctgcacgcgctgctggacctgccctgcttgacggcggtgctggacctgcagctcaggtcagcaccggctgcatccgagaggccactctgggacacctctctcagggcccccagctgcctggaggccttccgggacccgcagttccagggtcttttccaatacctgctgcgccccaaggccagtggcgccactgagaggttggcgccactccaccagctgctgcagcccatggccggctgtgcccgcgtggcccagtgtgcccaggccgtgcccacgctgctgcaggcattcttctcagcagtgacccaggtggctgacgggtccctgatcaaccagctggcgctgctgctcctgggcaggagcgactcgctctacccggccccagggtacgctgccggtgtgcacagtgtgctgagttctcagttcctggccctgtgtacgctgaaaccctccctggtggtggagctggcaagagacctgctggagttcctgggcagcgtgaatggtctctgcagcagggcgagcctcgtcaccagcgtggtgtgggccatcggcgagtacctgtcggtgacctacgatcggaggtgcaccgtggagcagatcaacaagttcttcgaagccctggaggctctgctattcgaggtcacccagtgccgcccctctgctgccctgcccaggtgtcccccccaggtggtcaccgtgctgatgaccacgctgacgaagctggcctcccggagccaagatctgatccccagggcctctttattgctgtcaaagatgaggaccctggctcacagtccagccaccagctccacgcacagcgaggagggcgcggaagccatccgtacccgggccacagagctgctgaccctgctgaagatgcctagcgtggcccagtttgtgctcacacccagcacggaggtgtgcagcccccgctatcaccgcgatgccaacacggccctgcccctggccctgcgcacggtcagccggctggtggagagggaggccggcctcatgccagggtgaagggacagtggccagggacttcggtgcagattaagagcctgggcagccagcttgctactgaggccaggctgataggagctcaggagggcgcgggagtcctgggagaggaggcaaggcccacggtgggcttggcaccctcacagacacgcggggctggcccccctgctcaccctctgggctttgtctccgagccttttgctcccaggcaacactgagctgagctgaggggtgccatggagcggctctgattggaggcttgaggccctgtggctgggtcgggtggaggctgctgggtctgtttcctagtcttttgtttttggacagttgatgggcaagaagagctgcagtaaaagtaaatctcctttaataagc

SEQ ID NO: 3537 - protein, 563 aa, Homo sapiens
MLRAWLLHSGPEGPGTLDTDDRSEQEGSTLSVISATSSAGRLLPPRERLREVAFEYCQRLIEQSNRRALRKGDSDLQKACLVEAVLVLDVLCRQDPSFLYRSLSCLKALHGRVRGDPASVRVLLPLAHFFLSHGEAAAVDSEAVYQHLFTRIPVEQFHSPMLAFEFIQFCRDNLHLFSGHLSTLRLSFPNLFKFLAWNSPPLTSEFVALLPALVDAGTALEMLHALLDLPCLTAVLDLQLRSAPAASERPLWDTSLRAPSCLEAFRDPQFQGLFQYLLRPKASGATERLAPLHQLLQPMAGCARVAQCAQAVPTLLQAFFSAVTQVADGSLINQLALLLLGRSDSLYPAPGYAAGVHSVLSSQFLALCTLKPSLVVELARDLLEFLGSVNGLCSRASLVTSVVWAIGEYLSVTYDRRCTVEQINKFFEALEALLFEVTQCRPSAALPRCPPQVVTVLMTTLTKLASRSQDLIPRASLLLSKMRTLAHSPATSSTHSEEGAEAIRTRATELLTLLKMPSVAQFVLTPSTEVCSPRYHRDANTALPLALRTVSRLVEREAGLMPG

SEQ ID NO: 3538 - DNA, 3376 bp, Homo sapiens
cccggaagttgaccggggtgcggagctcctgggctgcagctcctggagtttccgaggttcgtgcgcgtctggtggcggcggcgtgatgttctcggcaggagcggagagtttgctccaccaggccagggagatccaggacgaggagctgaagaagttctgttcccggatctgtaaactgctgcaggcggaggacttggggccggacaccctcgactccctgcagaggctcttcctcatcatctcagccacgaagtacagccggaggctggagaagacatgcgtagacctgctgcaggccaccctcggcctgcctgcatgccccgagcagctccaggtgctttgcgccgccatcctgcgagagatgtccccctctgacagcctcagcctggcctgggaccacacgcagaacagccggcagctgagcctggtggcctccgttctcttggcccagggtgacagaaacgaggaggtcagagccgtgggccagggcgtgctacgagcgctggagagccggcagcctgagggacccagcctcagacacctcctccccgtcatggccaagaccaggccaccctgctcagcaagcggctggtcgactggctgcgctacgccagcctccagcaagggctcccacactccggcggcttcttctccacgcccagggcccggcagccgggccccgtcaccgaggtggacggggcggtagccacagacttcttcacggtgctctccagcggccaccgcttcacagacgaccagtggctgaacgtgcaggccttctctatgctgcgggcgtggctgctgcacagcggccccgagggcccgggcaccctggacacagatgacaggtcagagcaggagggctccactctgtcggtgatctccgccacctcctctgccggccgcctgctgccgccccgggagcggcttcgggaggtggccttcgagtactgccagcgcctcattgagcaaagtaaccgacgagccctgaggaagggggactccgacctgcagaaagcttgcctggtggaggccgtgctggtgctggacgtgctgtgccggcaggacccgtccttcctgtaccgaagtctctcctgcctgaaggccctgcacgggcgggtgcgcggggacccggcctctgtgcgggtgctgctgcccctcgcccacttcttcctgagccacggggaagcggctgcagtggactcggaagccgtctaccagcacctgttcaccaggatcccggtggagcagttccacagccccatgctggcctttgaattcatccagttctgcagggacaacctccacctgttcagcgggcacctcagcaccctcagattgagcttccccaacctctttaagttcctggcctggaacagcccacccctcacctccgagtttgtggcgctcctcccggccctggtggacgctggcacagccctggagatgctgcacgcgctgctggacctgccctgcttgacggcggtgctggacctgcagctcaggtcagcaccggctgcatccgagaggccactctgggacacctctctcagggcccccagctgcctggaggccttccgggacccgcagttccagggtcttttccaatacctgctgcgccccaaggccagtggcgccactgagaggttggcgccactccaccagctgctgcagcccatggccggctgtgcccgcgtggcccagtgtgcccaggccgtgcccacgctgctgcaggcattcttctcagcagtgacccaggtggctgacgggtccctgatcaaccagctggcgctgctgctcctgggcaggagcgactcgctctacccggccccagggtacgctgccggtgtgcacaggtaggtccctcctgcgctcctgccacagccctgggcgggtgcctcctggactcctccccctctcccctcccccctccccttcagtggcttcggcaccacccctagctgggccctcagcagcctcagaccctgccacccccacccacagccccacacccagccccaggcacttctctctgcttctcaagaacattcccgtccttctttctgccgagcctgtcctcttcagggttagctcaggtccctcttccccgtcttgtcccctggggtccttctctccaaaggcctgatgcatgcaggcccatcctggttccactctgagcctgggcctgaggccagcgctggtgccagccttctccccagtgagaacagtttctctgaggctggcagtcttctgtgttcctctatcggagggtgcagcatacacctaccactcagacgcttcccgggtttctccaggcccttggcctggatggggatggggtcataggtctgcacagagcaggcgtagacccggctttctgggcagtgtgctgagttctcagttcctggccctgtgtacgctgaaaccctccctggtggtggagctggcaagagacctgctggagttcctgggcagcgtgaatggtctctgcagcagggcgagcctcgtcaccagcgtggtgtgggccatcggcgagtacctgtcggtgacctacgatcggaggtgcaccgtggagcagatcaacaagttcttcgaagccctggaggctctgctattcgaggtcacccagtgccgcccctctgctgccctgcccaggtgtcccccccaggtggtcaccgtgctgatgaccacgctgacgaagctggcctcccggagccaagatctgatccccagggcctctttattgctgtcaaagatgaggaccctggctcacagtccagccaccagctccacgcacagcgaggagggcgcggaagccatccgtacccgggccacagagctgctgaccctgctgaagatgcctagcgtggcccagtttgtgctcacacccagcacggaggtgtgcagcccccgctatcaccgcgatgccaacacggccctgcccctggccctgcgcacggtcagccggctggtggagagggaggccggcctcatgccagggtgaagggacagtggccagggacttcggtgcagattaagagcctgggcagccagcttgctactgaggccaggctgataggagctcaggagggcgcgggagtcctgggagaggaggcaaggcccacggtgggcttggcaccctcacagacacgcggggctggcccccctgctcaccctctgggctttgtctccgagccttttgctcccaggcaacactgagctgagctgaggggtgccatggagcggctctgattggaggcttgaggccctgtggctgggtcgggtggaggctgctgggtctgtttcctagtcttttgtttttggacagttgatgggcaagaagagctgcagtaaaagtaaatctcctttaataagc

SEQ ID NO: 3539 - protein, 358 aa, Homo sapiens
MLRAWLLHSGPEGPGTLDTDDRSEQEGSTLSVISATSSAGRLLPPRERLREVAFEYCQRLIEQSNRRALRKGDSDLQKACLVEAVLVLDVLCRQDPSFLYRSLSCLKALHGRVRGDPASVRVLLPLAHFFLSHGEAAAVDSEAVYQHLFTRIPVEQFHSPMLAFEFIQFCRDNLHLFSGHLSTLRLSFPNLFKFLAWNSPPLTSEFVALLPALVDAGTALEMLHALLDLPCLTAVLDLQLRSAPAASERPLWDTSLRAPSCLEAFRDPQFQGLFQYLLRPKASGATERLAPLHQLLQPMAGCARVAQCAQAVPTLLQAFFSAVTQVADGSLINQLALLLLGRSDSLYPAPGYAAGVHR

SEQ ID NO: 3540 - DNA, 2710 bp, Homo sapiens
cccggaagttgaccggggtgcggagctcctgggctgcagctcctggagtttccgaggttcgtgcgcgtctggtggcggcggcgtgatgttctcggcaggagcggagagtttgctccaccaggccagggagatccaggacgaggagctgaagaagttctgttcccggatctgtaaactgctgcaggcggaggacttggggccggacaccctcgactccctgcagaggctcttcctcatcatctcagccacgaagtacagccggaggctggagaagacatgcgtagacctgctgcaggccaccctcggcctgcctgcatgccccgagcagctccaggtgctttgcgccgccatcctgcgagagatgtccccctctgacagcctcagcctggcctgggaccacacgcagaacagccggcagctgagcctggtggcctccgttctcttggcccagggtgacagaaacgaggaggtcagagccgtgggccagggcgtgctacgagcgctggagagccggcagcctgagggacccagcctcagacacctcctccccgtcatggccaagaccaggccaccctgctcagcaagcggctggtcgactggctgcgctacgccagcctccagcaagggctcccacactccggcggcttcttctccacgcccagggcccggcagccgggccccgtcaccgaggtggacggggcggtagccacagacttcttcacggtgctctccagcggccaccgcttcacagacgaccagtggctgaacgtgcaggccttctctatgctgcgggcgtggctgctgcacagcggccccgagggcccgggcaccctggacacagatgacaggtcagagcaggagggctccactctgtcggtgatctccgccacctcctctgccggccgcctgctgccgccccgggagcggcttcgggaggtggccttcgagtactgccagcgcctcattgagcaaagtaaccgacgagccctgaggaagggggactccgacctgcagaaagcttgcctggtggaggccgtgctggtgctggacgtgctgtgccggcaggacccgtccttcctgtaccgaagtctctcctgcctgaaggccctgcacgggcgggtgcgcggggacccggcctctgtgcgggtgctgctgcccctcgcccacttcttcctgagccacggggaagcggctgcagtggactcggaagccgtctaccagcacctgttcaccaggatcccggtggagcagttccacagccccatgctggcctttgaattcatccagttctgcagggacaacctccacctgttcagcgggcacctcagcaccctcagattgagcttccccaacctctttaagttcctggcctggaacagcccacccctcacctccgagtttgtggcgctcctcccggccctggtggacgctggcacagccctggagatgctgcacgcgctgctggacctgccctgcttgacggcggtgctggacctgcagctcaggtcagcaccggctgcatccgagaggccactctgggacacctctctcagggcccccagctgcctggaggccttccgggacccgcagttccagggtcttttccaatacctgctgcgccccaaggccagtggcgccactgagaggttggcgccactccaccagctgctgcagcccatggccggctgtgcccgcgtggcccagtgtgcccaggccgtgcccacgctgctgcaggcattcttctcagcagtgacccaggtggctgacgggtccctgatcaaccagctggcgctgctgctcctgggcaggagcgactcgctctacccggccccagggtacgctgccggtgtgcacagtgtgctgagttctcagttcctggccctgtgtacgctgaaaccctccctggtggtggagctggcaagagacctgctggagttcctgggcagcgtgaatggtctctgcagcagggcgagcctcgtcaccagcgtggtgtcccccccaggtggtcaccgtgctgatgaccacgctgacgaagctggcctcccggagccaagatctgatccccagggcctctttattgctgtcaaagatgaggaccctggctcacagtccagccaccagctccacgcacagcgaggagggcgcggaagccatccgtacccgggccacagagctgctgaccctgctgaagatgcctagcgtggcccagtttgtgctcacacccagcacggaggtgtgcagcccccgctatcaccgcgatgccaacacggccctgcccctggccctgcgcacggtcagccggctggtggagagggaggccggcctcatgccagggtgaagggacagtggccagggacttcggtgcagattaagagcctgggcagccagcttgctactgaggccaggctgataggagctcaggagggcgcgggagtcctgggagaggaggcaaggcccacggtgggcttggcaccctcacagacacgcggggctggcccccctgctcaccctctgggctttgtctccgagccttttgctcccaggcaacactgagctgagctgaggggtgccatggagcggctctgattggaggcttgaggccctgtggctgggtcgggtggaggctgctgggtctgtttcctagtcttttgtttttggacagttgatgggcaagaagagctgcagtaaaagtaaatctcctttaataagc

SEQ ID NO: 3541 - protein, 471 aa, Homo sapiens
MLRAWLLHSGPEGPGTLDTDDRSEQEGSTLSVISATSSAGRLLPPRERLREVAFEYCQRLIEQSNRRALRKGDSDLQKACLVEAVLVLDVLCRQDPSFLYRSLSCLKALHGRVRGDPASVRVLLPLAHFFLSHGEAAAVDSEAVYQHLFTRIPVEQFHSPMLAFEFIQFCRDNLHLFSGHLSTLRLSFPNLFKFLAWNSPPLTSEFVALLPALVDAGTALEMLHALLDLPCLTAVLDLQLRSAPAASERPLWDTSLRAPSCLEAFRDPQFQGLFQYLLRPKASGATERLAPLHQLLQPMAGCARVAQCAQAVPTLLQAFFSAVTQVADGSLINQLALLLLGRSDSLYPAPGYAAGVHSVLSSQFLALCTLKPSLVVELARDLLEFLGSVNGLCSRASLVTSVVSPPGGHRADDHADEAGLPEPRSDPQGLFIAVKDEDPGSQSSHQLHAQRGGRGSHPYPGHRAADPAEDA

SEQ ID NO: 3542 - DNA, 2917 bp, Homo sapiens
cccggaagttgaccggggtgcggagctcctgggctgcagctcctggagtttccgaggttcgtgcgcgtctggtggcggcggcgtgatgttctcggcaggagcggagagtttgctccaccaggccagggagatccaggacgaggagctgaagaagttctgttcccggatctgtaaactgctgcaggcggaggacttggggccggacaccctcgactccctgcagaggctcttcctcatcatctcagccacgaagtacagccggaggctggagaagacatgcgtagacctgctgcaggccaccctcggcctgcctgcatgccccgagcagctccaggtgctttgcgccgccatcctgcgagagatgtccccctctgacagcctcagcctggcctgggaccacacgcagaacagccggcagctgagcctggtggcctccgttctcttggcccagggtgacagaaacgaggaggtcagagccgtgggccagggcgtgctacgagcgctggagagccggcagcctgagggacccagcctcagacacctcctccccgtcatggccaagaccaggccaccctgctcagcaagcggctggtcgactggctgcgctacgccagcctccagcaagggctcccacactccggcggcttcttctccacgcccagggcccggcagccgggccccgtcaccgaggtggacggggcggtagccacagacttcttcacggtgctctccagcggccaccgcttcacagacgaccagtggctgaacgtgcaggccttctctatgctgcgggcgtggctgctgcacagcggccccgagggcccgggcaccctggacacagatgacaggtcagagcaggagggctccactctgtcggtgatctccgccacctcctctgccggccgcctgctgccgccccgggagcggcttcgggaggtggccttcgagtactgccagcgcctcattgagcaaagtaaccgacgagccctgaggaagggggactccgacctgcagaaagcttgcctggtggaggccgtgctggtgctggacgtgctgtgccggcaggacccgtccttcctgtaccgaagtctctcctgcctgaaggccctgcacgggcgggtgcgcggggacccggcctctgtgcgggtgctgctgcccctcgcccacttcttcctgagccacggggaagcggctgcagtggactcggaagccgtctaccagcacctgttcaccaggatcccggtggagcagttccacagccccatgctggcctttgaattcatccagttctgcagggacaacctccacctgttcagcgggcacctcagcaccctcagattgagcttccccaacctctttaagttcctggcctggaacagcccacccctcacctccgagtttgtggcgctcctcccggccctggtggacgctggcacagccctggagatgctgcacgcgctgctggacctgccctgcttgacggcggtgctggacctgcagctcaggtcagcaccggctgcatccgagaggccactctgggacacctctctcagggcccccagctgcctggaggccttccgggacccgcagttccagggtcttttccaatacctgctgcgccccaaggccagtggcgccactgagaggttggcgccactccaccagctgctgcagcccatggccggctgtgcccgcgtggcccagtgtgcccaggccgtgcccacgctgctgcaggcattcttctcagcagtgacccaggtggctgacgggtccctgatcaaccagctggcgctgctgctcctgggcaggagcgactcgctctacccggccccagggtacgctgccggtgtgcacaggcccttggcctggatggggatggggtcataggtctgcacagagcaggcgtagacccggctttctgggcagtgtgctgagttctcagttcctggccctgtgtacgctgaaaccctccctggtggtggagctggcaagagacctgctggagttcctgggcagcgtgaatggtctctgcagcagggcgagcctcgtcaccagcgtggtgtgggccatcggcgagtacctgtcggtgacctacgatcggaggtgcaccgtggagcagatcaacaagttcttcgaagccctggaggctctgctattcgaggtcacccagtgccgcccctctgctgccctgcccaggtgtcccccccaggtggtcaccgtgctgatgaccacgctgacgaagctggcctcccggagccaagatctgatccccagggcctctttattgctgtcaaagatgaggaccctggctcacagtccagccaccagctccacgcacagcgaggagggcgcggaagccatccgtacccgggccacagagctgctgaccctgctgaagatgcctagcgtggcccagtttgtgctcacacccagcacggaggtgtgcagcccccgctatcaccgcgatgccaacacggccctgcccctggccctgcgcacggtcagccggctggtggagagggaggccggcctcatgccagggtgaagggacagtggccagggacttcggtgcagattaagagcctgggcagccagcttgctactgaggccaggctgataggagctcaggagggcgcgggagtcctgggagaggaggcaaggcccacggtgggcttggcaccctcacagacacgcggggctggcccccctgctcaccctctgggctttgtctccgagccttttgctcccaggcaacactgagctgagctgaggggtgccatggagcggctctgattggaggcttgaggccctgtggctgggtcgggtggaggctgctgggtctgtttcctagtcttttgtttttggacagttgatgggcaagaagagctgcagtaaaagtaaatctcctttaataagc

SEQ ID NO: 3543 - protein, 367 aa, Homo sapiens
MLRAWLLHSGPEGPGTLDTDDRSEQEGSTLSVISATSSAGRLLPPRERLREVAFEYCQRLIEQSNRRALRKGDSDLQKACLVEAVLVLDVLCRQDPSFLYRSLSCLKALHGRVRGDPASVRVLLPLAHFFLSHGEAAAVDSEAVYQHLFTRIPVEQFHSPMLAFEFIQFCRDNLHLFSGHLSTLRLSFPNLFKFLAWNSPPLTSEFVALLPALVDAGTALEMLHALLDLPCLTAVLDLQLRSAPAASERPLWDTSLRAPSCLEAFRDPQFQGLFQYLLRPKASGATERLAPLHQLLQPMAGCARVAQCAQAVPTLLQAFFSAVTQVADGSLINQLALLLLGRSDSLYPAPGYAAGVHRPLAWMGMGS

SEQ ID NO: 3544 - DNA, 4164 bp, Homo sapiens
cccggaagttgaccggggtgcggagctcctgggctgcagctcctggagtttccgaggttcgtgcgcgtctggtggcggcggcgtgatgttctcggcaggagcggagagtttgctccaccaggccagggagatccaggacgaggagctgaagaagttctgttcccggatctgtaaactgctgcaggcggaggacttggggccggacaccctcgactccctgcagaggctcttcctcatcatctcagccacgaagtacagccggaggctggagaagacatgcgtagacctgctgcaggccaccctcggcctgcctgcatgccccgagcagctccaggtgctttgcgccgccatcctgcgagagatgtccccctctgacagcctcagcctggcctgggaccacacgcagaacagccggcagctgagcctggtggcctccgttctcttggcccagggtgacagaaacgaggaggtcagagccgtgggccagggcgtgctacgagcgctggagagccggcagcctgagggacccagcctcagacacctcctccccgtcatggccaagaccaggccaccctgctcagcaagcggctggtcgactggctgcgctacgccagcctccagcaagggctcccacactccggcggcttcttctccacgcccagggcccggcagccgggccccgtcaccgaggtggacggggcggtagccacagacttcttcacggtgctctccagcggccaccgcttcacagacgaccagtggctgaacgtgcaggccttctctatgctgcgggcgtggctgctgcacagcggccccgagggcccgggcaccctggacacagatgacaggtcagagcaggagggctccactctgtcggtgatctccgccacctcctctgccggccgcctgctgccgccccgggagcggcttcgggaggtggccttcgagtactgccagcgcctcattgagcaaagtaaccgacgagccctgaggaagggggactccgacctgcagaaagcttgcctggtggaggccgtgctggtgctggacgtgctgtgccggcaggacccgtccttcctgtaccgaagtctctcctgcctgaaggccctgcacgggcgggtgcgcggggacccggcctctgtgcgggtgctgctgcccctcgcccacttcttcctgagccacggggaagcggctgcagtggactcggaagccgtctaccagcacctgttcaccaggatcccggtggagcagttccacagccccatgctggcctttgaattcatccagttctgcagggacaacctccacctgttcagcgggcacctcagcaccctcagattgagcttccccaacctctttaagttcctggcctggaacagcccacccctcacctccgagtttgtggcgctcctcccggccctggtggacgctggcacagccctggagatgctgcacgcgctgctggacctgccctgcttgacggcggtgctggacctgcagctcaggtcagcaccggctgcatccgagaggccactctgggacacctctctcagggcccccagctgcctggaggccttccgggacccgcagttccagggtcttttccaatacctgctgcgccccaaggccagtggcgccactgagaggttggcgccactccaccagctgctgcagcccatggccggctgtgcccgcgtggcccagtgtgcccaggccgtgcccacgctgctgcaggcattcttctcagcagtgacccaggtggctgacgggtccctgatcaaccagctggcgctgctgctcctgggcaggagcgactcgctctacccggccccagggtacgctgccggtgtgcacaggtaggtccctcctgcgctcctgccacagccctgggcgggtgcctcctggactcctccccctctcccctcccccctccccttcagtggcttcggcaccacccctagctgggccctcagcagcctcagaccctgccacccccacccacagccccacacccagccccaggcacttctctctgcttctcaagaacattcccgtccttctttctgccgagcctgtcctcttcagggttagctcaggtccctcttccccgtcttgtcccctggggtccttctctccaaaggcctgatgcatgcaggcccatcctggttccactctgagcctgggcctgaggccagcgctggtgccagccttctccccagtgagaacagtttctctgaggctggcagtcttctgtgttcctctatcggagggtgcagcatacacctaccactcagacgcttcccgggtttctccaggcccttggcctggatggggatggggtcataggtctgcacagagcaggcgtagacccggctttctgggcagtgtgctgagttctcagttcctggccctgtgtacgctgaaaccctccctggtggtggagctggcaagagacctgctggagttcctgggcagcgtgaatggtctctgcagcagggcgagcctcgtcaccagcgtggtgtgggccatcggcgagtacctgtcggtgacctacgatcggaggtgcaccgtggagcagatcaacaagttcttcgaagccctggaggctctgctattcgaggtcacccagtgccgcccctctgctgccctgcccaggtgtcccccccaggtggtcaccgtgctgatgaccacgctgacgaagctggcctcccggagccaagatctgatccccagggcctctttattgctgtcaaagatgaggaccctggctcacagtccagccaccagctccacgcacagcgaggagggcgcggaagccatccgtacccgggccacagagctgctgaccctgctgaagatgcctagcgtggcccagtttgtgctcacacccagcacggaggtgtgcagcccccgctatcaccgcgatgccaacacggccctgcccctggccctgcgcacggtcagccggctggtggagagggaggccggcctcatgccagggtgaagggacagtggccagggacttcggtgcagattaagagcctgggcagccagcttgctactgaggccaggctgataggagctcaggagggcgcgggagtcctgggagaggaggcaaggcccacggtgggcttggcaccctcacagacacgcggggctggcccccctgctcaccctctgggctttgtctccgagccttttgctcccaggcaacactgagctgagctgaggggtgccatggagcggctctgattggaggcttgaggccctgtggctgggtcgggtggaggctgctgggtctgtttcctagtcttttgtttttggacagttgatgggcaagaagagctgcagtaaaagtaaatctcctttaataagcgtctgtatgaagagtgcgcgatcagttccgttacctgccctgcaccctggggagaggaccagggatgggaacccctggcagctgctgccagtcctggaggctcagcccggcgtgccactgctgctacagaaaccaggtcatttgtgcacagcccggaaggcagcggcgcgagttcccgggtgtggtcaccgctctgggtggtgcgcttgtcaatgccccttttgatgcccttgaatagcctgaagatgaaggggaccgggggagggttgcaagcgccatggcctatgcaggctgcggcctctggccattcggagggaaggccccagggagccacctgagtggagctcagaacactggattcgcgcgaaggggaggtgtctgggcgtgcggccccagccccgccaccttcctgggccctgtggtcccaccctccggactaccaaggcacagctgtgtcgcacgttccgcccggtgcctgggacgggctcagccgccagggggcgccgccgccccgagagcctcacgccccgcccccaggctcaaactcttccccctccccactctggctccgcccccggtctcctcttttgctctggccccgcccacctcccctccggcctcggccccgcccccaatcccccatagctctgcgactaagaaaccacaggctgaaggcgactgcagggtcctgccccttgcccagcctcaggactatggagggggcgagtgacgcgcaaggaacggagcaggggacaccgtgcgggctcaggagctccccagatgcccga

SEQ ID NO: 3545 - protein, 358 aa, Homo sapiens; identical to SEQ ID NO: 3539

SEQ ID NO: 3546 - DNA, 3532 bp, Homo sapiens
cccggaagttgaccggggtgcggagctcctgggctgcagctcctggagtttccgaggttcgtgcgcgtctggtggcggcggcgtgatgttctcggcaggagcggagagtttgctccaccaggccagggagatccaggacgaggagctgaagaagttctgttcccggatctgtaaactgctgcaggcggaggacttggggccggacaccctcgactccctgcagaggctcttcctcatcatctcagccacgaagtacagccggaggctggagaagacatgcgtagacctgctgcaggccaccctcggcctgcctgcatgccccgagcagctccaggtgctttgcgccgccatcctgcgagagatgtccccctctgacagcctcagcctggcctgggaccacacgcagaacagccggcagctgagcctggtggcctccgttctcttggcccagggtgacagaaacgaggaggtcagagccgtgggccagggcgtgctacgagcgctggagagccggcagcctgagggacccagcctcagacacctcctccccgtcatggccaaggtcgtggtcctcagcccgggcaccctccaggaggaccaggccaccctgctcagcaagcggctggtcgactggctgcgctacgccagcctccagcaagggctcccacactccggcggcttcttctccacgcccagggcccggcagccgggccccgtcaccgaggtggacggggcggtagccacagacttcttcacggtgctctccagcggccaccgcttcacagacgaccagtggctgaacgtgcaggccttctctatgctgcgggcgtggctgctgcacagcggccccgagggcccgggcaccctggacacagatgacaggtcagagcaggagggctccactctgtcggtgatctccgccacctcctctgccggccgcctgctgccgccccgggagcggcttcgggaggtggccttcgagtactgccagcgcctcattgagcaaagtaaccgacgagccctgaggaagggggactccgacctgcagaaagcttgcctggtggaggccgtgctggtgctggacgtgctgtgccggcaggacccgtccttcctgtaccgaagtctctcctgcctgaaggccctgcacgggcgggtgcgcggggacccggcctctgtgcgggtgctgctgcccctcgcccacttcttcctgagccacggggaagcggctgcagtggactcggaagccgtctaccagcacctgttcaccaggatcccggtggagcagttccacagccccatgctggcctttgaattcatccagttctgcagggacaacctccacctgttcagcgggcacctcagcaccctcagattgagcttccccaacctctttaagttcctggcctggaacagcccacccctcacctccgagtttgtggcgctcctcccggccctggtggacgctggcacagccctggagatgctgcacgcgctgctggacctgccctgcttgacggcggtgctggacctgcagctcaggtcagcaccggctgcatccgagaggccactctgggacacctctctcagggcccccagctgcctggaggccttccgggacccgcagttccagggtcttttccaatacctgctgcgccccaaggccagtggcgccactgagaggttggcgccactccaccagctgctgcagcccatggccggctgtgcccgcgtggcccagtgtgcccaggccgtgcccacgctgctgcaggcattcttctcagcagtgacccaggtggctgacgggtccctgatcaaccagctggcgctgctgctcctgggcaggagcgactcgctctacccggccccagggtacgctgccggtgtgcacagtgtgctgagttctcagttcctggccctgtgtacgctgaaaccctccctggtggtggagctggcaagagacctgctggagttcctgggcagcgtgaatggtctctgcagcagggcgagcctcgtcaccagcgtggtgtcccccccaggtggtcaccgtgctgatgaccacgctgacgaagctggcctcccggagccaagatctgatccccagggcctctttattgctgtcaaagatgaggaccctggctcacagtccagccaccagctccacgcacagcgaggagggcgcggaagccatccgtacccgggccacagagctgctgaccctgctgaagatgcctagcgtggcccagtttgtgctcacacccagcacggaggtgtgcagcccccgctatcaccgcgatgccaacacggccctgcccctggccctgcgcacggtcagccggctggtggagagggaggccggcctcatgccagggtgaagggacagtggccagggacttcggtgcagattaagagcctgggcagccagcttgctactgaggccaggctgataggagctcaggagggcgcgggagtcctgggagaggaggcaaggcccacggtgggcttggcaccctcacagacacgcggggctggcccccctgctcaccctctgggctttgtctccgagccttttgctcccaggcaacactgagctgagctgaggggtgccatggagcggctctgattggaggcttgaggccctgtggctgggtcgggtggaggctgctgggtctgtttcctagtcttttgtttttggacagttgatgggcaagaagagctgcagtaaaagtaaatctcctttaataagcgtctgtatgaagagtgcgcgatcagttccgttacctgccctgcaccctggggagaggaccagggatgggaacccctggcagctgctgccagtcctggaggctcagcccggcgtgccactgctgctacagaaaccaggtcatttgtgcacagcccggaaggcagcggcgcgagttcccgggtgtggtcaccgctctgggtggtgcgcttgtcaatgccccttttgatgcccttgaatagcctgaagatgaaggggaccgggggagggttgcaagcgccatggcctatgcaggctgcggcctctggccattcggagggaaggccccagggagccacctgagtggagctcagaacactggattcgcgcgaaggggaggtgtctgggcgtgcggccccagccccgccaccttcctgggccctgtggtcccaccctccggactaccaaggcacagctgtgtcgcacgttccgcccggtgcctgggacgggctcagccgccagggggcgccgccgccccgagagcctcacgccccgcccccaggctcaaactcttccccctccccactctggctccgcccccggtctcctcttttgctctggccccgcccacctcccctccggcctcggccccgcccccaatcccccatagctctgcgactaagaaaccacaggctgaaggcgactgcagggtcctgccccttgcccagcctcaggactatggagggggcgagtgacgcgcaaggaacggagcaggggacaccgtgcgggctcaggagctccccagatgcccga

SEQ ID NO: 3547 - protein, 715 aa, Homo sapiens
MFSAGAESLLHQAREIQDEELKKFCSRICKLLQAEDLGPDTLDSLQRLFLIISATKYSRRLEKTCVDLLQATLGLPACPEQLQVLCAAILREMSPSDSLSLAWDHTQNSRQLSLVASVLLAQGDRNEEVRAVGQGVLRALESRQPEGPSLRHLLPVMAKVVVLSPGTLQEDQATLLSKRLVDWLRYASLQQGLPHSGGFFSTPRARQPGPVTEVDGAVATDFFTVLSSGHRFTDDQWLNVQAFSMLRAWLLHSGPEGPGTLDTDDRSEQEGSTLSVISATSSAGRLLPPRERLREVAFEYCQRLIEQSNRRALRKGDSDLQKACLVEAVLVLDVLCRQDPSFLYRSLSCLKALHGRVRGDPASVRVLLPLAHFFLSHGEAAAVDSEAVYQHLFTRIPVEQFHSPMLAFEFIQFCRDNLHLFSGHLSTLRLSFPNLFKFLAWNSPPLTSEFVALLPALVDAGTALEMLHALLDLPCLTAVLDLQLRSAPAASERPLWDTSLRAPSCLEAFRDPQFQGLFQYLLRPKASGATERLAPLHQLLQPMAGCARVAQCAQAVPTLLQAFFSAVTQVADGSLINQLALLLLGRSDSLYPAPGYAAGVHSVLSSQFLALCTLKPSLVVELARDLLEFLGSVNGLCSRASLVTSVVSPPGGHRADDHADEAGLPEPRSDPQGLFIAVKDEDPGSQSSHQLHAQRGGRGSHPYPGHRAADPAEDA

SEQ ID NO: 3548 - DNA, 3635 bp, Homo sapiens
cccggaagttgaccggggtgcggagctcctgggctgcagctcctggagtttccgaggttcgtgcgcgtctggtggcggcggcgtgatgttctcggcaggagcggagagtttgctccaccaggccagggagatccaggacgaggagctgaagaagttctgttcccggatctgtaaactgctgcaggcggaggacttggggccggacaccctcgactccctgcagaggctcttcctcatcatctcagccacgaagtacagccggaggctggagaagacatgcgtagacctgctgcaggccaccctcggcctgcctgcatgccccgagcagctccaggtgctttgcgccgccatcctgcgagagatgtccccctctgacagcctcagcctggcctgggaccacacgcagaacagccggcagctgagcctggtggcctccgttctcttggcccagggtgacagaaacgaggaggtcagagccgtgggccagggcgtgctacgagcgctggagagccggcagcctgagggacccagcctcagacacctcctccccgtcatggccaagaccaggccaccctgctcagcaagcggctggtcgactggctgcgctacgccagcctccagcaagggctcccacactccggcggcttcttctccacgcccagggcccggcagccgggccccgtcaccgaggtggacggggcggtagccacagacttcttcacggtgctctccagcggccaccgcttcacagacgaccagtggctgaacgtgcaggccttctctatgctgcgggcgtggctgctgcacagcggccccgagggcccgggcaccctggacacagatgacaggtcagagcaggagggctccactctgtcggtgatctccgccacctcctctgccggccgcctgctgccgccccgggagcggcttcgggaggtggccttcgagtactgccagcgcctcattgagcaaagtaaccgacgagccctgaggaagggggactccgacctgcagaaagcttgcctggtggaggccgtgctggtgctggacgtgctgtgccggcaggacccgtccttcctgtaccgaagtctctcctgcctgaaggccctgcacgggcgggtgcgcggggacccggcctctgtgcgggtgctgctgcccctcgcccacttcttcctgagccacggggaagcggctgcagtggactcggaagccgtctaccagcacctgttcaccaggatcccggtggagcagttccacagccccatgctggcctttgaattcatccagttctgcagggacaacctccacctgttcagcgggcacctcagcaccctcagattgagcttccccaacctctttaagttcctggcctggaacagcccacccctcacctccgagtttgtggcgctcctcccggccctggtggacgctggcacagccctggagatgctgcacgcgctgctggacctgccctgcttgacggcggtgctggacctgcagctcaggtcagcaccggctgcatccgagaggccactctgggacacctctctcagggcccccagctgcctggaggccttccgggacccgcagttccagggtcttttccaatacctgctgcgccccaaggccagtggcgccactgagaggttggcgccactccaccagctgctgcagcccatggccggctgtgcccgcgtggcccagtgtgcccaggccgtgcccacgctgctgcaggcattcttctcagcagtgacccaggtggctgacgggtccctgatcaaccagctggcgctgctgctcctgggcaggagcgactcgctctacccggccccagggtacgctgccggtgtgcacagtgtgctgagttctcagttcctggccctgtgtacgctgaaaccctccctggtggtggagctggcaagagacctgctggagttcctgggcagcgtgaatggtctctgcagcagggcgagcctcgtcaccagcgtggtgtgggccatcggcgagtacctgtcggtgacctacgatcggaggtgcaccgtggagcagatcaacaagttcttcgaagccctggaggctctgctattcgaggtcacccagtgccgcccctctgctgccctgcccaggtgtcccccccaggtggtcaccgtgctgatgaccacgctgacgaagctggcctcccggagccaagatctgatccccagggcctctttattgctgtcaaagatgaggaccctggctcacagtccagccaccagctccacgcacagcgaggagggcgcggaagccatccgtacccgggccacagagctgctgaccctgctgaagatgcctagcgtggcccagtttgtgctcacacccagcacggaggtgtgcagcccccgctatcaccgcgatgccaacacggccctgcccctggccctgcgcacggtcagccggctggtggagagggaggccggcctcatgccagggtgaagggacagtggccagggacttcggtgcagattaagagcctgggcagccagcttgctactgaggccaggctgataggagctcaggagggcgcgggagtcctgggagaggaggcaaggcccacggtgggcttggcaccctcacagacacgcggggctggcccccctgctcaccctctgggctttgtctccgagccttttgctcccaggcaacactgagctgagctgaggggtgccatggagcggctctgattggaggcttgaggccctgtggctgggtcgggtggaggctgctgggtctgtttcctagtcttttgtttttggacagttgatgggcaagaagagctgcagtaaaagtaaatctcctttaataagcgtctgtatgaagagtgcgcgatcagttccgttacctgccctgcaccctggggagaggaccagggatgggaacccctggcagctgctgccagtcctggaggctcagcccggcgtgccactgctgctacagaaaccaggtcatttgtgcacagcccggaaggcagcggcgcgagttcccgggtgtggtcaccgctctgggtggtgcgcttgtcaatgccccttttgatgcccttgaatagcctgaagatgaaggggaccgggggagggttgcaagcgccatggcctatgcaggctgcggcctctggccattcggagggaaggccccagggagccacctgagtggagctcagaacactggattcgcgcgaaggggaggtgtctgggcgtgcggccccagccccgccaccttcctgggccctgtggtcccaccctccggactaccaaggcacagctgtgtcgcacgttccgcccggtgcctgggacgggctcagccgccagggggcgccgccgccccgagagcctcacgccccgcccccaggctcaaactcttccccctccccactctggctccgcccccggtctcctcttttgctctggccccgcccacctcccctccggcctcggccccgcccccaatcccccatagctctgcgactaagaaaccacaggctgaaggcgactgcagggtcctgccccttgcccagcctcaggactatggagggggcgagtgacgcgcaaggaacggagcaggggacaccgtgcgggctcaggagctccccagatgcccga

SEQ ID NO: 3549 - protein, 563 aa, Homo sapiens; identical to SEQ ID NO: 3537

SEQ ID NO: 3550 - DNA, 3669 bp, Homo sapiens
cccggaagttgaccggggtgcggagctcctgggctgcagctcctggagtttccgaggttcgtgcgcgtctggtggcggcggcgtgatgttctcggcaggagcggagagtttgctccaccaggccagggagatccaggacgaggagctgaagaagttctgttcccggatctgtaaactgctgcaggcggaggacttggggccggacaccctcgactccctgcagaggctcttcctcatcatctcagccacgaagtacagccggaggctggagaagacatgcgtagacctgctgcaggccaccctcggcctgcctgcatgccccgagcagctccaggtgctttgcgccgccatcctgcgagagatgtccccctctgacagcctcagcctggcctgggaccacacgcagaacagccggcagctgagcctggtggcctccgttctcttggcccagggtgacagaaacgaggaggtcagagccgtgggccagggcgtgctacgagcgctggagagccggcagcctgagggacccagcctcagacacctcctccccgtcatggccaaggtcgtggtcctcagcccgggcaccctccaggaggaccaggccaccctgctcagcaagcggctggtcgactggctgcgctacgccagcctccagcaagggctcccacactccggcggcttcttctccacgcccagggcccggcagccgggccccgtcaccgaggtggacggggcggtagccacagacttcttcacggtgctctccagcggccaccgcttcacagacgaccagtggctgaacgtgcaggccttctctatgctgcgggcgtggctgctgcacagcggccccgagggcccgggcaccctggacacagatgacaggtcagagcaggagggctccactctgtcggtgatctccgccacctcctctgccggccgcctgctgccgccccgggagcggcttcgggaggtggccttcgagtactgccagcgcctcattgagcaaagtaaccgacgagccctgaggaagggggactccgacctgcagaaagcttgcctggtggaggccgtgctggtgctggacgtgctgtgccggcaggacccgtccttcctgtaccgaagtctctcctgcctgaaggccctgcacgggcgggtgcgcggggacccggcctctgtgcgggtgctgctgcccctcgcccacttcttcctgagccacggggaagcggctgcagtggactcggaagccgtctaccagcacctgttcaccaggatcccggtggagcagttccacagccccatgctggcctttgaattcatccagttctgcagggacaacctccacctgttcagcgggcacctcagcaccctcagattgagcttccccaacctctttaagttcctggcctggaacagcccacccctcacctccgagtttgtggcgctcctcccggccctggtggacgctggcacagccctggagatgctgcacgcgctgctggacctgccctgcttgacggcggtgctggacctgcagctcaggtcagcaccggctgcatccgagaggccactctgggacacctctctcagggcccccagctgcctggaggccttccgggacccgcagttccagggtcttttccaatacctgctgcgccccaaggccagtggcgccactgagaggttggcgccactccaccagctgctgcagcccatggccggctgtgcccgcgtggcccagtgtgcccaggccgtgcccacgctgctgcaggcattcttctcagcagtgacccaggtggctgacgggtccctgatcaaccagctggcgctgctgctcctgggcaggagcgactcgctctacccggccccagggtacgctgccggtgtgcacagtgtgctgagttctcagttcctggccctgtgtacgctgaaaccctccctggtggtggagctggcaagagacctgctggagttcctgggcagcgtgaatggtctctgcagcagggcgagcctcgtcaccagcgtggtgtgggccatcggcgagtacctgtcggtgacctacgatcggaggtgcaccgtggagcagatcaacaagttcttcgaagccctggaggctctgctattcgaggtcacccagtgccgcccctctgctgccctgcccaggtgtcccccccaggtggtcaccgtgctgatgaccacgctgacgaagctggcctcccggagccaagatctgatccccagggcctctttattgctgtcaaagatgaggaccctggctcacagtccagccaccagctccacgcacagcgaggagggcgcggaagccatccgtacccgggccacagagctgctgaccctgctgaagatgcctagcgtggcccagtttgtgctcacacccagcacggaggtgtgcagcccccgctatcaccgcgatgccaacacggccctgcccctggccctgcgcacggtcagccggctggtggagagggaggccggcctcatgccagggtgaagggacagtggccagggacttcggtgcagattaagagcctgggcagccagcttgctactgaggccaggctgataggagctcaggagggcgcgggagtcctgggagaggaggcaaggcccacggtgggcttggcaccctcacagacacgcggggctggcccccctgctcaccctctgggctttgtctccgagccttttgctcccaggcaacactgagctgagctgaggggtgccatggagcggctctgattggaggcttgaggccctgtggctgggtcgggtggaggctgctgggtctgtttcctagtcttttgtttttggacagttgatgggcaagaagagctgcagtaaaagtaaatctcctttaataagcgtctgtatgaagagtgcgcgatcagttccgttacctgccctgcaccctggggagaggaccagggatgggaacccctggcagctgctgccagtcctggaggctcagcccggcgtgccactgctgctacagaaaccaggtcatttgtgcacagcccggaaggcagcggcgcgagttcccgggtgtggtcaccgctctgggtggtgcgcttgtcaatgccccttttgatgcccttgaatagcctgaagatgaaggggaccgggggagggttgcaagcgccatggcctatgcaggctgcggcctctggccattcggagggaaggccccagggagccacctgagtggagctcagaacactggattcgcgcgaaggggaggtgtctgggcgtgcggccccagccccgccaccttcctgggccctgtggtcccaccctccggactaccaaggcacagctgtgtcgcacgttccgcccggtgcctgggacgggctcagccgccagggggcgccgccgccccgagagcctcacgccccgcccccaggctcaaactcttccccctccccactctggctccgcccccggtctcctcttttgctctggccccgcccacctcccctccggcctcggccccgcccccaatcccccatagctctgcgactaagaaaccacaggctgaaggcgactgcagggtcctgccccttgcccagcctcaggactatggagggggcgagtgacgcgcaaggaacggagcaggggacaccgtgcgggctcaggagctccccagatgcccga

SEQ ID NO: 3551 - protein, 807 aa, Homo sapiens; identical to SEQ ID NO: 397

SEQ ID NO: 3552 - DNA, 3498 bp, Homo sapiens
cccggaagttgaccggggtgcggagctcctgggctgcagctcctggagtttccgaggttcgtgcgcgtctggtggcggcggcgtgatgttctcggcaggagcggagagtttgctccaccaggccagggagatccaggacgaggagctgaagaagttctgttcccggatctgtaaactgctgcaggcggaggacttggggccggacaccctcgactccctgcagaggctcttcctcatcatctcagccacgaagtacagccggaggctggagaagacatgcgtagacctgctgcaggccaccctcggcctgcctgcatgccccgagcagctccaggtgctttgcgccgccatcctgcgagagatgtccccctctgacagcctcagcctggcctgggaccacacgcagaacagccggcagctgagcctggtggcctccgttctcttggcccagggtgacagaaacgaggaggtcagagccgtgggccagggcgtgctacgagcgctggagagccggcagcctgagggacccagcctcagacacctcctccccgtcatggccaagaccaggccaccctgctcagcaagcggctggtcgactggctgcgctacgccagcctccagcaagggctcccacactccggcggcttcttctccacgcccagggcccggcagccgggccccgtcaccgaggtggacggggcggtagccacagacttcttcacggtgctctccagcggccaccgcttcacagacgaccagtggctgaacgtgcaggccttctctatgctgcgggcgtggctgctgcacagcggccccgagggcccgggcaccctggacacagatgacaggtcagagcaggagggctccactctgtcggtgatctccgccacctcctctgccggccgcctgctgccgccccgggagcggcttcgggaggtggccttcgagtactgccagcgcctcattgagcaaagtaaccgacgagccctgaggaagggggactccgacctgcagaaagcttgcctggtggaggccgtgctggtgctggacgtgctgtgccggcaggacccgtccttcctgtaccgaagtctctcctgcctgaaggccctgcacgggcgggtgcgcggggacccggcctctgtgcgggtgctgctgcccctcgcccacttcttcctgagccacggggaagcggctgcagtggactcggaagccgtctaccagcacctgttcaccaggatcccggtggagcagttccacagccccatgctggcctttgaattcatccagttctgcagggacaacctccacctgttcagcgggcacctcagcaccctcagattgagcttccccaacctctttaagttcctggcctggaacagcccacccctcacctccgagtttgtggcgctcctcccggccctggtggacgctggcacagccctggagatgctgcacgcgctgctggacctgccctgcttgacggcggtgctggacctgcagctcaggtcagcaccggctgcatccgagaggccactctgggacacctctctcagggcccccagctgcctggaggccttccgggacccgcagttccagggtcttttccaatacctgctgcgccccaaggccagtggcgccactgagaggttggcgccactccaccagctgctgcagcccatggccggctgtgcccgcgtggcccagtgtgcccaggccgtgcccacgctgctgcaggcattcttctcagcagtgacccaggtggctgacgggtccctgatcaaccagctggcgctgctgctcctgggcaggagcgactcgctctacccggccccagggtacgctgccggtgtgcacagtgtgctgagttctcagttcctggccctgtgtacgctgaaaccctccctggtggtggagctggcaagagacctgctggagttcctgggcagcgtgaatggtctctgcagcagggcgagcctcgtcaccagcgtggtgtcccccccaggtggtcaccgtgctgatgaccacgctgacgaagctggcctcccggagccaagatctgatccccagggcctctttattgctgtcaaagatgaggaccctggctcacagtccagccaccagctccacgcacagcgaggagggcgcggaagccatccgtacccgggccacagagctgctgaccctgctgaagatgcctagcgtggcccagtttgtgctcacacccagcacggaggtgtgcagcccccgctatcaccgcgatgccaacacggccctgcccctggccctgcgcacggtcagccggctggtggagagggaggccggcctcatgccagggtgaagggacagtggccagggacttcggtgcagattaagagcctgggcagccagcttgctactgaggccaggctgataggagctcaggagggcgcgggagtcctgggagaggaggcaaggcccacggtgggcttggcaccctcacagacacgcggggctggcccccctgctcaccctctgggctttgtctccgagccttttgctcccaggcaacactgagctgagctgaggggtgccatggagcggctctgattggaggcttgaggccctgtggctgggtcgggtggaggctgctgggtctgtttcctagtcttttgtttttggacagttgatgggcaagaagagctgcagtaaaagtaaatctcctttaataagcgtctgtatgaagagtgcgcgatcagttccgttacctgccctgcaccctggggagaggaccagggatgggaacccctggcagctgctgccagtcctggaggctcagcccggcgtgccactgctgctacagaaaccaggtcatttgtgcacagcccggaaggcagcggcgcgagttcccgggtgtggtcaccgctctgggtggtgcgcttgtcaatgccccttttgatgcccttgaatagcctgaagatgaaggggaccgggggagggttgcaagcgccatggcctatgcaggctgcggcctctggccattcggagggaaggccccagggagccacctgagtggagctcagaacactggattcgcgcgaaggggaggtgtctgggcgtgcggccccagccccgccaccttcctgggccctgtggtcccaccctccggactaccaaggcacagctgtgtcgcacgttccgcccggtgcctgggacgggctcagccgccagggggcgccgccgccccgagagcctcacgccccgcccccaggctcaaactcttccccctccccactctggctccgcccccggtctcctcttttgctctggccccgcccacctcccctccggcctcggccccgcccccaatcccccatagctctgcgactaagaaaccacaggctgaaggcgactgcagggtcctgccccttgcccagcctcaggactatggagggggcgagtgacgcgcaaggaacggagcaggggacaccgtgcgggctcaggagctccccagatgcccga

SEQ ID NO: 3553 - protein, 471 aa, Homo sapiens; identical to SEQ ID NO: 3541

SEQ ID NO: 3554 - DNA, 3705 bp, Homo sapiens
cccggaagttgaccggggtgcggagctcctgggctgcagctcctggagtttccgaggttcgtgcgcgtctggtggcggcggcgtgatgttctcggcaggagcggagagtttgctccaccaggccagggagatccaggacgaggagctgaagaagttctgttcccggatctgtaaactgctgcaggcggaggacttggggccggacaccctcgactccctgcagaggctcttcctcatcatctcagccacgaagtacagccggaggctggagaagacatgcgtagacctgctgcaggccaccctcggcctgcctgcatgccccgagcagctccaggtgctttgcgccgccatcctgcgagagatgtccccctctgacagcctcagcctggcctgggaccacacgcagaacagccggcagctgagcctggtggcctccgttctcttggcccagggtgacagaaacgaggaggtcagagccgtgggccagggcgtgctacgagcgctggagagccggcagcctgagggacccagcctcagacacctcctccccgtcatggccaagaccaggccaccctgctcagcaagcggctggtcgactggctgcgctacgccagcctccagcaagggctcccacactccggcggcttcttctccacgcccagggcccggcagccgggccccgtcaccgaggtggacggggcggtagccacagacttcttcacggtgctctccagcggccaccgcttcacagacgaccagtggctgaacgtgcaggccttctctatgctgcgggcgtggctgctgcacagcggccccgagggcccgggcaccctggacacagatgacaggtcagagcaggagggctccactctgtcggtgatctccgccacctcctctgccggccgcctgctgccgccccgggagcggcttcgggaggtggccttcgagtactgccagcgcctcattgagcaaagtaaccgacgagccctgaggaagggggactccgacctgcagaaagcttgcctggtggaggccgtgctggtgctggacgtgctgtgccggcaggacccgtccttcctgtaccgaagtctctcctgcctgaaggccctgcacgggcgggtgcgcggggacccggcctctgtgcgggtgctgctgcccctcgcccacttcttcctgagccacggggaagcggctgcagtggactcggaagccgtctaccagcacctgttcaccaggatcccggtggagcagttccacagccccatgctggcctttgaattcatccagttctgcagggacaacctccacctgttcagcgggcacctcagcaccctcagattgagcttccccaacctctttaagttcctggcctggaacagcccacccctcacctccgagtttgtggcgctcctcccggccctggtggacgctggcacagccctggagatgctgcacgcgctgctggacctgccctgcttgacggcggtgctggacctgcagctcaggtcagcaccggctgcatccgagaggccactctgggacacctctctcagggcccccagctgcctggaggccttccgggacccgcagttccagggtcttttccaatacctgctgcgccccaaggccagtggcgccactgagaggttggcgccactccaccagctgctgcagcccatggccggctgtgcccgcgtggcccagtgtgcccaggccgtgcccacgctgctgcaggcattcttctcagcagtgacccaggtggctgacgggtccctgatcaaccagctggcgctgctgctcctgggcaggagcgactcgctctacccggccccagggtacgctgccggtgtgcacaggcccttggcctggatggggatggggtcataggtctgcacagagcaggcgtagacccggctttctgggcagtgtgctgagttctcagttcctggccctgtgtacgctgaaaccctccctggtggtggagctggcaagagacctgctggagttcctgggcagcgtgaatggtctctgcagcagggcgagcctcgtcaccagcgtggtgtgggccatcggcgagtacctgtcggtgacctacgatcggaggtgcaccgtggagcagatcaacaagttcttcgaagccctggaggctctgctattcgaggtcacccagtgccgcccctctgctgccctgcccaggtgtcccccccaggtggtcaccgtgctgatgaccacgctgacgaagctggcctcccggagccaagatctgatccccagggcctctttattgctgtcaaagatgaggaccctggctcacagtccagccaccagctccacgcacagcgaggagggcgcggaagccatccgtacccgggccacagagctgctgaccctgctgaagatgcctagcgtggcccagtttgtgctcacacccagcacggaggtgtgcagcccccgctatcaccgcgatgccaacacggccctgcccctggccctgcgcacggtcagccggctggtggagagggaggccggcctcatgccagggtgaagggacagtggccagggacttcggtgcagattaagagcctgggcagccagcttgctactgaggccaggctgataggagctcaggagggcgcgggagtcctgggagaggaggcaaggcccacggtgggcttggcaccctcacagacacgcggggctggcccccctgctcaccctctgggctttgtctccgagccttttgctcccaggcaacactgagctgagctgaggggtgccatggagcggctctgattggaggcttgaggccctgtggctgggtcgggtggaggctgctgggtctgtttcctagtcttttgtttttggacagttgatgggcaagaagagctgcagtaaaagtaaatctcctttaataagcgtctgtatgaagagtgcgcgatcagttccgttacctgccctgcaccctggggagaggaccagggatgggaacccctggcagctgctgccagtcctggaggctcagcccggcgtgccactgctgctacagaaaccaggtcatttgtgcacagcccggaaggcagcggcgcgagttcccgggtgtggtcaccgctctgggtggtgcgcttgtcaatgccccttttgatgcccttgaatagcctgaagatgaaggggaccgggggagggttgcaagcgccatggcctatgcaggctgcggcctctggccattcggagggaaggccccagggagccacctgagtggagctcagaacactggattcgcgcgaaggggaggtgtctgggcgtgcggccccagccccgccaccttcctgggccctgtggtcccaccctccggactaccaaggcacagctgtgtcgcacgttccgcccggtgcctgggacgggctcagccgccagggggcgccgccgccccgagagcctcacgccccgcccccaggctcaaactcttccccctccccactctggctccgcccccggtctcctcttttgctctggccccgcccacctcccctccggcctcggccccgcccccaatcccccatagctctgcgactaagaaaccacaggctgaaggcgactgcagggtcctgccccttgcccagcctcaggactatggagggggcgagtgacgcgcaaggaacggagcaggggacaccgtgcgggctcaggagctccccagatgcccga

SEQ ID NO: 3555 - protein, 367 aa, Homo sapiens; identical to SEQ ID NO: 3543

SEQ ID NO: 3556 - DNA, 5764 bp, Homo sapiens
cccggaagttgaccggggtgcggagctcctgggctgcagctcctggagtttccgaggttcgtgcgcgtctggtggcggcggcgtgatgttctcggcaggagcggagagtttgctccaccaggccagggagatccaggacgaggagctgaagaagttctgttcccggatctgtaaactgctgcaggcggaggacttggggccggacaccctcgactccctgcagaggctcttcctcatcatctcagccacgaagtacagccggaggctggagaagacatgcgtagacctgctgcaggccaccctcggcctgcctgcatgccccgagcagctccaggtgctttgcgccgccatcctgcgagagatgtccccctctgacagcctcagcctggcctgggaccacacgcagaacagccggcagctgagcctggtggcctccgttctcttggcccagggtgacagaaacgaggaggtcagagccgtgggccagggcgtgctacgagcgctggagagccggcagcctgagggacccagcctcagacacctcctccccgtcatggccaaggtcgtggtcctcagcccgggcaccctccaggaggaccaggccaccctgctcagcaagcggctggtcgactggctgcgctacgccagcctccagcaagggctcccacactccggcggcttcttctccacgcccagggcccggcagccgggccccgtcaccgaggtggacggggcggtagccacagacttcttcacggtgctctccagcggccaccgcttcacagacgaccagtggctgaacgtgcaggccttctctatgctgcgggcgtggctgctgcacagcggccccgagggcccgggcaccctggacacagatgacaggtcagagcaggagggctccactctgtcggtgatctccgccacctcctctgccggccgcctgctgccgccccgggagcggcttcgggaggtggccttcgagtactgccagcgcctcattgagcaaagtaaccgacgagccctgaggaagggggactccgacctgcagaaagcttgcctggtggaggccgtgctggtgctggacgtgctgtgccggcaggacccgtccttcctgtaccgaagtctctcctgcctgaaggccctgcacgggcgggtgcgcggggacccggcctctgtgcgggtgctgctgcccctcgcccacttcttcctgagccacggggaagcggctgcagtggactcggaagccgtctaccagcacctgttcaccaggatcccggtggagcagttccacagccccatgctggcctttgaattcatccagttctgcagggacaacctccacctgttcagcgggcacctcagcaccctcagattgagcttccccaacctctttaagttcctggcctggaacagcccacccctcacctccgagtttgtggcgctcctcccggccctggtggacgctggcacagccctggagatgctgcacgcgctgctggacctgccctgcttgacggcggtgctggacctgcagctcaggtcagcaccggctgcatccgagaggccactctgggacacctctctcagggcccccagctgcctggaggccttccgggacccgcagttccagggtcttttccaatacctgctgcgccccaaggccagtggcgccactgagaggttggcgccactccaccagctgctgcagcccatggccggctgtgcccgcgtggcccagtgtgcccaggccgtgcccacgctgctgcaggcattcttctcagcagtgacccaggtggctgacgggtccctgatcaaccagctggcgctgctgctcctgggcaggagcgactcgctctacccggccccagggtacgctgccggtgtgcacaggcctgatgcatgcaggcccatcctggttccactctgagcctgggcctgaggccagcgctggtgccagccttctccccagtgagaacagtttctctgaggctggcagtcttctgtgttcctctatcggagggtgcagcatacacctaccactcagacgcttcccgggtttctccaggcccttggcctggatggggatggggtcataggtctgcacagagcaggcgtagacccggctttctgggcagtgtgctgagttctcagttcctggccctgtgtacgctgaaaccctccctggtggtggagctggcaagagacctgctggagttcctgggcagcgtgaatggtctctgcagcagggcgagcctcgtcaccagcgtggtgtgggccatcggcgagtacctgtcggtgacctacgatcggaggtgcaccgtggagcagatcaacaagttcttcgaagccctggaggctctgctattcgaggtcacccagtgccgcccctctgctgccctgcccaggtgtcccccccaggtggtcaccgtgctgatgaccacgctgacgaagctggcctcccggagccaagatctgatccccagggcctctttattgctgtcaaagatgaggaccctggctcacagtccagccaccagctccacgcacagcgaggagggcgcggaagccatccgtacccgggccacagagctgctgaccctgctgaagatgcctagcgtggcccagtttgtgctcacacccagcacggaggtgtgcagcccccgctatcaccgcgatgccaacacggccctgcccctggccctgcgcacggtcagccggctggtggagagggaggccggcctcatgccagggtgaagggacagtggccagggacttcggtgcagattaagagcctgggcagccagcttgctactgaggccaggctgataggagctcaggagggcgcgggagtcctgggagaggaggcaaggcccacggtgggcttggcaccctcacagacacgcggggctggcccccctgctcaccctctgggctttgtctccgagccttttgctcccaggcaacactgagctgagctgaggggtgccatggagcggctctgattggaggcttgaggccctgtggctgggtcgggtggaggctgctgggtctgtttcctagtcttttgtttttggacagttgatgggcaagaagagctgcagtaaaagtaaatctcctttaataagcgtctgtatgaagagtgcgcgatcagttccgttacctgccctgcaccctggggagaggaccagggatgggaacccctggcagctgctgccagtcctggaggctcagcccggcgtgccactgctgctacagaaaccaggtcatttgtgcacagcccggaaggcagcggcgcgagttcccgggtgtggtcaccgctctgggtggtgcgcttgtcaatgccccttttgatgcccttgaatagcctgaagatgaaggggaccgggggagggttgcaagcgccatggcctatgcaggctgcggcctctggccattcggagggaaggccccagggagccacctgagtggagctcagaacactggattcgcgcgaaggggaggtgtctgggcgtgcggccccagccccgccaccttcctgggccctgtggtcccaccctccggactaccaaggcacagctgtgtcgcacgttccgcccggtgcctgggacgggctcagccgccagggggcgccgccgccccgagagcctcacgccccgcccccaggctcaaactcttccccctccccactctggctccgcccccggtctcctcttttgctctggccccgcccacctcccctccggcctcggccccgcccccaatcccccatagctctgcgactaagaaaccacaggctgaaggcgactgcagggtcctgccccttgcccagcctcaggactatggagggggcgagtgacgcgcaaggaacggagcaggggacaccgtgcgggctcaggagctccccagatgcccgagccgaaccgcggggtcctcaccgccaggttccagcccaggaagcgctcgcctgccccacagcctgggccttgggtcgcgttccgagctccaggacggctggtgtcccccgcggcctgcgatgacagcccagggccgctgagccggggccgcaggaaaggctggcgctggcaggcgcttccgtcggcagcactgtgtttgtgtttccacgtggaaacagcagcgcacgtgtacaactgtgcataccaaggcgtgcgtgccagtgcgcgggtctcgggatcacttcccagtgcggtgcacgaccccgcctgcagcagtgggtgtgggggcgctgctgggctcatcccgaagctcagagagcgtggggctgcccctaggctcggaatgagtctcccactgagtccgcagctcccctcctgccctggggcggggcttccctgacctgaaggcgtcgggggtgtcctggctcccagctcccaggcactcgtggggccaccgcccaggccagctggtgctaagtccgcagcctgtgcagcagcgcccggcttaggactgggagtgtgacttgaagggccgtcccgctcatccaagggacaaggaggagctcatggccacagggcctcggagggcatgaccccagcccagggaggagcaaccttcaggtggcctccaggaggcagctgggaaaagggcaaagctcaccagctctcaactttttttttaaataaactgaaattttagaatagtttttcagatttacagaaaagatgataaaccttagaaacattatatgctaagtgaaagtgagaagtgacagcctgctggcagtcctcacagccctcgctcgctcttggcgcctcctctgcctgggctcccactttggcagcacttgaggagcccttcagcccgccactgcactgtgggagcccctttcagggctggccaaggccggagccggctccctcagcttgcggggaggtgtggagggagaggcgcggtgggaaccagggctgcacgcggtgcttgcgggccagcgcgagttccgggtgggcgtgggctctgtgggccccgcactcggagccgccggctagccccgccagcctgggcagtgaggggcttagcacctggaccagcagctgctgtgctcgatttctcactgggccttagctgccttcctgcggggcagggctggggacctgcagcccgccatgcctgagcctcccccctcccctccgtgggttcctgcgcagtccgagcctccccaacgagtgttgccacctgctcagggcacccagtcccatcgaccacccaagggctgaggagtgcctttggagcagggcacgggactggcaggcagctctacctgcagcccctgtgcaggatccactgggtgaaagccagctgggctcctgagtctggtggggacttggagaacctttatgtctagctaagggattgtaaataaaccaattggcactctgtatctagctcaaggtttgtaaacacaccaatcagcaccttgtgtctagctcagggtttgtgaatgcaccaatagacactctgtatctagctactctggtggggacttggaaaacctttttgtcaacactctgtatctagttaatctggtggggacatggagaacctttgtgtctagctcagggattgtaaacgcaccaatcagcaccctgtcaaaacagaccactcggctctaccagtcagcaggatgtgggtggggccagatgagaataaaagcaggctgcccgagccagcagtgacaacccactcgggtccccttccacaccgggatgctttgtttgttcgctctttgcaataaatcttgctgctgctc

SEQ ID NO: 3557 - protein, 613 aa, Homo sapiens
MFSAGAESLLHQAREIQDEELKKFCSRICKLLQAEDLGPDTLDSLQRLFLIISATKYSRRLEKTCVDLLQATLGLPACPEQLQVLCAAILREMSPSDSLSLAWDHTQNSRQLSLVASVLLAQGDRNEEVRAVGQGVLRALESRQPEGPSLRHLLPVMAKVVVLSPGTLQEDQATLLSKRLVDWLRYASLQQGLPHSGGFFSTPRARQPGPVTEVDGAVATDFFTVLSSGHRFTDDQWLNVQAFSMLRAWLLHSGPEGPGTLDTDDRSEQEGSTLSVISATSSAGRLLPPRERLREVAFEYCQRLIEQSNRRALRKGDSDLQKACLVEAVLVLDVLCRQDPSFLYRSLSCLKALHGRVRGDPASVRVLLPLAHFFLSHGEAAAVDSEAVYQHLFTRIPVEQFHSPMLAFEFIQFCRDNLHLFSGHLSTLRLSFPNLFKFLAWNSPPLTSEFVALLPALVDAGTALEMLHALLDLPCLTAVLDLQLRSAPAASERPLWDTSLRAPSCLEAFRDPQFQGLFQYLLRPKASGATERLAPLHQLLQPMAGCARVAQCAQAVPTLLQAFFSAVTQVADGSLINQLALLLLGRSDSLYPAPGYAAGVHRPDACRPILVPL

SEQ ID NO: 3558 - DNA, 3083 bp, Homo sapiens
cggaagttgaccggggtgcggagctcctgggctgcagctcctggagtttccgaggttcgtgcgcgtctggtggcggcggcgtgatgttctcggcaggagcggagagtttgctccaccaggccagggtgacagaaacgaggaggtcagagccgtgggccagggcgtgctacgagcgctggagagccggcagcctgagggacccagcctcagacacctcctccccgtcatggccaaggtcgtggtcctcagcccgggcaccctccaggaggaccaggccaccctgctcagcaagcggctggtcgactggctgcgctacgccagcctccagcaagggctcccacactccggcggcttcttctccacgcccagggcccggcagccgggccccgtcaccgaggtggacggggcggtagccacagacttcttcacggtgctctccagcggccaccgcttcacagacgaccagtggctgaacgtgcaggccttctctatgctgcgggcgtggctgctgcacagcggccccgagggcccgggcaccctggacacagatgacaggtcagagcaggagggctccactctgtcggtgatctccgccacctcctctgccggccgcctgctgccgccccgggagcggcttcgggaggtggccttcgagtactgccagcgcctcattgagcaaagtaaccgacgagccctgaggaagggggactccgacctgcagaaagcttgcctggtggaggccgtgctggtgctggacgtgctgtgccggcaggacccgtccttcctgtaccgaagtctctcctgcctgaaggccctgcacgggcgggtgcgcggggacccggcctctgtgcgggtgctgctgcccctcgcccacttcttcctgagccacggggaagcggctgcagtggactcggaagccgtctaccagcacctgttcaccaggatcccggtggagcagttccacagccccatgctggcctttgaattcatccagttctgcagggacaacctccacctgttcagcgggcacctcagcaccctcagattgagcttccccaacctctttaagttcctggcctggaacagcccacccctcacctccgagtttgtggcgctcctcccggccctggtggacgctggcacagccctggagatgctgcacgcgctgctggacctgccctgcttgacggcggtgctggacctgcagctcaggtcagcaccggctgcatccgagaggccactctgggacacctctctcagggcccccagctgcctggaggccttccgggacccgcagttccagggtcttttccaatacctgctgcgccccaaggccagtggcgccactgagaggttggcgccactccaccagctgctgcagcccatggccggctgtgcccgcgtggcccagtgtgcccaggccgtgcccacgctgctgcaggcattcttctcagcagtgacccaggtggctgacgggtccctgatcaaccagctggcgctgctgctcctgggcaggagcgactcgctctacccggccccagggtacgctgccggtgtgcacaggtaggtccctcctgcgctcctgccacagccctgggcgggtgcctcctggactcctccccctctcccctcccccctccccttcagtggcttcggcaccacccctagctgggccctcagcagcctcagaccctgccacccccacccacagccccacacccagccccaggcacttctctctgcttctcaagaacattcccgtccttctttctgccgagcctgtcctcttcagggttagctcaggtccctcttccccgtcttgtcccctggggtccttctctccaaaggcctgatgcatgcaggcccatcctggttccactctgagcctgggcctgaggccagcgctggtgccagccttctccccagtgagaacagtttctctgaggctggcagtcttctgtgttcctctatcggagggtgcagcatacacctaccactcagacgcttcccgggtttctccaggcccttggcctggatggggatggggtcataggtctgcacagagcaggcgtagacccggctttctgggcagtgtgctgagttctcagttcctggccctgtgtacgctgaaaccctccctggtggtggagctggcaagagacctgctggagttcctgggcagcgtgaatggtctctgcagcagggcgagcctcgtcaccagcgtggtgtgggccatcggcgagtacctgtcggtgacctacgatcggaggtgcaccgtggagcagatcaacaagttcttcgaagccctggaggctctgctattcgaggtcacccagtgccgcccctctgctgccctgcccaggtgtcccccccaggtggtcaccgtgctgatgaccacgctgacgaagctggcctcccggagccaagatctgatccccagggcctctttattgctgtcaaagatgaggaccctggctcacagtccagccaccagctccacgcacagcgaggagggcgcggaagccatccgtacccgggccacagagctgctgaccctgctgaagatgcctagcgtggcccagtttgtgctcacacccagcacggaggtgtgcagcccccgctatcaccgcgatgccaacacggccctgcccctggccctgcgcacggtcagccggctggtggagagggaggccggcctcatgccagggtgaagggacagtggccagggacttcggtgcagattaagagcctgggcagccagcttgctactgaggccaggctgataggagctcaggagggcgcgggagtcctgggagaggaggcaaggcccacggtgggcttggcaccctcacagacacgcggggctggcccccctgctcaccctctgggctttgtctccgagccttttgctcccaggcaacactgagctgagctgaggggtgccatggagcggctctgattggaggcttgaggccctgtggctgggtcgggtggaggctgctgggtctgtttcctagtcttttgtttttggacagttgatgggcaagaagagctgcagtaaaagtaaatctcctttaataagc

SEQ ID NO: 3559 - protein, 446 aa, Homo sapiens
MAKVVVLSPGTLQEDQATLLSKRLVDWLRYASLQQGLPHSGGFFSTPRARQPGPVTEVDGAVATDFFTVLSSGHRFTDDQWLNVQAFSMLRAWLLHSGPEGPGTLDTDDRSEQEGSTLSVISATSSAGRLLPPRERLREVAFEYCQRLIEQSNRRALRKGDSDLQKACLVEAVLVLDVLCRQDPSFLYRSLSCLKALHGRVRGDPASVRVLLPLAHFFLSHGEAAAVDSEAVYQHLFTRIPVEQFHSPMLAFEFIQFCRDNLHLFSGHLSTLRLSFPNLFKFLAWNSPPLTSEFVALLPALVDAGTALEMLHALLDLPCLTAVLDLQLRSAPAASERPLWDTSLRAPSCLEAFRDPQFQGLFQYLLRPKASGATERLAPLHQLLQPMAGCARVAQCAQAVPTLLQAFFSAVTQVADGSLINQLALLLLGRSDSLYPAPGYAAGVHR

SEQ ID NO: 3560 - DNA, 3342 bp, Homo sapiens
cggaagttgaccggggtgcggagctcctgggctgcagctcctggagtttccgaggttcgtgcgcgtctggtggcggcggcgtgatgttctcggcaggagcggagagtttgctccaccaggccagggtgacagaaacgaggaggtcagagccgtgggccagggcgtgctacgagcgctggagagccggcagcctgagggacccagcctcagacacctcctccccgtcatggccaaggtcgtggtcctcagcccgggcaccctccaggaggaccaggccaccctgctcagcaagcggctggtcgactggctgcgctacgccagcctccagcaagggctcccacactccggcggcttcttctccacgcccagggcccggcagccgggccccgtcaccgaggtggacggggcggtagccacagacttcttcacggtgctctccagcggccaccgcttcacagacgaccagtggctgaacgtgcaggccttctctatgctgcgggcgtggctgctgcacagcggccccgagggcccgggcaccctggacacagatgacaggtcagagcaggagggctccactctgtcggtgatctccgccacctcctctgccggccgcctgctgccgccccgggagcggcttcgggaggtggccttcgagtactgccagcgcctcattgagcaaagtaaccgacgagccctgaggaagggggactccgacctgcagaaagcttgcctggtggaggccgtgctggtgctggacgtgctgtgccggcaggacccgtccttcctgtaccgaagtctctcctgcctgaaggccctgcacgggcgggtgcgcggggacccggcctctgtgcgggtgctgctgcccctcgcccacttcttcctgagccacggggaagcggctgcagtggactcggaagccgtctaccagcacctgttcaccaggatcccggtggagcagttccacagccccatgctggcctttgaattcatccagttctgcagggacaacctccacctgttcagcgggcacctcagcaccctcagattgagcttccccaacctctttaagttcctggcctggaacagcccacccctcacctccgagtttgtggcgctcctcccggccctggtggacgctggcacagccctggagatgctgcacgcgctgctggacctgccctgcttgacggcggtgctggacctgcagctcaggtcagcaccggctgcatccgagaggccactctgggacacctctctcagggcccccagctgcctggaggccttccgggacccgcagttccagggtcttttccaatacctgctgcgccccaaggccagtggcgccactgagaggttggcgccactccaccagctgctgcagcccatggccggctgtgcccgcgtggcccagtgtgcccaggccgtgcccacgctgctgcaggcattcttctcagcagtgacccaggtggctgacgggtccctgatcaaccagctggcgctgctgctcctgggcaggagcgactcgctctacccggccccagggtacgctgccggtgtgcacagtgtgctgagttctcagttcctggccctgtgtacgctgaaaccctccctggtggtggagctggcaagagacctgctggagttcctgggcagcgtgaatggtctctgcagcagggcgagcctcgtcaccagcgtggtgtgggccatcggcgagtacctgtcggtgacctacgatcggaggtgcaccgtggagcagatcaacaagttcttcgaagccctggaggctctgctattcgaggtcacccagtgccgcccctctgctgccctgcccaggtgtcccccccaggtggtcaccgtgctgatgaccacgctgacgaagctggcctcccggagccaagatctgatccccagggcctctttattgctgtcaaagatgaggaccctggctcacagtccagccaccagctccacgcacagcgaggagggcgcggaagccatccgtacccgggccacagagctgctgaccctgctgaagatgcctagcgtggcccagtttgtgctcacacccagcacggaggtgtgcagcccccgctatcaccgcgatgccaacacggccctgcccctggccctgcgcacggtcagccggctggtggagagggaggccggcctcatgccagggtgaagggacagtggccagggacttcggtgcagattaagagcctgggcagccagcttgctactgaggccaggctgataggagctcaggagggcgcgggagtcctgggagaggaggcaaggcccacggtgggcttggcaccctcacagacacgcggggctggcccccctgctcaccctctgggctttgtctccgagccttttgctcccaggcaacactgagctgagctgaggggtgccatggagcggctctgattggaggcttgaggccctgtggctgggtcgggtggaggctgctgggtctgtttcctagtcttttgtttttggacagttgatgggcaagaagagctgcagtaaaagtaaatctcctttaataagcgtctgtatgaagagtgcgcgatcagttccgttacctgccctgcaccctggggagaggaccagggatgggaacccctggcagctgctgccagtcctggaggctcagcccggcgtgccactgctgctacagaaaccaggtcatttgtgcacagcccggaaggcagcggcgcgagttcccgggtgtggtcaccgctctgggtggtgcgcttgtcaatgccccttttgatgcccttgaatagcctgaagatgaaggggaccgggggagggttgcaagcgccatggcctatgcaggctgcggcctctggccattcggagggaaggccccagggagccacctgagtggagctcagaacactggattcgcgcgaaggggaggtgtctgggcgtgcggccccagccccgccaccttcctgggccctgtggtcccaccctccggactaccaaggcacagctgtgtcgcacgttccgcccggtgcctgggacgggctcagccgccagggggcgccgccgccccgagagcctcacgccccgcccccaggctcaaactcttccccctccccactctggctccgcccccggtctcctcttttgctctggccccgcccacctcccctccggcctcggccccgcccccaatcccccatagctctgcgactaagaaaccacaggctgaaggcgactgcagggtcctgccccttgcccagcctcaggactatggagggggcgagtgacgcgcaaggaacggagcaggggacaccgtgcgggctcaggagctccccagatgcccga

SEQ ID NO: 3561 - protein, 651 aa, Homo sapiens
MAKVVVLSPGTLQEDQATLLSKRLVDWLRYASLQQGLPHSGGFFSTPRARQPGPVTEVDGAVATDFFTVLSSGHRFTDDQWLNVQAFSMLRAWLLHSGPEGPGTLDTDDRSEQEGSTLSVISATSSAGRLLPPRERLREVAFEYCQRLIEQSNRRALRKGDSDLQKACLVEAVLVLDVLCRQDPSFLYRSLSCLKALHGRVRGDPASVRVLLPLAHFFLSHGEAAAVDSEAVYQHLFTRIPVEQFHSPMLAFEFIQFCRDNLHLFSGHLSTLRLSFPNLFKFLAWNSPPLTSEFVALLPALVDAGTALEMLHALLDLPCLTAVLDLQLRSAPAASERPLWDTSLRAPSCLEAFRDPQFQGLFQYLLRPKASGATERLAPLHQLLQPMAGCARVAQCAQAVPTLLQAFFSAVTQVADGSLINQLALLLLGRSDSLYPAPGYAAGVHSVLSSQFLALCTLKPSLVVELARDLLEFLGSVNGLCSRASLVTSVVWAIGEYLSVTYDRRCTVEQINKFFEALEALLFEVTQCRPSAALPRCPPQVVTVLMTTLTKLASRSQDLIPRASLLLSKMRTLAHSPATSSTHSEEGAEAIRTRATELLTLLKMPSVAQFVLTPSTEVCSPRYHRDANTALPLALRTVSRLVEREAGLMPG

SEQ ID NO: 3562 - DNA, 3871 bp, Homo sapiens
cggaagttgaccggggtgcggagctcctgggctgcagctcctggagtttccgaggttcgtgcgcgtctggtggcggcggcgtgatgttctcggcaggagcggagagtttgctccaccaggccagggtgacagaaacgaggaggtcagagccgtgggccagggcgtgctacgagcgctggagagccggcagcctgagggacccagcctcagacacctcctccccgtcatggccaaggtcgtggtcctcagcccgggcaccctccaggaggaccaggccaccctgctcagcaagcggctggtcgactggctgcgctacgccagcctccagcaagggctcccacactccggcggcttcttctccacgcccagggcccggcagccgggccccgtcaccgaggtggacggggcggtagccacagacttcttcacggtgctctccagcggccaccgcttcacagacgaccagtggctgaacgtgcaggccttctctatgctgcgggcgtggctgctgcacagcggccccgagggcccgggcaccctggacacagatgacaggtcagagcaggagggctccactctgtcggtgatctccgccacctcctctgccggccgcctgctgccgccccgggagcggcttcgggaggtggccttcgagtactgccagcgcctcattgagcaaagtaaccgacgagccctgaggaagggggactccgacctgcagaaagcttgcctggtggaggccgtgctggtgctggacgtgctgtgccggcaggacccgtccttcctgtaccgaagtctctcctgcctgaaggccctgcacgggcgggtgcgcggggacccggcctctgtgcgggtgctgctgcccctcgcccacttcttcctgagccacggggaagcggctgcagtggactcggaagccgtctaccagcacctgttcaccaggatcccggtggagcagttccacagccccatgctggcctttgaattcatccagttctgcagggacaacctccacctgttcagcgggcacctcagcaccctcagattgagcttccccaacctctttaagttcctggcctggaacagcccacccctcacctccgagtttgtggcgctcctcccggccctggtggacgctggcacagccctggagatgctgcacgcgctgctggacctgccctgcttgacggcggtgctggacctgcagctcaggtcagcaccggctgcatccgagaggccactctgggacacctctctcagggcccccagctgcctggaggccttccgggacccgcagttccagggtcttttccaatacctgctgcgccccaaggccagtggcgccactgagaggttggcgccactccaccagctgctgcagcccatggccggctgtgcccgcgtggcccagtgtgcccaggccgtgcccacgctgctgcaggcattcttctcagcagtgacccaggtggctgacgggtccctgatcaaccagctggcgctgctgctcctgggcaggagcgactcgctctacccggccccagggtacgctgccggtgtgcacaggtaggtccctcctgcgctcctgccacagccctgggcgggtgcctcctggactcctccccctctcccctcccccctccccttcagtggcttcggcaccacccctagctgggccctcagcagcctcagaccctgccacccccacccacagccccacacccagccccaggcacttctctctgcttctcaagaacattcccgtccttctttctgccgagcctgtcctcttcagggttagctcaggtccctcttccccgtcttgtcccctggggtccttctctccaaaggcctgatgcatgcaggcccatcctggttccactctgagcctgggcctgaggccagcgctggtgccagccttctccccagtgagaacagtttctctgaggctggcagtcttctgtgttcctctatcggagggtgcagcatacacctaccactcagacgcttcccgggtttctccaggcccttggcctggatggggatggggtcataggtctgcacagagcaggcgtagacccggctttctgggcagtgtgctgagttctcagttcctggccctgtgtacgctgaaaccctccctggtggtggagctggcaagagacctgctggagttcctgggcagcgtgaatggtctctgcagcagggcgagcctcgtcaccagcgtggtgtgggccatcggcgagtacctgtcggtgacctacgatcggaggtgcaccgtggagcagatcaacaagttcttcgaagccctggaggctctgctattcgaggtcacccagtgccgcccctctgctgccctgcccaggtgtcccccccaggtggtcaccgtgctgatgaccacgctgacgaagctggcctcccggagccaagatctgatccccagggcctctttattgctgtcaaagatgaggaccctggctcacagtccagccaccagctccacgcacagcgaggagggcgcggaagccatccgtacccgggccacagagctgctgaccctgctgaagatgcctagcgtggcccagtttgtgctcacacccagcacggaggtgtgcagcccccgctatcaccgcgatgccaacacggccctgcccctggccctgcgcacggtcagccggctggtggagagggaggccggcctcatgccagggtgaagggacagtggccagggacttcggtgcagattaagagcctgggcagccagcttgctactgaggccaggctgataggagctcaggagggcgcgggagtcctgggagaggaggcaaggcccacggtgggcttggcaccctcacagacacgcggggctggcccccctgctcaccctctgggctttgtctccgagccttttgctcccaggcaacactgagctgagctgaggggtgccatggagcggctctgattggaggcttgaggccctgtggctgggtcgggtggaggctgctgggtctgtttcctagtcttttgtttttggacagttgatgggcaagaagagctgcagtaaaagtaaatctcctttaataagcgtctgtatgaagagtgcgcgatcagttccgttacctgccctgcaccctggggagaggaccagggatgggaacccctggcagctgctgccagtcctggaggctcagcccggcgtgccactgctgctacagaaaccaggtcatttgtgcacagcccggaaggcagcggcgcgagttcccgggtgtggtcaccgctctgggtggtgcgcttgtcaatgccccttttgatgcccttgaatagcctgaagatgaaggggaccgggggagggttgcaagcgccatggcctatgcaggctgcggcctctggccattcggagggaaggccccagggagccacctgagtggagctcagaacactggattcgcgcgaaggggaggtgtctgggcgtgcggccccagccccgccaccttcctgggccctgtggtcccaccctccggactaccaaggcacagctgtgtcgcacgttccgcccggtgcctgggacgggctcagccgccagggggcgccgccgccccgagagcctcacgccccgcccccaggctcaaactcttccccctccccactctggctccgcccccggtctcctcttttgctctggccccgcccacctcccctccggcctcggccccgcccccaatcccccatagctctgcgactaagaaaccacaggctgaaggcgactgcagggtcctgccccttgcccagcctcaggactatggagggggcgagtgacgcgcaaggaacggagcaggggacaccgtgcgggctcaggagctccccagatgcccga

SEQ ID NO: 3563 - protein, 446 aa, Homo sapiens; identical to SEQ ID NO: 3559

SEQ ID NO: 3564 - DNA, 671 bp, Homo sapiens
gaccggggtgcggagctcctgggctgcagctcctggagtttccgaggttcgtgcgcgtctggtggcggcggcgtgatgttctcggcaggagcggagagtttgctccaccaggccagggagatccaggacgaggagctgaagaagttctgttcccggatctgtaaactgctgcaggcggaggacttggggccggacaccctcgactccctgcagaggctcttcctcatcatctcagccacgaagtacagccggagcggctgcagtggactcggaagccgtctaccagcacctgttcaccaggatcccggtggagcagttccacagccccatgctggcctttgaattcatccagttctgcagggacaacctccacctgttcagcgggcacctcagcaccctcagattgagcttccccaacctctttaagttcctggcctggaacagcccacccctcacctccgagtttgtggcgctcctcccggccctggtggacgctggcacagccctggagatgctgcacgcgctgctggacctgccctgcttgacggcggtgctggacctgcagctcaggtgggcccctcaccctctgccagcgctgcgtctcccagccagctggttccacacactgggccccctcctcgctgctcctgacccctacaccggggaccctc

SEQ ID NO: 3565 - protein, 113 aa, Homo sapiens
MLAFEFIQFCRDNLHLFSGHLSTLRLSFPNLFKFLAWNSPPLTSEFVALLPALVDAGTALEMLHALLDLPCLTAVLDLQLRWAPHPLPALRLPASWFHTLGPLLAAPDPYTGD

SEQ ID NO: 3566 - DNA, 1038 bp, Homo sapiens
agggacctggggtctcactatgttgcccaggctggtctcaaacttctgggctcaagcaatccaccctccttggccaggagtttttgccaagtccatgtcctccctccctctgtgtcgggagcaggcctgggcactcagcgtggggatccaggggttcacaggctgcctttgtgtgagagaagctgctatctctgctcatgggttgcccaggggtgcagagtctgcaggaaggttgcgatggagctgggcttttccctccgttcccagcctgcagcgtcatgagttgcctcctgtgctggggtgcagcctgcggttgctttagttctgtgtgggcgagagcttgtgggccccggcgtactcagggcgttgtacttcatcactggggtcatcctggttggtgcccagccccctcacctcacagacctcctgcaggccacctccaggcctccgagatgaccccggtaatgctgtggtagctcgtggccttcgagtactgccagcgcctcattgagcaaagtaaccgacgagccctgaggaagggggactccgacctgcagaaagcttgcctggtggaggccgtgctggtgctggacgtgctgtgccggcaggacccgtccttcctgtaccgaagtctctcctgcctgaaggccctgcacgggcgggtgcgcggggacccggcctctgtgcgggtgctgctgcccctcgcccacttcttcctgagccacgcccaggaaacctgaaagtctaggaaccagcaccttccaaagaatgtgccatagtgtgtgtgactcacgagctgtccgtgtccctgggcgagggagaccaagtgccgcttccccagcgtcccagcgtaggacgcctcggagcccttggtgtcctggagagcaggcctgagactcagggcccctaaccagtcacagaagcacggccagggcgaggtcaagacgtgtgccctggcgggccctggtcttgcaggggaagcggctgcagtggactcggaagccgtctaccagcacctgttcaccaggatcccggtgg

SEQ ID NO: 3567 - protein, 100 aa, Homo sapiens
MLPRLVSNFWAQAIHPPWPGVFAKSMSSLPLCREQAWALSVGIQGFTGCLCVREAAISAHGLPRGAESAGRLRWSWAFPSVPSLQRHELPPVLGCSLRLL

SEQ ID NO: 3568 - DNA, 440 bp, Homo sapiens
aggtggacggggcggtagccacagacttcttcacggtggagagggaggccggcctcatgccagggtgaagggacagtggccagggacttcggtgcagattaagagcctgggcagccagcttgctactgaggccaggctgataggagctcaggagggcgcgggagtcctgggagaggaggcaaggcccacggtgggcttggcaccctcacagacacgcggggctggcccccctgctcaccctctgggctttgtctccgagccttttgctcccaggcaacactgagctgagctgaggggtgccatggagcggctctgattggaggcttgaggccctgtggctgggtcgggtggaggctgctgggtctgtttcctagtcttttgtttttggacagttgatgggcaagaagagctgcagtaaaagtaaatctcctttaataagc

SEQ ID NO: 3569 - protein, 93 aa, Homo sapiens
GGRGGSHRLLHGGEGGRPHARVKGQWPGTSVQIKSLGSQLATEARLIGAQEGAGVLGEEARPTVGLAPSQTRGAGPPAHPLGFVSEPFAPRQH

SEQ ID NO: 3570 - DNA, 1228 bp, Homo sapiens
aggtggacggggcggtagccacagacttcttcacggtggagagggaggccggcctcatgccagggtgaagggacagtggccagggacttcggtgcagattaagagcctgggcagccagcttgctactgaggccaggctgataggagctcaggagggcgcgggagtcctgggagaggaggcaaggcccacggtgggcttggcaccctcacagacacgcggggctggcccccctgctcaccctctgggctttgtctccgagccttttgctcccaggcaacactgagctgagctgaggggtgccatggagcggctctgattggaggcttgaggccctgtggctgggtcgggtggaggctgctgggtctgtttcctagtcttttgtttttggacagttgatgggcaagaagagctgcagtaaaagtaaatctcctttaataagcgtctgtatgaagagtgcgcgatcagttccgttacctgccctgcaccctggggagaggaccagggatgggaacccctggcagctgctgccagtcctggaggctcagcccggcgtgccactgctgctacagaaaccaggtcatttgtgcacagcccggaaggcagcggcgcgagttcccgggtgtggtcaccgctctgggtggtgcgcttgtcaatgccccttttgatgcccttgaatagcctgaagatgaaggggaccgggggagggttgcaagcgccatggcctatgcaggctgcggcctctggccattcggagggaaggccccagggagccacctgagtggagctcagaacactggattcgcgcgaaggggaggtgtctgggcgtgcggccccagccccgccaccttcctgggccctgtggtcccaccctccggactaccaaggcacagctgtgtcgcacgttccgcccggtgcctgggacgggctcagccgccagggggcgccgccgccccgagagcctcacgccccgcccccaggctcaaactcttccccctccccactctggctccgcccccggtctcctcttttgctctggccccgcccacctcccctccggcctcggccccgcccccaatcccccatagctctgcgactaagaaaccacaggctgaaggcgactgcagggtcctgccccttgcccagcctcaggactatggagggggcgagtgacgcgcaaggaacggagcaggggacaccgtgcgggctcaggagctccccagatgcccga

SEQ ID NO: 3571 - protein, 150 aa, Homo sapiens [sequence omitted]

SEQ ID NO: 3572 - DNA, 1549 bp, Homo sapiens
caacctccacctgttcagcgggcacctcagcaccctcagattgagcttccccaacctctttaagttcctggcctggaacagcccacccctcacctccgagtttgtggcgctcctcccggccctggtggacgctggcacagccctggagatgctgcacgcgctgctggacctgccctgcttgacggcggtgctggacctgcagctcaggtcagcaccggctgcatccgagaggccactctgggacacctctctcagggcccccagctgcctggaggccttccgggacccgcagttccagggtcttttccaatacctgctgcgccccaaggccagtggcgccactgagaggttggcgccactccaccagctgctgcagcccatggccggctgtgcccgcgtggcccagtgtgcccaggccgtgcccacgctgctgcaggcattcttctcagcagtgacccaggtggctgacgggtccctgatcaaccagctggcgctgctgctcctgggcaggagcgactcgctctacccggccccagggtacgctgccggtgtgcacagtgtgctgagttctcagttcctggccctgtgtacgctgaaaccctccctggtggtggagctggcaagagacctgctggagttcctgggcagcgtgaatggtctctgcagcagggcgagcctcgtcaccagcgtggtgtgggccatcggcgagtacctgtcggtgacctacgatcggaggtgcaccgtggagcagatcaacaagttcttcgaagccctggaggctctgctattcgaggtcacccagtgccgcccctctgctgccctgcccaggtgtcccccccaggtggtcaccgtgctgatgaccacgctgacgaagctggcctcccggagccaagatctgatccccagggcctctttattgctgtcaaagatgaggaccctggctcacagtccagccaccagctccacgcacagcgaggagggcgcggaagccatccgtacccgggccacagagctgctgaccctgctgaagatgcctagcgtggcccagtttgtgctcacacccagcacggaggtgtgcagcccccgctatcaccgcgatgccaacacggccctgcccctggccctgcgcacggtcagccggctggtggagagggaggccggcctcatgccagggtgaagggacagtggccagggacttcggtgcagattaagagcctgggcagccagcttgctactgaggccaggctgataggagctcaggagggcgcgggagtcctgggagaggaggcaaggcccacggtgggcttggcaccctcacagacacgcggggctggcccccctgctcaccctctgggctttgtctccgagccttttgctcccaggcaacactgagctgagctgaggggtgccatggagcggctctgattggaggcttgaggccctgtggctgggtcgggtggaggctgctgggtctgtttcctagtcttttgtttttggacagttgatgggcaagaagagctgcagtaaaagtaaatctcctttaataagc

SEQ ID NO: 3573 - protein, 342 aa, Homo sapiens [sequence omitted]

SEQ ID NO: 3574 - DNA, 576 bp, Homo sapiens
ctgttcagcgggcacctcagcaccctcagattgagcttccccaacctctttaagctccgagccgtgtccgaaccgctgtgctgtgcccacagttcctggcctggaacagcccacccctcacctccgagtttgtggcgctcctcccggccctggtggacgctggcacagccctggagatgctgcacgcgctgctggacctgccctgcttgacggcggtgctggacctgcagctcaggtcagcaccggctgcatccgagaggccactctgggacacctctctcagggcccccagctgcctggaggccttccgggacccgcagttccagggtcttttccaatacctgctgcgccccaaggccagtggcgccactgagaggttggcgccactccaccagctgctgcagcccatggccggctgtgcccgcgtggcccagtgtgcccaggccgtgcccacgctgctgcaggcattcttctcagcagtgacccaggtgagctcgctgcctggggccccccattcccacaggcctcacaactgaggggcaggccagagccagcactggggggccctcttgagct

SEQ ID NO: 3575 - protein, 119 aa, Homo sapiens
MLHALLDLPCLTAVLDLQLRSAPAASERPLWDTSLRAPSCLEAFRDPQFQGLFQYLLRPKASGATERLAPLHQLLQPMAGCARVAQCAQAVPTLLQAFFSAVTQVSSLPGAPHSHRPHN

SEQ ID NO: 3576 - DNA, 2344 bp, Homo sapiens
ccgggacccgcagttccagggtcttttccaatacctgctgcgccccaaggccagtggcgccactgagaggtacggggccctagggccagggggccaccagtggctcagagagcccggccacagccactggggtggggctcactgctcagccctaggctgaggccagggtgctttgtgtcccacacaaggctgcgtccccgtcatcaccattatagaggccctgcttctgcaccacgggtctgccgggggcggggcctggtctcagctctctctgctgcccacatcaaccctcataagcttggaggttggccctgtgggtgctccattttgcagatggacaaaccgagcctgagcccaggaagcaggaggcctgggaccggccacaggcctcctgccctcagcccacgccagcctttgtcccgatggctttactgtcccgggtgtgctgacgccaggggtctccccaaacccaggggagcaggaggtcccgagaggcgatgagtgaggatgggagcgggctcagctgtgcgagagggagcagtggcgacgtggccccggcctgcagtcaccaggtcggggagcgggcagcactcacggccacactgtgtcctcaggttggcgccactccaccagctgctgcagcccatggccggctgtgcccgcgtggcccagtgtgcccaggccgtgcccacgctgctgcaggcattcttctcagcagtgacccaggtggctgacgggtccctgatcaaccagctggcgctgctgctcctgggcaggagcgactcgctctacccggccccagggtacgctgccggtgtgcacaggtaggtccctcctgcgctcctgccacagccctgggcgggtgcctcctggactcctccccctctcccctcccccctccccttcagtggcttcggcaccacccctagctgggccctcagcagcctcagaccctgccacccccacccacagccccacacccagccccaggcacttctctctgcttctcaagaacattcccgtccttctttctgccgagcctgtcctcttcagggttagctcaggtccctcttccccgtcttgtcccctggggtccttctctccaaaggcctgatgcatgcaggcccatcctggttccactctgagcctgggcctgaggccagcgctggtgccagccttctccccagtgagaacagtttctctgaggctggcagtcttctgtgttcctctatcggagggtgcagcatacacctaccactcagacgcttcccgggtttctccaggcccttggcctggatggggatggggtcataggtctgcacagagcaggcgtagacccggctttctgggcagtgtgctgagttctcagttcctggccctgtgtacgctgaaaccctccctggtggtggagctggcaagagacctgctggagttcctgggcagcgtgaatggtctctgcagcagggcgagcctcgtcaccagcgtggtgtgggccatcggcgagtacctgtcggtgacctacgatcggaggtgcaccgtggagcagatcaacaagttcttcgaagccctggaggctctgctattcgaggtcacccagtgccgcccctctgctgccctgcccaggtgtcccccccaggtggtcaccgtgctgatgaccacgctgacgaagctggcctcccggagccaagatctgatccccagggcctctttattgctgtcaaagatgaggaccctggctcacagtccagccaccagctccacgcacagcgaggagggcgcggaagccatccgtacccgggccacagagctgctgaccctgctgaagatgcctagcgtggcccagtttgtgctcacacccagcacggaggtgtgcagcccccgctatcaccgcgatgccaacacggccctgcccctggccctgcgcacggtcagccggctggtggagagggaggccggcctcatgccagggtgaagggacagtggccagggacttcggtgcagattaagagcctgggcagccagcttgctactgaggccaggctgataggagctcaggagggcgcgggagtcctgggagaggaggcaaggcccacggtgggcttggcaccctcacagacacgcggggctggcccccctgctcaccctctgggctttgtctccgagccttttgctcccaggcaacactgagctgagctgaggggtgccatggagcggctctgattggaggcttgaggccctgtggctgggtcgggtggaggctgctgggtctgtttcctagtcttttgtttttggacagttgatgggcaagaagagctgcagtaaaagtaaatctcctttaataagc

SEQ ID NO: 3577 - protein, 284 aa, Homo sapiens [sequence omitted]

SEQ ID NO: 3578 - DNA, 3132 bp, Homo sapiens
ccgggacccgcagttccagggtcttttccaatacctgctgcgccccaaggccagtggcgccactgagaggtacggggccctagggccagggggccaccagtggctcagagagcccggccacagccactggggtggggctcactgctcagccctaggctgaggccagggtgctttgtgtcccacacaaggctgcgtccccgtcatcaccattatagaggccctgcttctgcaccacgggtctgccgggggcggggcctggtctcagctctctctgctgcccacatcaaccctcataagcttggaggttggccctgtgggtgctccattttgcagatggacaaaccgagcctgagcccaggaagcaggaggcctgggaccggccacaggcctcctgccctcagcccacgccagcctttgtcccgatggctttactgtcccgggtgtgctgacgccaggggtctccccaaacccaggggagcaggaggtcccgagaggcgatgagtgaggatgggagcgggctcagctgtgcgagagggagcagtggcgacgtggccccggcctgcagtcaccaggtcggggagcgggcagcactcacggccacactgtgtcctcaggttggcgccactccaccagctgctgcagcccatggccggctgtgcccgcgtggcccagtgtgcccaggccgtgcccacgctgctgcaggcattcttctcagcagtgacccaggtggctgacgggtccctgatcaaccagctggcgctgctgctcctgggcaggagcgactcgctctacccggccccagggtacgctgccggtgtgcacaggtaggtccctcctgcgctcctgccacagccctgggcgggtgcctcctggactcctccccctctcccctcccccctccccttcagtggcttcggcaccacccctagctgggccctcagcagcctcagaccctgccacccccacccacagccccacacccagccccaggcacttctctctgcttctcaagaacattcccgtccttctttctgccgagcctgtcctcttcagggttagctcaggtccctcttccccgtcttgtcccctggggtccttctctccaaaggcctgatgcatgcaggcccatcctggttccactctgagcctgggcctgaggccagcgctggtgccagccttctccccagtgagaacagtttctctgaggctggcagtcttctgtgttcctctatcggagggtgcagcatacacctaccactcagacgcttcccgggtttctccaggcccttggcctggatggggatggggtcataggtctgcacagagcaggcgtagacccggctttctgggcagtgtgctgagttctcagttcctggccctgtgtacgctgaaaccctccctggtggtggagctggcaagagacctgctggagttcctgggcagcgtgaatggtctctgcagcagggcgagcctcgtcaccagcgtggtgtgggccatcggcgagtacctgtcggtgacctacgatcggaggtgcaccgtggagcagatcaacaagttcttcgaagccctggaggctctgctattcgaggtcacccagtgccgcccctctgctgccctgcccaggtgtcccccccaggtggtcaccgtgctgatgaccacgctgacgaagctggcctcccggagccaagatctgatccccagggcctctttattgctgtcaaagatgaggaccctggctcacagtccagccaccagctccacgcacagcgaggagggcgcggaagccatccgtacccgggccacagagctgctgaccctgctgaagatgcctagcgtggcccagtttgtgctcacacccagcacggaggtgtgcagcccccgctatcaccgcgatgccaacacggccctgcccctggccctgcgcacggtcagccggctggtggagagggaggccggcctcatgccagggtgaagggacagtggccagggacttcggtgcagattaagagcctgggcagccagcttgctactgaggccaggctgataggagctcaggagggcgcgggagtcctgggagaggaggcaaggcccacggtgggcttggcaccctcacagacacgcggggctggcccccctgctcaccctctgggctttgtctccgagccttttgctcccaggcaacactgagctgagctgaggggtgccatggagcggctctgattggaggcttgaggccctgtggctgggtcgggtggaggctgctgggtctgtttcctagtcttttgtttttggacagttgatgggcaagaagagctgcagtaaaagtaaatctcctttaataagcgtctgtatgaagagtgcgcgatcagttccgttacctgccctgcaccctggggagaggaccagggatgggaacccctggcagctgctgccagtcctggaggctcagcccggcgtgccactgctgctacagaaaccaggtcatttgtgcacagcccggaaggcagcggcgcgagttcccgggtgtggtcaccgctctgggtggtgcgcttgtcaatgccccttttgatgcccttgaatagcctgaagatgaaggggaccgggggagggttgcaagcgccatggcctatgcaggctgcggcctctggccattcggagggaaggccccagggagccacctgagtggagctcagaacactggattcgcgcgaaggggaggtgtctgggcgtgcggccccagccccgccaccttcctgggccctgtggtcccaccctccggactaccaaggcacagctgtgtcgcacgttccgcccggtgcctgggacgggctcagccgccagggggcgccgccgccccgagagcctcacgccccgcccccaggctcaaactcttccccctccccactctggctccgcccccggtctcctcttttgctctggccccgcccacctcccctccggcctcggccccgcccccaatcccccatagctctgcgactaagaaaccacaggctgaaggcgactgcagggtcctgccccttgcccagcctcaggactatggagggggcgagtgacgcgcaaggaacggagcaggggacaccgtgcgggctcaggagctccccagatgcccga

SEQ ID NO: 3579 - protein, 284 aa, Homo sapiens [sequence omitted]

SEQ ID NO: 3580 - DNA, 1953 bp, Homo sapiens
gtcctgggtgactttggaagtccgtagtgtctcattgcagataatttttagcttagggcctggtggctaggtcggttctctcctttccagtcggagacctctgccgcaaacatgctccgccagatcatcggtcaggccaagaagcatccgagcttgggacagaaataacccagagccctggaacaaactgggtcccaatgatcaatacaagttctactcagtgaatgtggattacagcaagctgaagaaggaacgtccagatttctaaatgaaatgtttcactataacgctgctttagaatgaaggtcttccagaagccacatccgcacaattttccacttaaccaggaaatatttctcctctaaatgcatgaaatcatgttggagatctctattgtaatctctattggagattacaatgattaaatcaataaataactgaaacttgatatgtgtcacttttttatgctgaaagtatgctctgaactttagagtataggaaattaactattagaatttaaagaatttcttgaatttctgtagtttgaaaatacgactttaagctgctttagtaaaacacttccattttgtgtatagactgttggtaacttcactagagcatacataacaactggaactggaaattatacaaaagtaaattgggaaggatactccagcatctgacactggcaaaatggaaacctttgagtttctcttactggctgttgaagtgtgtgcagtttttaacaatggtttttacttggcatctctttgttgtgattttcaaggttataagttgctttggtcctaggattgaagttgaaatctgagtttatcagtgctaaccatggtgctagtagtcaagagatcttgagaattttggctgctgagtcttggtgcagggtgcaggttttcttttcttttttcttttttttttttttgagatagtctctgtcacccaggctggagtgcagtggtacaaacatggatcactgcagcctctacctcccgggcttaagtgatcctcctgcctcagcccctaagtagccgggactacaggtatgtgccaccatgcccagttaatttttgtaattttttttagagacagggttttgccatgttgcccaggctggtctcaaactcttgagctcaagcgatccattctcctcagcctcccagggtgctgggattacaggcgtgagccattgcgcttagccatggtgcaggttttcaaaggccaggaagtatattcataattttaagatggggaatatagcaagttttcacataggtgtgtgtaagtcatcacatcatagaaacttgaggaattcagtgacattaattttggattttcatacgtaagtatacaattaaatgtttacagggtagtagaagcacattttaaatgtcaggaactgaactaagtatttgaattacgtggattatctcaaaaattttgaaattgttaaacgagttgaattacttgaattcattctgttagtcaaatggtggatatttacacccatgtagttttgaatttagagtgtgtagagtgttttcagttaccagactccatgcttttacctcctatgtgtcaggtataatttgaacctctaagaacagggtttctcaaccttgccactgttgactatttctgaaagacagtttggtttagcagaccatcccatgcgctttagcttgtttagtagctaacttgggctctgccactacagacaaaaagcactctttccctccaattcccacaggctatgagaagaatggagacattaccaaatgtccattggtgggcaaaattgcttcattcctacctctgttgagaattactctagatcctttggcacaaattacctcaaagtttaaaattgtgtaaacaaacagtgtgtcatgtaattgaaaaacattaagcaactccaaataaatgctacattaagaa

SEQ ID NO: 3581 - protein, 64 aa, Homo sapiens
MCHHAQLIFVIFFRDRVLPCCPGWSQTLELKRSILLSLPGCWDYRREPLRLAMVQVFKGQEVYS

SEQ ID NO: 3582 - DNA, 2130 bp, Homo sapiens
agatctaagcaggcactattaaagacagtcgcatccgggccctcctgccgcaagctgccctcccagccaagggtccttcaggtaggaggtcctgggtgactttggaagtccgtagtgtctcattgcagataatttttagcttagggcctggtggctaggtcggttctctcctttccagtcggagacctctgccgcaaacatgctccgccagatcatcggtcaggccaagaagcatccgagcttgatccccctctttgtatttattggaactggagctactggagcaacactgtatctcttgcgtctggcattgttcaatccagatgtttgttgggacagaaataacccagagccctggaacaaactgggtcccaatgatcaatacaagttctactcagtgaatgtggattacagcaagctgaagaaggaacgtccagatttctaaatgaaatgtttcactataacgctgctttagaatgaaggtcttccagaagccacatccgcacaattttccacttaaccaggaaatatttctcctctaaatgcatgaaatcatgttggagatctctattgtaatctctattggagattacaatgattaaatcaataaataactgaaacttgatatgtgtcacttttttatgctgaaagtatgctctgaactttagagtataggaaattaactattagaatttaaagaatttcttgaatttctgtagtttgaaaatacgactttaagctgctttagtaaaacacttccattttgtgtatagactgttggtaacttcactagagcatacataacaactggaactggaaattatacaaaagtaaattgggaaggatactccagcatctgacactggcaaaatggaaacctttgagtttctcttactggctgttgaagtgtgtgcagtttttaacaatggtttttacttggcatctctttgttgtgattttcaaggttataagttgctttggtcctaggattgaagttgaaatctgagtttatcagtgctaaccatggtgctagtagtcaagagatcttgagaattttggctgctgagtcttggtgcagggtgcaggttttcttttcttttttcttttttttttttttgagatagtctctgtcacccaggctggagtgcagtggtacaaacatggatcactgcagcctctacctcccgggcttaagtgatcctcctgcctcagcccctaagtagccgggactacaggtatgtgccaccatgcccagttaatttttgtaattttttttagagacagggttttgccatgttgcccaggctggtctcaaactcttgagctcaagcgatccattctcctcagcctcccagggtgctgggattacaggcgtgagccattgcgcttagccatggtgcaggttttcaaaggccaggaagtatattcataattttaagatggggaatatagcaagttttcacataggtgtgtgtaagtcatcacatcatagaaacttgaggaattcagtgacattaattttggattttcatacgtaagtatacaattaaatgtttacagggtagtagaagcacattttaaatgtcaggaactgaactaagtatttgaattacgtggattatctcaaaaattttgaaattgttaaacgagttgaattacttgaattcattctgttagtcaaatggtggatatttacacccatgtagttttgaatttagagtgtgtagagtgttttcagttaccagactccatgcttttacctcctatgtgtcaggtataatttgaacctctaagaacagggtttctcaaccttgccactgttgactatttctgaaagacagtttggtttagcagaccatcccatgcgctttagcttgtttagtagctaacttgggctctgccactacagacaaaaagcactctttccctccaattcccacaggctatgagaagaatggagacattaccaaatgtccattggtgggcaaaattgcttcattcctacctctgttgagaattactctagatcctttggcacaaattacctcaaagtttaaaattgtgtaaacaaacagtgtgtcatgtaattgaaaaacattaagcaactccaaataaatgctacattaagaa

SEQ ID NO: 3583 - protein, 81 aa, Homo sapiens; identical to SEQ ID NO: 399

SEQ ID NO: 3584 - DNA, 447 bp, Homo sapiens
gtcctgggtgactttggaagtccgtagtgtctcattgcagataatttttagcttagggcctggtggctaggtcggttctctcctttccagtcggagacctctgccgcaaacatgctccgccagatcatcggtcaggccaagaagcatccgagcttgggacagaaataacccagagccctggaacaaactgggtcccaatgatcaatacaagttctactcagtgaatgtggattacagcaagctgaagaaggaacgtccagatttctaaatgaaatgtttcactataacgctgctttagaatgaaggtcttccagaagccacatccgcacaattttccacttaaccaggaaatatttctcctctaaatgcatgaaatcatgttggagatctctattgtaatctctattggagattacaatgattaaatcaataaataactgaaacttg

SEQ ID NO: 3585 - protein, 65 aa, Homo sapiens
VGSLLSSRRPLPQTCSARSSVRPRSIRAWDRNNPEPWNKLGPNDQYKFYSVNVDYSKLKKERPDF

SEQ ID NO: 3586 - DNA, 624 bp, Homo sapiens
agatctaagcaggcactattaaagacagtcgcatccgggccctcctgccgcaagctgccctcccagccaagggtccttcaggtaggaggtcctgggtgactttggaagtccgtagtgtctcattgcagataatttttagcttagggcctggtggctaggtcggttctctcctttccagtcggagacctctgccgcaaacatgctccgccagatcatcggtcaggccaagaagcatccgagcttgatccccctctttgtatttattggaactggagctactggagcaacactgtatctcttgcgtctggcattgttcaatccagatgtttgttgggacagaaataacccagagccctggaacaaactgggtcccaatgatcaatacaagttctactcagtgaatgtggattacagcaagctgaagaaggaacgtccagatttctaaatgaaatgtttcactataacgctgctttagaatgaaggtcttccagaagccacatccgcacaattttccacttaaccaggaaatatttctcctctaaatgcatgaaatcatgttggagatctctattgtaatctctattggagattacaatgattaaatcaataaataactgaaacttg

SEQ ID NO: 3587 - protein, 81 aa, Homo sapiens; identical to SEQ ID NO: 399

SEQ ID NO: 3588 - DNA, 599 bp, Homo sapiens
gtcctgggtgactttggaagtccgtagtgtctcattgcagataatttttagcttagggcctggtggctaggtcggttctctcctttccagtcggagacctctgccgcaaacatgctccgccagatcatcggtcaggccaagaagcatccgagcgtaagttcgtgaccgctctcctaatgttttcccttgtccttcttgcgtcggggtgcgccttttggtaaataagaggggtccgtgatcttggaatcctcactttgtctggacgtcgttgcttttgggaaaatttcgaagtgtggaaattgcagttaagttctttggcatctcatttttcctcagcacatcaatgtgctgtagagctaaaagtctatgcaatctttaatctgtcttaaatccggttccctaaatacgcagcaagcattggtagcattacgttttcagagataatgcttaaagccagtatttgtaatagatacgtttacttattcagattctatttttcatacatctttatagaggcacccttaaataatttgcaaagaatttgtttttcaagccccaggataaaggaagccagaaaatttaatgggaatgacatgtaa

SEQ ID NO: 3589 - protein, 51 aa, Homo sapiens
MLKASICNRYVYLFRFYFSYIFIEAPLNNLQRICFSSPRIKEARKFNGNDM

SEQ ID NO: 3590 - DNA, 1656 bp, Homo sapiens
acttccttttcagagctgtatccgggtcgctgctttccctattgtctgaggcagccgccctcgcgctgtgcaatttctggtctttcgttgcttctggtccaggctaataaagtttttctttctttaattttttttcttctagttttaacgggagaaattaactccccggggccgccgggttgactgcgctgcctgggccggaggtcttctccggccagggagcgctgtgggaaggggctcgagcggccagggccaggcgaggccgggggggcggggggttaggggaccgcggggctactcttgggagcgcccctgtccggctggctgcgcgccggttttaaatagcatctttcggacttgtcttcgcggccccagtccccgacctcggcgctgcctgggctcctgcagcctctccctaagtcttctccaaacgaccacctcacggattccttatggatcgcagctccaagaggaggcaggtgaagcctttggcagcttctctgctggaagctcttgattatgatagttcagatgacagtgattttaaagttggagatgcctcagattctgaagggagtggtaatggaagtgaagatgcttcaaaggacagtggagaaggttcctgtagtgattctgaagaaaatattttagaagaagaactgaatgaagatattaaagtaaaagaagaacaacttaaaaattctgcagaggaagaagtactatcatcagaaaaacaattaattaaaatggaaaagaaggaagaagaagaaaatggagaaagacctagaaagaaaaaggagaaagagaaggaaaaagaaaaggaaaaggagaaagagaaggaaagagagaaggaaaaagaaaaagcaacagtatctgagaatgtggctgcttctgctgctgccaccacaccagccacaagtcctcctgctgttaacacatccccttctgttcccactacgacaaccgctacagaggaacaagtcagcgagccaaaaaaatggaaccttcgacgaaaccgaccacttctggattttgtgtccatggaagagctgaatgacatggatgactatgacagtgaggatgacaatgattggcgacctactgtagtaaagagaaaagggagatctgcgtctcagaaagagggaagtgatggagacaatgaggatgatgaagatgagggaagcgggagtgatgaagacgagaatgatgaaggcaatgatgaagatcatagtagccctgccagtgaagggggttgcaagaagaagaagagtaaagttcttagcagaaacagtgctgatgatgaggaactgaccaatgatagcctgaccctatctcaaagcaagagtaatgaggtagatcaacccaatttttatatctgtctgtctggggaaaagggaattcttctctaaatcactctacacattgtattaagtggcttccttgaaatcctatttatagacggctgtgggatgaatgagcaccctaactgtaacattttttcatttggccaacagacttttattaaatatctactatttgtcaccgttctcaaggagctcacaatctctgtcctcaaggagaaatatttagagaaatatttttatatccatagacttgggaaatgacaaagttttccattctcctttttatcccttt

SEQ ID NO: 3591 - protein, 318 aa, Homo sapiens
MDRSSKRRQVKPLAASLLEALDYDSSDDSDFKVGDASDSEGSGNGSEDASKDSGEGSCSDSEENILEEELNEDIKVKEEQLKNSAEEEVLSSEKQLIKMEKKEEEENGERPRKKKEKEKEKEKEKEKEKEREKEKEKATVSENVAASAAATTPATSPPAVNTSPSVPTTTTATEEQVSEPKKWNLRRNRPLLDFVSMEELNDMDDYDSEDDNDWRPTVVKRKGRSASQKEGSDGDNEDDEDEGSGSDEDENDEGNDEDHSSPASEGGCKKKKSKVLSRNSADDEELTNDSLTLSQSKSNEVDQPNFYICLSGEKGILL

SEQ ID NO: 3592 - DNA, 5839 bp, Homo sapiens
acttccttttcagagctgtatccgggtcgctgctttccctattgtctgaggcagccgccctcgcgctgtgcaatttctggtctttcgttgcttctggtccaggctaataaagtttttctttctttaattttttttcttctagttttaacgggagaaattaactccccggggccgccgggttgactgcgctgcctgggccggaggtcttctccggccagggagcgctgtgggaaggggctcgagcggccagggccaggcgaggccgggggggcggggggttaggggaccgcggggctactcttgggagcgcccctgtccggctggctgcgcgccggttttaaatagcatctttcggacttgtcttcgcggccccagtccccgacctcggcgctgcctgggctcctgcagcctctccctaagtcttctccaaacgaccacctcacggattccttatggatcgcagctccaagaggaggcaggtgaagcctttggcagcttctctgctggaagctcttgattatgatagttcagatgacagtgattttaaagttggagatgcctcagattctgaagggagtggtaatggaagtgaagatgcttcaaaggacagtggagaaggttcctgtagtgattctgaagaaaatattttagaagaagaactgaatgaagatattaaagtaaaagaagaacaacttaaaaattctgcagaggaagaagtactatcatcagaaaaacaattaattaaaatggaaaagaaggaagaagaagaaaatggagaaagacctagaagcaacagtatctgagaatgtggctgcttctgctgctgccaccacaccagccacaagtcctcctgctgttaacacatccccttctgttcccactacgacaaccgctacagaggaacaagtcagcgagccaaaaaaatggaaccttcgacgaaaccgaccacttctggattttgtgtccatggaagagctgaatgacatggatgactatgacagtgaggatgacaatgattggcgacctactgtagtaaagagaaaagggagatctgcgtctcagaaagagggaagagtagccctgccagtgaagggggttgcaagaagaagaagagtaaagttcttagcagaaacagtgctgatgatgaggaactgaccaatgatagcctgaccctatctcaaagcaagagtaatgaggactcgctgattcttgagaagagtcaaaactggagctctcaaaaaatggaccatattctgatttgctgtgtttgtctgggagataatagtgaggacgctgatgaaataattcagtgtgacaattgtggcattacagtccatgaaggttgttatggagttgatggagagagtgactctattatgagttcagcttctgaaaactccactgaaccttggttttgtgatgcctgtaaatgtggtgtttctcctagctgtgaactgtgtcctaatcaggatggaattttcaaggagacagatgctggaagatgggttcatattgtttgtgccctgtatgttcctggagtagcctttggagatattgacaaattacgaccagtaacactaacggaaatgaactattccaaatatggtgccaaggagtgtagcttttgtgaagaccctcgctttgctagaactggggtttgcattagctgtgatgcagggatgtgcagagcctatttccatgtgacctgtgctcaaaaggaaggtctgctttcagaggcagcggcggaagaggatatagcagatccattctttgcttattgtaagcaacatgcagataggttagacagaaagtggaagagaaaaaactacttggctctacagtcctattgtaaaatgtctttgcaagagagagagaagcaactatcaccagaagcacaggcaaggatcaatgcccggcttcagcagtatcgtgccaaagcagaactagctcgatctaccagaccccaggcctgggttccaagggaaaaattgcccagaccactcaccagcagtgcttcagctattcgtaaacttatgcggaaagcagaactcatggggatcagtacagatatctttccagtggacaattcagatactagttctagtgtggatggaaggagaaaacataagcaaccagctctcactgcagattttgtgaattattattttgagagaaatatgcgcatgattcaaattcaggaaaatatggctgaacaaaagaatataaaagataaattagagaatgaacaagaaaagcttcatgtagaatataataagctatgtgaatctttagaagaactacaaaacctgaatggaaaacttcgaagtgaaggacaaggaatatgggctttactaggcagaatcacagggcagaagttgaatataccggcaattttgcgagcacccaaggagagaaaaccaagtaaaaaagaaggaggcacacaaaagacatctactcttcctgcagtactttatagttgtgggatttgtaagaagaaccatgatcagcatcttcttttattgtgtgatacctgtaaactacattaccatcttggatgtctggatcctcctcttacaaggatgccaagaaagaccaaaaacagttattggcagtgctcggaatgtgaccaggcagggagcagtgacatggaagcagatatggccatggaaaccctaccagatggaaccaaacgatcaaggaggcagattaaggaaccagtgaaatttgttccacaggatgtgccaccagaacccaagaagattccgataagaaacacgagaaccagaggacgaaaacgaagcttcgttcctgaggaagaaaaacatgaggaaagagttcctagagagagaagacaaagacagtctgtgttgcaaaagaagcccaaggctgaagatttaagaactgaatgtgcaacttgcaagggaactggagacaatgaaaatcttgtcagatacccttcatgagacccaactctgccacagctcatcctcggaggcaatcccggaaacctcttttataagtgtgattttaaaaatgtggattaaactctcgatagagtacataaagtaaaggagaacagctatattgtcctttctataagcttgtcactgcaaaaagttgccttttgcttgtcaggtttggatagaatataattgattggtttgttacttggactaacaaggcagtagatttgcctgtgtggaattttttttcctatttttcttctttttgctttttttgcacttatcagaaatatttgatgtgtgcattgttgaaaaatactggatacatgtcttgtcagaattgtcgtattaagtaatgtctttccctcttgcttctttggcaaatgttgatacacagtgtttggacttactgaagagttactgaagcctgtgggacttaataaatacaatatgctactccctgttgtgattgaacaatacaaataacaaacaagaaagacaatgcattccattagtctgctattctgtttccttcaacttcatacatagattcatatatgaagtactgcattgtaaaacaactatagactcatattaaatgttatttctatttataatattcagcaaaagtgaaagacttgtgaagcatatgacattctatttttgacttattagtcctagtgtgaaagcattaatattattagcatgaaatttttacttcagattttaagctcatgaataaagatatatctgtgttgatctctagatatttttagtaatacccaaatatattcagtccttattgttttaatataagctttctgtgttcagtataattttatttttctcaaccttaaatatgaacttaggaaataaggagggaagtacaaagattattgactatacaacctaccagctgaaagaaagatcttcatcaacatctgtatctttccagaggtatacagaattaaaatttgatcttcaagctttaatgatccagttttaagtcaacggcagaagtatgttgaatatttcatcactcaatcttgaactgatttagaagagactctttgctgaaattgaattgcacttatacatgtaaattgtcaacatgtaatttggaattttctgattaataaatgtggttttggacatcttttcgggtatagtgacaatggaaaatagtttaaactttaggaatagagtaggtaatgttatagataatcaaaagcaattgtaattgtaaagctgctgtaatctagtgatctctagttacagtgaggaacgctatgattggatgagatgtttgataaaagtaaaatgtgtatgaaattacatataaacagattattagcttattgaaagatctcataacattggaggaaaaatattcataatctttagcaaaactagtagacttttgtttaaaagaataagataggactagttgtcactatattagcttaaggaaatgttggtaattattactgttgctgaactctggctgcttttaagcaaaatgacagattgccattttctaagtggaatatactaatccattagaccatggccctcttttaatatttagtgagaaattactcgcagttgctttattttaggttttttgagaaactcttaggccttgttttggtatcactgttaatcaaaatccttttcactttgattccaattataatactatattatcatcattttccatcttgcattttcagtggtggtggatattctattccacatttggtgctagtcctaagaatctttgtcacatgttatacatatagactgcaaaattcataagatataggtcctgcaaaaagtatagttgaagtaagaaaacttgaagtaactagaatagaatactttctcctaataatctcttaaatgctctcatatccacagtataaaattattccgtgtccataatcggtccaactactataaggagaaaattgatgtgtgcttaagaaaatatgtactaaatgattcatatttcacagacctacataagaaaaaaatggcacatcaggtaaatgatagttgtttatcacacagtagggaaaggaagaaacatgaaaatatcaggaaggagatgaaatgtctctgaaatacaggaagaatgacataatagcaagtagtggttctcaaacgttgtgcattggaatcacaggaaggatttgtaaaaacacaggtgactaccctattcctctcctggatctgccctctgcccactttactccctcccccttcaccctggagtttctgatttagtagaaaatttgcatttctaacaagttcccagctgatgctgatgctactggcctggaacaccacattaagaaccattcataggtagtattttttttaaaacatcgttgtgttgtgcttaacattgattgataaaggaatgtgcttttaacatctccttaaaaggtcccttagatttcctctagataaaagaattagtaatttcatctgcaacacatacaattttttttaattttataaaatttagttaaatgtttgttttacactgactatggaaacagcactattttagatacagaaagaaatcaataaacatagcctgtgttcacaattcactcatccttttgttataaaaagacttgaaattagggttatgttttaacatgaaaacaaaatttagccttagcttttatccatcttaactttagaaattatatttatgcattgtttatagatcattgtcattcgttgttgcttaagtgttcatctgattttatatttatgatgttaaaaatagactgctgaccaataaataataaaatatttacactccattctatttccctgtattcacatcctattaatgaaaa

SEQ ID NO: 3593 - protein, 573 aa, Homo sapiens
MDHILICCVCLGDNSEDADEIIQCDNCGITVHEGCYGVDGESDSIMSSASENSTEPWFCDACKCGVSPSCELCPNQDGIFKETDAGRWVHIVCALYVPGVAFGDIDKLRPVTLTEMNYSKYGAKECSFCEDPRFARTGVCISCDAGMCRAYFHVTCAQKEGLLSEAAAEEDIADPFFAYCKQHADRLDRKWKRKNYLALQSYCKMSLQEREKQLSPEAQARINARLQQYRAKAELARSTRPQAWVPREKLPRPLTSSASAIRKLMRKAELMGISTDIFPVDNSDTSSSVDGRRKHKQPALTADFVNYYFERNMRMIQIQENMAEQKNIKDKLENEQEKLHVEYNKLCESLEELQNLNGKLRSEGQGIWALLGRITGQKLNIPAILRAPKERKPSKKEGGTQKTSTLPAVLYSCGICKKNHDQHLLLLCDTCKLHYHLGCLDPPLTRMPRKTKNSYWQCSECDQAGSSDMEADMAMETLPDGTKRSRRQIKEPVKFVPQDVPPEPKKIPIRNTRTRGRKRSFVPEEEKHEERVPRERRQRQSVLQKKPKAEDLRTECATCKGTGDNENLVRYPS

SEQ ID NO: 3594 - DNA, 1248 bp, Homo sapiens
cagattctgaagggagtggtaatggaagtgaagatgcttcaaaggacagtggagaaggttcctgtagtgattctgaagaaaatattttagaagaagaactgaatgaagatattaaagtaaaagaagaacaacttaaaaattctgcagaggaagaagtactatcatcagaaaaacaattaattaaaatggaaaagaaggaagaagaagaaaatggagaaagacctagaaagaaaaaggagaaagagaaggaaaaagaaaaggaaaaggagaaagagaaggaaagagagaaggaaaaagaaaaagcaacagtatctgagaatgtggctgcttctgctgctgccaccacaccagccacaagtcctcctgctgttaacacatccccttctgttcccactacgacaaccgctacagaggaacaagtcagcgagccaaaaaaatggaaccttcgacgaaaccgaccacttctggattttgtgtccatggaagagctgaatgacatggatgactatgacagtgaggatgacaatgattggcgacctactgtagtaaagagaaaagggagatctgcgtctcagaaagagggaagtgatggagacaatgaggatgatgaagatgagggaagcgggagtgatgaagacgagaatgatgaaggcaatgatgaagatcatagtagccctgccagtgaagggggttgcaagaagaagaagagtaaagttcttagcagaaacagtgctgatgatgaggaactgaccaatgatagcctgaccctatctcaaagcaagagtaatgaggactcgctgattcttgagaagagtcaaaactggagctctcaaaaaatggaccatattctgatttgctgtgtttgtctgggagataatagtgaggacgctgatgaaataattcagtgtgacaattgtggcattacagtccatgaaggttgttatggagttgatggagagagtgactctattatgagttcagcttctgaaaactccactgaaccttggttttgtgatgcctgtaaatgtggtgtttctcctagctgtgaactgtgtcctaatcaggatggaattttcaaggagacagatgctggaaggttaatgtcctaattatgttggttcatatgtttgctttataatgtgtctgcctttgacttccctgttcttctgtttatgattacacactttcatttgattgcttctttgtatcttcttggcatagaataaatgaccagtgggatacagatgg

SEQ ID NO: 3595 - protein, 307 aa, Homo sapiens
MEKKEEEENGERPRKKKEKEKEKEKEKEKEKEREKEKEKATVSENVAASAAATTPATSPPAVNTSPSVPTTTTATEEQVSEPKKWNLRRNRPLLDFVSMEELNDMDDYDSEDDNDWRPTVVKRKGRSASQKEGSDGDNEDDEDEGSGSDEDENDEGNDEDHSSPASEGGCKKKKSKVLSRNSADDEELTNDSLTLSQSKSNEDSLILEKSQNWSSQKMDHILICCVCLGDNSEDADEIIQCDNCGITVHEGCYGVDGESDSIMSSASENSTEPWFCDACKCGVSPSCELCPNQDGIFKETDAGRLMS

SEQ ID NO: 3596 - DNA, 14041 bp, Homo sapiens
ccggcctcgcgttccctcggacggttgcccaatggcagcccaggtggcagcccgggaggcgcgagacttcagagaagccccgacccttcgcctaacctcgggggccggcctggaggcagtgggcgctgtggagctcgaggaggaggaggagaacgaggaggaggcggcggccaggagagcgcggagtttcgcccaagacgcgcgggtgcgcttcctcggcggccgcctggcgatgatgctggggttcacggaggagaaatggagccagtatttggaaagcgaggacaaccggcaggttcttggggagtttctggaaagcaccagcccggcttgccttgtgtttagcttcgccgcctcggggcgccttgcggcttcccaggagattccaagagatgcaaaccataaacttgtttttatttccaagaagattactgaaagcattggagtaaatgacttttctcaagtggttttatttggagagttacctgcgttgtctcttggacatgtatctgctttccttgatgagattttagtgccagttctttctaataagaacaaccataagtcctggtcctgttttacttcacaagatatggaatatcacatagaagtcatgaaaaagaagatgtatatttttaggggcaaaatgtctagaagaactcttctaccaattcccactgttgcaggaaagatggatctggatcagaattgttcagagaacaagccaccgtcaaacgaaaggataatacttcatgcaattgaatctgtggttattgaatggtcacatcaaatccaagaaattatagaaagagattcagtgcagcgtttgttgaatggtcttcacttgtctcctcaagcagaactagatttctggatgatgaggagagaaaatctgtcatgcatttatgatcaacttcaggcacctgttgtcctcaaaatggttaagatcctgacaactaaacaaagcagctattttcctactctgaaggacatttttctggctgtggaaaatgctcttctcgaagcccaagatgtggaactttacctgagacctctgaggagacacatccagtgtctccaggagacggaattcccacagacacgcatattaatcgctccattatttcataccatctgtctgatctggagtcattccaagttttataacaccccagctcgggttatagttttattgcaagagttttgtaatctcttcattaaccaggcaacagcttacctttcacctgaggaccttttgaggggagaaatagaagagtcactggaaaaggtgcaggtggctgttaacatcttaaagactttcaaaaactcctttttcaactatagaaaaaaattggcaagctactttatgggaagaaagctgagaccatgggatttccagtctcatctggtgttttgcagatttgacaagtttcttgatcgtttaataaaaatagaggatatatttgccaccactttggaatttgaaaagctggaaagactggaatttggtggtaccaaaggagcaattttaaatggacaagtccacgagatgagtgaagaacttatggaactctgtaaactttttaaacagagcacttatgacccatctgattgcactaacatggagtttgaaagtgattatgtggcatttaagtccaaaactctggaatttgacagaaggcttgggacaattatttgtgaagctttctttaactgcaatggcttagaagctgcatttaagcttttgaccatatttggaaattttctagagaagccagttgtcatggaaattttcagcctacattacagcacactagtgcatatgtttaatacagagctggatgtgtgtaagcaactgtataatgaacacatgaaacagattgaatgtggtcatgtagttcttaacaagaacatgccatttacctcaggaaatatgaaatgggcccagcaggttctccaacgacttcaaatgttttggtcaaacttcgcatctctccgttatctatttttgggcaatcctgatcacgctttagtttatcaaaagtatgttgaaatgaccactttgcttgatcaatttgaaagtcgtatctataatgaatggaaaagtaatgtggatgaaatctgtgaattcaatttgaatcaacccttggttaaattcagtgccataaatggtcttctctgtgtcaattttgacccaaagctagtggctgtattgagagaagtgaaatatcttttgatgttgaagaaacaagacataccagattcagctttagccatcttcaagaaaaggaacactattttaaagtacattggaaatcttgaccttcttgtgcaagggtataataaactcaaacagacgctcctggaagttgaataccctctgattgaagatgagctgagggctattgacgagcagctgacagcagccacaacgtggctgacatggcaggatgactgctggggctacatcgagagggtgagggcagccacgtccgagttggagcacagagttgagcgcacacagaaaaacgtgaaggtgatccagcagaccatgaggggctgggccaggtgcgtgctacctcccaggagagagcacagacgagaggcagccttcaccttggaggacaagggtgatttgtttacaaaaaaatacaagttaatccaaggagatggctgcaagatccacaacttggtcgaggaaaataggaagctcttcaaagccaatccctctctggatacctggaaaatttatgtagaattcattgacgacattgtggtggaaggcttttttcaggctataatgcacgacttagacttctttctgaagaatacagagaaacaattgaaaccggcaccgttttttcaagcacaaatgatcttgttgcctcctgagattgtgtttaaaccttccctagacagagaggctggggatggcttctatgatcttgtagaagaaatgttatgcaatagttttagaatgtctgcccagatgaaccgaatagcaacacacctggaaattaaaaattatcagaatgatatggataacatgttaggcctggcagaggtcaggcaggagatcatgaacagagtggtgaatgtcatcaacaaagtcttagatttcagaaacaccctggagacccacacttacctctgggtggatgatcgagctgagtttatgaagcattttctcttgtatggccatgctgtgtcttccgatgaaatggatgctcatgcaaatgaagaaattcccgaacaaccaccaactcttgagcaattcaaagaacagattgacatttatgaagctttgtatgttcaaatgagcaaatttgaggactttagagtgtttgatagttggttcaaggtggacatgaagcctttcaaagtgagcttgttaaccataattaagaaatggagctggatgtttcaggagcatcttttgagatttgtcattgacagtctgaatgagctacaagaatttataaaggagacagattccggacttcagagagaattaaatgaaggtgatcatgatggtttagttgacatcatggtgcatcttctggctgtaagaagccgacagagagctactgatgaactctttgaacctctaaaagaaacgatcaccctcttggaaagctatggccagaagatgcctgagcaggtctatattcagctagaggaattacctgaaagatgggaaactaccaaaaagatcgcagcaactgtcagacatgaagtctcacctctccataatgcggaagtcactcttataaggaaaaaatgtattttgtttgacgcaaagcaggcagagttcagagagagattcagacactatgcccctcttggatttaatgcagaaaatccatacacagcgcttgataaggcaaatgaagagcttgaggccttagaagaagaaatgttgcagatgcaagaatctactcgtctttttgaagtggctcttccagagtacaaacaaatgaaacagtgtcgcaaagaaataaaattgctcaagggactgtgggatgtcattatttatgttcgaagaagcattgataattggactaaaacccagtggagacagattcatgtggaacagatggatgtagaactcagaaggtttgccaaggcgagttccataactgaaatttggtcactcaacaaggaagtccgcgtctgggatgcttacacgggcctggaaggcacagttaaggacatgacagcctccctgagggccatcacagagttacagagccctgccctcagggacaggcattggcaccagctgatgaaagctattggggtcaagtttttaataaatgaagccacaactttggcagatttgttagcactgcggttacacagagtggaagatgatgtccgaaggattgtggacaaggcggtgaaagagctggggactgagaaggttattactgaaatcagtcagacctgggcaaccatgaagttttcttacgaagttcactatcgaacaggcattccattactaaagtctgatgaacaactttttgaaactctagagcacaaccaagttcagttgcagactcttcttcaaagcaagtatgtagaatatttcattgagcaagtgttaagctggcaaaataaattaaacatagcagacttggtcatcttcacttggatggaagtccagcgaacttggtctcacctggaaagcatttttgtctgttcagaagatattcgaatccagcttgtgaaagatgctagaagatttgatggggtggatgctgaatttaaggagttaatgttcaagacagccaaagtagaaaatgtgttagaagcaacgtgcagacctaatctctatgaaaaacttaaagatttacagtccaggctttctctttgtgaaaaagctctcgctgaatacctggaaaccaagcgcatagcctttcctcgcttctatttcgtctcttctgctgatttacttgacattctctcaaaaggagctcagcctaaacaggtaacatgtcaccttgccaaacttttcgacagcattgcagatctgcagtttgaagacaatcaggatgtttctgcacacagggcagttggaatgtacagcaaagaaaaggagtatgtcccattccaagccgagtgtgaatgtgtgggccatgtggaaacatggcttctgcaacttgaacagactatgcaagaaacggtgcgtcattctataacagaagccatagtggcctacgaggaaaaacctagggaactgtggatttttgatttcccagctcaggttgcactaaccagctcacaaatatggtggaccacagatgtaggaatagccttcagtagactggaagaaggctacgaaacagccctgaaggatttccataaaaaacagatttctcagctgaatacactgattacacttttgctgggagaacttccacctggagacagacagaagatcatgacaatttgtaccatagatgtccatgccagagacgtggtggcaaaacttatttctcagaaggcaagttgttgtcagtccccaagcttttacatggctgtctcaacttcgtcaccgatgggaggatacccagaaacactgctttgttaatatttgtgatgcccagttccagtacttctatgaatacttaggaaacagccctcgactagtgatcactcctctaactgacaggtgttatattaccttaactcaatcacttcatctaaccatgagtggggctcctgctggcccagctggtaccgggaaaacagagaccaccaaagacctaggacgtgcccttggcatgatggtctatgtattcaactgttcagagcaaatggactacaaatccataggcaatatctataagggattggtgcagacaggagcttggggctgctttgatgagttcaaccgaatctctgtggaagttctgtcagtggtggcagtacaagtgaaaatgattcatgatgccatcagaaacaggaagaagagatttgtatttcttggggaagctatcacactgaagccatcagttggaatatttattactatgaacccgggttatgctggtcgaaccgaattaccggaaaatctcaaagctcttttcagaccctgtgccatggtggcccctgacattgagctaatctgtgaaatcttgttagttgctgaaggttttgtggatgcgcgtgcattagcccgaaagttcattacgttgtacacgctttgcaaggagcttctctccaagcaggatcattacgactggggacttcgtgctattaagtctgtcttggttgtggctggatctctgaaacgaggagataaaaatagacccgaagatcaggtactcatgagagcattaagggatttcaatatgcccaaaatagtgactgacgacatcccagtgtttctgggcctggtcggtgacctgtttccagccctggatgtgccccggaggaggaagctgcactttgaacagatggtcaggcagtctaccctggagctccgcctgcagcctgaagagagcttcatcctcaaagttgtccagcttgaggaactgttggctgtgcggcactcggtctttgtagttggaaatgcaggcacaggaaagagtaagattttgagaacactgaaccgaacatatgttaacatgaaacagaagccggtttggaatgacttaaaccctaaagctgtgacaacagatgaactctttggtttcatacatcatgctacccgagaatggaaagatggcaagattgtttactcttattttataggtctcttctcatccattctacgagaacaagcaaatcttaagcatgatggaccaaaatggatagtcctggatggcgatattgaccccatgtggattgaatcactgaatactgtaatggatgataacaaggtgctgaccctcgccagcaatgagcgcattgcactcactcccttcatgaggcttctgtttgagatacatcacttaaggagcgcaaccccggccactgtttccagagctggtattctgtatgtgaacccacaagatctgggctggaatccgtatgtggccagttggatagacagaaggcggcatcaatcagaaaaggccaatttgactattctttttgataaatatgtccctgcatgcttggataaactgagaacaagctttaaaaccatcacttcaattcctgagagtagcctggtgcagactctatgtgttcttttggagtgcttgctgactcctgaaaatgtaccttctgacagcccaaaagaagtttatgaagtctattttgtatttgcttgtatctgggcttttggaggcaccctgctacaagatcagatttctgattatcaagctgacttcagtcggtggtggcagaaagagatgaaagcagtgaaatttccgtcgcagggaacaatctttgattattatgtggaccacaaaactaagaaattattgccctgggctgacaaaattgcccagtttactatggatccagatgtgcctctgcagacagttctcgttcacacaacagagacagctcgtcttagatatttcatggagttgttgcttgagaaaggaaaacctctaatgctagtaggaaatgcaggagtgggaaaaacagtctttgtaggtgacacattggcaagtctctctgaggattacatagtatcccgtgtgcctttcaactactacacgacatccacagctctgcaaaaaattcttgagaaacccctagagaaaaaagctggtcataactatggtcctggaggaaataaaaaattgatttattttatcgacgacatgaacatgcctgaagtggacttatatggcaccgttcagcctcacaccctgatccggcagcatattgattatggacattggtatgatagacagaaggtgatgcttaaagaaatccataactgccagtatgtcgcctgcatgaatccgatggtgggcagcttcaccatcaatcccaggctacagagacatttcacagtgtttgcattcaattttccatctttggatgcactaaacaccatctatggccaaatctttagcttccatttccaacagcaagcatttgctccatcaattctcaggagtggccccactttgatccaggcaacaatagcattccatcagacaatgatgtgtaactttttacccacggctattaaattccactacatctttaatctgagagatttatcaaacgtcttccaggggattttatttgcttctcctgagtgtttaaaaggtccacttgatttaatacatctgtggcttcatgaatctgcccgtgtttatggagacaaactgatagacaaaaaagattgtgatttgtttcagagaagaatgctggaaactgcttataaatattttgaaggtatagatagtcacatgctgcttcaacagcccctcatttattgccactttgctgatagagggaaggacccacattacatgccagtgaaggactgggaagtgctgaagacgattcttacagaaacgttagacaactacaatgaactaaatgctgccatgcacctagttttgtttgaagatgccatgcaacatgtgtgtcgcatcagccggatcttacgaacccctcagggctgtgctctcttggttggagttgggggcagtggcaagcagagcttgtccaggctggcagcttaccttcgtggccttgaggtctttcagatcactctgaccgagggctatggaatccaggaacttcgggtagatcttgccaatttgtacatccgaactggagccaagaacatgcccactgtgttcctgctgacagatgcccaggttctagatgagagcttcctcgtgctgattaatgacttgctggcatcaggagaaatcccagatctgttcagcgatgaagatgtggacaagataatttctggaattcataatgaagttcatgctctgggcatggtagactccagggaaaactgttggaaattctttatggccagggtgcgactacagctcaaaatcattttgtgtttctctccagttggtcgcacgctgagagttagagctcggaagttcccagccatagttaactgcacggctattgactggtttcatgcgtggccgcaggaggctctggtctccgtcagcaggaggttcattgaggaaaccaagggaattgagccagtgcacaaagactctattagccttttcatggcacatgttcacaccactgtaaatgaaatgagtaccagatattaccagaatgagagaagacacaactataccaccccaaagagttttctagaacaaatatcactgtttaagaacctgttgaagaagaagcaaaatgaggtatccgagaaaaaagaacgcctggtgaacggcatccaaaagctaaaaaccacagcctctcaggtgggagatctaaaagccagacttgcctctcaagaagccgagctgcaactgagaaatcatgatgccgaagctctgatcacaaagatcggccttcagacggagaaagtgagccgggaaaagaccatcgctgatgctgaggagcgaaaggtgacagccattcagactgaagtgttccagaaacagagagaatgtgaagctgacttactcaaggctgagcctgcactggtggctgctacagctgcactcaatacactcaacagggtcaacctcagtgagctgaaagcctttcccaaccctcccatcgcagttaccaatgttactgcagccgtgatggtccttctggctcctcggggaagagtgcccaaagaccgaagttggaaagcagctaaagtcttcatgggaaaggttgatgattttttgcaagcattaattaactatgacaaagagcacattccagagaactgtctaaaagtggtgaatgaacactatttgaaagacccagagtttaatccaaacctgattcgaaccaaatcttttgcagcagctggcctgtgtgcctgggtcatcaacatcattaaattctatgaggtctactgtgatgtggagccaaaacgccaagcattagcccaagcaaacttagaactggctgcagctactgaaaaactagaggctatcaggaaaaagcttgtggatctggatcgaaatctgagcagactcacggcttcatttgaaaaagcaacagctgagaaagtccggtgtcaagaagaggtgaaccaaaccaacaaaaccatcaaattagctaacagacttgtcaaggaacttgaggcaaagaagattcgctggggtcaatccattaagtcctttgaagctcaagagaagacactctgtggagatgttcttctcacggcggcatttgtgtcttacgtcggacccttcacaaggcagtatcgccaggagctggtgcactgcaagtgggttccctttcttcaacagaaggtttccattccactaaccgaaggcctggacttgatatccatgttgacggatgatgctacaattgccgcctggaataacgaaggactgcccagtgacagaatgtccaccgaaaatgccgctatcctaacacactgtgagcgctggcctctggtgatagatccccagcaacagggaattaagtggatcaagaataagtatggaatggacctgaaagtcacacatttgggccagaaagggtttttgaatgccattgaaactgctttggcctttggtgatgtcatcttaattgaaaatctcgaggaaacgatagatccagtcctggatccactacttggcaggaacacaattaaaaaaggaaagtatatcaggattggagataaagaatgtgaatttaacaagaactttcgccttatccttcacacaaaattggcaaatcctcactataagccggaattacaagctcagacaactctcctcaatttcacagtcacagaagatggtctagaagcccagctgctggcagaggttgtcagtattgaaaggccagatttggagaaacttaagttggtattgacaaagcaccaaaatgattttaaaattgagctcaagtatctggaagacgatctccttttgcgcctttctgcggcagagggaagctttctggatgacaccaaactggtagagagattggaggcaacaaagaccaccgtggcagagatagagcacaaggtgattgaagccaaagaaaatgaaagaaaaatcaacgaggcccgagaatgttacagaccagtggcagcaagagcatctcttctttattttgttattaatgacctccaaaaaatcaaccccctctaccaattctctttgaaggcttttaacgtgctgttccacagagcgatcgagcaggctgacaaggtggaagacatgcagggacgcatctctatcctgatggagagcatcacccatgctgtcttcctctacaccagccaggcgctgtttgagaaggacaagctcaccttcctgtcccagatggcttttcagattttgttgagaaagaaagagatagaccctcttgaattggatttcctgcttcgattcacagttgaacacactcatctgagtcccgttgacttcctaacttctcagtcatggagtgctatcaaggcaattgccgtcatggaagaatttcgaggcatagaccgagatgtggaaggatctgccaagcagtggaggaagtgggtagaatccgagtgtccagaaaaagaaaaattacctcaagaatggaagaagaaaagtttaatacagaagctgattcttctgagagcaatgcgccctgacagaatgacgtatgctctcagaaattttgtagaggaaaaactgggtgcgaagtatgtggagaggaccagattggacttagttaaagcattcgaagaaagcagcccagccacccccatattcttcatcctgtctccgggggtagatgcccttaaagacctggagattcttggcaaaagacttggctttacaattgactctggaaaattccacaatgtgtctttaggacaaggtcaggagacggtggcagaagtggccctggagaaagcttccaaaggaggacactgggtcatcctccaaaatgttcatttggtagccaagtggctaggaaccttggagaagctccttgaaagattcagccaaggaagccacagagattacagggttttcatgagtgctgagtctgcacctacaccagatgagcatatcatccctcaaggactcctggaaaattccattaagatcactaatgaacccccaacagggatgctggccaatttgcatgccgccctgtacaactttgatcaggatacacttgaaatatgctccaaggagcaggagtttaaaagcatccttttttctctctgctacttccacgcctgtgttgctgggagactgaggtttggcccccagggctggagccgaagctatccttttaatcctggagacctcaccatttgtgccagtgtcctctacaactacttagaggcaaactctaaagtcccatgggaagatctccgttatctctttggtgagatcatgtatggaggccacatcacagatgactgggatcgcaaactgtgtcgggtgtatttagaagaattcatgaatccatctctgactgaagatgaactgatgctggcaccaggttttgctgccccaccctacctagattatgcaggctaccaccagtacatagaggagatgcttcctccagaaagcccggcactgtatggcctccacccaaatgctgaaatagaattcctgacagtgacatccaacactctcttcagaactttgctggagatgcagcccaggaatgcactcagtggtgatgaactggggcagtctacagaagaaaaggttaagaatgtcttggatgacattttggagaaacttccagaagagttcaacatggcagagataatgcaaaaaaattcaaatagaagcccatatgttcttgtttgcttccaagaatgtgagaggatgaatattctcattcgggaaatacgtatatcacttgaacaactggaccttagtttgaagggggaattggcattatctcctgctgtggaagcccagcagtttgcattgagttatgacacggtaccagacacttggagcaaactggcttatccttctacttatggcctagcccagtggttcaatgacctcctcctgcgatgccgagaactcgatacttggacacaagaccttacccttccggctgtcgtgtggctctccggcttcttcaaccctcagtccttcttaactgcaatcatgcagacgatggctcgaaaaaatgagtggcccctggataaaacgcgcttgactgctgatgttaccaaaaaaacaaaggaagattatggacacccgccaagggaaggtgcatacctccacggactcttcatggagggcgcccgctgggacacccaagcaggaaccattgttgaagcccgtctcaaggagctggcatgccctatgccggtcatctttgcaaaagccacccccgtggacagacaagaaaccaaacagacctacgagtgccctgtgtatagaaccaaactgagaggccccagctacatctggaccttcaggctgaagagcgaagagaagactgcaaaatgggttctggctggagtggctctgcttctagaagcgtaaggtaacactggcattcctctagcctctgctggagtgcagtgaggattttctagcatgttgctgcactgttcccatgcacattattctaactttttagtaactcacacgtgcattcttttttcaacgctatccttagagtgaaagtcagaaaaaaatactagaaactaactcagggtacatcataaaagtacatcatatgtgaacatgcaaaagcaatgcagccggaaagaacggagattttaatttttaacaaacaacaaattaaattattagcccttaaactctttcaaaatataaaagcagcaggccccaggtgagtcctgaaggaagaggctagcactctgtaaggcctccagtgtccagtgtctacaatgttgatggtccccttttgttcagtcaagttttaataaaaataaaactgttctacagttaattgc

SEQ ID NO: 3597 - protein, 2713 aa, Homo sapiens
MSMPETWWQNLFLRRQVVVSPQAFTWLSQLRHRWEDTQKHCFVNICDAQFQYFYEYLGNSPRLVITPLTDRCYITLTQSLHLTMSGAPAGPAGTGKTETTKDLGRALGMMVYVFNCSEQMDYKSIGNIYKGLVQTGAWGCFDEFNRISVEVLSVVAVQVKMIHDAIRNRKKRFVFLGEAITLKPSVGIFITMNPGYAGRTELPENLKALFRPCAMVAPDIELICEILLVAEGFVDARALARKFITLYTLCKELLSKQDHYDWGLRAIKSVLVVAGSLKRGDKNRPEDQVLMRALRDFNMPKIVTDDIPVFLGLVGDLFPALDVPRRRKLHFEQMVRQSTLELRLQPEESFILKVVQLEELLAVRHSVFVVGNAGTGKSKILRTLNRTYVNMKQKPVWNDLNPKAVTTDELFGFIHHATREWKDGKIVYSYFIGLFSSILREQANLKHDGPKWIVLDGDIDPMWIESLNTVMDDNKVLTLASNERIALTPFMRLLFEIHHLRSATPATVSRAGILYVNPQDLGWNPYVASWIDRRRHQSEKANLTILFDKYVPACLDKLRTSFKTITSIPESSLVQTLCVLLECLLTPENVPSDSPKEVYEVYFVFACIWAFGGTLLQDQISDYQADFSRWWQKEMKAVKFPSQGTIFDYYVDHKTKKLLPWADKIAQFTMDPDVPLQTVLVHTTETARLRYFMELLLEKGKPLMLVGNAGVGKTVFVGDTLASLSEDYIVSRVPFNYYTTSTALQKILEKPLEKKAGHNYGPGGNKKLIYFIDDMNMPEVDLYGTVQPHTLIRQHIDYGHWYDRQKVMLKEIHNCQYVACMNPMVGSFTINPRLQRHFTVFAFNFPSLDALNTIYGQIFSFHFQQQAFAPSILRSGPTLIQATIAFHQTMMCNFLPTAIKFHYIFNLRDLSNVFQGILFASPECLKGPLDLIHLWLHESARVYGDKLIDKKDCDLFQRRMLETAYKYFEGIDSHMLLQQPLIYCHFADRGKDPHYMPVKDWEVLKTILTETLDNYNELNAAMHLVLFEDAMQHVCRISRILRTPQGCALLVGVGGSGKQSLSRLAAYLRGLEVFQITLTEGYGIQELRVDLANLYIRTGAKNMPTVFLLTDAQVLDESFLVLINDLLASGEIPDLFSDEDVDKIISGIHNEVHALGMVDSRENCWKFFMARVRLQLKIILCFSPVGRTLRVRARKFPAIVNCTAIDWFHAWPQEALVSVSRRFIEETKGIEPVHKDSISLFMAHVHTTVNEMSTRYYQNERRHNYTTPKSFLEQISLFKNLLKKKQNEVSEKKERLVNGIQKLKTTASQVGDLKARLASQEAELQLRNHDAEALITKIGLQTEKVSREKTIADAEERKVTAIQTEVFQKQRECEADLLKAEPALVAATAALNTLNRVNLSELKAFPNPPIAVTNVTAAVMVLLAPRGRVPKDRSWKAAKVFMGKVDDFLQALINYDKEHIPENCLKVVNEHYLKDPEFNPNLIRTKSFAAAGLCAWVINIIKFYEVYCDVEPKRQALAQANLELAAATEKLEAIRKKLVDLDRNLSRLTASFEKATAEKVRCQEEVNQTNKTIKLANRLVKELEAKKIRWGQSIKSFEAQEKTLCGDVLLTAAFVSYVGPFTRQYRQELVHCKWVPFLQQKVSIPLTEGLDLISMLTDDATIAAWNNEGLPSDRMSTENAAILTHCERWPLVIDPQQQGIKWIKNKYGMDLKVTHLGQKGFLNAIETALAFGDVILIENLEETIDPVLDPLLGRNTIKKGKYIRIGDKECEFNKNFRLILHTKLANPHYKPELQAQTTLLNFTVTEDGLEAQLLAEVVSIERPDLEKLKLVLTKHQNDFKIELKYLEDDLLLRLSAAEGSFLDDTKLVERLEATKTTVAEIEHKVIEAKENERKINEARECYRPVAARASLLYFVINDLQKINPLYQFSLKAFNVLFHRAIEQADKVEDMQGRISILMESITHAVFLYTSQALFEKDKLTFLSQMAFQILLRKKEIDPLELDFLLRFTVEHTHLSPVDFLTSQSWSAIKAIAVMEEFRGIDRDVEGSAKQWRKWVESECPEKEKLPQEWKKKSLIQKLILLRAMRPDRMTYALRNFVEEKLGAKYVERTRLDLVKAFEESSPATPIFFILSPGVDALKDLEILGKRLGFTIDSGKFHNVSLGQGQETVAEVALEKASKGGHWVILQNVHLVAKWLGTLEKLLERFSQGSHRDYRVFMSAESAPTPDEHIIPQGLLENSIKITNEPPTGMLANLHAALYNFDQDTLEICSKEQEFKSILFSLCYFHACVAGRLRFGPQGWSRSYPFNPGDLTICASVLYNYLEANSKVPWEDLRYLFGEIMYGGHITDDWDRKLCRVYLEEFMNPSLTEDELMLAPGFAAPPYLDYAGYHQYIEEMLPPESPALYGLHPNAEIEFLTVTSNTLFRTLLEMQPRNALSGDELGQSTEEKVKNVLDDILEKLPEEFNMAEIMQKNSNRSPYVLVCFQECERMNILIREIRISLEQLDLSLKGELALSPAVEAQQFALSYDTVPDTWSKLAYPSTYGLAQWFNDLLLRCRELDTWTQDLTLPAVVWLSGFFNPQSFLTAIMQTMARKNEWPLDKTRLTADVTKKTKEDYGHPPREGAYLHGLFMEGARWDTQAGTIVEARLKELACPMPVIFAKATPVDRQETKQTYECPVYRTKLRGPSYIWTFRLKSEEKTAKWVLAGVALLLEA

SEQ ID NO: 3598 - DNA, 709 bp, Homo sapiens
agctttctcaggactttccagattttagcactgaaagtatcacatccctgaaatccacttgctagaaacccctcagtccggagcaaatcagggcatttggtcctcttatgcagaggcgtggatggtgctaaggaatgttagagggtagggaggggcagagggtggcagcttccaagaagcagattctggatattcttagcaaaagccggaaagaaaatggctttcctgcaacccatatggctggctcaactcttcacttacaggagacatgagtgagtttgggtcaagtttttaataaatgaagccacaactttggcagatttgttagcactgcggttacacagagtggaagatgatgtccgaaggattgtggacaaggcggtgaaagagctggggactgagaaggttattactgaaatcagtcagacctgggcaaccatgaagttttcttacgaagttcactatcgaacaggcattccattactaaagtctgatgaacaactttttgaaactctagagcacaaccaagttcagttgcagactcttcttcaaagcaagtatgtagaatatttcattgagcaagtgttaagctggcaaaataaattaaacatagcagacttggtcatcttcacttggatggaagtccagcgaacttggtctcacctggaaagcatttttgtctgttcagaagatattcgaatccagcttg

SEQ ID NO: 3599 - protein, 89 aa, Homo sapiens
MKFSYEVHYRTGIPLLKSDEQLFETLEHNQVQLQTLLQSKYVEYFIEQVLSWQNKLNIADLVIFTWMEVQRTWSHLESIFVCSEDIRIQ

SEQ ID NO: 3600 - DNA, 2035 bp, Homo sapiens
agcagtaggatctcggtttccagcccagtgcaatttctgctctatcccgctgacctcattgttgaggtatgtccttatagcagtgtgagaaccgactaatacagttccttaggaagcccctgctgggtatggatggggagtgaagcaaggtgggcccagaagctgccgctggctgagagaccatgaagaaagtgtatagaatctccaccatcaccagaggaagagagcttggcaggaaagttacttccatgaatggatgagttgaagtgaacagcgtcttgggcaaaactgaagggtagttagtcgggtttgtctctggtgggctttcagctccactccctgcatcccattcccacatcgtgatggtcccctcataggcccagggctaccaccttggagcataggtggggatcctccagccagggtccttccttcacagggagtcagagccctctgctccggaattgccctgccccaggtcggccatctatcaaaagccccactatcccctaaagacccaccctcaagcagcagatgtgcagcaagggagccgcaaatgtcattcctgtgaccccgaagcagtctagtgtgttacctctctcagggctgctatgggctgaattgcttttccccaaaatttctatgctgcttccctaacccccagcgcctcagaatctaactctggataggacctgtgaataagtgattaagttaaaatggggtcctgtggatgggccctaacccaatctgactggtgtccttttaagaagaggaagagacaccagagatgtgcacactcagagacaagacacatgaggacacagagacaaggcggctacctgcaagccagggagaggggcctcggggaagccaaccctgcctacgccttgatcttggacttccagcctccagaactccagaatctgagtgaaatgggtataaatcatgagctaggatacagttcaattattcctatgatgaaaagagctttctccgcatgtgggactctcggcctcattatgagtggcatctttgacaatccagggcccattaaaaacaccttgaagaaagcattcaccatgctgtggagcttcacagtctataccaggctggaatccttgagggtggcattatcaaatgaggaaatggttcctttcatttttcatctgaagactcagacagcaaacatgttatctggccctataagcaccccgatgcttctgtgaaacccaagcaagttctgcatcaccacgacagccgcggatgtcaaatcatcaaaacagcagcagaggaaggggtttattcctcctccaaatcttcagctggttttatagggttaccagtttaaagtttctttgttttcagagcatcagacctcccatttgtagctgatagccatttttcaaaggtttctggctcacccaggaattcattagggtggacgagaaaagaacagtggatagaatagaccagcagggcaatctaagccccattccctgtctctttacattggttcttggtccccgtgactcatccaaactcccttatattcctatctggaatgcgaaagctggaaatacaagtgctctgtaatcacaggcagtggttttcttggagtctggtgtgatttctgtagcttgcagcaatatgtgggacacacttgcactgaagaatttaatgacttgttttactgctgtctgccatcaatatttatctatattaactgaagaaaggcattactcgaaatggcatttcacacctctgagcattatacagtaattctaaagtcatacgttgtaccaaattctctgggcaaacacagagatacagtatgaatggaaagaatccaagttgaagtttttaaaacttgaattgtctgcagtaatctggaaaaccaaagtcaaaatgactcgaattgctatggctgggaatgactggattaaaagcaatggaaacaatcgtttctcggcttggtttttcttgaattagcaggagcacatttcaagtatatttaatagaaaagaaaaactgggcc

SEQ ID NO: 3601 - protein, 169 aa, Homo sapiens; identical to SEQ ID NO: 405

SEQ ID NO: 3602 - DNA, 530 bp, Homo sapiens
tccttccctctgcacttctcgctgctgccacgtcgcaaaggaagtgttttcttctccttccgccatgattataaatttcctgaggcctccccagccctgcggaactaagaggaagagacaccagagatgtgcacactcagagacaagacacatgaggacacagagacaaggcggctacctgcaagccagggagaggggcctcggggaagccaaccctgcctacgccttgatcttggacttccagcctccagaactccagaatctgagtgaaatgggtataaatcatgagctaggatacagttcaattattcctatgatgaaaagattttggtgtttgtgggaattcttggaaccaattccctgtgggtaccgaggagcacctgtacatgtcacatgttgcgtattcattcatcggtgggtggacactgcagcagtctccatcccttgcctactgtgaataacgctggtatggacatgtgctatcctgcttttatatttacaaactcttcactaaattatcagattctcac

SEQ ID NO: 3603 - protein, 130 aa, Homo sapiens
MIINFLRPPQPCGTKRKRHQRCAHSETRHMRTQRQGGYLQARERGLGEANPAYALILDFQPPELQNLSEMGINHELGYSSIIPMMKRFWCLWEFLEPIPCGYRGAPVHVTCCVFIHRWVDTAAVSIPCLL

SEQ ID NO: 3604 - DNA, 3354 bp, Homo sapiens
ggtagtttatggtcaataataaaggaataataaatgccttagggaaactattttaaaggaacctatttgtgaattattttttaagcagttttttggtattattagtgtttccgtattctctaatttatctgttaaagtgtgtatattagattttcttaagaaggggcacacatctatcaacattctaaatcattttaggtcatataagtttaagaaataagtagtttattgtaaaaaaaattattttatccttgctagatgataagcttcttgaaggcaaatataatagcttaaggatcctggctttaaccttctatagcctcttacacatgaaaggtatccccaggctctgtggagagagagagtgtccccgagagaaggcttcctgaggtagtttcattttctaggttttcatcatgagtgattgtttctgtgttctgtgcccaataataaacaggctttgtgttataccttaatttaaatcgttgcctaacagcattttaaagtgtccagaaacaaaaagatgaaaatgtttacatttgcagctcaagctcttttaactttataaatagaaataacatttctaagaagttgcatacaaacgacattgtacttacaccagtctaaaggttaatattgcatattgttttcaattaggaatacaatagatatggctggtgggtaggagaaatgaagggagccattggcttggtgcctaaagcctacataatggagatgtatgatatttgagagtcctggaaaaggaaaattcttctgcttgtctgcaaatgctttggatttagaagcgtcatgaaagcacgagtgacagctcctaacctctccttgttttattaaacattacttatctttgactgttattttatgcagtcgctcattaaaatattcctctgatgtgaaattaaatgaaggatattaatgtaaattagatgcaaccagttaagttatacctgttgctattttgcaaagaaataattatagtttttatttacccatttgatttgtgtgaagaattcatcactattttatacgtaacatatagtctactatagcatagtatgctactattgctacttctggtgtgatttgtaatgtttcttaatcattggacatcaattatttttagagagtaatgtataatttcatagcattttaaatttagtgtatcatgcgagttttttttggtagatgctgaagaatgtggttgctaaacaaagaatgctaaagaatgttcaaactttatagataactttattgttattatttattttcacacatttaattcctattaagtacagccgcaagaaagaaaaaatgatgaagttgcaaatggcagtgtgctgtcacctgcaacagaagtgcgtaccagaagtatgactcatgcaaagcattttaccgtacaaatatcctggtgcgatgatgggcctggcaacattttctactgtacttttgtttaaatttaatgaaacaaaaaattcctaagaaataccaccctaccactaacaaaatggtataaagaatctcccagccaggccaacatggtgaaaccctgtctctactaaaaattagccaagtgtggtaatgttcacctgcagtcccagctacttgggaggccaaggcacgagaattgcttgaacaaggtaggcagaggttgcagtgagccaagatcgcgccactgcactccagcctgggcgacagagtgagactccatctcagaaaaaaaaaaaaaaaaaaacagaatctcagtgtattctcaaagtaaaaaggcataaccaagcactctcttatcttgccttattgctatactatttacatcccactgcagaacagcagatttgaggcttttctatatacttctcagagcactgaaaagaaaggaagggtttgcagaggagagtgtagaaatcccagtggtagcatgtaccaacaggtgagtagaaaggtagtgttagcctgacatttgagttatactctgtgctgcctgagcaagatttgtagaatcatataattaccttttcatgtatatttgaaatcagaggtgtttaaaatacctatgagataccaatgtagccttaacatatgtcaaaatgcattgctggttagataattatttggactacacataaactcctaatattgaatcattacctatcaggtattatctttatggaacttttcaatatctttgctttataaagattctaaacatgtatctgagctggtaatattttaaaatctccattatttgtgtaaaactgtttataagcagtgtttgagagggtctgctttaccattaccccctcaatatcatgatcatccaatctcaaatgtgaaaaaaaaaaagaaatttgattttagggattgtgagtaaacaagtttatatagagagacattgtgaagttaaagttttcagaagttacatttgtgcagttcttaccttttcctcatatagtgccattgaaatagactgaaattatcttggcaaaagttagacaaccaaagacgactttagtggactggttttcaaaacttgagcagctgaaaagcaaaagccgttgtttcccatgacaatgtagcctttgtggatttgggtttgtgctttgggttgaaaagaagtttttagtcctaggccagtagatggcagcagcttttcattgcagacaaaacctcttgaaacccttcccccatggcacaaactcgcccatgatggaaagcatctagatttctgcctccttttacagttaatccaggagagggagtcctttgccaactgatgaccaacagttccaagccagatagtctcgtgaacagtgacaatacagaaataaggtgttatttctgttcagatctccaccggcctttgttcttttaaaacttgaatataggtgggagacataagaaaggaaagaaaagacttaaaactggagtgacaggacaaataatcattactttcaattcatgactgctttatattcatttgatgaaatcatttgtatacaaaccagggagagttttctttacacccttgacaatatatcacatactcttcaagatcataataatatcattaatataaatttaaacaacatggcttgttagaaaatatgctaattgctatggtctcattatgtttgcttagcttttatttgtttttctgtgaacagttagagagctaatttttttcaaaggtgattgtaagtcatattttatatagcattttgcttgattatttgctctgtactgaatttgtactctattgccattagatcttacaataatgttccactctgcaaatttttaaggttcaaataaagtttaattgtttgcaaactgtta

SEQ ID NO: 3605 - protein, 46 aa, Homo sapiens
MTALYSFDEIICIQTRESFLYTLDNISHTLQDHNNIININLNNMAC

SEQ ID NO: 3606 - DNA, 4021 bp, Homo sapiens
agcggtgggcgtggcttgcccacaggctctttcttctggggccgggaaaaccgaggaatacacatgcgcagttggacccctcaggcccttcgtgtcccttcccacccatctccccgccccggccctctgggcggggctgggccgacagtccagctgcagctcgctggagattcagtgacttccttgttgtgagccccggcccggcagtgtcccgactcgtagccccgctgttcttaatccgggccgctagcctgagtctaggtcgcagccgcagccccaccccgtcggtcaccttttcagcgcaggtcctttccccgcacgccctgcgctccctaacatgcccaaccccagcagcacctcctctccctaccccctccctgaggaaattaggaacctgttggcagatgttgaaacatttgtagcagatatactgaaaggagaaaatttatccaagaaagcaaaggaaaagagagaatcccttattaagaagataaaagatgtaaagtctatctatcttcaggaatttcaagacaaaggtgatgcagaagatggggaagaatatgatgacccttttgctgggcctccagacactatttcattagcctcagaacgatatgataaagacgatgaagccccctctgatggagcccagtttcctccaattgcagcacaagaccttccttttgttctaaaggctggctaccttgaaaaacgcagaaaagatcacagctttctgggatttgaatggcagaaacggtggtgtgctctcagtaaaacggtattctattattatggaagtgataaagacaaacaacagaaaggtgaatttgcaatagatggctacagtgtcagaatgaataacactctaagaaaggatggaaagaaagattgctgttttgaaatctctgctcctgataaacgtatatatcagtttacagcagcttctcccaaagatgctgaagaatgggtacagcagctgaaatttgtattgcaagatatggaatctgatattattcctgaggattatgatgagagaggagaattatatgatgatgttgatcatcctctaccaataagcaatccactaacaagcagtcaaccaatagatgatgaaatttatgaagaacttccagaagaagaagaggacagtgctccagtgaaagtggaagaacaaaggaagatgagtcaggatagtgtccatcacacctcaggggataagagcactgattatgctaatttttaccagggattgtgggattgtactggagctttttctgatgagttgtcatttaagcgtggtgatgtgatttacattcttagcaaggaatacaatagatatggctggtgggtaggagaaatgaagggagccattggcttggtgcctaaagcctacataatggagatgtatgatatttgagagtcctggaaaaggaaaattcttctgcttgtctgcaaatgctttggatttagaagcgtcatgaaagcacgagtgacagctcctaacctctccttgttttattaaacattacttatctttgactgttattttatgcagtcgctcattaaaatattcctctgatgtgaaattaaatgaaggatattaatgtaaattagatgcaaccagttaagttatacctgttgctattttgcaaagaaataattatagtttttatttacccatttgatttgtgtgaagaattcatcactattttatacgtaacatatagtctactatagcatagtatgctactattgctacttctggtgtgatttgtaatgtttcttaatcattggacatcaattatttttagagagtaatgtataatttcatagcattttaaatttagtgtatcatgcgagttttttttggtagatgctgaagaatgtggttgctaaacaaagaatgctaaagaatgttcaaactttatagataactttattgttattatttattttcacacatttaattcctattaagtacagccgcaagaaagaaaaaatgatgaagttgcaaatggcagtgtgctgtcacctgcaacagaagtgcgtaccagaagtatgactcatgcaaagcattttaccgtacaaatatcctggtgcgatgatgggcctggcaacattttctactgtacttttgtttaaatttaatgaaacaaaaaattcctaagaaataccaccctaccactaacaaaatggtataaagaatctcccagccaggccaacatggtgaaaccctgtctctactaaaaattagccaagtgtggtaatgttcacctgcagtcccagctacttgggaggccaaggcacgagaattgcttgaacaaggtaggcagaggttgcagtgagccaagatcgcgccactgcactccagcctgggcgacagagtgagactccatctcagaaaaaaaaaaaaaaaaaaacagaatctcagtgtattctcaaagtaaaaaggcataaccaagcactctcttatcttgccttattgctatactatttacatcccactgcagaacagcagatttgaggcttttctatatacttctcagagcactgaaaagaaaggaagggtttgcagaggagagtgtagaaatcccagtggtagcatgtaccaacaggtgagtagaaaggtagtgttagcctgacatttgagttatactctgtgctgcctgagcaagatttgtagaatcatataattaccttttcatgtatatttgaaatcagaggtgtttaaaatacctatgagataccaatgtagccttaacatatgtcaaaatgcattgctggttagataattatttggactacacataaactcctaatattgaatcattacctatcaggtattatctttatggaacttttcaatatctttgctttataaagattctaaacatgtatctgagctggtaatattttaaaatctccattatttgtgtaaaactgtttataagcagtgtttgagagggtctgctttaccattaccccctcaatatcatgatcatccaatctcaaatgtgaaaaaaaaaaagaaatttgattttagggattgtgagtaaacaagtttatatagagagacattgtgaagttaaagttttcagaagttacatttgtgcagttcttaccttttcctcatatagtgccattgaaatagactgaaattatcttggcaaaagttagacaaccaaagacgactttagtggactggttttcaaaacttgagcagctgaaaagcaaaagccgttgtttcccatgacaatgtagcctttgtggatttgggtttgtgctttgggttgaaaagaagtttttagtcctaggccagtagatggcagcagcttttcattgcagacaaaacctcttgaaacccttcccccatggcacaaactcgcccatgatggaaagcatctagatttctgcctccttttacagttaatccaggagagggagtcctttgccaactgatgaccaacagttccaagccagatagtctcgtgaacagtgacaatacagaaataaggtgttatttctgttcagatctccaccggcctttgttcttttaaaacttgaatataggtgggagacataagaaaggaaagaaaagacttaaaactggagtgacaggacaaataatcattactttcaattcatgactgctttatattcatttgatgaaatcatttgtatacaaaccagggagagttttctttacacccttgacaatatatcacatactcttcaagatcataataatatcattaatataaatttaaacaacatggcttgttagaaaatatgctaattgctatggtctcattatgtttgcttagcttttatttgtttttctgtgaacagttagagagctaatttttttcaaaggtgattgtaagtcatattttatatagcattttgcttgattatttgctctgtactgaatttgtactctattgccattagatcttacaataatgttccactctgcaaatttttaaggttcaaataaagtttaattgtttgcaaactgtta

SEQ ID NO: 3607 - protein, 359 aa, Homo sapiens; identical to SEQ ID NO: 407

SEQ ID NO: 3608 - DNA, 8189 bp, Homo sapiens
gatctgatgaatccaaggagtggagcaagaggcagattttggacacggttatgagaatgacagaaactgcctaaagcatttatgctctggcattcgtccctgtttctggaggtccagtaagcgcttcccaacagaggaccatctgatgattcataggcacaaacatgaaatgactttgaagtttccttcaataaaaacagacaatatgttatcagatcaaactccgaccccaacgagattcctgaagaactgcgaggaggtgggcctcttcagcgagctggactgctccctggagcacgagttcaggaaggctcaggaagaggagagcagcaagcggaatatctcgatgcataatgcagttggtggggccatgacggggcccggaactcaccagcttagcagcgctcggctgcccaaccatgacaccaacgttgtgattcagcaagccatgccgtcgcctcagtccagctctgtcatcactcaggcaccttccaccaaccgccagatcgggcctgtcccaggctctctatcttctctgctacatctccacaacagacagagacagcccatgccagcctccatgcctgggaccctgcccaaccctacaatgccaggatcttccgccgtcttgatgccaatggagcgacaaatgtcagtgaactccagcatcatggggatgcaaggtccaaatctcagcaacccctgtgcttctccccaggtccagccaatgcattcagaagccaaaatgaggttgaaggctgcattgactcaccaccctgctgccatgtcaaatgggaacatgaacaccatgggacacatgatggagatgatgggctcccggcaggaccagacgccacaccatcacatgcactcgcacccgcatcagcaccagacactgccaccccatcacccttacccacaccagcaccagcacccagcacaccatcctcaccctcaaccccatcaccagcagaaccatccacatcaccactcccattcccaccttcatgcacacccagcacatcaccagacctcgccacatccgcccctgcacaccggcaaccaagcacaggtttcaccagcaacacaacagatgcagccaacccagacaatacagccaccccagcccacaggggggcgccggcgaagggtggtagacgaggatccggacgagaggcggcggaaatttctggaacggaaccgggcagctgccacccgctgcagacagaagaggaaggtctgggtgatgtcattggaaaagaaagcagaagaactcacccagacaaacatgcagcttcagaatgaagtgtctatgttgaaaaatgaggtggcccagctgaaacagttgttgttaacacataaagactgcccaataacagccatgcagaaagaatcacaaggatatctaagtccagagagtagccctcctgctagtcctgtcccagcttgctcccagcaacaagtcatccagcataataccatcactacttcctcatcggtcagcgaggtggtaggaagctccaccctcagccagctcaccactcacagaacagacctgaatccgattctttaaaatgcaccatcagacctggcctccaagaagagctgtagcgtaccatgcgtcctttcttttaagggcatttttagaattaactcagacctggaagactcctcagttcttcaaagactggctttcatttttatagttattatggaaatgttgtcttttatacttagttatataagaaaaaagggagttatgcaattaatatctatcagcttgggaaacgctttggtgcttttctccagttttctggtaccagttacttgtttataaactgaaccttttctgtatatagccatggtttcattcttatcagtccaaccctttgcctgaaacattgaatcttgttaaaccacagcttttagctaaaatgaggtatacctagatgtcaagtaagacagatccaaggtaactgggtaggaaatcttttgacatcttaactcatgttgagtttgtgctgtggtgtcaccagaattccagataaacacacagcctttcccatacctttttttttcttactataaaatattataagatccattgatgtccaaataataccaccaagcatctcttcacctctcctcctcttggtccacttgctaatgcccagttttcttctccatttccactttttcttaggctccctatttactattcattttgacttccttctgttttatttttttccctttagcattgcatgtgaataagaaaataatgtttaaagaaaaaaaaaaaaaagcaaacctccaaaacgtggacctaaccattgcttcacttacacttcacccacagctggagttcattcaactcttgcttttcacaaaatagtaaccaggagatgtttaatgtgcctgatttaatgtttttaataatcacagcaaatgaaaggtggtttagttataagtgaagcatggttgaataccagctggggagacactagggaagggagctttgtaagccttgattgcgaaagtccaaattttgatgtggggctataacatgacacccttggattgcgactggttttatacggcctgcctataacgttgaaaatccatgtactacataataattcagaagggctctattcactacacagattacattgttcaatcatcagctgctaatagcctaagatttatttttttttttttcttaagcctatggaaccggctttgctgttctggggggtgaaaatagactaactactggagaaacaaagagagaaagaaaacccagtgtttccataggggcacttttagccttcccacaacagttaagcactctttgactgctgaaggaaccccatggatgaggtgcaggctacttcactctttttttttcttttttgagacagagtctcacctattgcccagactgaagtgcagtggtgcgatcatggatcactgcagcagcatcctccgagttcaagctatccttccacctccgcctcctgagtagctgggaccacaggttcacataaccatgcctggctaatttatttttacttttattttaaaataaaagatgaggtctgtcttatgttgcccaggctggtctcaaactatcctacttcttcctcccaaagtgttgggattataggtgtgagccactgcacccagcctacttcactcttctgaattattctgatttattttcaacaacttttgtgaacttgcccgtgatacaaagcagatagtccctgaaccacagtcgtgcctccttgaaacaagccattctactgtgctaatgttttaatatcacatctcacaaataacaggggtgaatgtttctctctagcaatctaggcaggtgctggtgtttcatctccatttgaatgcttgacctcttaatgtgtgtgtgtgtgtgtgtgtgtgtgtgtgtgttcatgggttttaaaagaacagtattttacaaaaggtgtagcttttataagagtgcagaaaagggaaggatgtgtttttttctctcactatagtataagaatctattttggagaaaaaaagaaaatatgagggtctcgaagcatgatttttatataactagtttcagttttatctaataacttactttttaaatcaatatttatcaacaatctttccttgtatgcagtgctttcaaaagatggttttgagtgtccagtgaaacttatgacttggatatatggttgaagaatcaaaacaaaagcaaaaaaaaaaagcaaaaaaagaaaagagaaaaaaagaaaaaatgcaaatggaataattttctattatattttagacaaacatatcattttcgagtattttaaatactgaattcatagttgttgttttttaaattccaacagtaacagctgaatggtttaatctgactggcttcctaagaaatgtttaagactcagctttaaaaagaagttaacattcatatctctgttttgaaatcaaaaatcatatttcaaaattctttcctaggaccatctatgtgtctcccctcccctccacaaaaaggagaaagagtgcattaaaatgtttagttgggttttttaatttttaatttttatgttatgttttgctttgttttaagtaaacaaaaatttttctttctttactgcatgcatagcacttaataaaatggatttttaaaaaatccactagtaatatcagaatgtccagggagtgactgtcactacaatgatggtttagtttacttctgttccaccttttgattgaaatatttagttgttaggctgaaagcctcggcagttaagaacttgcctgagttttcttcgttcagcaacttgacagtttgactgatgtgcattatatatagctcaattatgtctgttttttatgctaagtaggaaaaccaaccacacacattagcaaaccggcctcaacatataattagaataaactgtcttcttgttctactcagggcctttaggtgtgttcattcacggtatggaaatacagtaaatgaaagattccaactagttgtcagtgcttcttgaaattccaaacagaaagatacattggtcaaatccaacacttggcttatcaatattaagtcttttacctaaaggcccagccgtcaccagacaacagaataatcaatctgcctgaaaatccctcctccttgtcctacactttttgcctgtttgggagaatatctttgtactccattctcctccctcagccagttactgggtcacccatccatgtgttcatgaatcaatcatcacggcctgcagagcacctgtcctaaggagggaaaatcctgtcacactgcctctccccattcgtgtgtggttttcttgatcggtgagatctgtctctgaagtcactgccagcctccctgggaacgtctatagtgcctcccctgccttatgtgatgggagttaacaactcagataagtacacctgagagcatttctatcaggtaaactgtcacttaaatggaggtgtccacatcttaattgtttctccttgacacatttctcaatccacgaagccaggagaggtagagtgaaaatcccagccatggatgaatgtactaatttgaaagccaagtgttaagtcggatgttttcccgttacactactactcagccctctcctgcggccacatcaacggatgcaagtcacagtcttaacacagcctgtgggagacaagcagtttgtgtgctcacagtatatattatagtaattagggtgacttagagcaaatactcttcagatcctatgtagtcagtgaaacaaaatggagagcgtattctgatagaaggacgtcgacggtgaatgttctggtggttgttgcctgttaagtaaactttagtgtgtaagttgagtttgtcattaaaatcataaaccagctgcggtaacagacaagcctttggctggggagttttaagcctcggtaactgctataaaactagccatccagttaggatagaatgtgtttctttctggttaaaaaaaggaaaaaccatctaagaaaatatatatgtatgtatgtgtgtatacagtggaattcaaaggaccaaagcaaaatttgaacaggaatctattaatttagaattttataagatatttattaataaatgttatttttaaacattccatttgaacagtattctgtaggatctacttgtttttaaagtgttagtccataataaactactatagttatgtgtattttcatttttcagggtttcaaatggctattctccatcatttggtggaaatgtttgcttagatctctgtgcatagacatttcaaggatttttattgctctgtgagttattttttaatcaacattctgaacagttttttttaaacatttatttctgtgtgttcatttttaaagtaagctctttcatttaggaagcagagttcagctaaagggaatcagtaactctaactggaacagctttcttgtagaagtgtaaaaacagcttcatctctgcctctctccaccccaccccaatttcctagaaagccttgcactattcagctcccttagtgctttttgtcccttcccgaacaatatgcagtagctttaagccattcaagctccattatgcagtatatctgagaagggaaaggaaacaacccatttaaatttgaataaaaccgtgcctatgcgaacagtagcaatttagaatctcttttctgcttttaaaataatttatatttaaaaattgcactttagctttttgatccctttgtatttctcttattctctttctaacctcttctctgtcctcaaacttgcctttgctctcctttacaataccccccacccctcctccaaggctctgagcggcatcatttaaaatactttacagatatttgcaccaggtacatttatgtgcgtccattggtagcacagctgagacctgtgtctcacatcagcctaggtgaagcctactacaagaatgccaaggagaagagccagtacactatatggtttatactctttatccctttattcatagcatgttttttaaaaatgttatattatgcaacagatgtgaggcagcagctaagctatacttaagaattttctctcaccttccaaaccaaagtgtcctgaataagccaggagacttattcttttgtgcaccctggtgcacatctgactgttgtcctagccatagactctctgaggccactgaaagaacagtggccctatcgatttcattcctaggtctcaaaaatacaatgttgccttgtaacataattagggacagcacctctatttcacaattataatctaaggtaggataagacgacacagcagcaataaacttacaagtaaaattcaataccaaaacaaacacaaagaaatttaaaaaacaaaaaacctagctcatcatgttgtgaaaatgaaaaagtgaatgtccattcaaaatattttactatttcttgtggagtttttcagtgatgtaatgcttgtagccaaattgcttaaagagtgtttatatatttttttccttataaattgtctattttttaaaaaagctatttaaccacagctgaagtggggggtaaggccaaattgccaacacttgttaaaagattaatactcttaagtggcactctgatacctttccaacttgtcatcagaaaggaatcaataattaccaactgttgtatttagaccaacttacaatatctagctcattagaagccaggatctagaaagctccttctaagccatttaagatattcttacattgagcttcatattatagaactttataggattggatattttacaatagaataatttagcctcaggactgagaatgtggaagctgaataaattagctttaaatacatcattaaaatcttatgcacaataagctcattagattctagttttctcctttagaataccaatgccacagacactacaggagataatgaaaggtatcagttgtgttgagtggagggagtttaagagaaaggacccttcccaaccagcagccagtagaaaatacaacctactcacctttttcccttctaagttctgctaaatcacatctgcctcatagagaaaggaatgttgcctttgagaactgtcttggagaacagataagcttgaaatgttctctctagagaggacatagggtttgggatcctctgaaaaggcccagaaaaatagctcagttcaaatacaatgttctaggacaattggaatataaatattgtccaaaaatataattaaaagaaaaaagtttagcactgtgtaaagtaagtgttaactgaggaagtcccaaaaaggtgctgtcactttaagttctggacttggggttctttgtatttgtaaacagcaaagcatttgtgtttgtttgtctatttgtaaagcaaccaccttccttattggaaggagaaaaaaaggggtacatacatgtaaatacttgctgcagcatttaatatgtttaattttgtgttaagctttttgttgcatcgtgaacacatttattgttaccaatggacaatgagttcattaagactgttcaactaggtcagatttttacatctctttctagcaagaagagacaagattttgtgcatttgtacaaatgttaatatcactgcaattccaatataataaagcactcaaatgcaaataat

SEQ ID NO: 3609 - protein, 475 aa, Homo sapiens
MIHRHKHEMTLKFPSIKTDNMLSDQTPTPTRFLKNCEEVGLFSELDCSLEHEFRKAQEEESSKRNISMHNAVGGAMTGPGTHQLSSARLPNHDTNVVIQQAMPSPQSSSVITQAPSTNRQIGPVPGSLSSLLHLHNRQRQPMPASMPGTLPNPTMPGSSAVLMPMERQMSVNSSIMGMQGPNLSNPCASPQVQPMHSEAKMRLKAALTHHPAAMSNGNMNTMGHMMEMMGSRQDQTPHHHMHSHPHQHQTLPPHHPYPHQHQHPAHHPHPQPHHQQNHPHHHSHSHLHAHPAHHQTSPHPPLHTGNQAQVSPATQQMQPTQTIQPPQPTGGRRRRVVDEDPDERRRKFLERNRAAATRCRQKRKVWVMSLEKKAEELTQTNMQLQNEVSMLKNEVAQLKQLLLTHKDCPITAMQKESQGYLSPESSPPASPVPACSQQQVIQHNTITTSSSVSEVVGSSTLSQLTTHRTDLNPIL

SEQ ID NO: 3610 - DNA, 8638 bp, Homo sapiens
ggagattgcagcttgctaactagatggcgcactgttatttggtgttctctgctgcgtagcgcaggagtataaactgagcatgtagctgcttgcgaggtgttcttcaacatttacaacaaagttgattctgtgtagggttggaggctagacagttccacaaatttttagtcacattttccatgtcagttaaatctagggagttcaagactactggaaaaattagtctcattactaaaagaaacttagagaacgagggaggtaccagagtctaggaggtacctctgggttgcagaagtaattgtaaaataccagacctgttctttttactaaaagctagtttcactatcttctggtctgaaatactgaggcaaatactcaagacttattttcttcctaatcttgctggtgaaacagaagttactagaaagaaaggaagaaaaaacttgatttggtgactgcaggaagcaacacgttgctgcttttattctacagataatgatttatgaggaatccaagatgaatttggagcaggagaggccgtttgtctgcagtgccccaggctgctcccagcgcttcccaacagaggaccatctgatgattcataggcacaaacatgaaatgactttgaagtttccttcaataaaaacagacaatatgttatcagatcaaactccgaccccaacgagattcctgaagaactgcgaggaggtgggcctcttcagcgagctggactgctccctggagcacgagttcaggaaggctcaggaagaggagagcagcaagcggaatatctcgatgcataatgcagttggtggggccatgacggggcccggaactcaccagcttagcagcgctcggctgcccaaccatgacaccaacgttgtgattcagcaagccatgccgtcgcctcagtccagctctgtcatcactcaggcaccttccaccaaccgccagatcgggcctgtcccaggctctctatcttctctgctacatctccacaacagacagagacagcccatgccagcctccatgcctgggaccctgcccaaccctacaatgccaggatcttccgccgtcttgatgccaatggagcgacaaatgtcagtgaactccagcatcatggggatgcaaggtccaaatctcagcaacccctgtgcttctccccaggtccagccaatgcattcagaagccaaaatgaggttgaaggctgcattgactcaccaccctgctgccatgtcaaatgggaacatgaacaccatgggacacatgatggagatgatgggctcccggcaggaccagacgccacaccatcacatgcactcgcacccgcatcagcaccagacactgccaccccatcacccttacccacaccagcaccagcacccagcacaccatcctcaccctcaaccccatcaccagcagaaccatccacatcaccactcccattcccaccttcatgcacacccagcacatcaccagacctcgccacatccgcccctgcacaccggcaaccaagcacaggtttcaccagcaacacaacagatgcagccaacccagacaatacagccaccccagcccacaggggggcgccggcgaagggtggtagacgaggatccggacgagaggcggcggaaatttctggaacggaaccgggcagctgccacccgctgcagacagaagaggaaggtctgggtgatgtcattggaaaagaaagcagaagaactcacccagacaaacatgcagcttcagaatgaagtgtctatgttgaaaaatgaggtggcccagctgaaacagttgttgttaacacataaagactgcccaataacagccatgcagaaagaatcacaaggatatctaagtccagagagtagccctcctgctagtcctgtcccagcttgctcccagcaacaagtcatccagcataataccatcactacttcctcatcggtcagcgaggtggtaggaagctccaccctcagccagctcaccactcacagaacagacctgaatccgattctttaaaatgcaccatcagacctggcctccaagaagagctgtagcgtaccatgcgtcctttcttttaagggcatttttagaattaactcagacctggaagactcctcagttcttcaaagactggctttcatttttatagttattatggaaatgttgtcttttatacttagttatataagaaaaaagggagttatgcaattaatatctatcagcttgggaaacgctttggtgcttttctccagttttctggtaccagttacttgtttataaactgaaccttttctgtatatagccatggtttcattcttatcagtccaaccctttgcctgaaacattgaatcttgttaaaccacagcttttagctaaaatgaggtatacctagatgtcaagtaagacagatccaaggtaactgggtaggaaatcttttgacatcttaactcatgttgagtttgtgctgtggtgtcaccagaattccagataaacacacagcctttcccatacctttttttttcttactataaaatattataagatccattgatgtccaaataataccaccaagcatctcttcacctctcctcctcttggtccacttgctaatgcccagttttcttctccatttccactttttcttaggctccctatttactattcattttgacttccttctgttttatttttttccctttagcattgcatgtgaataagaaaataatgtttaaagaaaaaaaaaaaaaagcaaacctccaaaacgtggacctaaccattgcttcacttacacttcacccacagctggagttcattcaactcttgcttttcacaaaatagtaaccaggagatgtttaatgtgcctgatttaatgtttttaataatcacagcaaatgaaaggtggtttagttataagtgaagcatggttgaataccagctggggagacactagggaagggagctttgtaagccttgattgcgaaagtccaaattttgatgtggggctataacatgacacccttggattgcgactggttttatacggcctgcctataacgttgaaaatccatgtactacataataattcagaagggctctattcactacacagattacattgttcaatcatcagctgctaatagcctaagatttatttttttttttttcttaagcctatggaaccggctttgctgttctggggggtgaaaatagactaactactggagaaacaaagagagaaagaaaacccagtgtttccataggggcacttttagccttcccacaacagttaagcactctttgactgctgaaggaaccccatggatgaggtgcaggctacttcactctttttttttcttttttgagacagagtctcacctattgcccagactgaagtgcagtggtgcgatcatggatcactgcagcagcatcctccgagttcaagctatccttccacctccgcctcctgagtagctgggaccacaggttcacataaccatgcctggctaatttatttttacttttattttaaaataaaagatgaggtctgtcttatgttgcccaggctggtctcaaactatcctacttcttcctcccaaagtgttgggattataggtgtgagccactgcacccagcctacttcactcttctgaattattctgatttattttcaacaacttttgtgaacttgcccgtgatacaaagcagatagtccctgaaccacagtcgtgcctccttgaaacaagccattctactgtgctaatgttttaatatcacatctcacaaataacaggggtgaatgtttctctctagcaatctaggcaggtgctggtgtttcatctccatttgaatgcttgacctcttaatgtgtgtgtgtgtgtgtgtgtgtgtgtgtgtgttcatgggttttaaaagaacagtattttacaaaaggtgtagcttttataagagtgcagaaaagggaaggatgtgtttttttctctcactatagtataagaatctattttggagaaaaaaagaaaatatgagggtctcgaagcatgatttttatataactagtttcagttttatctaataacttactttttaaatcaatatttatcaacaatctttccttgtatgcagtgctttcaaaagatggttttgagtgtccagtgaaacttatgacttggatatatggttgaagaatcaaaacaaaagcaaaaaaaaaaagcaaaaaaagaaaagagaaaaaaagaaaaaatgcaaatggaataattttctattatattttagacaaacatatcattttcgagtattttaaatactgaattcatagttgttgttttttaaattccaacagtaacagctgaatggtttaatctgactggcttcctaagaaatgtttaagactcagctttaaaaagaagttaacattcatatctctgttttgaaatcaaaaatcatatttcaaaattctttcctaggaccatctatgtgtctcccctcccctccacaaaaaggagaaagagtgcattaaaatgtttagttgggttttttaatttttaatttttatgttatgttttgctttgttttaagtaaacaaaaatttttctttctttactgcatgcatagcacttaataaaatggatttttaaaaaatccactagtaatatcagaatgtccagggagtgactgtcactacaatgatggtttagtttacttctgttccaccttttgattgaaatatttagttgttaggctgaaagcctcggcagttaagaacttgcctgagttttcttcgttcagcaacttgacagtttgactgatgtgcattatatatagctcaattatgtctgttttttatgctaagtaggaaaaccaaccacacacattagcaaaccggcctcaacatataattagaataaactgtcttcttgttctactcagggcctttaggtgtgttcattcacggtatggaaatacagtaaatgaaagattccaactagttgtcagtgcttcttgaaattccaaacagaaagatacattggtcaaatccaacacttggcttatcaatattaagtcttttacctaaaggcccagccgtcaccagacaacagaataatcaatctgcctgaaaatccctcctccttgtcctacactttttgcctgtttgggagaatatctttgtactccattctcctccctcagccagttactgggtcacccatccatgtgttcatgaatcaatcatcacggcctgcagagcacctgtcctaaggagggaaaatcctgtcacactgcctctccccattcgtgtgtggttttcttgatcggtgagatctgtctctgaagtcactgccagcctccctgggaacgtctatagtgcctcccctgccttatgtgatgggagttaacaactcagataagtacacctgagagcatttctatcaggtaaactgtcacttaaatggaggtgtccacatcttaattgtttctccttgacacatttctcaatccacgaagccaggagaggtagagtgaaaatcccagccatggatgaatgtactaatttgaaagccaagtgttaagtcggatgttttcccgttacactactactcagccctctcctgcggccacatcaacggatgcaagtcacagtcttaacacagcctgtgggagacaagcagtttgtgtgctcacagtatatattatagtaattagggtgacttagagcaaatactcttcagatcctatgtagtcagtgaaacaaaatggagagcgtattctgatagaaggacgtcgacggtgaatgttctggtggttgttgcctgttaagtaaactttagtgtgtaagttgagtttgtcattaaaatcataaaccagctgcggtaacagacaagcctttggctggggagttttaagcctcggtaactgctataaaactagccatccagttaggatagaatgtgtttctttctggttaaaaaaaggaaaaaccatctaagaaaatatatatgtatgtatgtgtgtatacagtggaattcaaaggaccaaagcaaaatttgaacaggaatctattaatttagaattttataagatatttattaataaatgttatttttaaacattccatttgaacagtattctgtaggatctacttgtttttaaagtgttagtccataataaactactatagttatgtgtattttcatttttcagggtttcaaatggctattctccatcatttggtggaaatgtttgcttagatctctgtgcatagacatttcaaggatttttattgctctgtgagttattttttaatcaacattctgaacagttttttttaaacatttatttctgtgtgttcatttttaaagtaagctctttcatttaggaagcagagttcagctaaagggaatcagtaactctaactggaacagctttcttgtagaagtgtaaaaacagcttcatctctgcctctctccaccccaccccaatttcctagaaagccttgcactattcagctcccttagtgctttttgtcccttcccgaacaatatgcagtagctttaagccattcaagctccattatgcagtatatctgagaagggaaaggaaacaacccatttaaatttgaataaaaccgtgcctatgcgaacagtagcaatttagaatctcttttctgcttttaaaataatttatatttaaaaattgcactttagctttttgatccctttgtatttctcttattctctttctaacctcttctctgtcctcaaacttgcctttgctctcctttacaataccccccacccctcctccaaggctctgagcggcatcatttaaaatactttacagatatttgcaccaggtacatttatgtgcgtccattggtagcacagctgagacctgtgtctcacatcagcctaggtgaagcctactacaagaatgccaaggagaagagccagtacactatatggtttatactctttatccctttattcatagcatgttttttaaaaatgttatattatgcaacagatgtgaggcagcagctaagctatacttaagaattttctctcaccttccaaaccaaagtgtcctgaataagccaggagacttattcttttgtgcaccctggtgcacatctgactgttgtcctagccatagactctctgaggccactgaaagaacagtggccctatcgatttcattcctaggtctcaaaaatacaatgttgccttgtaacataattagggacagcacctctatttcacaattataatctaaggtaggataagacgacacagcagcaataaacttacaagtaaaattcaataccaaaacaaacacaaagaaatttaaaaaacaaaaaacctagctcatcatgttgtgaaaatgaaaaagtgaatgtccattcaaaatattttactatttcttgtggagtttttcagtgatgtaatgcttgtagccaaattgcttaaagagtgtttatatatttttttccttataaattgtctattttttaaaaaagctatttaaccacagctgaagtggggggtaaggccaaattgccaacacttgttaaaagattaatactcttaagtggcactctgatacctttccaacttgtcatcagaaaggaatcaataattaccaactgttgtatttagaccaacttacaatatctagctcattagaagccaggatctagaaagctccttctaagccatttaagatattcttacattgagcttcatattatagaactttataggattggatattttacaatagaataatttagcctcaggactgagaatgtggaagctgaataaattagctttaaatacatcattaaaatcttatgcacaataagctcattagattctagttttctcctttagaataccaatgccacagacactacaggagataatgaaaggtatcagttgtgttgagtggagggagtttaagagaaaggacccttcccaaccagcagccagtagaaaatacaacctactcacctttttcccttctaagttctgctaaatcacatctgcctcatagagaaaggaatgttgcctttgagaactgtcttggagaacagataagcttgaaatgttctctctagagaggacatagggtttgggatcctctgaaaaggcccagaaaaatagctcagttcaaatacaatgttctaggacaattggaatataaatattgtccaaaaatataattaaaagaaaaaagtttagcactgtgtaaagtaagtgttaactgaggaagtcccaaaaaggtgctgtcactttaagttctggacttggggttctttgtatttgtaaacagcaaagcatttgtgtttgtttgtctatttgtaaagcaaccaccttccttattggaaggagaaaaaaaggggtacatacatgtaaatacttgctgcagcatttaatatgtttaattttgtgttaagctttttgttgcatcgtgaacacatttattgttaccaatggacaatgagttcattaagactgttcaactaggtcagatttttacatctctttctagcaagaagagacaagattttgtgcatttgtacaaatgttaatatcactgcaattccaatataataaagcactcaaatgcaaataat

SEQ ID NO: 3611 - protein, 508 aa, Homo sapiens
MIYEESKMNLEQERPFVCSAPGCSQRFPTEDHLMIHRHKHEMTLKFPSIKTDNMLSDQTPTPTRFLKNCEEVGLFSELDCSLEHEFRKAQEEESSKRNISMHNAVGGAMTGPGTHQLSSARLPNHDTNVVIQQAMPSPQSSSVITQAPSTNRQIGPVPGSLSSLLHLHNRQRQPMPASMPGTLPNPTMPGSSAVLMPMERQMSVNSSIMGMQGPNLSNPCASPQVQPMHSEAKMRLKAALTHHPAAMSNGNMNTMGHMMEMMGSRQDQTPHHHMHSHPHQHQTLPPHHPYPHQHQHPAHHPHPQPHHQQNHPHHHSHSHLHAHPAHHQTSPHPPLHTGNQAQVSPATQQMQPTQTIQPPQPTGGRRRRVVDEDPDERRRKFLERNRAAATRCRQKRKVWVMSLEKKAEELTQTNMQLQNEVSMLKNEVAQLKQLLLTHKDCPITAMQKESQGYLSPESSPPASPVPACSQQQVIQHNTITTSSSVSEVVGSSTLSQLTTHRTDLNPIL

SEQ ID NO: 3612 - DNA, 8210 bp, Homo sapiens
agtggtggagtcaatttatttctgaaacgatctcatttacctgaatgaggagctcatatttattttcaggatttatgaggaatccaagatgaatttggagcaggagaggccgtttgtctgcagtgccccaggctgctcccagcgcttcccaacagaggaccatctgatgattcataggcacaaacatgaaatgactttgaagtttccttcaataaaaacagacaatatgttatcagatcaaactccgaccccaacgagattcctgaagaactgcgaggaggtgggcctcttcagcgagctggactgctccctggagcacgagttcaggaaggctcaggaagaggagagcagcaagcggaatatctcgatgcataatgcagttggtggggccatgacggggcccggaactcaccagcttagcagcgctcggctgcccaaccatgacaccaacgttgtgattcagcaagccatgccgtcgcctcagtccagctctgtcatcactcaggcaccttccaccaaccgccagatcgggcctgtcccaggctctctatcttctctgctacatctccacaacagacagagacagcccatgccagcctccatgcctgggaccctgcccaaccctacaatgccaggatcttccgccgtcttgatgccaatggagcgacaaatgtcagtgaactccagcatcatggggatgcaaggtccaaatctcagcaacccctgtgcttctccccaggtccagccaatgcattcagaagccaaaatgaggttgaaggctgcattgactcaccaccctgctgccatgtcaaatgggaacatgaacaccatgggacacatgatggagatgatgggctcccggcaggaccagacgccacaccatcacatgcactcgcacccgcatcagcaccagacactgccaccccatcacccttacccacaccagcaccagcacccagcacaccatcctcaccctcaaccccatcaccagcagaaccatccacatcaccactcccattcccaccttcatgcacacccagcacatcaccagacctcgccacatccgcccctgcacaccggcaaccaagcacaggtttcaccagcaacacaacagatgcagccaacccagacaatacagccaccccagcccacaggggggcgccggcgaagggtggtagacgaggatccggacgagaggcggcggaaatttctggaacggaaccgggcagctgccacccgctgcagacagaagaggaaggtctgggtgatgtcattggaaaagaaagcagaagaactcacccagacaaacatgcagcttcagaatgaagtgtctatgttgaaaaatgaggtggcccagctgaaacagttgttgttaacacataaagactgcccaataacagccatgcagaaagaatcacaaggatatctaagtccagagagtagccctcctgctagtcctgtcccagcttgctcccagcaacaagtcatccagcataataccatcactacttcctcatcggtcagcgaggtggtaggaagctccaccctcagccagctcaccactcacagaacagacctgaatccgattctttaaaatgcaccatcagacctggcctccaagaagagctgtagcgtaccatgcgtcctttcttttaagggcatttttagaattaactcagacctggaagactcctcagttcttcaaagactggctttcatttttatagttattatggaaatgttgtcttttatacttagttatataagaaaaaagggagttatgcaattaatatctatcagcttgggaaacgctttggtgcttttctccagttttctggtaccagttacttgtttataaactgaaccttttctgtatatagccatggtttcattcttatcagtccaaccctttgcctgaaacattgaatcttgttaaaccacagcttttagctaaaatgaggtatacctagatgtcaagtaagacagatccaaggtaactgggtaggaaatcttttgacatcttaactcatgttgagtttgtgctgtggtgtcaccagaattccagataaacacacagcctttcccatacctttttttttcttactataaaatattataagatccattgatgtccaaataataccaccaagcatctcttcacctctcctcctcttggtccacttgctaatgcccagttttcttctccatttccactttttcttaggctccctatttactattcattttgacttccttctgttttatttttttccctttagcattgcatgtgaataagaaaataatgtttaaagaaaaaaaaaaaaaagcaaacctccaaaacgtggacctaaccattgcttcacttacacttcacccacagctggagttcattcaactcttgcttttcacaaaatagtaaccaggagatgtttaatgtgcctgatttaatgtttttaataatcacagcaaatgaaaggtggtttagttataagtgaagcatggttgaataccagctggggagacactagggaagggagctttgtaagccttgattgcgaaagtccaaattttgatgtggggctataacatgacacccttggattgcgactggttttatacggcctgcctataacgttgaaaatccatgtactacataataattcagaagggctctattcactacacagattacattgttcaatcatcagctgctaatagcctaagatttatttttttttttttcttaagcctatggaaccggctttgctgttctggggggtgaaaatagactaactactggagaaacaaagagagaaagaaaacccagtgtttccataggggcacttttagccttcccacaacagttaagcactctttgactgctgaaggaaccccatggatgaggtgcaggctacttcactctttttttttcttttttgagacagagtctcacctattgcccagactgaagtgcagtggtgcgatcatggatcactgcagcagcatcctccgagttcaagctatccttccacctccgcctcctgagtagctgggaccacaggttcacataaccatgcctggctaatttatttttacttttattttaaaataaaagatgaggtctgtcttatgttgcccaggctggtctcaaactatcctacttcttcctcccaaagtgttgggattataggtgtgagccactgcacccagcctacttcactcttctgaattattctgatttattttcaacaacttttgtgaacttgcccgtgatacaaagcagatagtccctgaaccacagtcgtgcctccttgaaacaagccattctactgtgctaatgttttaatatcacatctcacaaataacaggggtgaatgtttctctctagcaatctaggcaggtgctggtgtttcatctccatttgaatgcttgacctcttaatgtgtgtgtgtgtgtgtgtgtgtgtgtgtgtgttcatgggttttaaaagaacagtattttacaaaaggtgtagcttttataagagtgcagaaaagggaaggatgtgtttttttctctcactatagtataagaatctattttggagaaaaaaagaaaatatgagggtctcgaagcatgatttttatataactagtttcagttttatctaataacttactttttaaatcaatatttatcaacaatctttccttgtatgcagtgctttcaaaagatggttttgagtgtccagtgaaacttatgacttggatatatggttgaagaatcaaaacaaaagcaaaaaaaaaaagcaaaaaaagaaaagagaaaaaaagaaaaaatgcaaatggaataattttctattatattttagacaaacatatcattttcgagtattttaaatactgaattcatagttgttgttttttaaattccaacagtaacagctgaatggtttaatctgactggcttcctaagaaatgtttaagactcagctttaaaaagaagttaacattcatatctctgttttgaaatcaaaaatcatatttcaaaattctttcctaggaccatctatgtgtctcccctcccctccacaaaaaggagaaagagtgcattaaaatgtttagttgggttttttaatttttaatttttatgttatgttttgctttgttttaagtaaacaaaaatttttctttctttactgcatgcatagcacttaataaaatggatttttaaaaaatccactagtaatatcagaatgtccagggagtgactgtcactacaatgatggtttagtttacttctgttccaccttttgattgaaatatttagttgttaggctgaaagcctcggcagttaagaacttgcctgagttttcttcgttcagcaacttgacagtttgactgatgtgcattatatatagctcaattatgtctgttttttatgctaagtaggaaaaccaaccacacacattagcaaaccggcctcaacatataattagaataaactgtcttcttgttctactcagggcctttaggtgtgttcattcacggtatggaaatacagtaaatgaaagattccaactagttgtcagtgcttcttgaaattccaaacagaaagatacattggtcaaatccaacacttggcttatcaatattaagtcttttacctaaaggcccagccgtcaccagacaacagaataatcaatctgcctgaaaatccctcctccttgtcctacactttttgcctgtttgggagaatatctttgtactccattctcctccctcagccagttactgggtcacccatccatgtgttcatgaatcaatcatcacggcctgcagagcacctgtcctaaggagggaaaatcctgtcacactgcctctccccattcgtgtgtggttttcttgatcggtgagatctgtctctgaagtcactgccagcctccctgggaacgtctatagtgcctcccctgccttatgtgatgggagttaacaactcagataagtacacctgagagcatttctatcaggtaaactgtcacttaaatggaggtgtccacatcttaattgtttctccttgacacatttctcaatccacgaagccaggagaggtagagtgaaaatcccagccatggatgaatgtactaatttgaaagccaagtgttaagtcggatgttttcccgttacactactactcagccctctcctgcggccacatcaacggatgcaagtcacagtcttaacacagcctgtgggagacaagcagtttgtgtgctcacagtatatattatagtaattagggtgacttagagcaaatactcttcagatcctatgtagtcagtgaaacaaaatggagagcgtattctgatagaaggacgtcgacggtgaatgttctggtggttgttgcctgttaagtaaactttagtgtgtaagttgagtttgtcattaaaatcataaaccagctgcggtaacagacaagcctttggctggggagttttaagcctcggtaactgctataaaactagccatccagttaggatagaatgtgtttctttctggttaaaaaaaggaaaaaccatctaagaaaatatatatgtatgtatgtgtgtatacagtggaattcaaaggaccaaagcaaaatttgaacaggaatctattaatttagaattttataagatatttattaataaatgttatttttaaacattccatttgaacagtattctgtaggatctacttgtttttaaagtgttagtccataataaactactatagttatgtgtattttcatttttcagggtttcaaatggctattctccatcatttggtggaaatgtttgcttagatctctgtgcatagacatttcaaggatttttattgctctgtgagttattttttaatcaacattctgaacagttttttttaaacatttatttctgtgtgttcatttttaaagtaagctctttcatttaggaagcagagttcagctaaagggaatcagtaactctaactggaacagctttcttgtagaagtgtaaaaacagcttcatctctgcctctctccaccccaccccaatttcctagaaagccttgcactattcagctcccttagtgctttttgtcccttcccgaacaatatgcagtagctttaagccattcaagctccattatgcagtatatctgagaagggaaaggaaacaacccatttaaatttgaataaaaccgtgcctatgcgaacagtagcaatttagaatctcttttctgcttttaaaataatttatatttaaaaattgcactttagctttttgatccctttgtatttctcttattctctttctaacctcttctctgtcctcaaacttgcctttgctctcctttacaataccccccacccctcctccaaggctctgagcggcatcatttaaaatactttacagatatttgcaccaggtacatttatgtgcgtccattggtagcacagctgagacctgtgtctcacatcagcctaggtgaagcctactacaagaatgccaaggagaagagccagtacactatatggtttatactctttatccctttattcatagcatgttttttaaaaatgttatattatgcaacagatgtgaggcagcagctaagctatacttaagaattttctctcaccttccaaaccaaagtgtcctgaataagccaggagacttattcttttgtgcaccctggtgcacatctgactgttgtcctagccatagactctctgaggccactgaaagaacagtggccctatcgatttcattcctaggtctcaaaaatacaatgttgccttgtaacataattagggacagcacctctatttcacaattataatctaaggtaggataagacgacacagcagcaataaacttacaagtaaaattcaataccaaaacaaacacaaagaaatttaaaaaacaaaaaacctagctcatcatgttgtgaaaatgaaaaagtgaatgtccattcaaaatattttactatttcttgtggagtttttcagtgatgtaatgcttgtagccaaattgcttaaagagtgtttatatatttttttccttataaattgtctattttttaaaaaagctatttaaccacagctgaagtggggggtaaggccaaattgccaacacttgttaaaagattaatactcttaagtggcactctgatacctttccaacttgtcatcagaaaggaatcaataattaccaactgttgtatttagaccaacttacaatatctagctcattagaagccaggatctagaaagctccttctaagccatttaagatattcttacattgagcttcatattatagaactttataggattggatattttacaatagaataatttagcctcaggactgagaatgtggaagctgaataaattagctttaaatacatcattaaaatcttatgcacaataagctcattagattctagttttctcctttagaataccaatgccacagacactacaggagataatgaaaggtatcagttgtgttgagtggagggagtttaagagaaaggacccttcccaaccagcagccagtagaaaatacaacctactcacctttttcccttctaagttctgctaaatcacatctgcctcatagagaaaggaatgttgcctttgagaactgtcttggagaacagataagcttgaaatgttctctctagagaggacatagggtttgggatcctctgaaaaggcccagaaaaatagctcagttcaaatacaatgttctaggacaattggaatataaatattgtccaaaaatataattaaaagaaaaaagtttagcactgtgtaaagtaagtgttaactgaggaagtcccaaaaaggtgctgtcactttaagttctggacttggggttctttgtatttgtaaacagcaaagcatttgtgtttgtttgtctatttgtaaagcaaccaccttccttattggaaggagaaaaaaaggggtacatacatgtaaatacttgctgcagcatttaatatgtttaattttgtgttaagctttttgttgcatcgtgaacacatttattgttaccaatggacaatgagttcattaagactgttcaactaggtcagatttttacatctctttctagcaagaagagacaagattttgtgcatttgtacaaatgttaatatcactgcaattccaatataataaagcactcaaatgcaaataat

SEQ ID NO: 3613 - protein, 501 aa, Homo sapiens
MNLEQERPFVCSAPGCSQRFPTEDHLMIHRHKHEMTLKFPSIKTDNMLSDQTPTPTRFLKNCEEVGLFSELDCSLEHEFRKAQEEESSKRNISMHNAVGGAMTGPGTHQLSSARLPNHDTNVVIQQAMPSPQSSSVITQAPSTNRQIGPVPGSLSSLLHLHNRQRQPMPASMPGTLPNPTMPGSSAVLMPMERQMSVNSSIMGMQGPNLSNPCASPQVQPMHSEAKMRLKAALTHHPAAMSNGNMNTMGHMMEMMGSRQDQTPHHHMHSHPHQHQTLPPHHPYPHQHQHPAHHPHPQPHHQQNHPHHHSHSHLHAHPAHHQTSPHPPLHTGNQAQVSPATQQMQPTQTIQPPQPTGGRRRRVVDEDPDERRRKFLERNRAAATRCRQKRKVWVMSLEKKAEELTQTNMQLQNEVSMLKNEVAQLKQLLLTHKDCPITAMQKESQGYLSPESSPPASPVPACSQQQVIQHNTITTSSSVSEVVGSSTLSQLTTHRTDLNPIL

SEQ ID NO: 3614 - DNA, 7896 bp, Homo sapiens
agagagcaagtgagcgagagcccagccggagggagagccagagctaggcgcaaaagaagggccagcacattacatcatcgcttggcctggaatcaaatgggaaggatatgactcactcaagctagttaagctttggctcaaattctacacacactcattccagagctctcatgttctgcacctcaggagggaattcagcctcagtgatgtccatgaggcctgtcccaggctctctatcttctctgctacatctccacaacagacagagacagcccatgccagcctccatgcctgggaccctgcccaaccctacaatgccaggatcttccgccgtcttgatgccaatggagcgacaaatgtcagtgaactccagcatcatggggatgcaaggtccaaatctcagcaacccctgtgcttctccccaggtccagccaatgcattcagaagccaaaatgaggttgaaggctgcattgactcaccaccctgctgccatgtcaaatgggaacatgaacaccatgggacacatgatggagatgatgggctcccggcaggaccagacgccacaccatcacatgcactcgcacccgcatcagcaccagacactgccaccccatcacccttacccacaccagcaccagcacccagcacaccatcctcaccctcaaccccatcaccagcagaaccatccacatcaccactcccattcccaccttcatgcacacccagcacatcaccagacctcgccacatccgcccctgcacaccggcaaccaagcacaggtttcaccagcaacacaacagatgcagccaacccagacaatacagccaccccagcccacaggggggcgccggcgaagggtggtagacgaggatccggacgagaggcggcggaaatttctggaacggaaccgggcagctgccacccgctgcagacagaagaggaaggtctgggtgatgtcattggaaaagaaagcagaagaactcacccagacaaacatgcagcttcagaatgaagtgtctatgttgaaaaatgaggtggcccagctgaaacagttgttgttaacacataaagactgcccaataacagccatgcagaaagaatcacaaggatatctaagtccagagagtagccctcctgctagtcctgtcccagcttgctcccagcaacaagtcatccagcataataccatcactacttcctcatcggtcagcgaggtggtaggaagctccaccctcagccagctcaccactcacagaacagacctgaatccgattctttaaaatgcaccatcagacctggcctccaagaagagctgtagcgtaccatgcgtcctttcttttaagggcatttttagaattaactcagacctggaagactcctcagttcttcaaagactggctttcatttttatagttattatggaaatgttgtcttttatacttagttatataagaaaaaagggagttatgcaattaatatctatcagcttgggaaacgctttggtgcttttctccagttttctggtaccagttacttgtttataaactgaaccttttctgtatatagccatggtttcattcttatcagtccaaccctttgcctgaaacattgaatcttgttaaaccacagcttttagctaaaatgaggtatacctagatgtcaagtaagacagatccaaggtaactgggtaggaaatcttttgacatcttaactcatgttgagtttgtgctgtggtgtcaccagaattccagataaacacacagcctttcccatacctttttttttcttactataaaatattataagatccattgatgtccaaataataccaccaagcatctcttcacctctcctcctcttggtccacttgctaatgcccagttttcttctccatttccactttttcttaggctccctatttactattcattttgacttccttctgttttatttttttccctttagcattgcatgtgaataagaaaataatgtttaaagaaaaaaaaaaaaaagcaaacctccaaaacgtggacctaaccattgcttcacttacacttcacccacagctggagttcattcaactcttgcttttcacaaaatagtaaccaggagatgtttaatgtgcctgatttaatgtttttaataatcacagcaaatgaaaggtggtttagttataagtgaagcatggttgaataccagctggggagacactagggaagggagctttgtaagccttgattgcgaaagtccaaattttgatgtggggctataacatgacacccttggattgcgactggttttatacggcctgcctataacgttgaaaatccatgtactacataataattcagaagggctctattcactacacagattacattgttcaatcatcagctgctaatagcctaagatttatttttttttttttcttaagcctatggaaccggctttgctgttctggggggtgaaaatagactaactactggagaaacaaagagagaaagaaaacccagtgtttccataggggcacttttagccttcccacaacagttaagcactctttgactgctgaaggaaccccatggatgaggtgcaggctacttcactctttttttttcttttttgagacagagtctcacctattgcccagactgaagtgcagtggtgcgatcatggatcactgcagcagcatcctccgagttcaagctatccttccacctccgcctcctgagtagctgggaccacaggttcacataaccatgcctggctaatttatttttacttttattttaaaataaaagatgaggtctgtcttatgttgcccaggctggtctcaaactatcctacttcttcctcccaaagtgttgggattataggtgtgagccactgcacccagcctacttcactcttctgaattattctgatttattttcaacaacttttgtgaacttgcccgtgatacaaagcagatagtccctgaaccacagtcgtgcctccttgaaacaagccattctactgtgctaatgttttaatatcacatctcacaaataacaggggtgaatgtttctctctagcaatctaggcaggtgctggtgtttcatctccatttgaatgcttgacctcttaatgtgtgtgtgtgtgtgtgtgtgtgtgtgtgtgttcatgggttttaaaagaacagtattttacaaaaggtgtagcttttataagagtgcagaaaagggaaggatgtgtttttttctctcactatagtataagaatctattttggagaaaaaaagaaaatatgagggtctcgaagcatgatttttatataactagtttcagttttatctaataacttactttttaaatcaatatttatcaacaatctttccttgtatgcagtgctttcaaaagatggttttgagtgtccagtgaaacttatgacttggatatatggttgaagaatcaaaacaaaagcaaaaaaaaaaagcaaaaaaagaaaagagaaaaaaagaaaaaatgcaaatggaataattttctattatattttagacaaacatatcattttcgagtattttaaatactgaattcatagttgttgttttttaaattccaacagtaacagctgaatggtttaatctgactggcttcctaagaaatgtttaagactcagctttaaaaagaagttaacattcatatctctgttttgaaatcaaaaatcatatttcaaaattctttcctaggaccatctatgtgtctcccctcccctccacaaaaaggagaaagagtgcattaaaatgtttagttgggttttttaatttttaatttttatgttatgttttgctttgttttaagtaaacaaaaatttttctttctttactgcatgcatagcacttaataaaatggatttttaaaaaatccactagtaatatcagaatgtccagggagtgactgtcactacaatgatggtttagtttacttctgttccaccttttgattgaaatatttagttgttaggctgaaagcctcggcagttaagaacttgcctgagttttcttcgttcagcaacttgacagtttgactgatgtgcattatatatagctcaattatgtctgttttttatgctaagtaggaaaaccaaccacacacattagcaaaccggcctcaacatataattagaataaactgtcttcttgttctactcagggcctttaggtgtgttcattcacggtatggaaatacagtaaatgaaagattccaactagttgtcagtgcttcttgaaattccaaacagaaagatacattggtcaaatccaacacttggcttatcaatattaagtcttttacctaaaggcccagccgtcaccagacaacagaataatcaatctgcctgaaaatccctcctccttgtcctacactttttgcctgtttgggagaatatctttgtactccattctcctccctcagccagttactgggtcacccatccatgtgttcatgaatcaatcatcacggcctgcagagcacctgtcctaaggagggaaaatcctgtcacactgcctctccccattcgtgtgtggttttcttgatcggtgagatctgtctctgaagtcactgccagcctccctgggaacgtctatagtgcctcccctgccttatgtgatgggagttaacaactcagataagtacacctgagagcatttctatcaggtaaactgtcacttaaatggaggtgtccacatcttaattgtttctccttgacacatttctcaatccacgaagccaggagaggtagagtgaaaatcccagccatggatgaatgtactaatttgaaagccaagtgttaagtcggatgttttcccgttacactactactcagccctctcctgcggccacatcaacggatgcaagtcacagtcttaacacagcctgtgggagacaagcagtttgtgtgctcacagtatatattatagtaattagggtgacttagagcaaatactcttcagatcctatgtagtcagtgaaacaaaatggagagcgtattctgatagaaggacgtcgacggtgaatgttctggtggttgttgcctgttaagtaaactttagtgtgtaagttgagtttgtcattaaaatcataaaccagctgcggtaacagacaagcctttggctggggagttttaagcctcggtaactgctataaaactagccatccagttaggatagaatgtgtttctttctggttaaaaaaaggaaaaaccatctaagaaaatatatatgtatgtatgtgtgtatacagtggaattcaaaggaccaaagcaaaatttgaacaggaatctattaatttagaattttataagatatttattaataaatgttatttttaaacattccatttgaacagtattctgtaggatctacttgtttttaaagtgttagtccataataaactactatagttatgtgtattttcatttttcagggtttcaaatggctattctccatcatttggtggaaatgtttgcttagatctctgtgcatagacatttcaaggatttttattgctctgtgagttattttttaatcaacattctgaacagttttttttaaacatttatttctgtgtgttcatttttaaagtaagctctttcatttaggaagcagagttcagctaaagggaatcagtaactctaactggaacagctttcttgtagaagtgtaaaaacagcttcatctctgcctctctccaccccaccccaatttcctagaaagccttgcactattcagctcccttagtgctttttgtcccttcccgaacaatatgcagtagctttaagccattcaagctccattatgcagtatatctgagaagggaaaggaaacaacccatttaaatttgaataaaaccgtgcctatgcgaacagtagcaatttagaatctcttttctgcttttaaaataatttatatttaaaaattgcactttagctttttgatccctttgtatttctcttattctctttctaacctcttctctgtcctcaaacttgcctttgctctcctttacaataccccccacccctcctccaaggctctgagcggcatcatttaaaatactttacagatatttgcaccaggtacatttatgtgcgtccattggtagcacagctgagacctgtgtctcacatcagcctaggtgaagcctactacaagaatgccaaggagaagagccagtacactatatggtttatactctttatccctttattcatagcatgttttttaaaaatgttatattatgcaacagatgtgaggcagcagctaagctatacttaagaattttctctcaccttccaaaccaaagtgtcctgaataagccaggagacttattcttttgtgcaccctggtgcacatctgactgttgtcctagccatagactctctgaggccactgaaagaacagtggccctatcgatttcattcctaggtctcaaaaatacaatgttgccttgtaacataattagggacagcacctctatttcacaattataatctaaggtaggataagacgacacagcagcaataaacttacaagtaaaattcaataccaaaacaaacacaaagaaatttaaaaaacaaaaaacctagctcatcatgttgtgaaaatgaaaaagtgaatgtccattcaaaatattttactatttcttgtggagtttttcagtgatgtaatgcttgtagccaaattgcttaaagagtgtttatatatttttttccttataaattgtctattttttaaaaaagctatttaaccacagctgaagtggggggtaaggccaaattgccaacacttgttaaaagattaatactcttaagtggcactctgatacctttccaacttgtcatcagaaaggaatcaataattaccaactgttgtatttagaccaacttacaatatctagctcattagaagccaggatctagaaagctccttctaagccatttaagatattcttacattgagcttcatattatagaactttataggattggatattttacaatagaataatttagcctcaggactgagaatgtggaagctgaataaattagctttaaatacatcattaaaatcttatgcacaataagctcattagattctagttttctcctttagaataccaatgccacagacactacaggagataatgaaaggtatcagttgtgttgagtggagggagtttaagagaaaggacccttcccaaccagcagccagtagaaaatacaacctactcacctttttcccttctaagttctgctaaatcacatctgcctcatagagaaaggaatgttgcctttgagaactgtcttggagaacagataagcttgaaatgttctctctagagaggacatagggtttgggatcctctgaaaaggcccagaaaaatagctcagttcaaatacaatgttctaggacaattggaatataaatattgtccaaaaatataattaaaagaaaaaagtttagcactgtgtaaagtaagtgttaactgaggaagtcccaaaaaggtgctgtcactttaagttctggacttggggttctttgtatttgtaaacagcaaagcatttgtgtttgtttgtctatttgtaaagcaaccaccttccttattggaaggagaaaaaaaggggtacatacatgtaaatacttgctgcagcatttaatatgtttaattttgtgttaagctttttgttgcatcgtgaacacatttattgttaccaatggacaatgagttcattaagactgttcaactaggtcagatttttacatctctttctagcaagaagagacaagattttgtgcatttgtacaaatgttaatatcactgcaattccaatataataaagcactcaaatgcaaataat

SEQ ID NO: 3615 - protein, 369 aa, Homo sapiens
MFCTSGGNSASVMSMRPVPGSLSSLLHLHNRQRQPMPASMPGTLPNPTMPGSSAVLMPMERQMSVNSSIMGMQGPNLSNPCASPQVQPMHSEAKMRLKAALTHHPAAMSNGNMNTMGHMMEMMGSRQDQTPHHHMHSHPHQHQTLPPHHPYPHQHQHPAHHPHPQPHHQQNHPHHHSHSHLHAHPAHHQTSPHPPLHTGNQAQVSPATQQMQPTQTIQPPQPTGGRRRRVVDEDPDERRRKFLERNRAAATRCRQKRKVWVMSLEKKAEELTQTNMQLQNEVSMLKNEVAQLKQLLLTHKDCPITAMQKESQGYLSPESSPPASPVPACSQQQVIQHNTITTSSSVSEVVGSSTLSQLTTHRTDLNPIL

SEQ ID NO: 3616 - DNA, 643 bp, Homo sapiens
attccagagctctcatgttctgcacctcaggagggaattcagcctcagtgatgtccatgaggcctgtcccaggctctctatcttctctgctacatctccacaacagacagagacagcccatgccagcctccatgcctgggaccctgcccaaccctacaatgccaggatcttccgccgtcttgatgccaatggagcgacaaatgtcagtgaactccagcatcatggggatgcaaggtccaaatctcagcaacccctgtgcttctccccaggtccagccaatgcattcagaagccaaaatggtaagtaacagttataatcaccctttcattattctgtgactttttcttttgaattttactctgactccaaaaccttagttcagctaggtagagggctccatctttgttttggtgaatgaaaggcagtgcagagactgcctctctttttgaggatgtttgttacagagccttggtgtcagataatcatgtaacaagcactggattggcaagtggtattaatgaaaggaacatttaggagttttggtagatccatacaagttggggtaggatatacccaagcgtgtatatatttgctcagcatgtgaaataataaaaataatacaaaactactcattcttcaaggt

SEQ ID NO: 3617 - protein, 107 aa, Homo sapiens
MFCTSGGNSASVMSMRPVPGSLSSLLHLHNRQRQPMPASMPGTLPNPTMPGSSAVLMPMERQMSVNSSIMGMQGPNLSNPCASPQVQPMHSEAKMVSNSYNHPFIIL

SEQ ID NO: 3618 - DNA, 583 bp, Homo sapiens
attccagagctctcatgttctgcacctcaggagggaattcagcctcagtgatgtccatgaggcctgtcccaggctctctatcttctctgctacatctccacaacagacagagacagcccatgccagcctccatgcctgggaccctgcccaaccctacaatgccaggatcttccgccgtcttgatgccaatggagcgacaaatgtcagtgaactccagcatcatggggatgcaaggtccaaatctcagcaacccctgtgcttctccccaggtccagccaatgcattcagaagccaaaatgttgttgtgaaatacccgccatgccaagacagagttcttccttctggatgcatttgcaatcttacaaagagcttctggtgactcagaaaatcccatgcgtccattttccaaattggatgttatgtgattaaaaataaatgtaaatcacacagagactttggtgtgcttccgaaaattcccatgtcaggagttggcatgtatcaaccatgtgtaggtgtgtgtgtgctcactaatactgtgtgagcatttaggaccttatttgagaagttctttcctggaagaaga

SEQ ID NO: 3619 - protein, 97 aa, Homo sapiens
MFCTSGGNSASVMSMRPVPGSLSSLLHLHNRQRQPMPASMPGTLPNPTMPGSSAVLMPMERQMSVNSSIMGMQGPNLSNPCASPQVQPMHSEAKMLL

SEQ ID NO: 3620 - DNA, 2913 bp, Homo sapiens
gagcctttgcaaatgcatgcagagcatggaaatgacccagctgccctgctgttgaaacagaatcctatttggaaggcagacatgtggcccatctctgtagccatcactgagaaatctggattttcaagggcctttctctctgttgcccaggctggagtttagcgactcaatcatggctcactgactgcagcatcgacctccggggctcaagtgatcctttcatctcagcctcctcagtagctgagactacaggctcctccagatctgcctcctgctgaccttgtacccagctgcagcgacaccgagctcctcacagcttcccaaagtgggctggcccctctcacgacagggtcatcgcacaggctccctctgtgggggaacacaacgggagtcatttcaacaccactttcttcaggaagcctattctgatccttggtactccaagcagctgttgtcaatgcctaccccaggctgctaggaaatgctttccactcggaactgagacctaaaactggaaactaggctgcaggaccacctgggtacgtgtgaattacagaggttcatgcatttccaaatgggggtgtcattttagaactggggcgtaagatgatgagcaacagaaaagacaacgccgagcccccgggtatgagctcagaactctttacatgtttgatgctccaaatggtctagggcaggggggcttcagagccttggcagcagaacgtggtcgcgtagatgtttatctgattttctgttgcgctgctgctcaaccgccactacggaagtgcacactgccaccttatggacgtcttgagaagttacacttacacgttattaattatattaaataaaattcaaatgtaataaataatgtcaggggtagtttttataaacatttgcaatgaaaattcatatgaggacttcagacagaatatattcaaatgaagagttgatttcgatttcactgatgaaattaaataacaggattaagatgaaattctcagctattttagcattttagtgtttttctgctactgagttgtgggaattccttatatgtttcggcttgtcataaatatggttgacaaatattttatctgattttatacgttttttcactctattgattatttccttggttgtacagaaactttttaattttatgtagtcccacttgtctattttttacttttgttgactgtgcttttggtgttgtattcaagaaatcactgccaagatcattatcatgaagctttctccctatgatttcttctagaagttttatagttggggtattacatttatttatttatttaaagacaagatattgttctgtcactcagctgcagtgcagtggcacaatcaaagctcactgcagccccaacctcctgggctcaagtgatcctcccatctcagcctcccaagtaactgcaggtaactacaagtgtgcactaccacaccaggctattttttgtggagacagggtttctctgtgtttcctgggctgatttcgaactcttgaactcaagtgatccttccaccttgccctcctaaagtgctgggattacaggtgtgagcctccaaccctggccaggtcttacatgtaagtcattaatctattttgagttgaatgttgtgtgtggtgtaatatacacatgtgaatatccagttttcctaacatttgttgaagaaactactgtgtattcttagcatctttgtcaaagatcaattaatcatatgtgtgtgtgtttatttctgcactctccattctattccattgatttatgtgtttatctttaagccaatacaatacagttttaattgcagtagctttgtaatatattttgaaatcaggaactatgatgcctccagctttctttttttttctagagattgttttggttcttctggatcttttatagtttaatatgaatcttaggattgtttttactatgtccgtaaaaaatgccattgggattttgatagaaattgcatttaaactgcagatcactttgaagaatatgattatttcaacaatattaagtcttccaatccatgaacatgggattttgtgaatattcttgtatggttttagcctaattagaatgtttctaatgttttgattttacatacaatgttagctgtaagtttcagacggaattatttctcaactcttagtttgttcagagctttctaaaattattattaatgaaagttaatcatttttggcatagacttggtttttaactttgattaagtccagttattacttttaaaattttatgatgactctttgtgttctaagaaatatttgattaccatcccaagattgtaaaaatattctatacttttggaaaagctttatagttgtaaacttttatgtgtaagtctgtgatccatctgaactacattgcatattttatgaaggtgaaggttcattattttccatatggagtttaaatttttccagcatcatttatttgaaagaatttcctttccctgttgaactaccttgatgtctttggagaaaataaattgacagtatgtgtgggactctttctgaactctgtatttttttcattgatctatacatggcattaccacaccattttaattgctgtagtttaatagtaaagtgcacgttttctaccttttttctttctgactcttctgggtacttgacatttccaaatcaattttagaatcagattgtcaagtgcaacaaaaaatggttgggatttttattatgattgcattgaatctatagaataatttcgattaaaagtgacatcttgggccgggtgcagtggctcgcacctgtaatcccagcacttcgggaggccaaggtgggcagatcacaaggtcaagagttcaagaccagcctggccaacatagtgaaaccccaccactgct

SEQ ID NO: 3621 - protein, 49 aa, Homo sapiens
MHAEHGNDPAALLLKQNPIWKADMWPISVAITEKSGFSRAFLSVAQAGV

SEQ ID NO: 3622 - DNA, 529 bp, Homo sapiens
gctgttgaaacagaatcctatttggaaggcagacatgtggcccatctctgtagccatcactgagaaatctggattttcaagggcctttctctctgttgcccaggctggagtttagcgactcaatcatggctcactgactgcagcatcgacctccggggctcaagtgatcctttcatctcagcctcctcagtagctgagactacagatccctagaagactgtggccagcaggtattagcgtcaggagataaacagaactgagagcgtttgtcactagaagacttacattacaagtaatcctatagtgttctgcagactgaagagcgatgaaacgagatggcaattctgatgcctagaagaaatgaagacaaccaaaaatgatggtaagtatgtgagttagtaagttaagaactcttctctctctctctctctctccctcccctcaccacatatgtgtgtatctgtattttctaaaaaacatgacattttaacaaaaattatagcactttattgatgagtttacaagatat

SEQ ID NO: 3623 - protein, 49 aa, Homo sapiens
EIWIFKGLSLCCPGWSLATQSWLTDCSIDLRGSSDPFISASSVAETTDP

SEQ ID NO: 3624 - DNA, 750 bp, Homo sapiens
agggcctttctctctgttgcccaggctggagtttagcgactcaatcatggctcactgactgcagcatcgacctccggggctcaagtgatcctttcatctcagcctcctcagtagctgagactacagataaacagaactgagagcgtttgtcactagaagacttacattacaagtaatcctatagtgttctgcagactgaagagcgatgaaacgagatggcaattctgatgcctagaagaaatgaagacaaccaaaaatgatgtagataaatggcaagcaaaaaacgagaagtccagttacaggcagaagctgacaacattgtgactttgcagccatttagagataaatgtgaacctgtttttctctttagtgttatgatgttttgcgtattattaaagatgaagacttcaaaatactggagcaaagacaagtagtattatcggaaaaagaagcacaagcactgtgcaaggaatatgaaaatgaagactattttaataaacttatagaaaacatgaccagtggtccatctctagcccttgttttattgagagacaatggcttgcaatactggaaacaattactgggaccaagaactgttgaagaagccattgaatattttccagagagtttatgtgcacagtttgcgatggacagtttgccggtcaaccagttgtatggcagcgattcattagaaaccgctgaaagggaaatacagcatttctttcctcttcaaagcactttaggcttgat

SEQ ID NO: 3625 - protein, 78 aa, Homo sapiens
MTSGPSLALVLLRDNGLQYWKQLLGPRTVEEAIEYFPESLCAQFAMDSLPVNQLYGSDSLETAEREIQHFFPLQSTLG

SEQ ID NO: 3626 - DNA, 3426 bp, Homo sapiens
cagtcccgacgcatcccgcccccgctctgtcgctttaagctggtcccgccgccgcgccccgccctcacccctccgcgctccgcggctccccgccgcttctcccgctcctcccttgctcggccctctcctcctcctcccgctcctcctcccgctcctccgcgccgccgccagccccgctgcgcgctctgctcttcgcagctccccggacccgcagccatggccgacatcaagacgggcatcttcgccaagaacgtccagaagcgactcaaccgcgcgcaggaaaaggtcctccaaaagctggggaaagctgatgagacaaaagacgaacagttcgaagaatatgtccagaacttcaaacggcaagaagcagagggtaccagacttcagcgagaactccgaggatatttagcagcaatcaaaggcatgcaggaggcctccatgaagctcacagagtcgctgcatgaagtctatgagcctgactggtatgggcgggaagatgtgaaaatggttggtgagaaatgtgatgtgctgtgggaagacttccatcaaaaactcgtggatgggtccttgctaacactggatacctacctggggcaatttcctgacataaagaatcgcatcgccaagcgcagcaggaagctagtggactatgacagtgcccgccaccatctggaagctctgcagagctccaagaggaaggatgagagtcgaatctctaaggcagaagaagaatttcagaaagcacagaaagtgtttgaagagtttaacgttgacttacaagaagagttaccatcattatggtcaagacgagttggattttatgttaatactttcaaaaacgtctccagccttgaagccaagtttcataaggaaattgcggtgctttgccacaaactgtatgaagtgatgacaaaactgggtgaccagcacgccgacaaggccttcaccatccaaggagcgcccagtgattcgggtcctctccgcattgcaaagacaccatcaccgcctgaggagccttcacccctcccgagcccgacagcaagtccaaatcatacattagcacctgcgtctcccgcaccagcacggcctcggtcaccttcacagacaaggaaagggcctcctgtcccacctctacctaaagtcaccccgacaaaggaactgcagcaggagaacatcatcagtttctttgaggacaactttgttccagaaatcagtgtgacaacaccttcccagaatgaagtccctgaggtgaagaaagaggagactttgctggatctggactttgatcctttcaagcccgaggtgacacctgcaggttctgctggagtgacccactcacccatgtctcagacattgccctgggacctatggacgacaagcactgatttggtacagccggcttctggtggttcatttaatggattcacacagccccaggatacttcattattcacaatgcagacagaccagagtatgatctgcaacttggctgaatctgaacaggctccacccacagagccaaaagcagaggagcctctggctgctgtcacacctgccgttggtctggaccttggaatggacactcgggctgaggagccagtggaggaggcagtgatcatacctggagctgatgctgatgcagctgttggaaccttggtgtcagcagctgagggggccccaggagaggaagcagaggcggagaaggccactgtccctgccggggaaggagtaagtttagaggaggccaaaattggaactgaaaccactgagggtgcagagagtgcccaacctgaagcagaggagctcgaagcaacagtgcctcaggagaaggtcattccttcggtggtcatagagcctgcctccaaccatgaagaggaaggagaaaacgaaataactataggtgcagagcccaaggagaccaccgaggacgcggctcctccgggccccaccagcgagacaccggagctggctacggagcagaagcctatccaggaccctcagcccacgccttctgcaccagccatgggggctgctgaccagctagcatctgcaagggaggcctctcaggaattgcctcctggctttctctacaaggtggaaacactgcatgattttgaggcagcaaattctgatgaacttaccttacaaaggggtgatgtggtgctggtggtcccctcagattcagaagctgatcaggatgcaggctggctggtgggagtgaaggaatcagactggcttcagtacagagaccttgccacctacaaaggcctctttccagagaacttcacccgacgcttagattagggcaacaagtactgcaagaaggagctcagttacggggtttttaaaccttcatgaaaacctgaagagttcacttttgttattatgctcttaatgatttacagactgatgccagacaaaccttgggaagatgtatcaatggagcatgtgtgcaaaaaaatgtaagaggaaaaaaagtaaattaaggaaaaaatcctcactcattcccatgttgtcaataacaggtttgtttgtgctttgtccaagctgtggagactcttgtacttgatcccctcccaccaattctaaagtagctttctccagatcagactttaatttctctgcatcaggtgtatcgtattgagtggctgccctgcagaagatgtgatgaattatcctgtagtacaagattatcttattcccctgcccaggtgtgagcacgtgctctcgctccctttcaggtttactatgtttaaaactaaactgctgcaaaagttctcaatgttcttttccaacacatctatatatatatggacacacagtcacgcaagctagttcccatgactcctggatctatgtgtatgcagaaggctacatatacatagttgcttctttcctttccattgtagctctttgcctctcaattgtcattgatacatgcattgctcttattctgtctggcattacaattgcagttttgcctaatggcaaaaccagccatcccattggcaaaagagtcaacagtatctgtgtttgtactgtgcagttttcaggatgagatgacagatagcacgactacactgaggcaccctcagagaaggcagggcctgatttatctagctgtccagccgctgtggctggaggtaggctagttgggatgggcagctaagcagtcttctcttctgcctttatgagattgggtagaaagatggggcatattcatctacccccaaaagaacactataaaaacagctcctctatatttccacctctttctatttatgcaactcatcttcacagattgttctaaagtaaaatagatggtgtatgctgtatccacaaatcatctgtaacaattatgttttcagtgctgtgtcattccaaataaacctttggtaatcttcaacgattaccctaattcctttt

SEQ ID NO: 3627 - protein, 695 aa, Homo sapiens; identical to SEQ ID NO: 409

SEQ ID NO: 3628 - DNA, 3300 bp, Homo sapiens
cagtcccgacgcatcccgcccccgctctgtcgctttaagctggtcccgccgccgcgccccgccctcacccctccgcgctccgcggctccccgccgcttctcccgctcctcccttgctcggccctctcctcctcctcccgctcctcctcccgctcctccgcgccgccgccagccccgctgcgcgctctgctcttcgcagctccccggacccgcagccatggccgacatcaagacgggcatcttcgccaagaacgtccagaagcgactcaaccgcgcgcaggaaaaggtcctccaaaagctggggaaagctgatgagacaaaagacgaacagttcgaagaatatgtccagaacttcaaacggcaagaagcagagggtaccagacttcagcgagaactccgaggatatttagcagcaatcaaaggcatgcaggaggcctccatgaagctcacagagtcgctgcatgaagtctatgagcctgactggtatgggcgggaagatgtgaaaatggttggtgagaaatgtgatgtgctgtgggaagacttccatcaaaaactcgtggatgggtccttgctaacactggatacctacctggggcaatttcctgacataaagaatcgcatcgccaagcgcagcaggaagctagtggactatgacagtgcccgccaccatctggaagctctgcagagctccaagaggaaggatgagagtcgaatctctaaggcagaagaagaatttcagaaagcacagaaagtgtttgaagagtttaacgttgacttacaagaagagttaccatcattatggtcaagacgagttggattttatgttaatactttcaaaaacgtctccagccttgaagccaagtttcataaggaaattgcggtgctttgccacaaactgtatgaagtgatgacaaaactgggtgaccagcacgccgacaaggccttcaccatccaaggagcgcccagtgattcgggtcctctccgcattgcaaagacaccatcaccgcctgaggagccttcacccctcccgagcccgacagcaagtccaaatcatacattagcacctgcgtctcccgcaccagcacggcctcggtcaccttcacagacaaggaaagggcctcctgtcccacctctacctaaagtcaccccgacaaaggaactgcagcaggagaacatcatcagtttctttgaggacaactttgttccagaaatcagtgtgacaacaccttcccagaatgaagtccctgaggtgaagaaagaggagactttgctggatctggactttgatcctttcaagcccgaggtgacacctgcaggttctgctggagtgacccactcacccatgtctcagacattgccctgggacctatggacgacaagcactgatttggtacagccggcttctggtggttcatttaatggattcacacagccccaggatacttcattattcacaatgcagacagaccagagtatgatctgcaacttgatcatacctggagctgatgctgatgcagctgttggaaccttggtgtcagcagctgagggggccccaggagaggaagcagaggcggagaaggccactgtccctgccggggaaggagtaagtttagaggaggccaaaattggaactgaaaccactgagggtgcagagagtgcccaacctgaagcagaggagctcgaagcaacagtgcctcaggagaaggtcattccttcggtggtcatagagcctgcctccaaccatgaagaggaaggagaaaacgaaataactataggtgcagagcccaaggagaccaccgaggacgcggctcctccgggccccaccagcgagacaccggagctggctacggagcagaagcctatccaggaccctcagcccacgccttctgcaccagccatgggggctgctgaccagctagcatctgcaagggaggcctctcaggaattgcctcctggctttctctacaaggtggaaacactgcatgattttgaggcagcaaattctgatgaacttaccttacaaaggggtgatgtggtgctggtggtcccctcagattcagaagctgatcaggatgcaggctggctggtgggagtgaaggaatcagactggcttcagtacagagaccttgccacctacaaaggcctctttccagagaacttcacccgacgcttagattagggcaacaagtactgcaagaaggagctcagttacggggtttttaaaccttcatgaaaacctgaagagttcacttttgttattatgctcttaatgatttacagactgatgccagacaaaccttgggaagatgtatcaatggagcatgtgtgcaaaaaaatgtaagaggaaaaaaagtaaattaaggaaaaaatcctcactcattcccatgttgtcaataacaggtttgtttgtgctttgtccaagctgtggagactcttgtacttgatcccctcccaccaattctaaagtagctttctccagatcagactttaatttctctgcatcaggtgtatcgtattgagtggctgccctgcagaagatgtgatgaattatcctgtagtacaagattatcttattcccctgcccaggtgtgagcacgtgctctcgctccctttcaggtttactatgtttaaaactaaactgctgcaaaagttctcaatgttcttttccaacacatctatatatatatggacacacagtcacgcaagctagttcccatgactcctggatctatgtgtatgcagaaggctacatatacatagttgcttctttcctttccattgtagctctttgcctctcaattgtcattgatacatgcattgctcttattctgtctggcattacaattgcagttttgcctaatggcaaaaccagccatcccattggcaaaagagtcaacagtatctgtgtttgtactgtgcagttttcaggatgagatgacagatagcacgactacactgaggcaccctcagagaaggcagggcctgatttatctagctgtccagccgctgtggctggaggtaggctagttgggatgggcagctaagcagtcttctcttctgcctttatgagattgggtagaaagatggggcatattcatctacccccaaaagaacactataaaaacagctcctctatatttccacctctttctatttatgcaactcatcttcacagattgttctaaagtaaaatagatggtgtatgctgtatccacaaatcatctgtaacaattatgttttcagtgctgtgtcattccaaataaacctttggtaatcttcaacgattaccctaattcctttt

SEQ ID NO: 3629 - protein, 653 aa, Homo sapiens; identical to SEQ ID NO: 411

SEQ ID NO: 3630 - DNA, 2057 bp, Homo sapiens
gaacataacgtctctaatcatgcatattcacgcagtgaggtagataatgtgaaagggctttgaacaatgtagtaagggaaagagactaggatactgacttcccattttcccaattcttgcttcagaactgctctcctaggccccaagcccctacctctgttagccccttgatcaatctttgcctgtccaggggcaaaactacgtaatatcccaagaacagggactaatattacagccccatttcttttctttgctatttcccatgatcactcttaaaccaagaaacagatcttttctctgattggtggggcctcctcactagaacaaaggggagaatgtacgtttcataatagggattctgtgatgaaatgacctaaggagataaatgtacatttcataataggcattctgtgatggaatgtcctgaggggataaaagctggagtcggtctcagcacatctcagttactcattttgactcgtttggacaagtgagttactacagcgctgatttggaaaaatgactagaaagctacctccaatttctcggcctcaaccccagcctcattttctttctgttccttcccgctctcgtcttccagccctccttccccccgttactcctcaaacttcctgccgtcagcctcctctccagagccgtccaagttgttcgattttctgccctacccgtttgcccaagctgactaatgtcgccccttcccagtaccctacctcaaggaacttcctgcccggcccttcctctgttactaccagggcgtccgtgtgccgccgccctgttcgtcaggcacccctttcccggtgtccccctatctttccccctcaccctcctcatagcccttctttctagtcccctgtactctagtccccactccctatccagccacccccaaccagacctgacggcttgcaaatctcaccctggagaaatggtttccctcctactggggcagttcccaggcggtccagaattgccaggacttgtggattcccagcagcgacctggcagacacggggaatccaagaccatggcaagcgaacattcggcctggcctgcgcctttcctctcctgcctgggcagccagactgcacaagcctctgcatttgaactggcttctccgtggaacttggtttgtaaccacggagcaaactgcaggaccaggggcagagaagttgatggcgagcctttttcctggcagtatccagaggcggttctagtaaagaggctggattccgagaggccagagcggtatcatacgaacgccgttgcctggagacggagtggggtgccattgcctagagactgcagaaggcccgcagccaagcgagtggtaagaggacgccgagagagccccggacccacggagcagccccaaggctatggcgggacacccgaaagagagggtggtcacagatgaggtccatcagaaccagatcttgcgggagctgtacctcaaagagttacgaacccagaaactccacacgcagtaccatgtgaatcccctgcgcaaggttcacaggattacgaggaagcctatgtcttggcatgataacctggaggaacccgcagacgccaggtttctgaatctcattcaccatgctgcccaggggccaacgaagaagtacccggaggcacagactgaaaaccaggaaattgggtgggactcagaagccttggtcgacccagaacgccgtgaccacaggatgaaccacttcagggtctacagtgacatcactctgtacaaagctaaaatgtggagcttgggagaagatgatcgccacaagtagcatctcagctgtggagtcaggccctggatttaatgccctaaatatccactgcctagaagactaaacattattttaaccccccgtcccccatccataattcatggataatggcaaaaattaggaagcataaaaaatatgcggaagaaggaaataaaaattgcccattatctcaccatatggaagtgactaatgttagcattttaaaccatttgtttttaaaattaataataaattgcatatatttattgtgta

SEQ ID NO: 3631 - protein, 242 aa, Homo sapiens
MSPLPSTLPQGTSCPALPLLLPGRPCAAALFVRHPFPGVPLSFPLTLLIALLSSPLYSSPHSLSSHPQPDLTACKSHPGEMVSLLLGQFPGGPELPGLVDSQQRPGRHGESKTMASEHSAWPAPFLSCLGSQTAQASAFELASPWNLVCNHGANCRTRGREVDGEPFSWQYPEAVLVKRLDSERPERYHTNAVAWRRSGVPLPRDCRRPAAKRVVRGRRESPGPTEQPQGYGGTPEREGGHR

SEQ ID NO: 3632 - DNA, 3642 bp, Homo sapiens
tcgcatagcaacatgattataatacctgttttgtgtctgatcataccacccctcaggaatgcttttgtaaataagccattctctaaaggcaccttattgctgaaaattaaactgcaactcgactttcagtcgggattggtttaaaatgatcttgcttgttgcattaagttctcctcctttctctgccctcctcgccagatgcagctaagcccttcagcgtggtggtcttccattgccggcacatgttccacaaggagtgcctgcccatgcccagcatgaactctgctgcacagttctgcaacatctgcagtgctaagaaccgtggaccaggaagtgcaattttggagatgaaaaaatagctcatttctccttgtcagtctccttgtcaccactctttttgagactgtttttgcaacaacaaaagcatttgttgacactcgtgctgttaagagatttgtttatgtttatattatactcaaaaacaatttcttcatctattcctgtactaatggtttctctttgcagttcacagagaatttggggctctcttcatgccttgaaattttggggtccatagtgaatattttgttatttatttgtttggctcattctttatatagtaatggaaacataagtctaggagttagaaatgaattttttagaccttagtaaaaccatttaaccataaaatggacaactgagaattctcccagctgcctgaaagcgtcgccaactgtggttatcctgcaagctgctacctgcaacttggacgttgtttccacgtgctctgctggctacgattcttgcattctgggtttggcttttttctgtgtcatcaactatggttatcctctaaataggcatttaatgaaacattgtacaaattgtcactcatttgatgacacctgggaataacattagcaggctgatgtcctgcaccattatgtttactaatcacatgttctgtgtgctgtgacgactgtcaaagagtatctggccatggcggacactcagcatttgttgattgaataaatgttagctcttctcattgtgaaggactcacttttactgggataaacaaatgcagttaagaattctggcacccttgtaaggaagaaaagagagttcaacaccttcgagtctgagcgcttgtggctagagtttgccaggagggaggaaaccagtgaccctgaaaactgagggtgcctcaggagcagtgggaccacctgatgctgaaggacggactaatgatgtttcctcttgccttctctggtgcctccattgccctcatggaacagagcatatcatagagggagaaaagtcaaacttgtaattgtgtcttacagttactggcttcatcttccttgggatatatggtcatcctctaatgagtgtaaaagtgcgcaaaacacatccttattgttcctgatctcttagtcccataaatgggaacaaatacagctttctgcttctttctttttggggaaaggacagggtgctagtgagtactgacagcatgccagctaccgaagtcacccagccattcccatgagcagcagttcatttaattgtcacagcgtcgccaggaagaagatctgataaacctaggtttacagataaagaaagcaaaatgtagagatgttgttgaggtcacagaggtgactgcctaacttcagagcagggcttctgatccctttaagaaattacagggccagccgggcatggtggctcacgcccgtaatcccagggctttgggaggccttggcaggtggatcacctgagatcgcacgttcgagaccagcctgaccaacatggagaaaccccatctctactaaaaacacaaattagccaggcgtggtggtacatgcctgtaatcccagctactcaggaggctgaggcaggagaatcacttgaccccaggagacgtaggttgtggtgagctgagatcgcgccattgcactccagcctgggcaacaagagcaaaactccgtctcaaaaaagaaaagaaaagaaaagaaatcatagggccaagttcaaaggaaatgcacagaacatatcttcacattagagttaagaattctctagcaaacaacagatttttttgttgttgttagtcacaaatacttagaactggaaggctctttgttattattgaatgtacccctcagccttctcagcatttccttatcccaagactagtgtgctttctgctacactgctagttttcagttttgttcttacccaattgttttttcttttcaacattaccaatttacagattcagtttattacatttacattaatcctcacttatgatttgagcaagctcatttccagaaaagtttactttaagatcatcaataggatttgctaatttcagtgaagtcattttgcttcaggggtaaattatcctagttaccaagtcctatttggacataaagaaaatcctacttatagaaaaggagaaaataattaaacagtcttcatttttaagtaactgatttaaaaggaaaataataaaatatgttcgtttatcatttcagaaattgctgtaacacactggaaaattcctgaacaatatagattttatcgttaataaaaaacactagctttcgttccttagaatgtcttttcttttgaataaacagtattgggtgatttattaaaggatattcaatcctttttacttttcatcaacctataagggcttaaatatggcaaaataatccaagtgttagtcaattatttttcatgtgtgactagcccaatttaaaatataggtaaaaaggaaacccattcccctcgttttggggaagaacatagttgcaaagtacacacttcataagctattctttttttttttttttttttttttttttttgagatggagtctcgttctgttgccttggctggagtgcagtgacatgatcttggctcactgcaacctccgcctcccaggttcaagtgattctcccgtctcagcttccggagtaggtgggagtacaggcacgcaccaccatgcccagctaattttttgtactttggtagagatgaggtttcaccatgttgcccaagctggtctcgaactcctgagctcaggaatccgcccacctcggccttccgaagtgttaggattacaggcgtaagtcaccatgcccagccaagaaagctattcttgaagtgtaaaacagccaggtgcaaaattattttggagtactttagtttgcttttgtttttagccaaagggatttcatactggtttaattatgttcatccttgagaatttttgagaagtttccaacagatttgtagttcattttgctgttgttacaatgtaaagctatatatagttgacccttgaacaacacaggttggaactgcaaggatccacttatacatggattttcttctgcctctgccacccttgagacggcaagaccaggccctccccttcctcctccttctcagcctactcagtatgaagacgacagagatgaaacacttatgatgatccacttctacttaatgagtagtaaatatattttcttttccttatgattttcttactattttctttagcttgctttattataagaatatagcatataatataaataaaatataaaatatgtgttaatggtc

SEQ ID NO: 3633 - protein, 38 aa, Homo sapiens
MFHKECLPMPSMNSAAQFCNICSAKNRGPGSAILEMKK

SEQ ID NO: 3634 - DNA, 5790 bp, Homo sapiens
gactctcccgtggcgccatggcggaagcagaggagcaggaaactgggtcccttgaagaatctacagatgagtctgaggaagaagagagcgaagaggaacccaagctgaagtatgaaaggctttccaatggggtaactgaaatacttcagaaggatgcagctagctgcatgacagtccatgacaagtttttggcattgggcacacattatggcaaggtttatttacttgatgtccaggggaacatcactcagaagtttgatgtagtgcaggtatttggactgtattctggagaagaatttcacgagacttttgactgtcccattaaaattattgctgtgcacccacatttcgtgagatccagttgcaagcagtttgtgaccggagggaagaagctgctactgtttgaacggtcttggatgaacagatggaagtctgctgttctgcatgaaggggaagggaacataaggagtgtgaagtggagaggccatctgattgcttgggccaataatatgggtgtgaagatttttgacatcatctcaaagcaaagaatcaccaatgtgccccgggatgatataagtcttcgcccagacatgtatccctgcagcctctgctggaaggacaatgtgacactgattattggctgggggacttctgtcaaggtgtgctcagtgaaggaacggcatgccagtgaaatgagggatttgccaagtcgatatgttgaaatagtgtctcagtttgaaactgaattctacatcagtggacttgcacctctctgtgatcagcttgttgtactttcgtatgtaaaggagatttcagaaaaaacggaaagagaatactgtgccaggcctagactggacatcatccagccactttctgagacttgtgaagagatctcttctgatgctttgacagtcagaggctttcaggagaatgaatgtagagattatcatttagaatactctgaaggggaatcacttttttacatcgtgagtccgagagatgttgtagtggccaaggaacgagaccaagatgatcacattgactggctccttgaaaagaagaaatatgaagaagcattgatggcagctgaaattagccaaaaaaatattaaaagacataagattctggatattggcttggcatatataaatcacctggtggagagaggagactatgacatagcagcacgcaaatgccagaaaattcttgggaaaaatgcagcactctgggaatatgaagtttataaatttaaagaaattggacagcttaaggctattagtccttatttgccaagaggtgatccagttctgaaaccactcatctatgaaatgatcttacatgaatttttggagagtgattatgagggttttgccacattgatccgagaatggcctggagatctgtataataattcagtcatagttcaagcagttcgggatcatttgaagaaagatagtcagaacaagactttacttaaaaccctggcagaattgtacacctatgacaagaactatggcaatgctctggaaatatacttaacattaagacataaagacgtttttcagttgatccacaagcataatcttttcagttctatcaaggataaaattgttttattaatggattttgattcagagaaagctgttgacatgcttttggacaatgaagataaaatttcaattaaaaaggtagtggaagaattggaagacagaccagagctacagcatgtgtatttgcataagcttttcaagagagaccaccataaggggcagcgttaccatgaaaaacagatcagtctttatgctgaatatgatcgaccaaacttacttccctttctccgagacagtacccattgcccacttgaaaaggctcttgagatctgtcaacagagaaactttgtagaagagacagtttatcttctgagccgaatgggtaatagccgaagtgccctgaagatgattatggaggaattacatgatgttgataaagcaatcgaatttgccaaggagcaagatgatggagagctgtgggaagatttgattttatattccattgacaaaccaccatttattactggcttgttaaacaacattggcacacatgttgacccaattctactgattcaccgtattaaggaaggaatggagatccccaatttgagagattccttggttaaaattctgcaagactacaatttgcaaattctgcttcgtgaaggctgcaagaagattctcgtagctgactctttgtccttactgaagaaaatgcaccgaactcaaatgaaaggtgttcttgttgatgaggagaacatctgtgagtcgtgcctttcccctattcttccatcagatgcagctaagcccttcagcgtggtggtcttccattgccggcacatgttccacaaggagtgcctgcccatgcccagcatgaactctgctgcacagttctgcaacatctgcagtgctaagaaccgtggaccaggaagtgcaattttggagatgaaaaaatagctcatttctccttgtcagtctccttgtcaccactctttttgagactgtttttgcaacaacaaaagcatttgttgacactcgtgctgttaagagatttgtttatgtttatattatactcaaaaacaatttcttcatctattcctgtactaatggtttctctttgcagttcacagagaatttggggctctcttcatgccttgaaattttggggtccatagtgaatattttgttatttatttgtttggctcattctttatatagtaatggaaacataagtctaggagttagaaatgaattttttagaccttagtaaaaccatttaaccataaaatggacaactgagaattctcccagctgcctgaaagcgtcgccaactgtggttatcctgcaagctgctacctgcaacttggacgttgtttccacgtgctctgctggctacgattcttgcattctgggtttggcttttttctgtgtcatcaactatggttatcctctaaataggcatttaatgaaacattgtacaaattgtcactcatttgatgacacctgggaataacattagcaggctgatgtcctgcaccattatgtttactaatcacatgttctgtgtgctgtgacgactgtcaaagagtatctggccatggcggacactcagcatttgttgattgaataaatgttagctcttctcattgtgaaggactcacttttactgggataaacaaatgcagttaagaattctggcacccttgtaaggaagaaaagagagttcaacaccttcgagtctgagcgcttgtggctagagtttgccaggagggaggaaaccagtgaccctgaaaactgagggtgcctcaggagcagtgggaccacctgatgctgaaggacggactaatgatgtttcctcttgccttctctggtgcctccattgccctcatggaacagagcatatcatagagggagaaaagtcaaacttgtaattgtgtcttacagttactggcttcatcttccttgggatatatggtcatcctctaatgagtgtaaaagtgcgcaaaacacatccttattgttcctgatctcttagtcccataaatgggaacaaatacagctttctgcttctttctttttggggaaaggacagggtgctagtgagtactgacagcatgccagctaccgaagtcacccagccattcccatgagcagcagttcatttaattgtcacagcgtcgccaggaagaagatctgataaacctaggtttacagataaagaaagcaaaatgtagagatgttgttgaggtcacagaggtgactgcctaacttcagagcagggcttctgatccctttaagaaattacagggccagccgggcatggtggctcacgcccgtaatcccagggctttgggaggccttggcaggtggatcacctgagatcgcacgttcgagaccagcctgaccaacatggagaaaccccatctctactaaaaacacaaattagccaggcgtggtggtacatgcctgtaatcccagctactcaggaggctgaggcaggagaatcacttgaccccaggagacgtaggttgtggtgagctgagatcgcgccattgcactccagcctgggcaacaagagcaaaactccgtctcaaaaaagaaaagaaaagaaaagaaatcatagggccaagttcaaaggaaatgcacagaacatatcttcacattagagttaagaattctctagcaaacaacagatttttttgttgttgttagtcacaaatacttagaactggaaggctctttgttattattgaatgtacccctcagccttctcagcatttccttatcccaagactagtgtgctttctgctacactgctagttttcagttttgttcttacccaattgttttttcttttcaacattaccaatttacagattcagtttattacatttacattaatcctcacttatgatttgagcaagctcatttccagaaaagtttactttaagatcatcaataggatttgctaatttcagtgaagtcattttgcttcaggggtaaattatcctagttaccaagtcctatttggacataaagaaaatcctacttatagaaaaggagaaaataattaaacagtcttcatttttaagtaactgatttaaaaggaaaataataaaatatgttcgtttatcatttcagaaattgctgtaacacactggaaaattcctgaacaatatagattttatcgttaataaaaaacactagctttcgttccttagaatgtcttttcttttgaataaacagtattgggtgatttattaaaggatattcaatcctttttacttttcatcaacctataagggcttaaatatggcaaaataatccaagtgttagtcaattatttttcatgtgtgactagcccaatttaaaatataggtaaaaaggaaacccattcccctcgttttggggaagaacatagttgcaaagtacacacttcataagctattctttttttttttttttttttttttttttttgagatggagtctcgttctgttgccttggctggagtgcagtgacatgatcttggctcactgcaacctccgcctcccaggttcaagtgattctcccgtctcagcttccggagtaggtgggagtacaggcacgcaccaccatgcccagctaattttttgtactttggtagagatgaggtttcaccatgttgcccaagctggtctcgaactcctgagctcaggaatccgcccacctcggccttccgaagtgttaggattacaggcgtaagtcaccatgcccagccaagaaagctattcttgaagtgtaaaacagccaggtgcaaaattattttggagtactttagtttgcttttgtttttagccaaagggatttcatactggtttaattatgttcatccttgagaatttttgagaagtttccaacagatttgtagttcattttgctgttgttacaatgtaaagctatatatagttgacccttgaacaacacaggttggaactgcaaggatccacttatacatggattttcttctgcctctgccacccttgagacggcaagaccaggccctccccttcctcctccttctcagcctactcagtatgaagacgacagagatgaaacacttatgatgatccacttctacttaatgagtagtaaatatattttcttttccttatgattttcttactattttctttagcttgctttattataagaatatagcatataatataaataaaatataaaatatgtgttaatggtc

SEQ ID NO: 3635 - protein, 829 aa, Homo sapiens; identical to SEQ ID NO: 416

SEQ ID NO: 3636 - DNA, 1542 bp, Homo sapiens
ttagtaaaaccatttaaccataaaatggacaactgagaattctcccagctgcctgaaagcgtcgccaactgtggttatcctgcaagctgctacctgcaacttggacgttgtttccacgtgctctgctggctacgattcttgcattctgggtttggcttttttctgtgtcatcaactatggttatcctctaaataggcatttaatgaaacattgtacaaattgtcactcatttgatgacacctgggaataacattagcaggctgatgtcctgcaccattatgtttactaatcacatgttctgtgtgctgtgacgactgtcaaagagtatctggccatggcggacactcagcatttgttgattgaataaatgttagctcttctcattgtgaaggactcacttttactgggataaacaaatgcagttaagaattctggcacccttgtaaggaagaaaagagagttcaacaccttcgagtctgagcgcttgtggctagagtttgccaggagggaggaaaccagtgaccctgaaaactgagggtgcctcaggagcagtgggaccacctgatgctgaaggacggactaatgatgtttcctcttgccttctctggtgcctccattgccctcatggaacagagcatatcatagagggagaaaagtcaaacttgtaattgtgtcttacagttactggcttcatcttccttgggatatatggtcatcctctaatgagtgtaaaagtgcgcaaaacacatccttattgttcctgatctcttagtcccataaatgggaacaaatacagctttctgcttctttctttttggggaaaggacagggtgctagtgagtactgacagcatgccagctaccgaagtcacccagccattcccatgagcagcagttcatttaattgtcacagcgtcgccaggaagaagatctgataaacctaggtttacagataaagaaagcaaaatgtagagatgttgttgaggtcacagaggtgactgcctaacttcagagcagggcttctgatccctttaagaaattacagggcgtaagtcaccatgcccagccaagaaagctattcttgaagtgtaaaacagccaggtgcaaaattattttggagtactttagtttgcttttgtttttagccaaagggatttcatactggtttaattatgttcatccttgagaatttttgagaagtttccaacagatttgtagttcattttgctgttgttacaatgtaaagctatatatagttgacccttgaacaacacaggttggaactgcaaggatccacttatacatggattttcttctgcctctgccacccttgagacggcaagaccaggccctccccttcctcctccttctcagcctactcagtatgaagacgacagagatgaaacacttatgatgatccacttctacttaatgagtagtaaatatattttcttttccttatgattttcttactattttctttagcttgctttattataagaatatagcatataatataaataaaatataaaatatgtgttaa

SEQ ID NO: 3637 - protein, 36 aa, Homo sapiens
MDFLLPLPPLRRQDQALPFLLLLSLLSMKTTEMKHL

SEQ ID NO: 3638 - DNA, 986 bp, Homo sapiens
tctcaaaaaagaaaagaaaagaaaagaaatcatagggccaagttcaaaggaaatgcacagaacatatcttcacattagagttaagaattctctagcaaacaacagatttttttgttgttgttagtcacaaatacttagaactggaaggctctttgttattattgaatgtacccctcagccttctcagcatttccttatcccaagactagtgtgctttctgctacactgctagttttcagttttgttcttacccaattgttttttcttttcaacattaccaatttacagattcagtttattacatttacattaatcctcacttatgatttgagcaagctcatttccagaaaagtttactttaagatcatcaataggatttgctaatttcagtgaagtcattttgcttcaggggtaaattatcctagttaccaagtcctatttggacataaagaaaatcctacttatagaaaaggagaaaataattaaacagtcttcatttttaagtaactgatttaaaaggaaaataataaaatatgttcgtttatcatttcagaaattgctgtaacacactggaaaattcctgaacaatatagattttatcgttaataaaaaacactagctttcgttccttagaataatttttgagaagtttccaacagatttgtagttcattttgctgttgttacaatgtaaagctatatatagttgacccttgaacaacacaggttggaactgcaaggatccacttatacatggattttcttctgcctctgccacccttgagacggcaagaccaggccctccccttcctcctccttctcagcctactcagtatgaagacgacagagatgaaacacttatgatgatccacttctacttaatgagtagtaaatatattttcttttccttatgattttcttactattttctttagcttgctttattataagaatatagcatataatataaataaaatataaaatatg

SEQ ID NO: 3639 - protein, 72 aa, Homo sapiens [sequence omitted]

SEQ ID NO: 3640 - DNA, 4908 bp, Homo sapiens
ctcttatttccgggtctgtcaggtgactctcccgtggcgccatggcggaagcagaggagcaggaaactgggtcccttgaagaatctacagatgagtctgaggaagaagagagcgaagaggaacccaagctgaagtatgaaaggctttccaatggggtaactgaaatacttcagaaggatgcagctagctgcatgacagtccatgacaagtttttggcattgggcacacattatggcaaggtttatttacttgatgtccaggggaacatcactcagaagtttgatgtaagtcctgtgaagataaatcagattagcttggatgaaagtggagagcacatgggtgtgtgttcagaggatggcaaggtgcaggtatttggactgtattctggagaagaatttcacgagacttttgactgtcccattaaaattattgctgtgcacccacatttcgtgagatccagttgcaagcagtttgtgaccggagggaagaagctgctactgtttgaacggtcttggatgaacagatggaagtctgctgttctgcatgaaggggaagggaacataaggagtgtgaagtggagaggccatctgattgcttgggccaataatatgggtgtgaagatttttgacatcatctcaaagcaaagaatcaccaatgtgccccgggatgatataagtcttcgcccagacatgtatccctgcagcctctgctggaaggacaatgtgacactgattattggctgggggacttctgtcaaggtgtgctcagtgaaggaacggcatgccagtgaaatgagggatttgccaagtcgatatgttgaaatagtgtctcagtttgaaactgaattctacatcagtggacttgcacctctctgtgatcagcttgttgtactttcgtatgtaaaggagatttcagaaaaaacggaaagagaatactgtgccaggcctagactggacatcatccagccactttctgagacttgtgaagagatctcttctgatgctttgacagtcagaggctttcaggagaatgaatgtagagattatcatttagaatactctgaaggggaatcacttttttacatcgtgagtccgagagatgttgtagtggccaaggaacgagaccaagatgatcacattgactggctccttgaaaagaagaaatatgaagaagcattgatggcagctgaaattagccaaaaaaatattaaaagacataagattctggatattggcttggcatatataaatcacctggtggagagaggagactatgacatagcagcacgcaaatgccagaaaattcttgggaaaaatgcagcactctgggaatatgaagtttataaatttaaagaaattggacagcttaaggctattagtccttatttgccaagaggtgatccagttctgaaaccactcatctatgaaatgatcttacatgaatttttggagagtgattatgagggttttgccacattgatccgagaatggcctggagatctgtataataattcagtcatagttcaagcagttcgggatcatttgaagaaagatagtcagaacaagactttacttaaaaccctggcagaattgtacacctatgacaagaactatggcaatgctctggaaatatacttaacattaagacataaagacgtttttcagttgatccacaagcataatcttttcagttctatcaaggataaaattgttttattaatggattttgattcagagaaagctgttgacatgcttttggacaatgaagataaaatttcaattaaaaaggtagtggaagaattggaagacagaccagagctacagcatgtgtatttgcataagcttttcaagagagaccaccataaggggcagcgttaccatgaaaaacagatcagtctttatgctgaatatgatcgaccaaacttacttccctttctccgagacagtacccattgcccacttgaaaaggctcttgagatctgtcaacagagaaactttgtagaagagacagtttatcttctgagccgaatgggtaatagccgaagtgccctgaagatgattatggaggaattacatgatgttgataaagcaatcgaatttgccaaggagcaagatgatggagagctgtgggaagatttgattttatattccattgacaaaccaccatttattactggcttgttaaacaacattggcacacatgttgacccaattctactgattcaccgtattaaggaaggaatggagatccccaatttgagagattccttggttaaaattctgcaagactacaatttgcaaattctgcttcgtgaaggctgcaagaagattctcgtagctgactctttgtccttactgaagaaaatgcaccgaactcaaatgaaaggtgttcttgttgatgaggagaacatctgtgagtcgtgcctttcccctattcttccatcagatgcagctaagcccttcagcgtggtggtcttccattgccggcacatgttccacaaggagtgcctgcccatgcccagcatgaactctgctgcacagttctgcaacatctgcagtgctaagaaccgtggaccaggaagtgcaattttggagatgaaaaaatagctcatttctccttgtcagtctccttgtcaccactctttttgagactgtttttgcaacaacaaaagcatttgttgacactcgtgctgttaagagatttgtttatgtttatattatactcaaaaacaatttcttcatctattcctgtactaatggtttctctttgcagttcacagagaatttggggctctcttcatgccttgaaattttggggtccatagtgaatattttgttatttatttgtttggctcattctttatatagtaatggaaacataagtctaggagttagaaatgaattttttagaccttagtaaaaccatttaaccataaaatggacaactgagaattctcccagctgcctgaaagcgtcgccaactgtggttatcctgcaagctgctacctgcaacttggacgttgtttccacgtgctctgctggctacgattcttgcattctgggtttggcttttttctgtgtcatcaactatggttatcctctaaataggcatttaatgaaacattgtacaaattgtcactcatttgatgacacctgggaataacattagcaggctgatgtcctgcaccattatgtttactaatcacatgttctgtgtgctgtgacgactgtcaaagagtatctggccatggcggacactcagcatttgttgattgaataaatgttagctcttctcattgtgaaggactcacttttactgggataaacaaatgcagttaagaattctggcacccttgtaaggaagaaaagagagttcaacaccttcgagtctgagcgcttgtggctagagtttgccaggagggaggaaaccagtgaccctgaaaactgagggtgcctcaggagcagtgggaccacctgatgctgaaggacggactaatgatgtttcctcttgccttctctggtgcctccattgccctcatggaacagagcatatcatagagggagaaaagtcaaacttgtaattgtgtcttacagttactggcttcatcttccttgggatatatggtcatcctctaatgagtgtaaaagtgcgcaaaacacatccttattgttcctgatctcttagtcccataaatgggaacaaatacagctttctgcttctttctttttggggaaaggacagggtgctagtgagtactgacagcatgccagctaccgaagtcacccagccattcccatgagcagcagttcatttaattgtcacagcgtcgccaggaagaagatctgataaacctaggtttacagataaagaaagcaaaatgtagagatgttgttgaggtcacagaggtgactgcctaacttcagagcagggcttctgatccctttaagaaattacagggccagccgggcatggtggctcacgcccgtaatcccagggctttgggaggccttggcaggtggatcacctgagatcgcacgttcgagaccagcctgaccaacatggagaaaccccatctctactaaaaacacaaattagccaggcgtggtggtacatgcctgtaatcccagctactcaggaggctgaggcaggagaatcacttgaccccaggagacgtaggttgtggtgagctgagatcgcgccattgcactccagcctgggcaacaagagcaaaactccgtctcaaaaaagaaaagaaaagaaaagaaatcatagggccaagttcaaaggaaatgcacagaacatatcttcacattagagttaagaattctctagcaaacaacagatttttttgttgttgttagtcacaaatacttagaactggaaggctctttgttattattgaatgtacccctcagccttctcagcatttccttatcccaagactagtgtgctttctgctacactgctagttttcagttttgttcttacccaattgttttttcttttcaacattaccaatttacagattcagtttattacatttacattaatcctcacttatgatttgagcaagctcatttccagaaaagtttactttaagatcatcaataggatttgctaatttcagtgaagtcattttgcttcaggggtaaattatcctagttaccaagtcctatttggacataaagaaaatcctacttatagaaaaggagaaaataattaaacagtcttcatttttaagtaactgatttaaaaggaaaataataaaatatgttcgtttatcatttcagaaattgctgtaacacactggaaaattcctgaacaatatagattttatcgttaataaaaaacactagctttcgttccttagaatgtcttttcttttgaataaacagtattgggtgattt

SEQ ID NO: 3641 - protein, 854 aa, Homo sapiens; identical to SEQ ID NO: 414

SEQ ID NO: 3642 - DNA, 2621 bp, Homo sapiens
tcgcatagcaacatgattataatacctgttttgtgtctgatcataccacccctcaggaatgcttttgtaaataagccattctctaaaggcaccttattgctgaaaattaaactgcaactcgactttcagtcgggattggtttaaaatgatcttgcttgttgcattaagttctcctcctttctctgccctcctcgccagatgcagctaagcccttcagcgtggtggtcttccattgccggcacatgttccacaaggagtgcctgcccatgcccagcatgaactctgctgcacagttctgcaacatctgcagtgctaagaaccgtggaccaggaagtgcaattttggagatgaaaaaatagctcatttctccttgtcagtctccttgtcaccactctttttgagactgtttttgcaacaacaaaagcatttgttgacactcgtgctgttaagagatttgtttatgtttatattatactcaaaaacaatttcttcatctattcctgtactaatggtttctctttgcagttcacagagaatttggggctctcttcatgccttgaaattttggggtccatagtgaatattttgttatttatttgtttggctcattctttatatagtaatggaaacataagtctaggagttagaaatgaattttttagaccttagtaaaaccatttaaccataaaatggacaactgagaattctcccagctgcctgaaagcgtcgccaactgtggttatcctgcaagctgctacctgcaacttggacgttgtttccacgtgctctgctggctacgattcttgcattctgggtttggcttttttctgtgtcatcaactatggttatcctctaaataggcatttaatgaaacattgtacaaattgtcactcatttgatgacacctgggaataacattagcaggctgatgtcctgcaccattatgtttactaatcacatgttctgtgtgctgtgacgactgtcaaagagtatctggccatggcggacactcagcatttgttgattgaataaatgttagctcttctcattgtgaaggactcacttttactgggataaacaaatgcagttaagaattctggcacccttgtaaggaagaaaagagagttcaacaccttcgagtctgagcgcttgtggctagagtttgccaggagggaggaaaccagtgaccctgaaaactgagggtgcctcaggagcagtgggaccacctgatgctgaaggacggactaatgatgtttcctcttgccttctctggtgcctccattgccctcatggaacagagcatatcatagagggagaaaagtcaaacttgtaattgtgtcttacagttactggcttcatcttccttgggatatatggtcatcctctaatgagtgtaaaagtgcgcaaaacacatccttattgttcctgatctcttagtcccataaatgggaacaaatacagctttctgcttctttctttttggggaaaggacagggtgctagtgagtactgacagcatgccagctaccgaagtcacccagccattcccatgagcagcagttcatttaattgtcacagcgtcgccaggaagaagatctgataaacctaggtttacagataaagaaagcaaaatgtagagatgttgttgaggtcacagaggtgactgcctaacttcagagcagggcttctgatccctttaagaaattacagggccagccgggcatggtggctcacgcccgtaatcccagggctttgggaggccttggcaggtggatcacctgagatcgcacgttcgagaccagcctgaccaacatggagaaaccccatctctactaaaaacacaaattagccaggcgtggtggtacatgcctgtaatcccagctactcaggaggctgaggcaggagaatcacttgaccccaggagacgtaggttgtggtgagctgagatcgcgccattgcactccagcctgggcaacaagagcaaaactccgtctcaaaaaagaaaagaaaagaaaagaaatcatagggccaagttcaaaggaaatgcacagaacatatcttcacattagagttaagaattctctagcaaacaacagatttttttgttgttgttagtcacaaatacttagaactggaaggctctttgttattattgaatgtacccctcagccttctcagcatttccttatcccaagactagtgtgctttctgctacactgctagttttcagttttgttcttacccaattgttttttcttttcaacattaccaatttacagattcagtttattacatttacattaatcctcacttatgatttgagcaagctcatttccagaaaagtttactttaagatcatcaataggatttgctaatttcagtgaagtcattttgcttcaggggtaaattatcctagttaccaagtcctatttggacataaagaaaatcctacttatagaaaaggagaaaataattaaacagtcttcatttttaagtaactgatttaaaaggaaaataataaaatatgttcgtttatcatttcagaaattgctgtaacacactggaaaattcctgaacaatatagattttatcgttaataaaaaacactagctttcgttcctt

SEQ ID NO: 3643 - protein, 38 aa, Homo sapiens; identical to SEQ ID NO: 3633

SEQ ID NO: 3644 - DNA, 4769 bp, Homo sapiens
gactctcccgtggcgccatggcggaagcagaggagcaggaaactgggtcccttgaagaatctacagatgagtctgaggaagaagagagcgaagaggaacccaagctgaagtatgaaaggctttccaatggggtaactgaaatacttcagaaggatgcagctagctgcatgacagtccatgacaagtttttggcattgggcacacattatggcaaggtttatttacttgatgtccaggggaacatcactcagaagtttgatgtagtgcaggtatttggactgtattctggagaagaatttcacgagacttttgactgtcccattaaaattattgctgtgcacccacatttcgtgagatccagttgcaagcagtttgtgaccggagggaagaagctgctactgtttgaacggtcttggatgaacagatggaagtctgctgttctgcatgaaggggaagggaacataaggagtgtgaagtggagaggccatctgattgcttgggccaataatatgggtgtgaagatttttgacatcatctcaaagcaaagaatcaccaatgtgccccgggatgatataagtcttcgcccagacatgtatccctgcagcctctgctggaaggacaatgtgacactgattattggctgggggacttctgtcaaggtgtgctcagtgaaggaacggcatgccagtgaaatgagggatttgccaagtcgatatgttgaaatagtgtctcagtttgaaactgaattctacatcagtggacttgcacctctctgtgatcagcttgttgtactttcgtatgtaaaggagatttcagaaaaaacggaaagagaatactgtgccaggcctagactggacatcatccagccactttctgagacttgtgaagagatctcttctgatgctttgacagtcagaggctttcaggagaatgaatgtagagattatcatttagaatactctgaaggggaatcacttttttacatcgtgagtccgagagatgttgtagtggccaaggaacgagaccaagatgatcacattgactggctccttgaaaagaagaaatatgaagaagcattgatggcagctgaaattagccaaaaaaatattaaaagacataagattctggatattggcttggcatatataaatcacctggtggagagaggagactatgacatagcagcacgcaaatgccagaaaattcttgggaaaaatgcagcactctgggaatatgaagtttataaatttaaagaaattggacagcttaaggctattagtccttatttgccaagaggtgatccagttctgaaaccactcatctatgaaatgatcttacatgaatttttggagagtgattatgagggttttgccacattgatccgagaatggcctggagatctgtataataattcagtcatagttcaagcagttcgggatcatttgaagaaagatagtcagaacaagactttacttaaaaccctggcagaattgtacacctatgacaagaactatggcaatgctctggaaatatacttaacattaagacataaagacgtttttcagttgatccacaagcataatcttttcagttctatcaaggataaaattgttttattaatggattttgattcagagaaagctgttgacatgcttttggacaatgaagataaaatttcaattaaaaaggtagtggaagaattggaagacagaccagagctacagcatgtgtatttgcataagcttttcaagagagaccaccataaggggcagcgttaccatgaaaaacagatcagtctttatgctgaatatgatcgaccaaacttacttccctttctccgagacagtacccattgcccacttgaaaaggctcttgagatctgtcaacagagaaactttgtagaagagacagtttatcttctgagccgaatgggtaatagccgaagtgccctgaagatgattatggaggaattacatgatgttgataaagcaatcgaatttgccaaggagcaagatgatggagagctgtgggaagatttgattttatattccattgacaaaccaccatttattactggcttgttaaacaacattggcacacatgttgacccaattctactgattcaccgtattaaggaaggaatggagatccccaatttgagagattccttggttaaaattctgcaagactacaatttgcaaattctgcttcgtgaaggctgcaagaagattctcgtagctgactctttgtccttactgaagaaaatgcaccgaactcaaatgaaaggtgttcttgttgatgaggagaacatctgtgagtcgtgcctttcccctattcttccatcagatgcagctaagcccttcagcgtggtggtcttccattgccggcacatgttccacaaggagtgcctgcccatgcccagcatgaactctgctgcacagttctgcaacatctgcagtgctaagaaccgtggaccaggaagtgcaattttggagatgaaaaaatagctcatttctccttgtcagtctccttgtcaccactctttttgagactgtttttgcaacaacaaaagcatttgttgacactcgtgctgttaagagatttgtttatgtttatattatactcaaaaacaatttcttcatctattcctgtactaatggtttctctttgcagttcacagagaatttggggctctcttcatgccttgaaattttggggtccatagtgaatattttgttatttatttgtttggctcattctttatatagtaatggaaacataagtctaggagttagaaatgaattttttagaccttagtaaaaccatttaaccataaaatggacaactgagaattctcccagctgcctgaaagcgtcgccaactgtggttatcctgcaagctgctacctgcaacttggacgttgtttccacgtgctctgctggctacgattcttgcattctgggtttggcttttttctgtgtcatcaactatggttatcctctaaataggcatttaatgaaacattgtacaaattgtcactcatttgatgacacctgggaataacattagcaggctgatgtcctgcaccattatgtttactaatcacatgttctgtgtgctgtgacgactgtcaaagagtatctggccatggcggacactcagcatttgttgattgaataaatgttagctcttctcattgtgaaggactcacttttactgggataaacaaatgcagttaagaattctggcacccttgtaaggaagaaaagagagttcaacaccttcgagtctgagcgcttgtggctagagtttgccaggagggaggaaaccagtgaccctgaaaactgagggtgcctcaggagcagtgggaccacctgatgctgaaggacggactaatgatgtttcctcttgccttctctggtgcctccattgccctcatggaacagagcatatcatagagggagaaaagtcaaacttgtaattgtgtcttacagttactggcttcatcttccttgggatatatggtcatcctctaatgagtgtaaaagtgcgcaaaacacatccttattgttcctgatctcttagtcccataaatgggaacaaatacagctttctgcttctttctttttggggaaaggacagggtgctagtgagtactgacagcatgccagctaccgaagtcacccagccattcccatgagcagcagttcatttaattgtcacagcgtcgccaggaagaagatctgataaacctaggtttacagataaagaaagcaaaatgtagagatgttgttgaggtcacagaggtgactgcctaacttcagagcagggcttctgatccctttaagaaattacagggccagccgggcatggtggctcacgcccgtaatcccagggctttgggaggccttggcaggtggatcacctgagatcgcacgttcgagaccagcctgaccaacatggagaaaccccatctctactaaaaacacaaattagccaggcgtggtggtacatgcctgtaatcccagctactcaggaggctgaggcaggagaatcacttgaccccaggagacgtaggttgtggtgagctgagatcgcgccattgcactccagcctgggcaacaagagcaaaactccgtctcaaaaaagaaaagaaaagaaaagaaatcatagggccaagttcaaaggaaatgcacagaacatatcttcacattagagttaagaattctctagcaaacaacagatttttttgttgttgttagtcacaaatacttagaactggaaggctctttgttattattgaatgtacccctcagccttctcagcatttccttatcccaagactagtgtgctttctgctacactgctagttttcagttttgttcttacccaattgttttttcttttcaacattaccaatttacagattcagtttattacatttacattaatcctcacttatgatttgagcaagctcatttccagaaaagtttactttaagatcatcaataggatttgctaatttcagtgaagtcattttgcttcaggggtaaattatcctagttaccaagtcctatttggacataaagaaaatcctacttatagaaaaggagaaaataattaaacagtcttcatttttaagtaactgatttaaaaggaaaataataaaatatgttcgtttatcatttcagaaattgctgtaacacactggaaaattcctgaacaatatagattttatcgttaataaaaaacactagctttcgttcctt

SEQ ID NO: 3645 - protein, 829 aa, Homo sapiens; identical to SEQ ID NO: 416

SEQ ID NO: 3646 - DNA, 3561 bp, Homo sapiens
ctcttatttccgggtctgtcaggtgactctcccgtggcgccatggcggaagcagaggagcaggaaactgggtcccttgaagaatctacagatgagtctgaggaagaagagagcgaagaggaacccaagctgaagtatgaaaggctttccaatggggtaactgaaatacttcagaaggatgcagctagctgcatgacagtccatgacaagtttttggcattgggcacacattatggcaaggtttatttacttgatgtccaggggaacatcactcagaagtttgatgtaagtcctgtgaagataaatcagattagcttggatgaaagtggagagcacatgggtgtgtgttcagaggatggcaaggtgcaggtatttggactgtattctggagaagaatttcacgagacttttgactgtcccattaaaattattgctgtgcacccacatttcgtgagatccagttgcaagcagtttgtgaccggagggaagaagctgctactgtttgaacggtcttggatgaacagatggaagtctgctgttctgcatgaaggggaagggaacataaggagtgtgaagtggagaggccatctgattgcttgggccaataatatgggtgtgaagatttttgacatcatctcaaagcaaagaatcaccaatgtgccccgggatgatataagtcttcgcccagacatgtatccctgcagcctctgctggaaggacaatgtgacactgattattggctgggggacttctgtcaaggtgtgctcagtgaaggaacggcatgccagtgaaatgagggatttgccaagtcgatatgttgaaatagtgtctcagtttgaaactgaattctacatcagtggacttgcacctctctgtgatcagcttgttgtactttcgtatgtaaaggagatttcagaaaaaacggaaagagaatactgtgccaggcctagactggacatcatccagccactttctgagacttgtgaagagatctcttctgatgctttgacagtcagaggctttcaggagaatgaatgtagagattatcatttagaatactctgaaggggaatcacttttttacatcgtgagtccgagagatgttgtagtggccaaggaacgagaccaagatgatcacattgactggctccttgaaaagaagaaatatgaagaagcattgatggcagctgaaattagccaaaaaaatattaaaagacataagattctggatattggcttggcatatataaatcacctggtggagagaggagactatgacatagcagcacgcaaatgccagaaaattcttgggaaaaatgcagcactctgggaatatgaagtttataaatttaaagaaattggacagcttaaggctattagtccttatttgccaagaggtgatccagttctgaaaccactcatctatgaaatgatcttacatgaatttttggagagtgattatgagggttttgccacattgatccgagaatggcctggagatctgtataataattcagtcatagttcaagcagttcgggatcatttgaagaaagatagtcagaacaagactttacttaaaaccctggcagaattgtacacctatgacaagaactatggcaatgctctggaaatatacttaacattaagacataaagacgtttttcagttgatccacaagcataatcttttcagttctatcaaggataaaattgttttattaatggattttgattcagagaaagctgttgacatgcttttggacaatgaagataaaatttcaattaaaaaggtagtggaagaattggaagacagaccagagctacagcatgtgtatttgcataagcttttcaagagagaccaccataaggggcagcgttaccatgaaaaacagatcagtctttatgctgaatatgatcgaccaaacttacttccctttctccgagacagtacccattgcccacttgaaaaggctcttgagatctgtcaacagagaaactttgtagaagagacagtttatcttctgagccgaatgggtaatagccgaagtgccctgaagatgattatggaggaattacatgatgttgataaagcaatcgaatttgccaaggagcaagatgatggagagctgtgggaagatttgattttatattccattgacaaaccaccatttattactggcttgttaaacaacattggcacacatgttgacccaattctactgattcaccgtattaaggaaggaatggagatccccaatttgagagattccttggttaaaattctgcaagactacaatttgcaaattctgcttcgtgaaggctgcaagaagattctcgtagctgactctttgtccttactgaagaaaatgcaccgaactcaaatgaaaggtgttcttgttgatgaggagaacatctgtgagtcgtgcctttcccctattcttccatcagatgcagctaagcccttcagcgtggtggtcttccattgccggcacatgttccacaaggagtgcctgcccatgcccagcatgaactctgctgcacagttctgcaacatctgcagtgctaagaaccgtggaccaggaagtgcaattttggagatgaaaaaatagctcatttctccttgtcagtctccttgtcaccactctttttgagactgtttttgcaacaacaaaagcatttgttgacactcgtgctgttaagagatttgtttatgtttatattatactcaaaaacaatttcttcatctattcctgtactaatggtttctctttgcagttcacagagaatttggggctctcttcatgccttgaaattttggggtccatagtgaatattttgttatttatttgtttggctcattctttatatagtaatggaaacataagtctaggagttagaaatgaattttttagaccttagtaaaaccatttaaccataaaatggacaactgagaattctcccagctgcctgaaagcgtcgccaactgtggttatcctgcaagctgctacctgcaacttggacgttgtttccacgtgctctgctggctacgattcttgcattctgggtttggcttttttctgtgtcatcaactatggttatcctctaaataggcatttaatgaaacattgtacaaattgtcactcatttgatgacacctgggaataacattagcaggctgatgtcctgcaccattatgtttactaatcacatgttctgtgtgctgtgacgactgtcaaagagtatctggccatggcggacactcagcatttgttgattgaataaatgttagctcttctcattgtgaaggactcacttttactgggataaacaaatgcagttaagaattctggcacccttgtaaggaagaaaagagagttcaacaccttcgagtctgagcgcttgtggctagagtttgccaggagggaggaaaccagtgaccctgaaaactgagggtgcctcaggagcagtgggaccacctgatgctgaaggacggactaatgatgtttcctcttgccttctctggtgcctccattgccctcatggaacagagcatatcatagaggg

SEQ ID NO: 3647 - protein, 854 aa, Homo sapiens; identical to SEQ ID NO: 414

SEQ ID NO: 3648 - DNA, 1053 bp, Homo sapiens
tcgcatagcaacatgattataatacctgttttgtgtctgatcataccacccctcaggaatgcttttgtaaataagccattctctaaaggcaccttattgctgaaaattaaactgcaactcgactttcagtcgggattggtttaaaatgatcttgcttgttgcattaagttctcctcctttctctgccctcctcgccagatgcagctaagcccttcagcgtggtggtcttccattgccggcacatgttccacaaggagtgcctgcccatgcccagcatgaactctgctgcacagttctgcaacatctgcagtgctaagaaccgtggaccaggaagtgcaattttggagatgaaaaaatagctcatttctccttgtcagtctccttgtcaccactctttttgagactgtttttgcaacaacaaaagcatttgttgacactcgtgctgttaagagatttgtttatgtttatattatactcaaaaacaatttcttcatctattcctgtactaatggtttctctttgcagttcacagagaatttggggctctcttcatgccttgaaattttggggtccatagtgaatattttgttatttatttgtttggctcattctttatatagtaatggaaacataagtctaggagttagaaatgaattttttagaccttagtaaaaccatttaaccataaaatggacaactgagaattctcccagctgcctgaaagcgtcgccaactgtggttatcctgcaagctgctacctgcaacttggacgttgtttccacgtgctctgctggctacgattcttgcattctgggtttggcttttttctgtgtcatcaactatggttatcctctaaataggcatttaatgaaacattgtacaaattgtcactcatttgatgacacctgggaataacattagcaggctgatgtcctgcaccattatgtttactaatcacatgttctgtgtgctgtgacgactgtcaaagagtatctggccatggcggacactcagcatttgttgattgaataaatgttagctcttctcattgtg

SEQ ID NO: 3649 - protein, 38 aa, Homo sapiens; identical to SEQ ID NO: 3633

SEQ ID NO: 3650 - DNA, 3201 bp, Homo sapiens
gactctcccgtggcgccatggcggaagcagaggagcaggaaactgggtcccttgaagaatctacagatgagtctgaggaagaagagagcgaagaggaacccaagctgaagtatgaaaggctttccaatggggtaactgaaatacttcagaaggatgcagctagctgcatgacagtccatgacaagtttttggcattgggcacacattatggcaaggtttatttacttgatgtccaggggaacatcactcagaagtttgatgtagtgcaggtatttggactgtattctggagaagaatttcacgagacttttgactgtcccattaaaattattgctgtgcacccacatttcgtgagatccagttgcaagcagtttgtgaccggagggaagaagctgctactgtttgaacggtcttggatgaacagatggaagtctgctgttctgcatgaaggggaagggaacataaggagtgtgaagtggagaggccatctgattgcttgggccaataatatgggtgtgaagatttttgacatcatctcaaagcaaagaatcaccaatgtgccccgggatgatataagtcttcgcccagacatgtatccctgcagcctctgctggaaggacaatgtgacactgattattggctgggggacttctgtcaaggtgtgctcagtgaaggaacggcatgccagtgaaatgagggatttgccaagtcgatatgttgaaatagtgtctcagtttgaaactgaattctacatcagtggacttgcacctctctgtgatcagcttgttgtactttcgtatgtaaaggagatttcagaaaaaacggaaagagaatactgtgccaggcctagactggacatcatccagccactttctgagacttgtgaagagatctcttctgatgctttgacagtcagaggctttcaggagaatgaatgtagagattatcatttagaatactctgaaggggaatcacttttttacatcgtgagtccgagagatgttgtagtggccaaggaacgagaccaagatgatcacattgactggctccttgaaaagaagaaatatgaagaagcattgatggcagctgaaattagccaaaaaaatattaaaagacataagattctggatattggcttggcatatataaatcacctggtggagagaggagactatgacatagcagcacgcaaatgccagaaaattcttgggaaaaatgcagcactctgggaatatgaagtttataaatttaaagaaattggacagcttaaggctattagtccttatttgccaagaggtgatccagttctgaaaccactcatctatgaaatgatcttacatgaatttttggagagtgattatgagggttttgccacattgatccgagaatggcctggagatctgtataataattcagtcatagttcaagcagttcgggatcatttgaagaaagatagtcagaacaagactttacttaaaaccctggcagaattgtacacctatgacaagaactatggcaatgctctggaaatatacttaacattaagacataaagacgtttttcagttgatccacaagcataatcttttcagttctatcaaggataaaattgttttattaatggattttgattcagagaaagctgttgacatgcttttggacaatgaagataaaatttcaattaaaaaggtagtggaagaattggaagacagaccagagctacagcatgtgtatttgcataagcttttcaagagagaccaccataaggggcagcgttaccatgaaaaacagatcagtctttatgctgaatatgatcgaccaaacttacttccctttctccgagacagtacccattgcccacttgaaaaggctcttgagatctgtcaacagagaaactttgtagaagagacagtttatcttctgagccgaatgggtaatagccgaagtgccctgaagatgattatggaggaattacatgatgttgataaagcaatcgaatttgccaaggagcaagatgatggagagctgtgggaagatttgattttatattccattgacaaaccaccatttattactggcttgttaaacaacattggcacacatgttgacccaattctactgattcaccgtattaaggaaggaatggagatccccaatttgagagattccttggttaaaattctgcaagactacaatttgcaaattctgcttcgtgaaggctgcaagaagattctcgtagctgactctttgtccttactgaagaaaatgcaccgaactcaaatgaaaggtgttcttgttgatgaggagaacatctgtgagtcgtgcctttcccctattcttccatcagatgcagctaagcccttcagcgtggtggtcttccattgccggcacatgttccacaaggagtgcctgcccatgcccagcatgaactctgctgcacagttctgcaacatctgcagtgctaagaaccgtggaccaggaagtgcaattttggagatgaaaaaatagctcatttctccttgtcagtctccttgtcaccactctttttgagactgtttttgcaacaacaaaagcatttgttgacactcgtgctgttaagagatttgtttatgtttatattatactcaaaaacaatttcttcatctattcctgtactaatggtttctctttgcagttcacagagaatttggggctctcttcatgccttgaaattttggggtccatagtgaatattttgttatttatttgtttggctcattctttatatagtaatggaaacataagtctaggagttagaaatgaattttttagaccttagtaaaaccatttaaccataaaatggacaactgagaattctcccagctgcctgaaagcgtcgccaactgtggttatcctgcaagctgctacctgcaacttggacgttgtttccacgtgctctgctggctacgattcttgcattctgggtttggcttttttctgtgtcatcaactatggttatcctctaaataggcatttaatgaaacattgtacaaattgtcactcatttgatgacacctgggaataacattagcaggctgatgtcctgcaccattatgtttactaatcacatgttctgtgtgctgtgacgactgtcaaagagtatctggccatggcggacactcagcatttgttgattgaataaatgttagctcttctcattgtg

SEQ ID NO: 3651 - protein, 829 aa, Homo sapiens; identical to SEQ ID NO: 416

SEQ ID NO: 3652 - DNA, 461 bp, Homo sapiens
ttcaatttaatttaattttaatcaatttaaacttaaatagacacatagagcaagtggctgctgtcttggataactcaggtgaggcttcaaactgcaaactcttttgtggtttgagactagcatgttcttaagcattctcatgtgcagaagaaaatgggtaatggttctgtctgaaatcttgaatggtattttaaagtgtgtaagtgaatttccaagtacagaattgattcatggataccttttaataataaattattttaagcagcataaatgcttatcattagtcagactatctttctctaaacattctccttattcagttgtattacagtgttctatttatctgtgaatggcagtcccactcaactataaactatctgtatcttaacacccagaacaaatctagggagatgtgttctttatttgtttgctttgttttatttttaaagaagctgtggaaa

SEQ ID NO: 3653 - protein, 75 aa, Homo sapiens [sequence omitted]

SEQ ID NO: 3654 - DNA, 8237 bp, Homo sapiens
tgcggttctcttgctcgctttctgttctcttgcttactttcaaatgcagacgtgcactacagcgtcaccagggcatttttggtcgaagagagctgaagtaatgagaagacatcatggaggcccagtcccacagctccacgaccactgaaaagaaaaaagttgagaattccatagtgaagtgctccactcgaacagatgtgagcgagaaagccgttgcctccagcaccacttctaatgaggatgaaagtcctggacagacttatcacagagagagaagaaacgcaatcactatgcagccacagaatgtccaggggctcagcaaagtcagtgaggaaccttcaacatcgagtgacgagagggcctcattgatcaagaaagagatccatgggtccctgccacacgtggcggagccctctgtgccgtaccgcgggacggtgtttgccatggaccccaggaatggttacatggagccccactaccaccctcctcatcttttccctgccttccatcctcctgtaccaattgatgccagacatcatgagggccgttaccattacgatccatctccgattcctccattgcatatgacttccgccttatctagtagccctacgtatccggacctgcccttcattaggatctccccacaccggaaccccactgctgcttccgagtctcccttcagccctccacatccctacattaatccctacatggactatatccgctccttgcacagcagcccatcgctctccatgatctcagcaacccgtgggctgagccctacagatgcgccccatgcaggagtcagcccagcagaatactatcatcagatggccctgctaactggccagcgcagcccctatgcagacattattccctcagctgccaccgccggcacgggggccatccacatggaatatcttcatgctatggatagcaccagattctccagccccaggctgtcagccaggccgagccgaaaacgtacactgtccatatcaccactctccgatcatagctttgaccttcagaccatgataaggacgtctcccaactccttggtcacgattctcaataattcccgtagcagctcttcagcaagtggctcctatggtcacttatctgcaagtgcaatcagccctgccttgagcttcacctactcttccgcgcccgtctctctccacatgcatcagcagatcctaagccgacaacagagcttaggttcagcctttggacacagccctccactcatccaccctgccccaacttttccaacacagaggcctattccagggatccctacggttctgaaccccgtccaggtcagctccggcccttctgagtcctcacagaacaagcccacgagtgagtctgcagtgagcagcactggtgacccgatgcacaacaagaggtccaagatcaaacccgatgaagacctccccagcccaggggctcgggggcagcaggaacagcccgaaggaacaacccttgtcaaggaggaaggggacaaagatgaaagcaaacaggagcctgaagtcatctatgagacaaactgccactgggaaggctgcgcgagggagttcgacacccaagagcagcttgtgcaccatataaataacgaccatattcatggagagaagaaggagttcgtgtgcaggtggctggactgctcaagagagcagaaacccttcaaagcccagtatatgttggtagtgcatatgagaagacacacgggcgagaagcctcacaaatgcacttttgaaggttgcacaaaggcctactcgagactagaaaacttgaaaacacacttgagatctcacactggagagaaaccatacgtctgtgagcacgaaggttgcaacaaggctttctcaaatgcctctgatcgcgccaaacaccaaaacagaacgcattccaatgagaaaccatatgtgtgcaaaatcccaggctgcactaagcgttacacagacccaagctccctccggaaacatgtgaagacagtgcatggcccagaggctcatgtcaccaagaagcagcgaggggacatccatcctcggccgccacccccgagagattccggcagccattcacagtccaggtcgcctggccgaccgactcagggagcccttggtgagcagcaggacctcagcaacactacctcaaagcgggaagaatgcctccaggtgaaaaccgtcaaggcagagaagccaatgacatctcagccaagccctggtggtcagtcttcatgcagcagccaacagtcccccatcagcaactattccaacagtgggctcgagcttcctctgaccgatggaggtagtataggagacctcagtgccatcgatgaaaccccaatcatggactcaaccatttccactgcaaccacagcccttgctttgcaagccaggagaaacccggcagggaccaaatggatggagcacgtaaaactagaaaggctaaaacaagtgaatggaatgtttccgcgactgaaccccattctaccccctaaagcccctgcggtctctcctctcataggaaatggcacacagtccaacaacacctgcagcttgggtgggcccatgacgcttctcccgggcagaagcgacctctctggggtggacgtcactatgctgaacatgctcaacagaagggacagcagcgccagcaccatcagctcggcctacctgagcagccgccgctcctcagggatctcgccctgcttctccagccgccgctccagcgaggcgtcacaggccgagggccggccgcagaacgtgagcgtggccgactcctacgaccccatctccaccgacgcctcgcgccgctccagcgaagccagccagagcgacggcctgcccagcctgctcagcctcacgcccgcccagcagtaccgcctcaaggccaagtacgcggctgccacaggagggccgccgccgacgcccctgcccaacatggagaggatgagcctgaagacgcgcctggcgctgctcggggatgccctcgagcctggcgtggccctgcctccagttcatgccccgaggaggtgcagcgacgggggagcccacggctacgggcggcgccacctgcagccgcacgatgcgccgggccacggcgtgaggagggccagcgacccggtgcggacaggctccgagggcctggccctgcctcgtgtgccgcgcttcagcagcctcagcagctgcaaccccccggcgatggccacgtccgcggagaagcgcagtctcgtgcttcagaattacacgcggcccgagggcggccagtcccgaaacttccactcgtccccctgtcctcccagcatcaccgagaacgtcaccctggagtccctgaccatggacgctgatgccaacctgaacgatgaggatttcctgccggacgacgtggtgcagtatttaaattcccagaaccaagcagggtacgagcagcacttccccagcgccctcccggacgacagcaaagtgccccacgggcccggtgactttgacgcgcccgggctgccagacagccacgctggccagcagttccatgccctcgagcagccctgccccgagggcagcaaaaccgacctgcccattcagtggaacgaagtcagctccggaagcgccgacctgtcctcctccaagctcaagtgtgggccgcggcccgctgtgccgcagactcgcgcctttgggttctgcaacggcatggtcgtccacccgcagaaccccttgaggagcgggcctgctgggggctatcagaccctcggggagaacagcaacccctacggtggcccagagcacttgatgctccacaacagccccggaagtggcaccagtggaaacgccttccatgaacagccctgtaaggccccgcagtatgggaactgtctcaacaggcagccagtggcccctggtgcactcgacggtgcctgtggtgccgggattcaagcctcaaagctgaagagcacccccatgcaagggagcgggggccagctgaatttcggcctgccggtagcgccaaatgagtcagctggcagcatggtgaatggcatgcagaaccaggacccagtgggacaggggtacctggctcaccagctcctcggcgacagcatgcagcacccgggggcaggccgccccggtcagcagatgcttgggcagattagtgctacctcacacatcaacatctaccaagggccagagagctgcctgccaggggctcacggcatgggcagccagccgtcaagcttggcagttgtcaggggctaccagccatgtgccagctttgggggcagcaggcgccaggctatgccgagggacagccttgctctgcagtcaggacagctcagtgacacaagtcagacctgcagggtgaatggtatcaagatggagatgaaagggcagccccatccgctgtgctctaatctgcagaattactctggtcagttctatgaccaaaccgtgggcttcagtcagcaagacacgaaagctggttcattctctatttcagacgccagctgcctgctacaggggaccagcgccaaaaactctgagttactttccccaggtgctaatcaggtgacaagcacagtggacagcctcgacagccatgacctggaaggggtacagattgacttcgatgccatcatagacgatggggaccactccagcctgatgtcgggggccctgagcccaagtatcattcagaacctttcccatagctcctcccgcctcaccacgcctcgggcgtccctcccattcccagcgctgtccatgagcaccaccaacatggctatcggggacatgagttctttgctgacctccctagcggaagaaagcaaattccttgcagttatgcaataggctttaggaaaaaaagactgcaaccaacggaaatcaataggagttgaagagattaaactgactttgttttggctgtttttttagttctgtatgtattttagcaatctcatctcacctaactgagatgtgtttcaattatattccttttatggaaaaggactctgaaaaaccctaaagtattctagggagaaactgtcttccatttcagttttgaatcagtattgttacactcaaaccaccctctttttaaaaaaaaaaaaaaaaactgtaagccccgccccctttttagtaaaccgatgtaaatttgtgatgtgcatattcttctttcttttagaagagcagtcaaattaaaggatttgacatgttttgctgttgctcaaaggaaataggagttggtgtgcttgtgaccaaggggttacacttccagcttttaaaattctcctttacatgtgctcagtgttttgttttgtgttttggtttctgttttttattttaattcccacattgggcacaagaatcagaatatggatagctagtttaagaaacttttgtgggtgcactgtagcatagatgacagaatattgatgttccccccatctccaattcagttcagggcattccacagttaaacagaaatgggaacgtggggctcttataaatgaaatgggcgctcacagttttggttttcagctcttcatgtctgtaagtgtgctttgggggaggctatgtctgtatggtcgattctcagttatcacatttgcctctcctcccactaccttcatgaacattcagtgctgtttcgcactgcagttagagagaagggacggacagttggtgacactcagccacattgctacttttatctgttctggtaagaagttagatagatggtagattgaagcaattgggtagaattagttgggggaatatttatgagttgctgtgtttgttgattagttccatctctttcccattttaactgagaattgattatatatagctctaagtatataggtatttaaacaaccccacaagcggctgtatcagtaacatttattaattccactatagtgagggaggatttccattctaaataccttattttgagggatttataaaacttagttgtaaaagagaaagcccacatagtgggaataaattgcttcagccatttttagtatttgagagcactagggaagatgtttagtagctgtgtggatgccttttttcacaccctgtctattgaatgctgcatccattcacgaagttaaatgttacatgcagttagtccttaatgtggactggatctgtacttttgttttggattaaaacatttaaagatttttgaagtgcagctactccccacgtgcatttgatacacataaaagtcatactgtgtgtgcacaaagagtacatggattttccagcatattgctttaaaaaattatataaactgttaaaatattaacacctcaggctacctgctgtattctgtcccattgacccctggaattggatttactgcaagtgattgataattcaattatgtggcttttcccctttaatcttgccatttaaattacagtagaaagacaaaatcaagtaaaataaagtgttagataatagaaagagtgttaagaccagcccacttttctcatgtttatgttctttcatttggaccaagaatctccgcatggaggttgatttgccactggggactttggctaagactattaggtttgctttcaactagatgttcctgagacaagcagagggacactgcaattccccttccatgcctgctgttctcccccatgtaagtcttctttgaaattaacggatgtgtctcctttggaacagccccataacaaaagagaactactgatctgagcataggaaagtagaggctctaccacttttcagttgaaaaagcaagactttctctgtgtttctgaaacaaggcataatgttgtcacagaatcagagatccagtctcacttttccacaaatctccaaatctccagtcttatcttgtgtgctctaatggtttggttcaatccctttccaactcttgttttcaaagcatggggcctgagtgttctccactcctcctaagaaaggagcttgggtggaagggaccatgctgacctcctccatcagagggctcttccagtagtattctcggatgcaacctccatttctcagttaccattatttcctgtatcagctttgtccttcctggagggatgcacagtgatccggcccaccactgttgttgtcttgtgcttctgctctttcctatggtttcaggttattttctgggtttcccctattcttcttttatttctttttttttttatatttgctttcctttctactgcttttagatttgcaggagatgcaagtttcagctcaatgtttggcttctctcaatatggaaatttcagaaggacagaggagaggagggaggaagaagaaagtatactcctccagaatttcagtgatctgttgtggcagtccagtggaaggaaggtcttttgaggtcacttagaagcatctttttgggacatccttttgggatctctgtaggctaggcatctcatatcttgagactcacccccagcctccaagcctctctccatttctctaacctatgcattttagagcgagaggaccgcctcactagtgtcaccatcctgccttttctaaaacatgcaggctcacacattctactcctgcttaatgtctgtgttaaacgttttctaaccatttttgttttatttttctgaaaaagttaacccctcccaactcctcacacattggctcttcctcttgagccacaaagttttgattcttgcgatgtatgtgccttattttatgttaatcttgtcaatgagagggaccagttggtgttgcccaatcagcactccaaggctgtgtgtgcaccagccagagagcgcacggtggtagcagagtcgaggctgtcttgtatcctggtttcatgtgttgttttgaactgataggaggatgttctcttctgacaagttacccttgtgtatcctgcagacatgtaaaataaaatacaagttcatttttttcaccttttttagatttttttaaaaaataaaatgtgtaatcctttttttaaaagaaacacatgtaaatacatttaagtattgtaggcatagcgttcagatgtgactggcccaggcgttcctcggacaagcctgcattccccgtgatcacgcccacctcaagcccaggggctgcagcccagccacagatgaactctacctttgctttcagaaccacttagtccttttgtaacaaagaaaaaaaaatgtttcttacaatgtcaataaaaaattctttgtatggaaa

SEQ ID NO: 3655 - protein, 1580 aa, Homo sapiens; identical to SEQ ID NO: 418

SEQ ID NO: 3656 - DNA, 8209 bp, Homo sapiens; identical to SEQ ID NO: 417

SEQ ID NO: 3657 - protein, 1580 aa, Homo sapiens; identical to SEQ ID NO: 418

SEQ ID NO: 3658 - DNA, 451 bp, Homo sapiens
gcggccgcgcggagcggggagccgccagcctgcgccccgtccgcgggtctatgggaagttcggggacttgacagccgctgccgccgcagggcatttttggtcgaagagagctgaagtaatgagaagacatcatggaggcccagtcccacagctccacgaccactgaaaagaaaaaagttgagaattccatagtgaagtgctccactcgaacagatgtgagcgagaaagccgttgcctccagcaccacttctaatggcaaccatttggaggcccaggccagaggctggaccaggaggattggatgcatccgcgctgtccatccctgctgctgcacaaacgactcagccacagatcctcttggatgggctaccttgaaagggggaagctccaaagaatgcgtacaaacccatacatttacctaggtgcgggatgattgcaagaccactttatt

SEQ ID NO: 3659 - protein, 96 aa, Homo sapiens
MEAQSHSSTTTEKKKVENSIVKCSTRTDVSEKAVASSTTSNGNHLEAQARGWTRRIGCIRAVHPCCCTNDSATDPLGWATLKGGSSKECVQTHTFT

SEQ ID NO: 3660 - DNA, 1767 bp, Homo sapiens
agctgggacccactccgggcttggggacccggcgggcgggagaagcgggggctcccggcgcggcctggaaggagcgagaaagcaaaaggcatttttggtcgaagagagctgaagtaatgagaagacatcatggaggcccagtcccacagctccacgaccactgaaaagaaaaaagttgagaattccatagtgaagtgctccactcgaacagatgtgagcgagaaagccgttgcctccagcaccacttctaatggtgagcagcacagggattaccagcagcccagcctggagtcatttctgtgttctctgcattccttgtgaattgagcgtttgcacctggaccagtgtttgttctaggagacgctaaagaaagcaaatggagcaggggcggggggacggcggggggacatggaatgtagtaatctctattttggcactcaacctacacgttgacttccaaactttctaatttgagatgtaaatgtgataggttatttattatcagaagttcctgttttggcattttggaaatcatcttgactagtctggcaagagttcaaaatgctttgtgttgcatatggatcatctacactactcggaataattagtacaaaagacacaaaagttgtcttgtcaaaattagtgacaggacagcagtctcctccaaccccaactttaagtagtctactttaaaggattttaagaattgttaatgactgaacctcaaggtaatgttagtatctgagatgcaggttttgttgttagcttataaaaatttaatttacttatttgtgttcagagataacacagagccactgtttctgtattctgtgtttttaaagtttaagcaaagtgttgagaggcatttcagttcaagcatggagtgttgaaaataaattccagagcatccctggtacaaacagactgaatatgttaatggtaaccttcacttcctgtccctgctgtttctccattgtgggccactaatgcctttcctttttgtagatttcatagccattcttggcctccctgaatttctctgcttttccatgggcctttaggaagaatgagctggcccgttttcctcgttcctggacactgcctatctgggcacactgatttgtatgagtcaacctgctattcttatattttctatattccaagacaggttttacttgattgatttacaagtttttacatccacctagagagtcagaatctcctttggaaggtaactgcagtccagaacattagactctaagggcatatacttccaagcagcctggccacttctctctgggtccctccatgtctgctgagagcctgtgcttctcacctgcacttcttcacccggtttcatgagtgtgctttgctgactgtactgggtagggaaggagctggctcttaaacctgctggcaaatgacttcagttttaaattgatcctgagggagatatatttacgtctgagttaaaataatgaatttacatatatgtgaaaatatttcctcctttattgatggtatttaaagtcaagactggagcttattttaattgagccagaatatttgcatttttcatccaatgtggttatagaaggcatttctccttagaaatatgttaccttggtttcttttttctggaattggtaaaatttaggcaaatttattatttcagaaatagaatcagtatatgcagtgttggttatttggtaatttttatggtaattctgtcggaataaatgcttcctatgtacttggcttcaggaa

SEQ ID NO: 3661 - protein, 63 aa, Homo sapiens
MEAQSHSSTTTEKKKVENSIVKCSTRTDVSEKAVASSTTSNGEQHRDYQQPSLESFLCSLHSL

SEQ ID NO: 3662 - DNA, 548 bp, Homo sapiens
ctttaggaaactttgtatctcatactctccgcccctcctccagcacgcaaagcctgagaacttagatcttagttaaaagagagcttgtatttatacataaaactttgcaaatcaccattcattctttccacagactttggggaatttcaatgttttgcttttcatcttcctgagagtccagaagcctccccgtcagaagtgtgttaacagcagttcagcccatttcagggtgaaggacagtttgtcatctaactgttttaaccctcttagggagaaagtacatagactgaaaagaatttgactggtgattttcaaaaatattttttactttcatgatctcaaaagattaaagattccagagaaggtggggagagaacttcaaaagtttgcctcacaactcttttggatcaaagggattttattttcctggcactgaagaactaaaagatacataaaacggcacaatattttatagggttccttatggatgggctattctttaaatgctgaggaaggaaacaaataatgcaccagactatttaattaaa

SEQ ID NO: 3663 - protein, 66 aa, Homo sapiens
NFANHHSFFPQTLGNFNVLLFIFLRVQKPPRQKCVNSSSAHFRVKDSLSSNCFNPLREKVHRLKRI

SEQ ID NO: 3664 - DNA, 602 bp, Homo sapiens
ggccgggcctcatctgtggggtgaggcctccacctccagcacctggtagagaagtccaagggtactggctcccacagagcaggggctgggagaagtcctgagactgagaggcctgcacaaatcactttagtaacacccaatgcaaccaagatatgctcttgcttttacttttgcttggagaaaaaaatccttacaggctacaaaaggtcagaatattctagaaagcaaatctgaaggaacatgaccatctgttcagtttaaatcttcactgagctgagcaaacagaagaataatcctgcagatggagaaatgctgcacatcacaaggtccgtatcatagcagtgtgaggttagcttccccaggtccagttcccatacaccatccattactctgctctgtttatcagaaaaatgtgccaccaagcaatcaatacattttccaagtgaacaaaacaggacagaaacctcccagctcttccttagcaataagccatgctgagtgttcctccccacacagggctgacctcaccacactgctgtgaccccagcctgagcagagggagacagagcagaaaggaattgaccacagctgctgcaaggaca

SEQ ID NO: 3665 - protein, 79 aa, Homo sapiens
MEKCCTSQGPYHSSVRLASPGPVPIHHPLLCSVYQKNVPPSNQYIFQVNKTGQKPPSSSLAISHAECSSPHRADLTTLL

SEQ ID NO: 3666 - DNA, 5486 bp, Homo sapiens
gcttgtgacccttccatcactaccccaattccccctctctgcccactcaaccccacctagcccatcgtcctcactccccaccacactcaccccaaccagtaccccacaccccacaaacaagagggtgtgacttgcagggaacaaaagcaggatgtcccctttatctgagacacctccagatgagggctctctgggacccataagtgtctctgtgaacaataagctccccacgaggtgggcttcccctgggattacaggcagtgtctctagtggtatcagagctcaacactgaagtggtgctcctggggacacgggcattgactctgagcacctctgtgagataggcgcgcccagggactgtctccacaagctttgacaccccactgaggtgggagctccctggaaacaaacagtgtctctgcagtctcagagcttgacactgaagtggagctccctggcacgccagcggtgtgtttgcaaactgtggcctgcccactgtgtcctctggttcacagacagtgtttccacagactccgaactcccccactgaactgggagcaccctatgactggagcagtgtctctagggacttggagctccccactgagttaggagttccctgcagcacagacatggtccccaccaactctcagctccccagtgcagtgggagctccctggaacacagcagtttctccctggtacacaggcggtgtttccatggattctgagctctttactgaggtgggagctccctgagacaagcacagtgtctcacagactctgtgctccccatgagacaggagctccctgggtagcgggcagggtctccagggtctatgaaccgcccgctgaggtgggagcctcctgggatgcaaggagtgcctttaaggactctgagcttccatggtgtggtgctccctgggacacggcagtgtcttcacgactctgacttcccactgaagtcacactctctgggacacagcagtgtctgtaaggactctgaactccactgaggtgggagccccctgggctgtctttccagtgagtctgcactgaggtgggagctcactgggaaaccagtagtgtctctgtggactctgacctttatttgaggtaaaagctccctgagacactggcagtgtctccacagactctgagcctccccctggtgggagcccctgggaacacagagggcgtctccacagactctgagctctcactgaaatgaagctccctgggactccggcaggatctccacagactcttacctccccactgaaatgggagattttgggacatgggcagggtctccatggactcagagttcccccattgaagggggagttcggtggcacatgggcattgtctctaatgactctgagctcctggctgaggggattgctccctgggacgttgccagggtctccacagactctgagctccccatgaggtgggagctccacaggatttgggcagggtctccatgaactataaactctccactgaggtgggagctccctgggacacagagagtttttttcagactctgaactcccatgaaatggagctctttggagcatggacagtgtctttaaggactctgagctacccaccgaggtgggagctcagtgggacatgtgaagcagtgtctccacggactctgggctgcccactcaggtgggctgtgtcttggacacaggcagtgtctctatcaactttgggctctgctctgaggtaagagccccctgggacaggggcactatctccttggactttgaactcccaccaaagtggagctcactgggacagtggcaacgtctccacggattctgagctcccgctgaagtggagctccctgggaatcagtcagtgtccaagaactctgagcttccctgaggtgggagccctctggaacacaaggagtgtccacgcagactctgagtttccatgaagtagggctgtctgggacactggcggtgtctctatggtctctgagctcctcacggagctgggagctccctcggacatgggcgatgtctccacaaactctccattcccctatgaggtggaagctctctgcgacatgaccattgtctctgtggaatctgagcttcccactagtgggagccccttgggacacagggcagggtctccacagactctaagctcccactgaagtggagctctctggaataacagcaggatctccacagactcttaccacctccagtgaagtgggaacttttgggacacaggcagtgtctccatggactctgagctccctgctgaggtgggagttcatgtggcaccagttgtgtctccacagacgctgagctccctaggacatgggctctccctgggtggagagcaatgtctccacggaacctgtgctccctactgaggtgggagcttcctgggacaggggcagggtctccagtaactctgagctcccactgaagtggagctccctaggattctgcagtttgtccacaaactcttacctcctcactcagtgggaggttttgggacccgggtagtgtctccacatactctgagctacccactgaggtgggatccccctgggtcgagggcaatgtctccacagggactgagctccctaccaagatgaggtctggcacaagaacagtgacttcatggtggagtcatagctcccactgaagtggagctccctgacccactgaacagctgaatggggagcttgctggcacacagaaactgttcacactgtctgaccttcccccacgtttgttcgttcaatactggaaggaagcgcaagtctgtttgttctcctgcctgtgtgtgtgtacagggggacatcctgggagcttatttgtctaaaggatgcctgtgtcctctagttgctgagaggcagtgaggacaagcagctgcatgaactgcacttggagagaaaccctgctgtatacaatttcacacaccagggagcaggactcaacatgactgtgcacagtgccttggacagtgatgagcagagccaccaggcagtgaccgaggccatgagggtcatcggcttcagtcctgaagaggtggagtctgtgcatcgcatcctggctgccatattgcacctgggaaacatcgagtttgtggagacggaggagggtgggctgcagaaggagggcctggcagtggccgaggaggcactggtggaccatgtggctgagctgacggccacaccccgggacctcgtgctccgctccctgctggctcgcacagttgcctcgggaggcagggaactcatagagaagggccacactgcagctgaggccagctatgcccgggatgcctgtgccaaggcagtgtaccagcggctgtttgagtgggtggtgaacaggatcaacagtgtcatggaaccccggggccgggatcctcggcgtgatggcaaggacacagtcattggcgtgctggacatctatggcttcgaggtgtttcccgtcaacagtttcgagcagttctgcatcaactactgcaacgagaagctgcagcagctattcatccagctcatcctgaagcaggaacaggaagagtacgagcgcgagggcatcacctggcagagcgttgagtatttcaacaacgccaccattgtggatctggtggagcggccccaccgtggcatcctggccgtgctggacgaggcctgcagctctgctggcaccatcactgaccgaatcttcctgcagaccctggacatgcaccaccgccatcacctacactacaccagccgccagctctgccccacagacaagaccatggagtttggccgagacttccggatcaagcactatgcaggggacgtcacgtactccgtggaaggcttcatcgacaagaacagagatttcctcttccaggacttcaagcggctgctgtacaacagcacggaccccactctacgggccatgtggccggacgggcagcaggacatcacagaggtgaccaagcgccccctgacggctggcacactcttcaagaactccatggtggccctggtggagaaccttgcctccaaggagcccttctacgtccgctgcatcaagcccaatgaggacaaggtagctgggaagctggatgagaaccactgtcgccaccaggtcgcatacctggggctgctggagaatgtgagggtccgcagggctggcttcgcttcccgccagccctactctcgattcctgctcaggtacaagatgacctgtgaatacacatggcccaaccacctgctgggctccgacaaggcagccgtgagcgctctcctggagcagcacgggctgcagggggacgtggcctttggccacagcaagctgttcatccgctcaccccggacactggtcacactggagcagagccgagcccgcctcatccccatcattgtgctgctattgcagaaggcatggcggggcaccttggcgaggtggcgctgccggaggctgagggctatctacaccatcatgcgctggttccggagacacaaggtgcgggctcacctggctgagctgcagcggcgattccaggctgcaaggcagccgccactctacgggcgtgaccttgtgtggccgctgccccctgctgtgctgcagcccttccaggacacctgccacgcactcttctgcaggtggcgggcccggcagctggtgaagaacatccccccttcagacatgccccagatcaaggccaaggtggccgccatgggggccctgcaagggcttcgtcaggactggggctgccgacgggcctgggcccgagactacctgtcctctgccactgacaatcccacagcatcaagcctgtttgctcagcgactaaagacacttcaggacaaagatggcttcggggctgtgctcttttcaagccatgtccgcaaggtgaaccgcttccacaagatccggaaccgggccctcctgctcacagaccagcacctctacaagctggaccctgaccggcagtaccgggtgatgcgggccgtgccccttgaggcggtgacggggctgagcgtgaccagcggaggagaccagctggtggtgctgcacgcccgcggccaggacgacctcgtggtgtgcctgcaccgctcccggccgccattggacaaccgcgttggggagctggtgggcgtgctggccgcacactgccagggggagggccgcaccctggaggttcgcgtctccgactgcatcccactaagccatcgcggggtccggcgcctcatctccgtggagcccaggccggagcagccagagcccgatttccgctgcgctcgcggctccttcaccctgctctggcccagccgctgagcgcccgcacccgccgcaccccgaggccgccaattgtccgccccgccagcgctgcaaataaaccttctgagtcagccctcctgctcgccgctcccgcctcacccgcaggggctccggccgcctcctcggtcaggtccacctgcgcccggctcacccgctggggacc

SEQ ID NO: 3667 - protein, 780 aa, Homo sapiens
MTVHSALDSDEQSHQAVTEAMRVIGFSPEEVESVHRILAAILHLGNIEFVETEEGGLQKEGLAVAEEALVDHVAELTATPRDLVLRSLLARTVASGGRELIEKGHTAAEASYARDACAKAVYQRLFEWVVNRINSVMEPRGRDPRRDGKDTVIGVLDIYGFEVFPVNSFEQFCINYCNEKLQQLFIQLILKQEQEEYEREGITWQSVEYFNNATIVDLVERPHRGILAVLDEACSSAGTITDRIFLQTLDMHHRHHLHYTSRQLCPTDKTMEFGRDFRIKHYAGDVTYSVEGFIDKNRDFLFQDFKRLLYNSTDPTLRAMWPDGQQDITEVTKRPLTAGTLFKNSMVALVENLASKEPFYVRCIKPNEDKVAGKLDENHCRHQVAYLGLLENVRVRRAGFASRQPYSRFLLRYKMTCEYTWPNHLLGSDKAAVSALLEQHGLQGDVAFGHSKLFIRSPRTLVTLEQSRARLIPIIVLLLQKAWRGTLARWRCRRLRAIYTIMRWFRRHKVRAHLAELQRRFQAARQPPLYGRDLVWPLPPAVLQPFQDTCHALFCRWRARQLVKNIPPSDMPQIKAKVAAMGALQGLRQDWGCRRAWARDYLSSATDNPTASSLFAQRLKTLQDKDGFGAVLFSSHVRKVNRFHKIRNRALLLTDQHLYKLDPDRQYRVMRAVPLEAVTGLSVTSGGDQLVVLHARGQDDLVVCLHRSRPPLDNRVGELVGVLAAHCQGEGRTLEVRVSDCIPLSHRGVRRLISVEPRPEQPEPDFRCARGSFTLLWPSR

SEQ ID NO: 3668 - DNA, 5398 bp, Homo sapiens
gcttgtgacccttccatcactaccccaattccccctctctgcccactcaaccccacctagcccatcgtcctcactccccaccacactcaccccaaccagtaccccacaccccacaaacaagagggtgtgacttgcagggaacaaaagcaggatgtcccctttatctgagacacctccagatgagggctctctgggacccataagtgtctctgtgaacaataagctccccacgaggtgggcttcccctgggattacaggcagtgtctctagtggtatcagagctcaacactgaagtggtgctcctggggacacgggcattgactctgagcacctctgtgagataggcgcgcccagggactgtctccacaagctttgacaccccactgaggtgggagctccctggaaacaaacagtgtctctgcagtctcagagcttgacactgaagtggagctccctggcacgccagcggtgtgtttgcaaactgtggcctgcccactgtgtcctctggttcacagacagtgtttccacagactccgaactcccccactgaactgggagcaccctatgactggagcagtgtctctagggacttggagctccccactgagttaggagttccctgcagcacagacatggtccccaccaactctcagctccccagtgcagtgggagctccctggaacacagcagtttctccctggtacacaggcggtgtttccatggattctgagctctttactgaggtgggagctccctgagacaagcacagtgtctcacagactctgtgctccccatgagacaggagctccctgggtagcgggcagggtctccagggtctatgaaccgcccgctgaggtgggagcctcctgggatgcaaggagtgcctttaaggactctgagcttccatggtgtggtgctccctgggacacggcagtgtcttcacgactctgacttcccactgaagtcacactctctgggacacagcagtgtctgtaaggactctgaactccactgaggtgggagccccctgggctgtctttccagtgagtctgcactgaggtgggagctcactgggaaaccagtagtgtctctgtggactctgacctttatttgaggtaaaagctccctgagacactggcagtgtctccacagactctgagcctccccctggtgggagcccctgggaacacagagggcgtctccacagactctgagctctcactgaaatgaagctccctgggactccggcaggatctccacagactcttacctccccactgaaatgggagattttgggacatgggcagggtctccatggactcagagttcccccattgaagggggagttcggtggcacatgggcattgtctctaatgactctgagctcctggctgaggggattgctccctgggacgttgccagggtctccacagactctgagctccccatgaggtgggagctccacaggatttgggcagggtctccatgaactataaactctccactgaggtgggagctccctgggacacagagagtttttttcagactctgaactcccatgaaatggagctctttggagcatggacagtgtctttaaggactctgagctacccaccgaggtgggagctcagtgggacatgtgaagcagtgtctccacggactctgggctgcccactcaggtgggctgtgtcttggacacaggcagtgtctctatcaactttgggctctgctctgaggtaagagccccctgggacaggggcactatctccttggactttgaactcccaccaaagtggagctcactgggacagtggcaacgtctccacggattctgagctcccgctgaagtggagctccctgggaatcagtcagtgtccaagaactctgagcttccctgaggtgggagccctctggaacacaaggagtgtccacgcagactctgagtttccatgaagtagggctgtctgggacactggcggtgtctctatggtctctgagctcctcacggagctgggagctccctcggacatgggcgatgtctccacaaactctccattcccctatgaggtggaagctctctgcgacatgaccattgtctctgtggaatctgagcttcccactagtgggagccccttgggacacagggcagggtctccacagactctaagctcccactgaagtggagctctctggaataacagcaggatctccacagactcttaccacctccagtgaagtgggaacttttgggacacaggcagtgtctccatggactctgagctccctgctgaggtgggagttcatgtggcaccagttgtgtctccacagacgctgagctccctaggacatgggctctccctgggtggagagcaatgtctccacggaacctgtgctccctactgaggtgggagcttcctgggacaggggcagggtctccagtaactctgagctcccactgaagtggagctccctaggattctgcagtttgtccacaaactcttacctcctcactcagtgggaggttttgggacccgggtagtgtctccacatactctgagctacccactgaggtgggatccccctgggtcgagggcaatgtctccacagggactgagctccctaccaagatgaggtctggcacaagaacagtgacttcatggtggagtcatagctcccactgaagtggagctccctgacccactgaacagctgaatggggagcttgctggcacacagaaactgttcacactgtctgaccttcccccacgtttgttcgttcaatactggaaggaagcgcaagtctgtttgttctcctgcctgtgtgtgtgtacagggggacatcctgggagcttatttgtctaaaggatgcctgtgtcctctagttgctgagaggcagtgaggacaagcagctgcatgaactgcacttggagagaaaccctgctgtatacaatttcacacaccagggagcaggactcaacatgactgtgcacagtgccttggacagtgatgagcagagccaccaggcagtgaccgaggccatgagggtcatcggcttcagtcctgaagaggtggagtctgtgcatcgcatcctggctgccatattgcacctgggaaacatcgagtttgtggagacggaggagggtgggctgcagaaggagggcctggcagtggccgaggaggcactggtggaccatgtggctgagctgacggccacaccccgggacctcgtgctccgctccctgctggctcgcacagttgcctcgggaggcagggaactcatagagaagggccacactgcagctgaggccagctatgcccgggatgcctgtgccaaggcagtgtaccagcggctgtttgagtgggtggtgaacaggatcaacagtgtcatggaaccccggggccgggatcctcggcgtgatggcaaggacacagtcattggcgtgctggacatctatggcttcgaggtgtttcccgtcaacagtttcgagcagttctgcatcaactactgcaacgagaagctgcagcagctattcatccagctcatcctgaagcaggaacaggaagagtacgagcgcgagggcatcacctggcagagcgttgagtatttcaacaacgccaccattgtggatctggtggagcggccccaccgtggcatcctggccgtgctggacgaggcctgcagctctgctggcaccatcactgaccgaatcttcctgcagaccctggacatgcaccaccgccatcacctacactacaccagccgccagctctgccccacagacaagaccatggagtttggccgagacttccggatcaagcactatgcaggggacgtcacgtactccgtggaaggcttcatcgacaagaacagagatttcctcttccaggacttcaagcggctgctgtacaacagcacggaccccactctacgggccatgtggccggacgggcagcaggacatcacagaggtgaccaagcgccccctgacggctggcacactcttcaagaactccatggtggccctggtggagaaccttgcctccaaggagcccttctacgtccgctgcatcaagcccaatgaggacaaggtagctgggaagctggatgagaaccactgtcgccaccaggtcgcatacctggggctgctggagaatgtgagggtccgcagggctggcttcgcttcccgccagccctactctcgattcctgctcaggtacaagatgacctgtgaatacacatggcccaaccacctgctgggctccgacaaggcagccgtgagcgctctcctggagcagcacgggctgcagggggacgtggcctttggccacagcaagctgttcatccgctcaccccggacactggtcacactggagcagagccgagcccgcctcatccccatcattgtgctgctattgcagaaggcatggcggggcaccttggcgaggtggcgctgccggaggctgagggctatctacaccatcatgcgctggttccggagacacaaggtgcgggctcacctggctgagctgcagcggcgattccaggctgcaaggcagccgccactctacgggcgtgaccttgtgtggccgctgccccctgctgtgctgcagcccttccaggacacctgccacgcactcttctgcaggtggcgggcccggcagctggtgaagaacatccccccttcagacatgccccagatcaaggccaaggtggccgccatgggggccctgcaagggcttcgtcaggactggggctgccgacgggcctgggcccgagactacctgtcctctgccactgacaatcccacagcatcaagcctgtttgctcagcgactaaagacacttcaggacaaagatggcttcggggctgtgctcttttcaagccatgtccgcaaggtgaaccgcttccacaagatccggaaccgggccctcctgctcacagaccagcacctctacaagctggaccctgaccggcagtaccgggtgatgcgggccgtgccccttgaggcggtgacggggctgagcgtgaccagcggaggagaccagctggtggtgctgcacgcccgcggccaggacgacctcgtggtgtgcctgcaccgctcccggccgccattggacaaccgcgttggggagctggtgggcgtgctggccgcacactgccagggggagggccgcaccctggaggttcgcgtctccgactgcatcccactaagccatcgcggggtccggcgcctcatctccgtggagcccaggccggagcagccagagcccgatttccgctgcgctcgcggctccttcaccctgctctggcccagccgctgagcgcccgcacccgccgcaccccgaggccgccaattgtccgccccgccagcgctgcaaataaaccttctgagtcagccc

SEQ ID NO: 3669 - protein, 780 aa, Homo sapiens; identical to SEQ ID NO: 3667

SEQ ID NO: 3670 - DNA, 3063 bp, Homo sapiens
actttacaccagcactggaggaggctggtggggcagggcgggggcggtggggcctcccctagccttccctccccctctccttcactgtccttccagcaggcacaggaaggtgaggcaaggtgtttccagccggcaggatggaggacgaggaaggccctgagtatggcaaacctgactttgtgcttttggaccaagtgaccatggaggacttcatgaggaacctgcagctcaggggagagtggggcagggaagacagaagccagtaagcacatcatgcagtacatcgctgctgtcaccaatccaagccagagggctgaggtggagagggtcaaggacgtgctgctcaagtccacctgtgtgctggaggcctttggcaatgcccgcaccaaccgcaatcacaactccagccgctttggcaagtacatggacatcaactttgacttcaagggggacccgatcggaggacacatccacagctacctactggagaagtctcgggtcctcaagcagcacgtgggtgaaagaaacttccacgccttctaccaattgctgagaggcagtgaggacaagcagctgcatgaactgcacttggagagaaaccctgctgtatacaatttcacacaccagggagcaggactcaacatgactgtgcacagtgccttggacagtgatgagcagagccaccaggcagtgaccgaggccatgagggtcatcggcttcagtcctgaagaggtggagtctgtgcatcgcatcctggctgccatattgcacctgggaaacatcgagtttgtggagacggaggagggtgggctgcagaaggagggcctggcagtggccgaggaggcactggtggaccatgtggctgagctgacggccacaccccgggacctcgtgctccgctccctgctggctcgcacagttgcctcgggaggcagggaactcatagagaagggccacactgcagctgaggccagctatgcccgggatgcctgtgccaaggcagtgtaccagcggctgtttgagtgggtggtgaacaggatcaacagtgtcatggaaccccggggccgggatcctcggcgtgatggcaaggacacagtcattggcgtgctggacatctatggcttcgaggtgtttcccgtcaacagtttcgagcagttctgcatcaactactgcaacgagaagctgcagcagctattcatccagctcatcctgaagcaggaacaggaagagtacgagcgcgagggcatcacctggcagagcgttgagtatttcaacaacgccaccattgtggatctggtggagcggccccaccgtggcatcctggccgtgctggacgaggcctgcagctctgctggcaccatcactgaccgaatcttcctgcagaccctggacatgcaccaccgccatcacctacactacaccagccgccagctctgccccacagacaagaccatggagtttggccgagacttccggatcaagcactatgcaggggacgtcacgtactccgtggaaggcttcatcgacaagaacagagatttcctcttccaggacttcaagcggctgctgtacaacagcacggaccccactctacgggccatgtggccggacgggcagcaggacatcacagaggtgaccaagcgccccctgacggctggcacactcttcaagaactccatggtggccctggtggagaaccttgcctccaaggagcccttctacgtccgctgcatcaagcccaatgaggacaaggtagctgggaagctggatgagaaccactgtcgccaccaggtcgcatacctggggctgctggagaatgtgagggtccgcagggctggcttcgcttcccgccagccctactctcgattcctgctcaggtacaagatgacctgtgaatacacatggcccaaccacctgctgggctccgacaaggcagccgtgagcgctctcctggagcagcacgggctgcagggggacgtggcctttggccacagcaagctgttcatccgctcaccccggacactggtcacactggagcagagccgagcccgcctcatccccatcattgtgctgctattgcagaaggcatggcggggcaccttggcgaggtggcgctgccggaggctgagggctatctacaccatcatgcgctggttccggagacacaaggtgcgggctcacctggctgagctgcagcggcgattccaggctgcaaggcagccgccactctacgggcgtgaccttgtgtggccgctgccccctgctgtgctgcagcccttccaggacacctgccacgcactcttctgcaggtggcgggcccggcagctggtgaagaacatccccccttcagacatgccccagatcaaggccaaggtggccgccatgggggccctgcaagggcttcgtcaggactggggctgccgacgggcctgggcccgagactacctgtcctctgccactgacaatcccacagcatcaagcctgtttgctcagcgactaaagacacttcaggacaaagatggcttcggggctgtgctcttttcaagccatgtccgcaaggtgaaccgcttccacaagatccggaaccgggccctcctgctcacagaccagcacctctacaagctggaccctgaccggcagtaccgggtgatgcgggccgtgccccttgaggcggtgacggggctgagcgtgaccagcggaggagaccagctggtggtgctgcacgcccgcggccaggacgacctcgtggtgtgcctgcaccgctcccggccgccattggacaaccgcgttggggagctggtgggcgtgctggccgcacactgccagggggagggccgcaccctggaggttcgcgtctccgactgcatcccactaagccatcgcggggtccggcgcctcatctccgtggagcccaggccggagcagccagagcccgatttccgctgcgctcgcggctccttcaccctgctctggcccagccgctgagcgcccgcacccgccgcaccccgaggccgccaattgtccgccccgccagcgctgcaaataaaccttctgagtcagccc

SEQ ID NO: 3671 - protein, 903 aa, Homo sapiens
MQYIAAVTNPSQRAEVERVKDVLLKSTCVLEAFGNARTNRNHNSSRFGKYMDINFDFKGDPIGGHIHSYLLEKSRVLKQHVGERNFHAFYQLLRGSEDKQLHELHLERNPAVYNFTHQGAGLNMTVHSALDSDEQSHQAVTEAMRVIGFSPEEVESVHRILAAILHLGNIEFVETEEGGLQKEGLAVAEEALVDHVAELTATPRDLVLRSLLARTVASGGRELIEKGHTAAEASYARDACAKAVYQRLFEWVVNRINSVMEPRGRDPRRDGKDTVIGVLDIYGFEVFPVNSFEQFCINYCNEKLQQLFIQLILKQEQEEYEREGITWQSVEYFNNATIVDLVERPHRGILAVLDEACSSAGTITDRIFLQTLDMHHRHHLHYTSRQLCPTDKTMEFGRDFRIKHYAGDVTYSVEGFIDKNRDFLFQDFKRLLYNSTDPTLRAMWPDGQQDITEVTKRPLTAGTLFKNSMVALVENLASKEPFYVRCIKPNEDKVAGKLDENHCRHQVAYLGLLENVRVRRAGFASRQPYSRFLLRYKMTCEYTWPNHLLGSDKAAVSALLEQHGLQGDVAFGHSKLFIRSPRTLVTLEQSRARLIPIIVLLLQKAWRGTLARWRCRRLRAIYTIMRWFRRHKVRAHLAELQRRFQAARQPPLYGRDLVWPLPPAVLQPFQDTCHALFCRWRARQLVKNIPPSDMPQIKAKVAAMGALQGLRQDWGCRRAWARDYLSSATDNPTASSLFAQRLKTLQDKDGFGAVLFSSHVRKVNRFHKIRNRALLLTDQHLYKLDPDRQYRVMRAVPLEAVTGLSVTSGGDQLVVLHARGQDDLVVCLHRSRPPLDNRVGELVGVLAAHCQGEGRTLEVRVSDCIPLSHRGVRRLISVEPRPEQPEPDFRCARGSFTLLWPSR

SEQ ID NO: 3672 - DNA, 3719 bp, Homo sapiens
acttcctactttacaccagcactggaggaggctggtggggcagggcgggggcggtggggcctcccctagccttccctccccctctccttcactgtccttccagcaggcacaggaaggtgaggcaaggtgtttccagccggcaggatggaggacgaggaaggccctgagtatggcaaacctgactttgtgcttttggaccaagtgaccatggaggacttcatgaggaacctgcagctcaggttcgagaagggccgcatctacacctacatcggtgaggtgctggtgtccgtgaacccctaccaggagctgcccctgtatgggcctgaggccatcgccaggtaccagggccgtgagctctatgagcggccaccccatctctatgctgtggccaacgccgcctacaaggcaatgaagcaccggtccagggacacctgcatcgtcatctcaggggagagtggggcagggaagacagaagccagtaagcacatcatgcagtacatcgctgctgtcaccaatccaagccagagggctgaggtggagagggtcaaggacgtgctgctcaagtccacctgtgtgctggaggcctttggcaatgcccgcaccaaccgcaatcacaactccagccgctttggcaagtacatggacatcaactttgacttcaagggggacccgatcggaggacacatccacagctacctactggagaagtctcgggtcctcaagcagcacgtgggtgaaagaaacttccacgccttctaccaaggggacatcctgggagcttatttgtctaaaggatgcctgtgtcctctagttgctgagaggcagtgaggacaagcagctgcatgaactgcacttggagagaaaccctgctgtatacaatttcacacaccagggagcaggactcaacatgactgtgcacagtgccttggacagtgatgagcagagccaccaggcagtgaccgaggccatgagggtcatcggcttcagtcctgaagaggtggagtctgtgcatcgcatcctggctgccatattgcacctgggaaacatcgagtttgtggagacggaggagggtgggctgcagaaggagggcctggcagtggccgaggaggcactggtggaccatgtggctgagctgacggccacaccccgggacctcgtgctccgctccctgctggctcgcacagttgcctcgggaggcagggaactcatagagaagggccacactgcagctgaggccagctatgcccgggatgcctgtgccaaggcagtgtaccagcggctgtttgagtgggtggtgaacaggatcaacagtgtcatggaaccccggggccgggatcctcggcgtgatggcaaggacacagtcattggcgtgctggacatctatggcttcgaggtgtttcccgtcaacagtttcgagcagttctgcatcaactactgcaacgagaagctgcagcagctattcatccagctcatcctgaagcaggaacaggaagagtacgagcgcgagggcatcacctggcagagcgttgagtatttcaacaacgccaccattgtggatctggtggagcggccccaccgtggcatcctggccgtgctggacgaggcctgcagctctgctggcaccatcactgaccgaatcttcctgcagaccctggacatgcaccaccgccatcacctacactacaccagccgccagctctgccccacagacaagaccatggagtttggccgagacttccggatcaagcactatgcaggggacgtcacgtactccgtggaaggcttcatcgacaagaacagagatttcctcttccaggacttcaagcggctgctgtacaacagcacggaccccactctacgggccatgtggccggacgggcagcaggacatcacagaggtgaccaagcgccccctgacggctggcacactcttcaagaactccatggtggccctggtggagaaccttgcctccaaggagcccttctacgtccgctgcatcaagcccaatgaggacaaggtagctgggaagctggatgagaaccactgtcgccaccaggtcgcatacctggggctgctggagaatgtgagggtccgcagggctggcttcgcttcccgccagccctactctcgattcctgctcaggtactggcacctgacacccatcactccatgggccatagtccctgtgtggagtccaaggggtaggagcagagggtccccaaacagcacgtcgcaaacatcgatacaagcaggaaccagcacgctgctggcctcaagacaccaaaatatctgggaagacatgtgtgtgagcacatgcatgtggggacatacaggtgggaacatgggtatgagggctgtgtgaggacatgtatgtgaggacatgtgtatgggaagacatatgtgcacaggtgtcataagtgctccaggaacacactctgtatccctgccatctccccaggtgtggggtgggcagggtgggctccatcatctctcccccaggcctgggccacactgccctgtcctgtggtgacaggtacaagatgacctgtgaatacacatggcccaaccacctgctgggctccgacaaggcagccgtgagcgctctcctggagcagcacgggctgcagggggacgtggcctttggccacagcaagctgttcatccgctcaccccggacactggtcacactggagcagagccgagcccgcctcatccccatcattgtgctgctattgcagaaggcatggcggggcaccttggcgaggtggcgctgccggaggctgagggctatctacaccatcatgcgctggttccggagacacaaggtgcgggctcacctggctgagctgcagcggcgattccaggctgcaaggcagccgccactctacgggcgtgaccttgtgtggccgctgccccctgctgtgctgcagcccttccaggacacctgccacgcactcttctgcaggtggcgggcccggcagctggtgaagaacatccccccttcagacatgccccagatcaaggccaaggtggccgccatgggggccctgcaagggcttcgtcaggactggggctgccgacgggcctgggcccgagactacctgtcctctgccactgacaatcccacagcatcaagcctgtttgctcagcgactaaagacacttcaggacaaagatggcttcggggctgtgctcttttcaagccatgtccgcaaggtgaaccgcttccacaagatccggaaccgggccctcctgctcacagaccagcacctctacaagctggaccctgaccggcagtaccgggtgatgcgggccgtgccccttgaggcggtgacggggctgagcgtgaccagcggaggagaccagctggtggtgctgcacgcccgcggccaggacgacctcgtggtgtgcctgcaccgctcccggccgccattggacaaccgcgttggggagctggtgggcgtgctggccgcacactgccagggggagggccgcaccctggaggttcgcgtctccgactgcatcccactaagccatcgcggggtccggcgcctcatctccgtggagcccaggccggagcagccagagcccgatttccgctgcgctcgcggctccttcaccctgctctggcccagccgctgagcgcccgcacccgccgcaccccgaggccgccaattgtccgccccgccagcgctgcaaataaaccttctgagtcagccc

SEQ ID NO: 3673 - protein, 484 aa, Homo sapiens
MTVHSALDSDEQSHQAVTEAMRVIGFSPEEVESVHRILAAILHLGNIEFVETEEGGLQKEGLAVAEEALVDHVAELTATPRDLVLRSLLARTVASGGRELIEKGHTAAEASYARDACAKAVYQRLFEWVVNRINSVMEPRGRDPRRDGKDTVIGVLDIYGFEVFPVNSFEQFCINYCNEKLQQLFIQLILKQEQEEYEREGITWQSVEYFNNATIVDLVERPHRGILAVLDEACSSAGTITDRIFLQTLDMHHRHHLHYTSRQLCPTDKTMEFGRDFRIKHYAGDVTYSVEGFIDKNRDFLFQDFKRLLYNSTDPTLRAMWPDGQQDITEVTKRPLTAGTLFKNSMVALVENLASKEPFYVRCIKPNEDKVAGKLDENHCRHQVAYLGLLENVRVRRAGFASRQPYSRFLLRYWHLTPITPWAIVPVWSPRGRSRGSPNSTSQTSIQAGTSTLLASRHQNIWEDMCVSTCMWGHTGGNMGMRAV

SEQ ID NO: 3674 - DNA, 3279 bp, Homo sapiens
acttcctactttacaccagcactggaggaggctggtggggcagggcgggggcggtggggcctcccctagccttccctccccctctccttcactgtccttccagcaggcacaggaaggtgaggcaaggtgtttccagccggcaggatggaggacgaggaaggccctgagtatggcaaacctgactttgtgcttttggaccaagtgaccatggaggacttcatgaggaacctgcagctcaggttcgagaagggccgcatctacacctacatcggtgaggtgctggtgtccgtgaacccctaccaggagctgcccctgtatgggcctgaggccatcgccaggtaccagggccgtgagctctatgagcggccaccccatctctatgctgtggccaacgccgcctacaaggcaatgaagcaccggtccagggacacctgcatcgtcatctcaggggagagtggggcagggaagacagaagccagtaagcacatcatgcagtacatcgctgctgtcaccaatccaagccagagggctgaggtggagagggtcaaggacgtgctgctcaagtccacctgtgtgctggaggcctttggcaatgcccgcaccaaccgcaatcacaactccagccgctttggcaagtacatggacatcaactttgacttcaagggggacccgatcggaggacacatccacagctacctactggagaagtctcgggtcctcaagcagcacgtgggtgaaagaaacttccacgccttctaccaattgctgagaggcagtgaggacaagcagctgcatgaactgcacttggagagaaaccctgctgtatacaatttcacacaccagggagcaggactcaacatgactgtgcacagtgccttggacagtgatgagcagagccaccaggcagtgaccgaggccatgagggtcatcggcttcagtcctgaagaggtggagtctgtgcatcgcatcctggctgccatattgcacctgggaaacatcgagtttgtggagacggaggagggtgggctgcagaaggagggcctggcagtggccgaggaggcactggtggaccatgtggctgagctgacggccacaccccgggacctcgtgctccgctccctgctggctcgcacagttgcctcgggaggcagggaactcatagagaagggccacactgcagctgaggccagctatgcccgggatgcctgtgccaaggcagtgtaccagcggctgtttgagtgggtggtgaacaggatcaacagtgtcatggaaccccggggccgggatcctcggcgtgatggcaaggacacagtcattggcgtgctggacatctatggcttcgaggtgtttcccgtcaacagtttcgagcagttctgcatcaactactgcaacgagaagctgcagcagctattcatccagctcatcctgaagcaggaacaggaagagtacgagcgcgagggcatcacctggcagagcgttgagtatttcaacaacgccaccattgtggatctggtggagcggccccaccgtggcatcctggccgtgctggacgaggcctgcagctctgctggcaccatcactgaccgaatcttcctgcagaccctggacatgcaccaccgccatcacctacactacaccagccgccagctctgccccacagacaagaccatggagtttggccgagacttccggatcaagcactatgcaggggacgtcacgtactccgtggaaggcttcatcgacaagaacagagatttcctcttccaggacttcaagcggctgctgtacaacagcacggaccccactctacgggccatgtggccggacgggcagcaggacatcacagaggtgaccaagcgccccctgacggctggcacactcttcaagaactccatggtggccctggtggagaaccttgcctccaaggagcccttctacgtccgctgcatcaagcccaatgaggacaaggtagctgggaagctggatgagaaccactgtcgccaccaggtcgcatacctggggctgctggagaatgtgagggtccgcagggctggcttcgcttcccgccagccctactctcgattcctgctcaggtacaagatgacctgtgaatacacatggcccaaccacctgctgggctccgacaaggcagccgtgagcgctctcctggagcagcacgggctgcagggggacgtggcctttggccacagcaagctgttcatccgctcaccccggacactggtcacactggagcagagccgagcccgcctcatccccatcattgtgctgctattgcagaaggcatggcggggcaccttggcgaggtggcgctgccggaggctgagggctatctacaccatcatgcgctggttccggagacacaaggtgcgggctcacctggctgagctgcagcggcgattccaggctgcaaggcagccgccactctacgggcgtgaccttgtgtggccgctgccccctgctgtgctgcagcccttccaggacacctgccacgcactcttctgcaggtggcgggcccggcagctggtgaagaacatccccccttcagacatgccccagatcaaggccaaggtggccgccatgggggccctgcaagggcttcgtcaggactggggctgccgacgggcctgggcccgagactacctgtcctctgccactgacaatcccacagcatcaagcctgtttgctcagcgactaaagacacttcaggacaaagatggcttcggggctgtgctcttttcaagccatgtccgcaaggtgaaccgcttccacaagatccggaaccgggccctcctgctcacagaccagcacctctacaagctggaccctgaccggcagtaccgggtgatgcgggccgtgccccttgaggcggtgacggggctgagcgtgaccagcggaggagaccagctggtggtgctgcacgcccgcggccaggacgacctcgtggtgtgcctgcaccgctcccggccgccattggacaaccgcgttggggagctggtgggcgtgctggccgcacactgccagggggagggccgcaccctggaggttcgcgtctccgactgcatcccactaagccatcgcggggtccggcgcctcatctccgtggagcccaggccggagcagccagagcccgatttccgctgcgctcgcggctccttcaccctgctctggcccagccgctgagcgcccgcacccgccgcaccccgaggccgccaattgtccgccccgccagcgctgcaaataaaccttctgagtcagccc

SEQ ID NO: 3675 - protein, 1018 aa, Homo sapiens
MEDEEGPEYGKPDFVLLDQVTMEDFMRNLQLRFEKGRIYTYIGEVLVSVNPYQELPLYGPEAIARYQGRELYERPPHLYAVANAAYKAMKHRSRDTCIVISGESGAGKTEASKHIMQYIAAVTNPSQRAEVERVKDVLLKSTCVLEAFGNARTNRNHNSSRFGKYMDINFDFKGDPIGGHIHSYLLEKSRVLKQHVGERNFHAFYQLLRGSEDKQLHELHLERNPAVYNFTHQGAGLNMTVHSALDSDEQSHQAVTEAMRVIGFSPEEVESVHRILAAILHLGNIEFVETEEGGLQKEGLAVAEEALVDHVAELTATPRDLVLRSLLARTVASGGRELIEKGHTAAEASYARDACAKAVYQRLFEWVVNRINSVMEPRGRDPRRDGKDTVIGVLDIYGFEVFPVNSFEQFCINYCNEKLQQLFIQLILKQEQEEYEREGITWQSVEYFNNATIVDLVERPHRGILAVLDEACSSAGTITDRIFLQTLDMHHRHHLHYTSRQLCPTDKTMEFGRDFRIKHYAGDVTYSVEGFIDKNRDFLFQDFKRLLYNSTDPTLRAMWPDGQQDITEVTKRPLTAGTLFKNSMVALVENLASKEPFYVRCIKPNEDKVAGKLDENHCRHQVAYLGLLENVRVRRAGFASRQPYSRFLLRYKMTCEYTWPNHLLGSDKAAVSALLEQHGLQGDVAFGHSKLFIRSPRTLVTLEQSRARLIPIIVLLLQKAWRGTLARWRCRRLRAIYTIMRWFRRHKVRAHLAELQRRFQAARQPPLYGRDLVWPLPPAVLQPFQDTCHALFCRWRARQLVKNIPPSDMPQIKAKVAAMGALQGLRQDWGCRRAWARDYLSSATDNPTASSLFAQRLKTLQDKDGFGAVLFSSHVRKVNRFHKIRNRALLLTDQHLYKLDPDRQYRVMRAVPLEAVTGLSVTSGGDQLVVLHARGQDDLVVCLHRSRPPLDNRVGELVGVLAAHCQGEGRTLEVRVSDCIPLSHRGVRRLISVEPRPEQPEPDFRCARGSFTLLWPSR

SEQ ID NO: 3676 - DNA, 2611 bp, Homo sapiens
acttcctactttacaccagcactggaggaggctggtggggcagggcgggggcggtggggcctcccctagccttccctccccctctccttcactgtccttccagcaggcacaggaaggtgaggcaaggtgtttccagccggcaggatggaggacgaggaaggccctgagtatggcaaacctgactttgtgcttttggaccaagtgaccatggaggacttcatgaggaacctgcagctcaggttcgagaagggccgcatctacacctacatcggtgaggtgctggtgtccgtgaacccctaccaggagctgcccctgtatgggcctgaggccatcgccaggtaccagggccgtgagctctatgagcggccaccccatctctatgctgtggccaacgccgcctacaaggcaatgaagcaccggtccagggacacctgcatcgtcatctcaggggagagtggggcagggaagacagaagccagtaagcacatcatgcagtacatcgctgctgtcaccaatccaagccagagggctgaggtggagagggtcaaggacgtgctgctcaagtccacctgtgtgctggaggcctttggcaatgcccgcaccaaccgcaatcacaactccagccgctttggcaagtacatggacatcaactttgacttcaagggggacccgatcggaggacacatccacagctacctactggagaagtctcgggtcctcaagcagcacgtgggtgaaagaaacttccacgccttctaccaattgctgagaggcagtgaggacaagcagctgcatgaactgcacttggagagaaaccctgctgtatacaatttcacacaccagggagcaggactcaacatgactgtgcacagtgccttggacagtgatgagcagagccaccaggcagtgaccgaggccatgagggtcatcggcttcagtcctgaagaggtggagtctgtgcatcgcatcctggctgccatattgcacctgggaaacatcgagtttgtggagacggaggagggtgggctgcagaaggagggcctggcagtggccgaggaggcactggtggaccatgtggctgagctgacggccacaccccgggacctcgtgctccgctccctgctggctcgcacagttgcctcgggaggcagggaactcatagagaagggccacactgcagctgaggccagctatgcccgggatgcctgtgccaaggcagtgtaccagcggctgtttgagtgggtggtgaacaggatcaacagtgtcatggaaccccggggccgggatcctcggcgtgatggcaaggacacagtcattggcgtgctggacatctatggcttcgaggtgtttcccgtcaacagtttcgagcagttctgcatcaactactgcaacgagaagctgcagcagctattcatccagctcatcctgaagcaggaacaggaagagtacgagcgcgagggcatcacctggcagagcgttgagtatttcaacaacgccaccattgtggatctggtggagcggccccaccgtggcatcctggccgtgctggacgaggcctgcagctctgctggcaccatcactgaccgaatcttcctgcagaccctggacatgcaccaccgccatcacctacactacaccagccgccagctctgccccacagacaagaccatggagtttggccgagacttccggatcaagcactatgcaggggacgtcacgtaagggccccctcccacccacatccctggctttcccacaggcaccatggcatgtgtcatggggcaggagcgcttcaggggagtggctcggagacaggtgttatggccacttctgccacccccacccctttaagacactgaaacatgccggacagcagattcacaagtgaagagcaggaaacagggtttgaggatagtggttaaccatggctgcattcttctgggagcctttaaaaaatacccacgtctcatgtctgggcccaaccctataccagcatctgtggggtggggggcttcaggctggtgatgtgggggtggggagggagtggaaggtgcaggggggccaagattctgcatttctaacaagctcccaggtgaggcctcgctaccatacttggaccacgctcccagtgccaaagcccaggtgtcttcaggggttgtcatgatggctattaacttatgtgttgcttgccgcatcccaaaacgatttaaggtgactcacatcaaggtataagtgtttcatgagaacttctcaaggagagggaatagaatagatgatgacaacaaagcagcccaatatcatctacctttatctgttcgcaaaatctacacccatgaggtcgctcatgcctgtaaccccagcactttgggaggccaaagtgggtggatcacctgaggccaagagttcgagaccagcctggccaacatggcaaaacctcatctgtactaaaaatataaaaattatccgggcacgatgacgcgtgcctgtaatgccagttgctcgggaggctgaggcacaagaactgcttgaacctgggaggtagaggttgtggcgaactgagatcgcaccactgcactccagcctgggcaagagagtgagactatttctcaaa

SEQ ID NO: 3677 - protein, 525 aa, Homo sapiens
MEDEEGPEYGKPDFVLLDQVTMEDFMRNLQLRFEKGRIYTYIGEVLVSVNPYQELPLYGPEAIARYQGRELYERPPHLYAVANAAYKAMKHRSRDTCIVISGESGAGKTEASKHIMQYIAAVTNPSQRAEVERVKDVLLKSTCVLEAFGNARTNRNHNSSRFGKYMDINFDFKGDPIGGHIHSYLLEKSRVLKQHVGERNFHAFYQLLRGSEDKQLHELHLERNPAVYNFTHQGAGLNMTVHSALDSDEQSHQAVTEAMRVIGFSPEEVESVHRILAAILHLGNIEFVETEEGGLQKEGLAVAEEALVDHVAELTATPRDLVLRSLLARTVASGGRELIEKGHTAAEASYARDACAKAVYQRLFEWVVNRINSVMEPRGRDPRRDGKDTVIGVLDIYGFEVFPVNSFEQFCINYCNEKLQQLFIQLILKQEQEEYEREGITWQSVEYFNNATIVDLVERPHRGILAVLDEACSSAGTITDRIFLQTLDMHHRHHLHYTSRQLCPTDKTMEFGRDFRIKHYAGDVT

SEQ ID NO: 3678 - DNA, 5780 bp, Homo sapiens
acttcctactttacaccagcactggaggaggctggtggggcagggcgggggcggtggggcctcccctagccttccctccccctctccttcactgtccttccagcaggcacaggaaggtgaggcaaggtgtttccagccggcaggatggaggacgaggaaggccctgagtatggcaaacctgactttgtgcttttggaccaagtgaccatggaggacttcatgaggaacctgcagctcaggttcgagaagggccgcatctacacctacatcggtgaggtgctggtgtccgtgaacccctaccaggagctgcccctgtatgggcctgaggccatcgccaggtaccagggccgtgagctctatgagcggccaccccatctctatgctgtggccaacgccgcctacaaggcaatgaagcaccggtccagggacacctgcatcgtcatctcaggggagagtggggcagggaagacagaagccagtaagcacatcatgcagtacatcgctgctgtcaccaatccaagccagagggctgaggtggagagggtcaaggacgtgctgctcaagtccacctgtgtgctggaggcctttggcaatgcccgcaccaaccgcaatcacaactccagccgctttggcaagtacatggacatcaactttgacttcaagggggacccgatcggaggacacatccacagctacctactggagaagtctcgggtcctcaagcagcacgtgggtgaaagaaacttccacgccttctaccaagtaagccctgagggcaaggggaggtggaaaaatggggtggggaaagggagggcagcaagctggaccagcttgtgacccttccatcactaccccaattccccctctctgcccactcaaccccacctagcccatcgtcctcactccccaccacactcaccccaaccagtaccccacaccccacaaacaagagggtgtgacttgcagggaacaaaagcaggatgtcccctttatctgagacacctccagatgagggctctctgggacccataagtgtctctgtgaacaataagctccccacgaggtgggcttcccctgggattacaggcagtgtctctagtggtatcagagctcaacactgaagtggtgctcctggggacacgggcattgactctgagcacctctgtgagataggcgcgcccagggactgtctccacaagctttgacaccccactgaggtgggagctccctggaaacaaacagtgtctctgcagtctcagagcttgacactgaagtggagctccctggcacgccagcggtgtgtttgcaaactgtggcctgcccactgtgtcctctggttcacagacagtgtttccacagactccgaactcccccactgaactgggagcaccctatgactggagcagtgtctctagggacttggagctccccactgagttaggagttccctgcagcacagacatggtccccaccaactctcagctccccagtgcagtgggagctccctggaacacagcagtttctccctggtacacaggcggtgtttccatggattctgagctctttactgaggtgggagctccctgagacaagcacagtgtctcacagactctgtgctccccatgagacaggagctccctgggtagcgggcagggtctccagggtctatgaaccgcccgctgaggtgggagcctcctgggatgcaaggagtgcctttaaggactctgagcttccatggtgtggtgctccctgggacacggcagtgtcttcacgactctgacttcccactgaagtcacactctctgggacacagcagtgtctgtaaggactctgaactccactgaggtgggagccccctgggctgtctttccagtgagtctgcactgaggtgggagctcactgggaaaccagtagtgtctctgtggactctgacctttatttgaggtaaaagctccctgagacactggcagtgtctccacagactctgagcctccccctggtgggagcccctgggaacacagagggcgtctccacagactctgagctctcactgaaatgaagctccctgggactccggcaggatctccacagactcttacctccccactgaaatgggagattttgggacatgggcagggtctccatggactcagagttcccccattgaagggggagttcggtggcacatgggcattgtctctaatgactctgagctcctggctgaggggattgctccctgggacgttgccagggtctccacagactctgagctccccatgaggtgggagctccacaggatttgggcagggtctccatgaactataaactctccactgaggtgggagctccctgggacacagagagtttttttcagactctgaactcccatgaaatggagctctttggagcatggacagtgtctttaaggactctgagctacccaccgaggtgggagctcagtgggacatgtgaagcagtgtctccacggactctgggctgcccactcaggtgggctgtgtcttggacacaggcagtgtctctatcaactttgggctctgctctgaggtaagagccccctgggacaggggcactatctccttggactttgaactcccaccaaagtggagctcactgggacagtggcaacgtctccacggattctgagctcccgctgaagtggagctccctgggaatcagtcagtgtccaagaactctgagcttccctgaggtgggagccctctggaacacaaggagtgtccacgcagactctgagtttccatgaagtagggctgtctgggacactggcggtgtctctatggtctctgagctcctcacggagctgggagctccctcggacatgggcgatgtctccacaaactctccattcccctatgaggtggaagctctctgcgacatgaccattgtctctgtggaatctgagcttcccactagtgggagccccttgggacacagggcagggtctccacagactctaagctcccactgaagtggagctctctggaataacagcaggatctccacagactcttaccacctccagtgaagtgggaacttttgggacacaggcagtgtctccatggactctgagctccctgctgaggtgggagttcatgtggcaccagttgtgtctccacagacgctgagctccctaggacatgggctctccctgggtggagagcaatgtctccacggaacctgtgctccctactgaggtgggagcttcctgggacaggggcagggtctccagtaactctgagctcccactgaagtggagctccctaggattctgcagtttgtccacaaactcttacctcctcactcagtgggaggttttgggacccgggtagtgtctccacatactctgagctacccactgaggtgggatccccctgggtcgagggcaatgtctccacagggactgagctccctaccaagatgaggtctggcacaagaacagtgacttcatggtggagtcatagctcccactgaagtggagctccctgacccactgaacagctgaatggggagcttgctggcacacagaaactgttcacactgtctgaccttcccccacgtttgttcgttcaatactggaaggaagcgcaagtctgtttgttctcctgcctgtgtgtgtgtacagggggacatcctgggagcttatttgtctaaaggatgcctgtgtcctctagttgctgagaggcagtgaggacaagcagctgcatgaactgcacttggagagaaaccctgctgtatacaatttcacacaccagggagcaggactcaacatgactgtgcacagtgccttggacagtgatgagcagagccaccaggcagtgaccgaggccatgagggtcatcggcttcagtcctgaagaggtggagtctgtgcatcgcatcctggctgccatattgcacctgggaaacatcgagtttgtggagacggaggagggtgggctgcagaaggagggcctggcagtggccgaggaggcactggtggaccatgtggctgagctgacggccacaccccgggacctcgtgctccgctccctgctggctcgcacagttgcctcgggaggcagggaactcatagagaagggccacactgcagctgaggccagctatgcccgggatgcctgtgccaaggcagtgtaccagcggctgtttgagtgggtggtgaacaggatcaacagtgtcatggaaccccggggccgggatcctcggcgtgatggcaaggacacagtcattggcgtgctggacatctatggcttcgaggtgtttcccgtcaacagtttcgagcagttctgcatcaactactgcaacgagaagctgcagcagctattcatccagctcatcctgaagcaggaacaggaagagtacgagcgcgagggcatcacctggcagagcgttgagtatttcaacaacgccaccattgtggatctggtggagcggccccaccgtggcatcctggccgtgctggacgaggcctgcagctctgctggcaccatcactgaccgaatcttcctgcagaccctggacatgcaccaccgccatcacctacactacaccagccgccaggtgcccccggctgtcccagtgccaccacagtgggctggtgggacctgccccacaggcaccatgctgcccatgcctcgtggggcctggttggggacccagctttggtgccattgtcgtcactgtggcaaccttctctgccctggaggtggggaggcagggctatcccttcatacagaccctccacataccttttgtgccttgacctcagcctgtccccatagctctgccccacagacaagaccatggagtttggccgagacttccggatcaagcactatgcaggggacgtcacgtaagggccccctcccacccacatccctggctttcccacaggcaccatggcatgtgtcatggggcaggagcgcttcaggggagtggctcggagacaggtgttatggccacttctgccacccccacccctttaagacactgaaacatgccggacagcagattcacaagtgaagagcaggaaacagggtttgaggatagtggttaaccatggctgcattcttctgggagcctttaaaaaatacccacgtctcatgtctgggcccaaccctataccagcatctgtggggtggggggcttcaggctggtgatgtgggggtggggagggagtggaaggtgcaggggggccaagattctgcatttctaacaagctcccaggtgaggcctcgctaccatacttggaccacgctcccagtgccaaagcccaggtgtcttcaggggttgtcatgatggctattaacttatgtgttgcttgccgcatcccaaaacgatttaaggtgactcacatcaaggtataagtgtttcatgagaacttctcaaggagagggaatagaatagatgatgacaacaaagcagcccaatatcatctacctttatctgttcgcaaaatctacacccatgaggtcgctcatgcctgtaaccccagcactttgggaggccaaagtgggtggatcacctgaggccaagagttcgagaccagcctggccaacatggcaaaacctcatctgtactaaaaatataaaaattatccgggcacgatgacgcgtgcctgtaatgccagttgctcgggaggctgaggcacaagaactgcttgaacctgggaggtagaggttgtggcgaactgagatcgcaccactgcactccagcctgggcaagagagtgagactatttctcaaa

SEQ ID NO: 3679 - protein, 416 aa, Homo sapiens
MTVHSALDSDEQSHQAVTEAMRVIGFSPEEVESVHRILAAILHLGNIEFVETEEGGLQKEGLAVAEEALVDHVAELTATPRDLVLRSLLARTVASGGRELIEKGHTAAEASYARDACAKAVYQRLFEWVVNRINSVMEPRGRDPRRDGKDTVIGVLDIYGFEVFPVNSFEQFCINYCNEKLQQLFIQLILKQEQEEYEREGITWQSVEYFNNATIVDLVERPHRGILAVLDEACSSAGTITDRIFLQTLDMHHRHHLHYTSRQVPPAVPVPPQWAGGTCPTGTMLPMPRGAWLGTQLWCHCRHCGNLLCPGGGEAGLSLHTDPPHTFCALTSACPHSSAPQTRPWSLAETSGSSTMQGTSRKGPLPPTSLAFPQAPWHVSWGRSASGEWLGDRCYGHFCHPHPFKTLKHAGQQIHK

SEQ ID NO: 3680 - DNA, 571 bp, Homo sapiens
ccgccatcctgggccccacgtgttgcctgaccattcctgagcccagtgtccatgaaactgggaggcgaccgtgttagctgccagttcctgacagccacctctcaccagtggcttcactctgtgtccctgacccagcacatggcacaagagtgcctgccatccgtcagtgtttctacagcagcaatcccaagatgctggagctagaggggacctgacctgagagaagataccttcagtggctgccaggctgttccttggaacctgtgcagggatgaggcctgcctgtgttaatacacctagtgaggagtggagctgaatttgaatgcaagccttggcaccttaattgagcaagtttgaaacctcgcttgttgcccttctggaaggagtcaggaatttccagttctgggcctgggctgtgggtctggcagacagacctctggccctaggtttgggtgccaggttctctgcttccagaatgagaagctttgctgtgcaccaggacctgggcccttctggtatctcctgaatgaaaaacaagggatatttaataaatatggatttaaatatgtga

SEQ ID NO: 3681 - protein, 50 aa, Homo sapiens
MKLGGDRVSCQFLTATSHQWLHSVSLTQHMAQECLPSVSVSTAAIPRCWS

SEQ ID NO: 3682 - DNA, 721 bp, Homo sapiens
agtcttggctggcagacctgtactccgtactccgtacttcgtagtcgcagcggcgcggtcttcggcagtctagtcatccaccgccatcctgggccccacgtgttgcctgaccattcctgagcccaggccaggaatagttgctgaacaccccaggcctgctgaggtccctccttgagtctcatgttcaagcagtctttgtccatgaaactgggaggcgaccgtgttagctgccagttcctgacagccacctctcaccagtggcttcactctgtgtccctgacccagcacatggcacaagagtgcctgccatccgtcagtgtttctacagcagcaatcccaagatgctggagctagaggggacctgacctgagagaagataccttcagtggctgccaggctgttccttggaacctgtgcagggatgaggcctgcctgtgttaatacacctagtgaggagtggagctgaatttgaatgcaagccttggcaccttaattgagcaagtttgaaacctcgcttgttgcccttctggaaggagtcaggaatttccagttctgggcctgggctgtgggtctggcagacagacctctggccctaggtttgggtgccaggttctctgcttccagaatgagaagctttgctgtgcaccaggacctgggcccttctggtatctcctgaatgaaaaacaagggatatttaataaatatggatttaaatatgtga

SEQ ID NO: 3683 - protein, 57 aa, Homo sapiens
MFKQSLSMKLGGDRVSCQFLTATSHQWLHSVSLTQHMAQECLPSVSVSTAAIPRCWS

SEQ ID NO: 3684 - DNA, 734 bp, Homo sapiens
ggcgtcagtcttggctggcagacctgtactccgtactccgtacttcgtagtcgcagcggcgcggtcttcggcagtctagtcatccaccgccatcctgggccccacgtgttgcctgaccattcctgagcccaggtgggagccgtggctgaggtgacggtctcaaagtggaagagcttactgtcacagcaactcctttgcaagatgccccgtgtccatgaaactgggaggcgaccgtgttagctgccagttcctgacagccacctctcaccagtggcttcactctgtgtccctgacccagcacatggcacaagagtgcctgccatccgtcagtgtttctacagcagcaatcccaagatgctggagctagaggggacctgacctgagagaagataccttcagtggctgccaggctgttccttggaacctgtgcagggatgaggcctgcctgtgttaatacacctagtgaggagtggagctgaatttgaatgcaagccttggcaccttaattgagcaagtttgaaacctcgcttgttgcccttctggaaggagtcaggaatttccagttctgggcctgggctgtgggtctggcagacagacctctggccctaggtttgggtgccaggttctctgcttccagaatgagaagctttgctgtgcaccaggacctgggcccttctggtatctcctgaatgaaaaacaagggatatttaataaatatggatttaaatatgtga

SEQ ID NO: 3685 - protein, 50 aa, Homo sapiens; identical to SEQ ID NO: 3681

SEQ ID NO: 3686 - DNA, 982 bp, Homo sapiens
tccactgagttgacacgcagacgcagcctcaggaccctaaactctacgccccagcacaccctaccaagcgagcgcccgcggccgcgtgacgtcatctaccccaaacgctgtggccccggccacgcacggcttcggggcgggactacgcggtgacgtcgaggtgcgcggcgcagcgcgcggcgtcagtcttggctggcagacctgtactccgtactccgtacttcgtagtcgcagcggcgcggtcttcggcagtctagtcatccaccgccatcctgggccccacgtgttgcctgaccattcctgagcccaggtgggagccgtggctgaggtgacggtctcaaagtggaagagcttactgtcacagcaactcctttgcaagatgccccggccaggaatagttgctgaacaccccaggcctgctgaggtccctccttgagtctcatgttcaagcagtctttgtccatgaaactgggaggcgaccgtgttagctgccagttcctgacagccacctctcaccagtggcttcactctgtgtccctgacccagcacatggcacaagagtgcctgccatccgtcagtgtttctacagcagcaatcccaagatgctggagctagaggggacctgacctgagagaagataccttcagtggctgccaggctgttccttggaacctgtgcagggatgaggcctgcctgtgttaatacacctagtgaggagtggagctgaatttgaatgcaagccttggcaccttaattgagcaagtttgaaacctcgcttgttgcccttctggaaggagtcaggaatttccagttctgggcctgggctgtgggtctggcagacagacctctggccctaggtttgggtgccaggttctctgcttccagaatgagaagctttgctgtgcaccaggacctgggcccttctggtatctcctgaatgaaaaacaagggatatttaataaatatggatttaaatatgtga

SEQ ID NO: 3687 - protein, 57 aa, Homo sapiens; identical to SEQ ID NO: 3683

SEQ ID NO: 3688 - DNA, 1248 bp, Homo sapiens
cattaggggctcagcgcgtccctccaggccacgccgtcaggcctccgtccttttagctgtaggggcagattacgtaactccagccttctggtcactaaaggagggtaacaaagggcggtcgagagactccactgagttgacacgcagacgcagcctcaggaccctaaactctacgccccagcacaccctaccaagcgagcgcccgcggccgcgtgacgtcatctaccccaaacgctgtggccccggccacgcacggcttcggggcgggactacgcggtgacgtcgaggtgcgcggcgcagcgcgcggcgtcagtcttggctggcagacctgtactccgtactccgtacttcgtagtcgcagcggcgcggtcttcggcagtctagtcatccaccgccatcctgggccccacgtgttgcctgaccattcctgagcccaggtgggagccgtggctgaggtgacggtctcaaagtggaagagcttactgtcacagcaactcctttgcaagatgccccggtaaatcacgttgcagagaccccaactctgccttcctggaactaggcctgcgttttctctgaaccattatttcatggggaaaatgaaatctacttcatgtgcctggtctacttactccttcagaagtgatttctgagccgccaggaatagttgctgaacaccccaggcctgctgaggtccctccttgagtctcatgttcaagcagtctttgtccatgaaactgggaggcgaccgtgttagctgccagttcctgacagccacctctcaccagtggcttcactctgtgtccctgacccagcacatggcacaagagtgcctgccatccgtcagtgtttctacagcagcaatcccaagatgctggagctagaggggacctgacctgagagaagataccttcagtggctgccaggctgttccttggaacctgtgcagggatgaggcctgcctgtgttaatacacctagtgaggagtggagctgaatttgaatgcaagccttggcaccttaattgagcaagtttgaaacctcgcttgttgcccttctggaaggagtcaggaatttccagttctgggcctgggctgtgggtctggcagacagacctctggccctaggtttgggtgccaggttctctgcttccagaatgagaagctttgctgtgcaccaggacctgggcccttctggtatctcctgaatgaaaaacaagggatatttaataaatatggatttaaatatgtga

SEQ ID NO: 3689 - protein, 57 aa, Homo sapiens; identical to SEQ ID NO: 3683

SEQ ID NO: 3690 - DNA, 3224 bp, Homo sapiens
gtgcgcggcgcagcgcgcggcgtcagtcttggctggcagacctgtactccgtactccgtacttcgtagtcgcagcggcgcggtcttcggcagtctagtcatccaccgccatcctgggccccacgtgttgcctgaccattcctgagcccaggtgggagccgtggctgaggtgacggtctcaaagtggaagagcttactgtcacagcaactcctttgcaagatgccccggtaaatcacgttgcagagaccccaactctgccttcctggaactaggcctgcgttttctctgaaccattatttcatggggaaaatgaaatctacttcatgtgcctggtctacttactccttcagaagtgatttctgagccgtaagatacatgagaaaaaaatgaaggggaaaaggcagtatttatattaactacatgatgataaggatgtttctggtcacagtgaaaagccatgctagaattgtagtgtcatagaataatgtggaagtttagttcgtgttgtctgatctatttaataatttaataaggttatctcttccaagacaccttcccttcttcctcagccagaaaggatctttccctgagagtcattagtagctctgggctcctggaaccaagctcaggtgcctaattgaactctggtctcttcccacagcccccagcagggactggtgcttagtgagagtggactgccagattccttgagtgtgggggatttgggtgaatgagggtagcaagcctccagcgtgcttgggtctgcggtgaccctatgcattccttcagtgcttgctagaacagttttgaaacggtttgaggccttgccctgctccatccagagcaaggttatagaaatttcagacaatgacttcctccctcctggatctagtgtcctgggccttgtatagatccgtgccatctaatgtggtagccacttggcacacatgattaaattaaatttggagttttatttcattttcacactagccacatttcagatgatcagtagccacaggtggccagtggctaccatattggaccgcacagattagagggcatttctgtcgctgtggaagttgttttggacaatgctggtgtgaaaggtgaagggaatcctgagtgtttgctgtgctccaggctcagtacaaattttattttattatacacttaaagcaaaagtcttataaaagttgaggatgaagccaagagtggtggtaagggtaggagttgaaacagtgaagaggaataacagggaagagtcctgccctgagagactcatggaataggatatttacaaggcaaagcaaagagaaccaaagtctcagttctgcagaggagctgagtgccccaggagctagtggagggtgaggtcaatgtgtgctcatcttaaaggaaaaactcatggaagaggaaggtgctaatgttgaacacctattttgcgccagacctcttaattgttttaaatctttgaggtatcatcatgaggtcgtttttaagttcagtacagatgaggggcccaaggtcagaattatgtgtccagggttgcccagccacaaaccagcagatcagggtttgatgccaggcctctctaaccctgcatcctgagtggaatatagaagccggtgggaagtttggatgggaaggagatggatgccttcaagttcttgtcttggtgttaggtgtgttaaaggactggctgggatgagaagagtgttgctggcttgagcatagcacgagcagcacagctcctgtgttcctctgggtggtggggtcacctctcttaaaggtagaggctttcagctgattctgtcttttcaggccaggaatagttgctgaacaccccaggcctgctgaggtccctccttgagtctcatgttcaagcagtcttgtgagtaaagcactggctaccccttttcacttactatcttttcaagcatgttctaccaccttggaaggtaagaggttagtaccttcttccagagcagagggcaggcattcttgctgtgcgttgtgaaagggtagagtcctgcgctcctttcttgtagtagtccaatggctcatgcaggtgcctctgactcccctatgggaactggggcttgggagggtggtggaaaatgctgatgctctggctattgctattgttttgaataatcagtggtcccttgtccctaatcgaggaattttgtattttctaccagtgtccatgaaactgggaggcgaccgtgttagctgccagttcctgacagccacctctcaccagtggcttcactctgtgtccctgacccagcacatggcacaagagtgcctgccatccgtcagtgtttctacagcagcaatcccaagatgctggagctagaggggacctgacctgagagaagataccttcagtggctgccaggctgttccttggaacctgtgcaggggtaagtgtgcaggaaggtctgacctggcaagtcacttcactcctgttttatttagagtcacctggctaatgaaaagtattttgaccttcccgtatggtaagtcaggtgattgaatcccagaaaggttcattgtcttcaagctcacaatactattttgggacaaacagttgtctagtgtttggactcatgaaccctgattcttgagggtggtattttactgcttttgtgatttggtttcaacatatatagtcttttctccggagttaccttaggtcagtggccagtgtttcagcccctggaaagggcatgggctgccactgaggttggtcacaggcctctcagctcatggtgggagtgggttcaggagttggtaagtagggttcagttctgttgttgccaccgatggcaacaggggtttgtaataatccctagttgtgtcaattatgtcacttaattttcacaacaggtctctgaagtgtttctcatctcatttttacagatgaggcctgcctgtgttaatacacctagtgaggagtggagctgaatttgaatgcaagccttggcaccttaattgagcaagtttgaaacctcgcttgttgcccttctggaaggagtcaggaatttccagttctgggcctgggctgtgggtctggcagacagacctctggccctaggtttgggtgccaggttctctgcttccagaatgagaagctttgctgtgcaccaggacctgggcccttctggtatctcctgaatgaaaaacaagggatatttaataaatatggatttaaatatgtg

SEQ ID NO: 3691 - protein, 98 aa, Homo sapiens
MQVPLTPLWELGLGRVVENADALAIAIVLNNQWSLVPNRGILYFLPVSMKLGGDRVSCQFLTATSHQWLHSVSLTQHMAQECLPSVSVSTAAIPRCWS

SEQ ID NO: 3692 - DNA, 1630 bp, Homo sapiens
gtgcgcggcgcagcgcgcggcgtcagtcttggctggcagacctgtactccgtactccgtacttcgtagtcgcagcggcgcggtcttcggcagtctagtcatccaccgccatcctgggccccacgtgttgcctgaccattcctgagcccaggtgggagccgtggctgaggtgacggtctcaaagtggaagagcttactgtcacagcaactcctttgcaagatgccccggccaggaatagttgctgaacaccccaggcctgctgaggtccctccttgagtctcatgttcaagcagtcttgtgagtaaagcactggctaccccttttcacttactatcttttcaagcatgttctaccaccttggaaggtaagaggttagtaccttcttccagagcagagggcaggcattcttgctgtgcgttgtgaaagggtagagtcctgcgctcctttcttgtagtagtccaatggctcatgcaggtgcctctgactcccctatgggaactggggcttgggagggtggtggaaaatgctgatgctctggctattgctattgttttgaataatcagtggtcccttgtccctaatcgaggaattttgtattttctaccagtgtccatgaaactgggaggcgaccgtgttagctgccagttcctgacagccacctctcaccagtggcttcactctgtgtccctgacccagcacatggcacaagagtgcctgccatccgtcagtgtttctacagcagcaatcccaagatgctggagctagaggggacctgacctgagagaagataccttcagtggctgccaggctgttccttggaacctgtgcaggggtaagtgtgcaggaaggtctgacctggcaagtcacttcactcctgttttatttagagtcacctggctaatgaaaagtattttgaccttcccgtatggtaagtcaggtgattgaatcccagaaaggttcattgtcttcaagctcacaatactattttgggacaaacagttgtctagtgtttggactcatgaaccctgattcttgagggtggtattttactgcttttgtgatttggtttcaacatatatagtcttttctccggagttaccttaggtcagtggccagtgtttcagcccctggaaagggcatgggctgccactgaggttggtcacaggcctctcagctcatggtgggagtgggttcaggagttggtaagtagggttcagttctgttgttgccaccgatggcaacaggggtttgtaataatccctagttgtgtcaattatgtcacttaattttcacaacaggtctctgaagtgtttctcatctcatttttacagatgaggcctgcctgtgttaatacacctagtgaggagtggagctgaatttgaatgcaagccttggcaccttaattgagcaagtttgaaacctcgcttgttgcccttctggaaggagtcaggaatttccagttctgggcctgggctgtgggtctggcagacagacctctggccctaggtttgggtgccaggttctctgcttccagaatgagaagctttgctgtgcaccaggacctgggcccttctggtatctcctgaatgaaaaacaagggatatttaataaatatggatttaaatatgtg

SEQ ID NO: 3693 - protein, 98 aa, Homo sapiens; identical to SEQ ID NO: 3691

SEQ ID NO: 3694 - DNA, 1657 bp, Homo sapiens
cattaggggctcagcgcgtccctccaggccacgccgtcaggcctccgtccttttagctgtaggggcagattacgtaactccagccttctggtcactaaaggagggtaacaaagggcggtcgagagactccactgagttgacacgcagacgcagcctcaggaccctaaactctacgccccagcacaccctaccaagcgagcgcccgcggccgcgtgacgtcatctaccccaaacgctgtggccccggccacgcacggcttcggggcgggactacgcggtgacgtcgaggtgcgcggcgcagcgcgcggcgtcagtcttggctggcagacctgtactccgtactccgtacttcgtagtcgcagcggcgcggtcttcggcagtctagtcatccaccgccatcctgggccccacgtgttgcctgaccattcctgagcccaggtgggagccgtggctgaggtgacggtctcaaagtggaagagcttactgtcacagcaactcctttgcaagatgccccggtaaatcacgttgcagagaccccaactctgccttcctggaactaggcctgcgttttctctgaaccattatttcatggggaaaatgaaatctacttcatgtgcctggtctacttactccttcagaagtgatttctgagccgccaggaatagttgctgaacaccccaggcctgctgaggtccctccttgagtctcatgttcaagcagtcttcacatggcacaagagtgcctgccatccgtcagtgtttctacagcagcaatcccaagatgctggagctagaggggacctgacctgagagaagataccttcagtggctgccaggctgttccttggaacctgtgcaggggtaagtgtgcaggaaggtctgacctggcaagtcacttcactcctgttttatttagagtcacctggctaatgaaaagtattttgaccttcccgtatggtaagtcaggtgattgaatcccagaaaggttcattgtcttcaagctcacaatactattttgggacaaacagttgtctagtgtttggactcatgaaccctgattcttgagggtggtattttactgcttttgtgatttggtttcaacatatatagtcttttctccggagttaccttaggtcagtggccagtgtttcagcccctggaaagggcatgggctgccactgaggttggtcacaggcctctcagctcatggtgggagtgggttcaggagttggtaagtagggttcagttctgttgttgccaccgatggcaacaggggtttgtaataatccctagttgtgtcaattatgtcacttaattttcacaacaggtctctgaagtgtttctcatctcatttttacagatgaggcctgcctgtgttaatacacctagtgaggagtggagctgaatttgaatgcaagccttggcaccttaattgagcaagtttgaaacctcgcttgttgcccttctggaaggagtcaggaatttccagttctgggcctgggctgtgggtctggcagacagacctctggccctaggtttgggtgccaggttctctgcttccagaatgagaagctttgctgtgcaccaggacctgggcccttctggtatctcctgaatgaaaaacaagggatatttaataaatatggatttaaatatgtg

SEQ ID NO: 3695 - protein, 31 aa, Homo sapiens
MFKQSSHGTRVPAIRQCFYSSNPKMLELEGT

SEQ ID NO: 3696 - DNA, 3114 bp, Homo sapiens
agacctgtactccgtactccgtacttcgtagtcgcagcggcgcggtcttcggcagtctagtcatccaccgccatcctgggccccacgtgttgcctgaccattcctgagcccaggtaggggtcctgggggattgggttcagtggcgggcggcgtgggaggctgggccgcagtgagtgggggcaccagtgattcttggagaccaagccttcactacacgtgctacttcctctcaagaggcggttgagcgcgttcggaacattttacccggaggagactcggggattacttgatgagtaacctcgtgcttctctttcagccgagaagtggggcttctgcatgacctgggtggaccccagtaggtgggatgggacgtgtggtcaggagggacctcaccggaaggcatggggtggcgtgtagacctgccgcaagagaggctgtagagtgggccaggcgttgcaaggagctagagctggataatggttcagaggcacaagctgaagctaactgcgtttggagctaactgcatttgttcccttctaggtgggagccgtggctgaggtgacggtctcaaagtggaagagcttactgtcacagcaactcctttgcaagatgccccggtaaatcacgttgcagagaccccaactctgccttcctggaactaggcctgcgttttctctgaaccattatttcatggggaaaatgaaatctacttcatgtgcctggtctacttactccttcagaagtgatttctgagccgtaagatacatgagaaaaaaatgaaggggaaaaggcagtatttatattaactacatgatgataaggatgtttctggtcacagtgaaaagccatgctagaattgtagtgtcatagaataatgtggaagtttagttcgtgttgtctgatctatttaataatttaataaggttatctcttccaagacaccttcccttcttcctcagccagaaaggatctttccctgagagtcattagtagctctgggctcctggaaccaagctcaggtgcctaattgaactctggtctcttcccacagcccccagcagggactggtgcttagtgagagtggactgccagattccttgagtgtgggggatttgggtgaatgagggtagcaagcctccagcgtgcttgggtctgcggtgaccctatgcattccttcagtgcttgctagaacagttttgaaacggtttgaggccttgccctgctccatccagagcaaggttatagaaatttcagacaatgacttcctccctcctggatctagtgtcctgggccttgtatagatccgtgccatctaatgtggtagccacttggcacacatgattaaattaaatttggagttttatttcattttcacactagccacatttcagatgatcagtagccacaggtggccagtggctaccatattggaccgcacagattagagggcatttctgtcgctgtggaagttgttttggacaatgctggtgtgaaaggtgaagggaatcctgagtgtttgctgtgctccaggctcagtacaaattttattttattatacacttaaagcaaaagtcttataaaagttgaggatgaagccaagagtggtggtaagggtaggagttgaaacagtgaagaggaataacagggaagagtcctgccctgagagactcatggaataggatatttacaaggcaaagcaaagagaaccaaagtctcagttctgcagaggagctgagtgccccaggagctagtggagggtgaggtcaatgtgtgctcatcttaaaggaaaaactcatggaagaggaaggtgctaatgttgaacacctattttgcgccagacctcttaattgttttaaatctttgaggtatcatcatgaggtcgtttttaagttcagtacagatgaggggcccaaggtcagaattatgtgtccagggttgcccagccacaaaccagcagatcagggtttgatgccaggcctctctaaccctgcatcctgagtggaatatagaagccggtgggaagtttggatgggaaggagatggatgccttcaagttcttgtcttggtgttaggtgtgttaaaggactggctgggatgagaagagtgttgctggcttgagcatagcacgagcagcacagctcctgtgttcctctgggtggtggggtcacctctcttaaaggtagaggctttcagctgattctgtcttttcaggccaggaatagttgctgaacaccccaggcctgctgaggtccctccttgagtctcatgttcaagcagtcttgtgagtaaagcactggctaccccttttcacttactatcttttcaagcatgttctaccaccttggaaggtaagaggttagtaccttcttccagagcagagggcaggcattcttgctgtgcgttgtgaaagggtagagtcctgcgctcctttcttgtagtagtccaatggctcatgcaggtgcctctgactcccctatgggaactggggcttgggagggtggtggaaaatgctgatgctctggctattgctattgttttgaataatcagtggtcccttgtccctaatcgaggaattttgtattttctaccagtgtccatgaaactgggaggcgaccgtgttagctgccagttcctgacagccacctctcaccagtggcttcactctgtgtccctgacccagcacatggcacaagagtgcctgccatccgtcagtgtttctacagcagcaatcccaagatgctggagctagaggggacctgacctgagagaagataccttcagtggctgccaggctgttccttggaacctgtgcagggatgaggcctgcctgtgttaatacacctagtgaggagtggagctgaatttgaatgcaagccttggcaccttaattgagcaagtttgaaacctcgcttgttgcccttctggaaggagtcaggaatttccagttctgggcctgggctgtgggtctggcagacagacctctggccctaggtttgggtgccaggttctctgcttccagaatgagaagctttgctgtgcaccaggacctgggcccttctggtatctcctgaatgaaaaacaagggatatttaataaatatggatttaaatatgt

SEQ ID NO: 3697 - protein, 98 aa, Homo sapiens; identical to SEQ ID NO: 3691

SEQ ID NO: 3698 - DNA, 474 bp, Homo sapiens
gtcccgccgagagtctgggtgcggtgcggttttcttttttcttgtgtcccactttattccctgagccacagggaatccgttttctagtacttctctgttataaagtctgcctgccttagacaaacacatttggaaaatagaagtgcaaccacaaggatgtgcagaccctatcagaataaaatcgtagaaccttaccagtcatccggtataatttccacattttccagatgaggtccggggaatgaggtgattcgcccaaaagcacactacaaattggagtcaccagcaggtctgctattttgccactaaaccaatctgccggtcacaccttggctgtaaagtgtcctaacagccacctacttatgattactgctttcttaccaataacctccccagcctgttgtgtggctcctacatcttgaacaaaagcgaccaaggcaggctcctgttcattcccaaggctccgtgtccaca

SEQ ID NO: 3699 - protein, 40 aa, Homo sapiens
QPPTYDYCFLTNNLPSLLCGSYILNKSDQGRLLFIPKAPC

SEQ ID NO: 3700 - DNA, 1829 bp, Homo sapiens
aggctgggaagtcggccgccgtaaagatggcggcaaattgaaaaagttggagctgctcccgcgcgcgctcccgcgcgcgctgagtgggcggagcgaacagggggctggacagcctggaattgtctcgccatttaaacgagtattcctaaaaggtgaaaagagtagagataagaaagcccatgagaaggtgacagagaggcgccctctgcacactgtggtgttgtcattgcctgagcgcgtcgagccagacagactgctgagcgactatattgagaaggaggtaaagtatttaggtcagttaacgtccataccaggatacctgaatccctccagtaggactgaaatcctgcatttcatagacaatgcaaagagagcccaccagcttccgggacacttgactcaggagcacgatgctgtgctcagcctgtctgcgtacaacgtcaagctggcctggagggacggggaggatatcatcctcagggtgcccatccatgacatcgccgccgtctcctatgttcgggatgacgctgcacacctggtggtcctgaagacagcccaggacccagggatctcccccagccagagtctgtgtgcggaaagttccagaggcctcagtgcaggctccctgtcggagagtgcagttgggcccgtggaggcatgctgcctggtcatcctggctgcagagagcaaggtcgctgcggaggagctttgctgtctgctaggccaggtcttccaggttgtttacacggagtccaccatcgactttctggacagagcgatatttgatggggcctctaccccgacccaccacctgtccctgcacagcgatgactcttctacaaaagtggacattaaggagacctacgaggtggaagccagcactttctgcttccctgaatctgtggatgtgggtggtgcatcaccccacagcaagaccatcagtgagagcgagctgagcgccagcgccactgagctgctgcaggactacatgctgacgctgcgcaccaagctgtcatcacaggagatccagcagtttgcagcactgctgcacgagtaccgcaatggggcctctatccacgagttctgcatcaacctgcggcagctctacggggacagccgcaagttcctgctgcttggtctgaggcccttcatccctgagaaggacagccagcacttcgagaacttcctggagaccattggcgtgaaggatggccgcggcatcatcactgacagctttggcaggcaccggcgggccctgagcaccacatccagttccaccaccaatgggaacagggccacgggcagctctgatgaccggtcggcaccctcagagggggatgagtgggaccgcatgatctcggacatcagcagcgacattgaggcgctgggctgcagcatggaccaggactcagcatgatggacagtggatgggggggcacccacaccttccgcgcagtcgtcataggccttcccagaaggagctgcccagacctgcgtgtcagcccttggtggtggccagggagaggcgcccggtgcagatggccccgggcggcccaggtcctctactgtgaaggagcagggagctgccgagggacacgagcctcagtgcggggtggaaggctctttgccttgtccaccagggctcagccaagccctgcagtgtgtccccgctcggggagggcccggccgagcgggcagggagagccagtcctgtcggctgggcccttggacggctgtcagttttgcacatgatgttcctattgtaactctcagagaccttaaaaagaagtttactgcaatgtgaataatttaatctctggttgccaagc

SEQ ID NO: 3701 - protein, 142 aa, Homo sapiens
MLTLRTKLSSQEIQQFAALLHEYRNGASIHEFCINLRQLYGDSRKFLLLGLRPFIPEKDSQHFENFLETIGVKDGRGIITDSFGRHRRALSTTSSSTTNGNRATGSSDDRSAPSEGDEWDRMISDISSDIEALGCSMDQDSA

SEQ ID NO: 3702 - DNA, 465 bp, Homo sapiens
gggaagtcggccgccgtaaagatggcggcaaattgaaaaagttggagctgctcccgcgcgcgctcccgcgcgcgctgagtgggcggagcgaacagggggctggacagcctggaattgtctcgccatttaaacgagtattcctaaaaggtgaaaagagtagagataagaaagcccatgagaaggtgacagagaggcgccctctgcacactgtggtgttgtcattgcctgagcgcgtcgagccagacagactgctgagcgactatattgagaaggaggtaaagtatttaggtcagttaacgtccataccaggatacctgaatccctccagtaggactgaaatcctgcatttcatagacaatgcaaagagagcccaccagcttccgggacacttgactcaggagcacgatgctgtgctcagcctgtctgcgtacaacgtcaagctggcctggagggacggggaggata

SEQ ID NO: 3703 - protein, 153 aa, Homo sapiens
EVGRRKDGGKLKKLELLPRALPRALSGRSEQGAGQPGIVSPFKRVFLKGEKSRDKKAHEKVTERRPLHTVVLSLPERVEPDRLLSDYIEKEVKYLGQLTSIPGYLNPSSRTEILHFIDNAKRAHQLPGHLTQEHDAVLSLSAYNVKLAWRDGE

SEQ ID NO: 3704 - DNA, 1741 bp, Homo sapiens
ggcccggaagtgcgggtgtggggcgcggccggggcggagacttcgggcccggctggcgggcggcgccgggagcgcgggggcggcgggcccgggtcgagcatgtagcggctgctggcggcggggctcccggggcgggccgggcgggccgcgggagccgcacgcggcgatatggaagaggagggcaagaagggcaagaagtatttaggtcagttaacgtccataccaggatacctgaatccctccagtaggactgaaatcctgcatttcatagacaatgcaaagagagcccaccagcttccgggacacttgactcaggagcacgatgctgtgctcagcctgtctgcgtacaacgtcaagctggcctggagggacggggaggatatcatcctcagggtgcccatccatgacatcgccgccgtctcctatgttcgggatgacgctgcacacctggtggtcctgaagacagcccaggacccagggatctcccccagccagagtctgtgtgcggaaagttccagaggcctcagtgcaggctccctgtcggagagtgcagttgggcccgtggaggcatgctgcctggtcatcctggctgcagagagcaaggtcgctgcggaggagctttgctgtctgctaggccaggtcttccaggttgtttacacggagtccaccatcgactttctggacagagcgatatttgatggggcctctaccccgacccaccacctgtccctgcacagcgatgactcttctacaaaagtggacattaaggagacctacgaggtggaagccagcactttctgcttccctgaatctgtggatgtgggtggtgcatcaccccacagcaagaccatcagtgagagcgagctgagcgccagcgccactgagctgctgcaggactacatgctgacgctgcgcaccaagctgtcatcacaggagatccagcagtttgcagcactgctgcacgagtaccgcaatggggcctctatccacgagttctgcatcaacctgcggcagctctacggggacagccgcaagttcctgctgcttggtctgaggcccttcatccctgagaaggacagccagcacttcgagaacttcctggagaccattggcgtgaaggatggccgcggcatcatcactgacagctttggcaggcaccggcgggccctgagcaccacatccagttccaccaccaatgggaacagggccacgggcagctctgatgaccggtcggcaccctcagagggggatgagtgggaccgcatgatctcggacatcagcagcgacattgaggcgctgggctgcagcatggaccaggactcagcatgatggacagtggatgggggggcacccacaccttccgcgcagtcgtcataggccttcccagaaggagctgcccagacctgcgtgtcagcccttggtggtggccagggagaggcgcccggtgcagatggccccgggcggcccaggtcctctactgtgaaggagcagggagctgccgagggacacgagcctcagtgcggggtggaaggctctttgccttgtccaccagggctcagccaagccctgcagtgtgtccccgctcggggagggcccggccgagcgggcagggagagccagtcctgtcggctgggcccttggacggctgtcagttttgcacatgatgttcctattgtaactctcagagaccttaaaaagaagtttactgcaatgtgaataatttaatctctggttgccaagc

SEQ ID NO: 3705 - protein, 386 aa, Homo sapiens
MEEEGKKGKKYLGQLTSIPGYLNPSSRTEILHFIDNAKRAHQLPGHLTQEHDAVLSLSAYNVKLAWRDGEDIILRVPIHDIAAVSYVRDDAAHLVVLKTAQDPGISPSQSLCAESSRGLSAGSLSESAVGPVEACCLVILAAESKVAAEELCCLLGQVFQVVYTESTIDFLDRAIFDGASTPTHHLSLHSDDSSTKVDIKETYEVEASTFCFPESVDVGGASPHSKTISESELSASATELLQDYMLTLRTKLSSQEIQQFAALLHEYRNGASIHEFCINLRQLYGDSRKFLLLGLRPFIPEKDSQHFENFLETIGVKDGRGIITDSFGRHRRALSTTSSSTTNGNRATGSSDDRSAPSEGDEWDRMISDISSDIEALGCSMDQDSA

SEQ ID NO: 3706 - DNA, 1893 bp, Homo sapiens
gcgcggccggggcggagacttcgggcccggctggcgggcggcgccgggagcgcgggggcggcgggcccgggtcgagcatgtagcggctgctggcggcggggctcccggggcgggccgggcgggccgcgggagccgcacgcggcgatatggaagaggagggcaagaagggcaagaagcctggaattgtctcgccatttaaacgagtattcctaaaaggtgaaaagagtagagataagaaagcccatgagaaggtgacagagaggcgccctctgcacactgtggtgttgtcattgcctgagcgcgtcgagccagacagactgctgagcgactatattgagaaggaggtaaagtatttaggtcagttaacgtccataccaggatacctgaatccctccagtaggactgaaatcctgcatttcatagacaatgcaaagagagcccaccagcttccgggacacttgactcaggagcacgatgctgtgctcagcctgtctgcgtacaacgtcaagctggcctggagggacggggaggatatcatcctcagggtgcccatccatgacatcgccgccgtctcctatgttcgggatgacgctgcacacctggtggtcctgaagacagcccaggacccagggatctcccccagccagagtctgtgtgcggaaagttccagaggcctcagtgcaggctccctgtcggagagtgcagttgggcccgtggaggcatgctgcctggtcatcctggctgcagagagcaaggtcgctgcggaggagctttgctgtctgctaggccaggtcttccaggttgtttacacggagtccaccatcgactttctggacagagcgatatttgatggggcctctaccccgacccaccacctgtccctgcacagcgatgactcttctacaaaagtggacattaaggagacctacgaggtggaagccagcactttctgcttccctgaatctgtggatgtgggtggtgcatcaccccacagcaagaccatcagtgagagcgagctgagcgccagcgccactgagctgctgcaggactacatgctgacgctgcgcaccaagctgtcatcacaggagatccagcagtttgcagcactgctgcacgagtaccgcaatggggcctctatccacgagttctgcatcaacctgcggcagctctacggggacagccgcaagttcctgctgcttggtctgaggcccttcatccctgagaaggacagccagcacttcgagaacttcctggagaccattggcgtgaaggatggccgcggcatcatcactgacagctttggcaggcaccggcgggccctgagcaccacatccagttccaccaccaatgggaacagggccacgggcagctctgatgaccggtcggcaccctcagagggggatgagtgggaccgcatgatctcggacatcagcagcgacattgaggcgctgggctgcagcatggaccaggactcagcatgatggacagtggatgggggggcacccacaccttccgcgcagtcgtcataggccttcccagaaggagctgcccagacctgcgtgtcagcccttggtggtggccagggagaggcgcccggtgcagatggccccgggcggcccaggtcctctactgtgaaggagcagggagctgccgagggacacgagcctcagtgcggggtggaaggctctttgccttgtccaccagggctcagccaagccctgcagtgtgtccccgctcggggagggcccggccgagcgggcagggagagccagtcctgtcggctgggcccttggacggctgtcagttttgcacatgatgttcctattgtaactctcagagaccttaaaaagaagtttactgcaatgtgaataatttaatctctggttgccaagc

SEQ ID NO: 3707 - protein, 444 aa, Homo sapiens; identical to SEQ ID NO: 427

SEQ ID NO: 3708 - DNA, 706 bp, Homo sapiens
gcggagacttcgggcccggctggcgggcggcgccgggagcgcgggggcggcgggcccgggtcgagcatgtagcggctgctggcggcggggctcccggggcgggccgggcgggccgcgggagccgcacgcggcgatatggaagaggagggcaagaagggcaagaagtatttaggtcagttaacgtccataccaggatacctgaatccctccagtaggactgaaatcctgcatttcatagacaatgcaaagagagcccaccagcttccgggacacttgactcaggagcacgatgctgtgctcagcctgtctgcgtacaacgtcaagctggcctggagggacggggaggatatcatcctcagggtgcccatccatgacatcgccgccgtctcctatgttcgggatgacgctgcacacctggtggtcctgaagacagcccaggacccagggatctcccccagccagagtctgtgtgcggaaagttccagaggcctcagtgcaggctccctgtcggagagtgcagttgggcccgtggaggcatgctgcctggtcatcctggctgcagagagcaaggtcgctgcggaggagctttgctgtctgctaggccaggtcttccaggttgtttacacggagtccaccatcgactttctggacagagcgatatttgatggggcctctaccccgacccaccacctgtccctgcacagcg

SEQ ID NO: 3709 - protein, 189 aa, Homo sapiens
MEEEGKKGKKYLGQLTSIPGYLNPSSRTEILHFIDNAKRAHQLPGHLTQEHDAVLSLSAYNVKLAWRDGEDIILRVPIHDIAAVSYVRDDAAHLVVLKTAQDPGISPSQSLCAESSRGLSAGSLSESAVGPVEACCLVILAAESKVAAEELCCLLGQVFQVVYTESTIDFLDRAIFDGASTPTHHLSLH

SEQ ID NO: 3710 - DNA, 1816 bp, Homo sapiens
ttcgggcccggctggcgggcggcgccgggagcgcgggggcggcgggcccgggtcgagcatgtagcggctgctggcggcggggctcccggggcgggccgggcgggccgcgggagccgcacgcggcgatatggaagaggagggcaagaagggcaagaagcctggaattgtctcgccatttaaacgagtattcctaaaaggtgaaaagagtagagataagaaagcccatgagaaggtgacagagaggcgccctctgcacactgtggtgttgtcattgcctgagcgcgtcgagccagacagactgctgagcgactatattgagaaggaggtaaagtatttaggtcagttaacgtccataccaggatacctgaatccctccagtaggactgaaatcctgcatttcatagacaatgcaaagagagcccaccagcttccgggacacttgactcaggagcacgatgctgtgctcagcctgtctgcgtacaacgtcaagctggcctggagggacggggaggatatcatcctcagggtgcccatccatgacatcgccgccgtctcctatgttcgggatgacgctgcacacctggtggtcctgaagacagcccaggacccagggatctcccccagccagagtctgtgtgcggaaagttccagaggcctcagtgcaggctccctgtcggagagtgcagttgggcccgtggaggcatgctgcctggtcatcctggctgcagagagcaaggtcgctgcggaggagctttgctgtctgctaggccaggtcttccaggttgtttacacggagtccaccatcgactttctggacagagcgatatttgatggggcctctaccccgacccaccacctgtccctgcacagcgctgcttccctgaatctgtggatgtgggtggtgcatcaccccacagcaagaccatcagtgagagcgagctgagcgccagcgccactgagctgctgcaggactacatgctgacgctgcgcaccaagctgtcatcacaggagatccagcagtttgcagcactgctgcacgagtaccgcaatggggcctctatccacgagttctgcatcaacctgcggcagctctacggggacagccgcaagttcctgctgcttggtctgaggcccttcatccctgagaaggacagccagcacttcgagaacttcctggagaccattggcgtgaaggatggccgcggcatcatcactgacagctttggcaggcaccggcgggccctgagcaccacatccagttccaccaccaatgggaacagggccacgggcagctctgatgaccggtcggcaccctcagagggggatgagtgggaccgcatgatctcggacatcagcagcgacattgaggcgctgggctgcagcatggaccaggactcagcatgatggacagtggatgggggggcacccacaccttccgcgcagtcgtcataggccttcccagaaggagctgcccagacctgcgtgtcagcccttggtggtggccagggagaggcgcccggtgcagatggccccgggcggcccaggtcctctactgtgaaggagcagggagctgccgagggacacgagcctcagtgcggggtggaaggctctttgccttgtccaccagggctcagccaagccctgcagtgtgtccccgctcggggagggcccggccgagcgggcagggagagccagtcctgtcggctgggcccttggacggctgtcagttttgcacatgatgttcctattgtaactctcagagaccttaaaaagaagtttactgcaatgtgaataatttaatctctggttgccaagc

SEQ ID NO: 3711 - protein, 271 aa, Homo sapiens
MEEEGKKGKKPGIVSPFKRVFLKGEKSRDKKAHEKVTERRPLHTVVLSLPERVEPDRLLSDYIEKEVKYLGQLTSIPGYLNPSSRTEILHFIDNAKRAHQLPGHLTQEHDAVLSLSAYNVKLAWRDGEDIILRVPIHDIAAVSYVRDDAAHLVVLKTAQDPGISPSQSLCAESSRGLSAGSLSESAVGPVEACCLVILAAESKVAAEELCCLLGQVFQVVYTESTIDFLDRAIFDGASTPTHHLSLHSAASLNLWMWVVHHPTARPSVRAS

SEQ ID NO: 3712 - DNA, 860 bp, Homo sapiens
ggcgggcggcgccgggagcgcgggggcggcgggcccgggtcgagcatgtagcggctgctggcggcggggctcccggggcgggccgggcgggccgcgggagccgcacgcggcgatatggaagaggagggcaagaagggcaagaagcctggaattgtctcgccatttaaacgagtattcctaaaaggtgaaaagagtagagataagaaagcccatgagaaggtgacagagaggcgccctctgcacactgtggtgttgtcattgcctgagcgcgtcgagccagacagactgctgagcgactatattgagaaggaggtaaagtatttaggtcagttaacgtccataccaggatacctgaatccctccagtaggactgaaatcctgcatttcatagacaatgcaaagagagcccaccagcttccgggacacttgactcaggagcacgatgctgtgctcagcctgtctgcgtacaacgtcaagctggcctggagggacggggaggatatcatcctcagggtgcccatccatgacatcgccgccgtctcctatgttcgggatgacgctgcacacctggtggtcctgaagacagcccaggacccagggatctcccccagccagagtctgtgtgcggaaagttccagaggcctcagtgcaggctccctgtcggagagtgcagttgggcccgtggaggcatgctgcctggtcatcctggctgcagagagcaaggtcgctgcggaggagctttgctgtctgctaggccaggtcttccaggttgtttacacggagtccaccatcgactttctggacagagcgatatttgatggggcctctaccccgacccaccacctgtccctgcacagcgg

SEQ ID NO: 3713 - protein, 247 aa, Homo sapiens
MEEEGKKGKKPGIVSPFKRVFLKGEKSRDKKAHEKVTERRPLHTVVLSLPERVEPDRLLSDYIEKEVKYLGQLTSIPGYLNPSSRTEILHFIDNAKRAHQLPGHLTQEHDAVLSLSAYNVKLAWRDGEDIILRVPIHDIAAVSYVRDDAAHLVVLKTAQDPGISPSQSLCAESSRGLSAGSLSESAVGPVEACCLVILAAESKVAAEELCCLLGQVFQVVYTESTIDFLDRAIFDGASTPTHHLSLH

SEQ ID NO: 3714 - DNA, 1577 bp, Homo sapiens
ccgggagcgcgggggcggcgggcccgggtcgagcatgtagcggctgctggcggcggggctcccggggcgggccgggcgggccgcgggagccgcacgcggcgatatggaagaggagggcaagaagggcaagaagcctggaattgtctcgccatttaaacgagtattcctaaaaggtgaaaagagtagagataagaaagcccatgagaaggtgacagagaggcgccctctgcacactgtggtgttgtcattgcctgagcgcgtcgagccagacagactgctgagcgactatattgagaaggaggtaaagtatttaggtcagttaacgtccataccaggatacctgaatccctccagtaggactgaaatcctgcatttcatagacaatgcaaagagagcccaccagcttccgggacacttgactcaggagcacgatgctgtgctcagcctgtctgcgtacaacgtcaagctggcctggagggacggggaggatatcatcctcagggtgcccatccatgacatcgccgccgtctcctatgttcgggatgacgctgcacacctggtggtcctgaagacagatgactcttctacaaaagtggacattaaggagacctacgaggtggaagccagcactttctgcttccctgaatctgtggatgtgggtggtgcatcaccccacagcaagaccatcagtgagagcgagctgagcgccagcgccactgagctgctgcaggactacatgctgacgctgcgcaccaagctgtcatcacaggagatccagcagtttgcagcactgctgcacgagtaccgcaatggggcctctatccacgagttctgcatcaacctgcggcagctctacggggacagccgcaagttcctgctgcttggtctgaggcccttcatccctgagaaggacagccagcacttcgagaacttcctggagaccattggcgtgaaggatggccgcggcatcatcactgacagctttggcaggcaccggcgggccctgagcaccacatccagttccaccaccaatgggaacagggccacgggcagctctgatgaccggtcggcaccctcagagggggatgagtgggaccgcatgatctcggacatcagcagcgacattgaggcgctgggctgcagcatggaccaggactcagcatgatggacagtggatgggggggcacccacaccttccgcgcagtcgtcataggccttcccagaaggagctgcccagacctgcgtgtcagcccttggtggtggccagggagaggcgcccggtgcagatggccccgggcggcccaggtcctctactgtgaaggagcagggagctgccgagggacacgagcctcagtgcggggtggaaggctctttgccttgtccaccagggctcagccaagccctgcagtgtgtccccgctcggggagggcccggccgagcgggcagggagagccagtcctgtcggctgggcccttggacggctgtcagttttgcacatgatgttcctattgtaactctcagagaccttaaaaagaagtttactgcaatgtgaataatttaatctctggttgccaagc

SEQ ID NO: 3715 - protein, 353 aa, Homo sapiens
MEEEGKKGKKPGIVSPFKRVFLKGEKSRDKKAHEKVTERRPLHTVVLSLPERVEPDRLLSDYIEKEVKYLGQLTSIPGYLNPSSRTEILHFIDNAKRAHQLPGHLTQEHDAVLSLSAYNVKLAWRDGEDIILRVPIHDIAAVSYVRDDAAHLVVLKTDDSSTKVDIKETYEVEASTFCFPESVDVGGASPHSKTISESELSASATELLQDYMLTLRTKLSSQEIQQFAALLHEYRNGASIHEFCINLRQLYGDSRKFLLLGLRPFIPEKDSQHFENFLETIGVKDGRGIITDSFGRHRRALSTTSSSTTNGNRATGSSDDRSAPSEGDEWDRMISDISSDIEALGCSMDQDSA

SEQ ID NO: 3716 - DNA, 519 bp, Homo sapiens
cgcgggggcggcgggcccgggtcgagcatgtagcggctgctggcggcggggctcccggggcgggccgggcgggccgcgggagccgcacgcggcgatatggaagaggagggcaagaagggcaagaagcctggaattgtctcgccatttaaacgagtattcctaaaaggtgaaaagagtagagataagaaagcccatgagaaggtgacagagaggcgccctctgcacactgtggtgttgtcattgcctgagcgcgtcgagccagacagactgctgagcgactatattgagaaggaggtaaagtatttaggtcagttaacgtccataccaggatacctgaatccctccagtaggactgaaatcctgcatttcatagacaatgcaaagagagcccaccagcttccgggacacttgactcaggagcacgatgctgtgctcagcctgtctgcgtacaacgtcaagctggcctggagggacggggaggatatcatcctcagggtgcccatccatgacatcgccgcc

SEQ ID NO: 3717 - protein, 140 aa, Homo sapiens
MEEEGKKGKKPGIVSPFKRVFLKGEKSRDKKAHEKVTERRPLHTVVLSLPERVEPDRLLSDYIEKEVKYLGQLTSIPGYLNPSSRTEILHFIDNAKRAHQLPGHLTQEHDAVLSLSAYNVKLAWRDGEDIILRVPIHDIA

SEQ ID NO: 3718 - DNA, 2849 bp, Homo sapiens
cccgggtcgagcatgtagcggctgctggcggcggggctcccggggcgggccgggcgggccgcgggagccgcacgcggcgatatggaagaggagggcaagaagggcaagaagcctggaattgtctcgccatttaaacgagtattcctaaaaggtgaaaagagtagagataagaaagcccatgagaaggtgacagagaggcgccctctgcacactgtggtgttgtcattgcctgagcgcgtcgagccagacagactgctgagcgactatattgagaaggaggtaaagggctcccattaatcacatattgatatttattttatttttcatgccctttcatttttctctcatttttcctattctttactcttcccaatgccttctgggaatgtttcaaaccactctccgtcttatgaattcattcctcaactgtattcattcaaccctgaattaaattgtttgtttctactatatctgattggtccttttttataactccttgtccctatttgtttccagtgccctcctacatgcccttgagaatatttattaggattattgtaaattcttgttttctctggcttatcagttcttctccctccagaattagttgtttagtttgtgatcttgcctttccagtgcttgaggtctgtgttccacagatctgtctttattttttccattccctccacctgggtgacagagtgagactttgcctcaaaaaaacaaaacaaaacaaaacaaactcagacaaacaagatatgtttttgaacaatgaatatgtggatatcaaaattaaatcaataccattcacaatcacttaaaaaatgaaacacgggtataaatcttacaaaacatgaataagatttgtatgctgaaaactatagaacactgatgaaagaaatcaaagatctgaataagtggagagacacactgaattcatggattggaagactcaacctaattagtatgttacttgtccctaagttgatataaatggaccaactccttgaaaagcacaaactactactacaagtcatccaatatgaaataatttgaatagcttgtaactattaaaagtgaattctacaattcctatcaaaatttcagcaagaattttttgtagatataaacaagactattcttaaagtgcagtggcacgatcttaaatttcaagctattcttgaaatttaaatggagaggcaaaataagtagaatagctaataataattttgaaaaagaagaaaatgagaagagtcagcctgtctgatttcaagatagatcatactgctatcacaatcaagactgtggtatctgcagagggactgacacagagatcaggggagcaaaatgaactagaaacagatccacacatatatgcccagctgattcttgacaaaggttcataagcaattcagtggagaagggataggatagccttttaacaaatggtgctggagcagttggacatttgtaggcaaaaattgaaccttgccctgaatttcacaacttaaacacaaaaattaactcaaaatggatcataggcttaaatataaaatacaacttctaggataaaacatagaaaatcttcaggatgcagggctacgcagagttctgagacttgatacctaaagcataattcataaaagaaaaaactgataaactggacttcatcaaaatttaaaactcttgctctataaaagacaatgaaaacatatgctacagactgagaggagatatttttaaaccacatatctgacagagggttggtatctacagtatataaagaactctcaaaactcaacagtaaaacaaacaatccgattaagacataagcaaaagacaggaggagatacttcaatgaagaggatatacagatggcagtaagcacatgaaaatatgctcagcatcattagccatcagggaaatgcacattaaaaccataatgagctgccaatacacacctaacagaatgtttaaaaaaagtagaacacaagatgctggagaagatgtggaggaactggacccctcattcattgctggtagggatgtaaaatggtaccgccactctagaaagcagtctggcagtttcttcaaatctccacgtgcaactacgaacaacttggcaattgcactcctaggcatttatcccagggaaatgaaaatttatgttcacatgaaaacctgcctactaatattcaaaacagttgtattcatagtagcccaaaactggaaacaactccatgtcctttggtggataaatggttaaacaaaatgaggtccatccatgccacagaagactattcaataatacaaagggctgggcatggtggcacctgcctgtagtcccacctactggggaggctgaggctggaggattgcttgagcccaggaagtccaggctgcagtgagccatgatcatgccactgtgctccatcctggatgacagtgagaccctgtcttaaagcaacaacaaaggaacaaactacacagcaacctggatgggcctccagagaattatgttgagtgaaaaaagccgttcctaaaggtttcacactgtatgttcctttctgtaacatctttgaaatgacacagttgctgaggtggagaacagattagggtttgctaggggtggagagaagtaggtgtgcctataaagggcaacaggaggggtcctcacagtgatgggtgctctggctgtgtttacatccatgtcctggtgtgatgtgctgtagttctgcaagatgtcactgctgggggcaatagggtaaagggagcgatggatctccctgtatcatttcttataataagagaatttacaattaccttaaaataaaagtttaattataaag

SEQ ID NO: 3719 - protein, 97 aa, Homo sapiens [sequence omitted]

SEQ ID NO: 3720 - DNA, 598 bp, Homo sapiens
actgtttcttggagtccacatctttttctctcttggatgatcctcgttttgctgggagtagatcctctagtatgtttttcaaaagggggtttttagagtgtaaagatcccaaggcactgcaggtgtgaaaataactattttgcaccttgattgacagtttggttttaaattaacttccagatttaaattaatttccacacagaattttaaagggattaccatattcccatttatcaggatacatctgatgctgatctgagtcttactgcttttacagcctggaattgtctcgccatttaaacgagtattcctaaaaggtgaaaagagtagagataagaaagcccatgagaaggtgacagagaggcgccctctgcacactgtggtgttgtcattgcctgagcgcgtcgagccagacagactgctgagcgactatattgagaaggaggtaaagtatttaggtcagttaacgtccataccaggatacctgaatccctccagtaggactgaaatcctgcatttcatagacaatgcaaagagagcccaccagcttccgggacacttgactcaggagcacgatgctgtgctcagcctgtctgcg

SEQ ID NO: 3721 - protein, 112 aa, Homo sapiens
VLLLLQPGIVSPFKRVFLKGEKSRDKKAHEKVTERRPLHTVVLSLPERVEPDRLLSDYIEKEVKYLGQLTSIPGYLNPSSRTEILHFIDNAKRAHQLPGHLTQEHDAVLSLS

SEQ ID NO: 3722 - DNA, 2508 bp, Homo sapiens
agattaggaaatttgccttgaagaagtgagcttggccagaggcacgctgtttaatttcaaagtgctgctgactcaaactcatgagtcctggaggcaggtagaggcacttgtaggctgaggacccgtagagcccggtgtgccctgcccaagccccacctgggaatggagttatctctgtaaagatcttgctgcctttgagcaagcactgcaaatggggtaactggaacagccttgtcgcgtgtttccacccttcgtatgaggcaggtaccatgggtcttcaccaacagcacggcctgttgtctccaggaaatggtagcccctcacagtgctttctgtctgcttgtttagctttggcatttgaatgtgcagaatggtggactttgaaattaatgtccttctgttgactgcagaatttctgctggaaatgcagggaggctgcttgtggggttcgcgtgctgtgggaagtagggaaaatgagctggtttactttgtgtctttttgtgcatgcagactgtttggattttgccaacagtttctgggtgctgcctgctttttaaacttttaaaaaattgtaaacagcttcagtggctttgcagaaggaagctgtggtttctggtcttcctgttcagtcatgtttttttcagagggagggctaacatctggccatatttttcaacaaattcagaagtgagtagagaatgcatagtagctgtcggcagaggaggaaccagaatctctccaaagaaattcctcaaacagaatttcacacagggtattccatggagaatgagcctggaattgtctcgccatttaaacgagtattcctaaaaggtgaaaagagtagagataagaaagcccatgagaaggtgacagagaggcgccctctgcacactgtggtgttgtcattgcctgagcgcgtcgagccagacagactgctgagcgactatattgagaaggaggtaaagtatttaggtcagttaacgtccataccaggatacctgaatccctccagtaggactgaaatcctgcatttcatagacaatgcaaagagagcccaccagcttccgggacacttgactcaggagcacgatgctgtgctcagcctgtctgcgtacaacgtcaagctggcctggagggacggggaggatatcatcctcagggtgcccatccatgacatcgccgccgtctcctatgttcgggatgacgctgcacacctggtggtcctgaagacagcccaggacccagggatctcccccagccagagtctgtgtgcggaaagttccagaggcctcagtgcaggctccctgtcggagagtgcagttgggcccgtggaggcatgctgcctggtcatcctggctgcagagagcaaggtcgctgcggaggagctttgctgtctgctaggccaggtcttccaggttgtttacacggagtccaccatcgactttctggacagagcgatatttgatggggcctctaccccgacccaccacctgtccctgcacagcgatgactcttctacaaaagtggacattaaggagacctacgaggtggaagccagcactttctgcttccctgaatctgtggatgtgggtggtgcatcaccccacagcaagaccatcagtgagagcgagctgagcgccagcgccactgagctgctgcaggactacatgctgacgctgcgcaccaagctgtcatcacaggagatccagcagtttgcagcactgctgcacgagtaccgcaatggggcctctatccacgagttctgcatcaacctgcggcagctctacggggacagccgcaagttcctgctgcttggtctgaggcccttcatccctgagaaggacagccagcacttcgagaacttcctggagaccattggcgtgaaggatggccgcggcatcatcactgacagctttggcaggcaccggcgggccctgagcaccacatccagttccaccaccaatgggaacagggccacgggcagctctgatgaccggtcggcaccctcagagggggatgagtgggaccgcatgatctcggacatcagcagcgacattgaggcgctgggctgcagcatggaccaggactcagcatgatggacagtggatgggggggcacccacaccttccgcgcagtcgtcataggccttcccagaaggagctgcccagacctgcgtgtcagcccttggtggtggccagggagaggcgcccggtgcagatggccccgggcggcccaggtcctctactgtgaaggagcagggagctgccgagggacacgagcctcagtgcggggtggaaggctctttgccttgtccaccagggctcagccaagccctgcagtgtgtccccgctcggggagggcccggccgagcgggcagggagagccagtcctgtcggctgggcccttggacggctgtcagttttgcacatgatgttcctattgtaactctcagagaccttaaaaagaagtttactgcaatgtgaataatttaatctctggttgccaagc

SEQ ID NO: 3723 - protein, 465 aa, Homo sapiens; identical to SEQ ID NO: 425

SEQ ID NO: 3724 - DNA, 542 bp, Homo sapiens
aaatttgccttgaagaagtgagcttggccagaggcacgctgtttaatttcaaagtgctgctgactcaaactcatgagtcctggaggcaggtagaggcacttgtaggctgaggacccgtagagcccggtgtgccctgcccaagccccacctgggaatggagttatctctgtaaagatcttgctgcctttgagcaagcactgcaaatggggtaactggaacagccttgtcgcgtgtttccacccttcgtatgagcctggaattgtctcgccatttaaacgagtattcctaaaaggtgaaaagagtagagataagaaagcccatgagaaggtgacagagaggcgccctctgcacactgtggtgttgtcattgcctgagcgcgtcgagccagacagactgctgagcgactatattgagaaggaggtaaagtatttaggtcagttaacgtccataccaggatacctgaatccctccagtaggactgaaatcctgcatttcatagacaatgcaaagagagcccaccagcttccgggacacttgactca

SEQ ID NO: 3725 - protein, 139 aa, Homo sapiens
SPVCPAQAPPGNGVISVKILLPLSKHCKWGNWNSLVACFHPSYEPGIVSPFKRVFLKGEKSRDKKAHEKVTERRPLHTVVLSLPERVEPDRLLSDYIEKEVKYLGQLTSIPGYLNPSSRTEILHFIDNAKRAHQLPGHL

SEQ ID NO: 3726 - DNA, 1134 bp, Homo sapiens
gaagaagtgagcttggccagaggcacgctgtttaatttcaaagtgctgctgactcaaactcatgagtcctggaggcaggtagaggcacttgtaggctgaggacccgtagagcccggtgtgccctgcccaagccccacctgggaatggagttatctctgtaaagatcttgctgcctttgagcaagcactgcaaatggggtaactggaacagccttgtcgcgtgtttccacccttcgtatgaggcaggtaccatgggtcttcaccaacagcacggcctgttgtctccaggaaatggtagcccctcacagtgctttctgtctgcttgtttagctttggcatttgaatgtgcagaatggtggactttgaaattaatgtccttctgttgactgcagaatttctgctggaaatgcagggaggctgcttgtggggttcgcgtgctgtgggaagtagggaaaatgagctggtttactttgtgtctttttgtgcatgcagactgtttggattttgccaacagtttctgggtgctgcctgctttttaaacttttaaaaaattgtaaacagcttcagtggctttgcagaaggaagctgtggtttctggtcttcctgttcagtcatgtttttttcagagggagggctaacatctggccatatttttcaacaaattcagaagtgagtagagaatgcatagtagctgtcggcagaggaggaaccagaatctctccaaagaaattcctcaaacagaatttcacacagggtattccatggagaatgagcctggaattgtctcgccatttaaacgagtattcctaaaaggtgaaaagagtagagataagaaagcccatgagaaggtgacagagaggcgccctctgcacactgtggtgttgtcattgcctgagcgcgtcgagccagacagactgctgagcgactatattgagaaggaggtaaagtatttaggtcagttaacgtccataccaggatacctgaatccctccagtaggactgaaatcctgcatttcatagacaatgcaaagagagcccaccagcttccgggacacttgactcaggagcacgatgctgtgctcagcctgtctgcgtacaacgtcaagctggcctggagggacggggaggatatcat

SEQ ID NO: 3727 - protein, 150 aa, Homo sapiens
MHSSCRQRRNQNLSKEIPQTEFHTGYSMENEPGIVSPFKRVFLKGEKSRDKKAHEKVTERRPLHTVVLSLPERVEPDRLLSDYIEKEVKYLGQLTSIPGYLNPSSRTEILHFIDNAKRAHQLPGHLTQEHDAVLSLSAYNVKLAWRDGED

SEQ ID NO: 3728 - DNA, 1488 bp, Homo sapiens
gaagaagtgagcttggccagaggcacgctgtttaatttcaaagtgctgctgactcaaactcatgagtcctggaggcaggtagaggcacttgtaggctgaggacccgtagagcccggtgtgccctgcccaagccccacctgggaatggagttatctctgtaaagatcttgctgcctttgagcaagcactgcaaatggggtaactggaacagccttgtcgcgtgtttccacccttcgtatgaggcaggtaccatgggtcttcaccaacagcacggcctgttgtctccaggaaatggtagcccctcacagtgctttctgtctgcttgtttagctttggcatttgaatgtgcagaatggtggactttgaaattaatgtccttctgttgactgcagaatttctgctggaaatgcagggaggctgcttgtggggttcgcgtgctgtgggaagtagggaaaatgagctggtttactttgtgtctttttgtgcatgcagactgtttggattttgccaacagtttctgggtgctgcctgctttttaaacttttaaaaaattgtaaacagcttcagtggctttgcagaaggaagctgtggtttctggtcttcctgttcagtcatgtttttttcagagggagggctaacatctggccatatttttcaacaaattcagaagtgagtagagaatgcatagtagctgtcggcagaggaggaaccagaatctctccaaagaaattcctcaaacagaatttcacacagggtattccatggagaatgagcctggaattgtctcgccatttaaacgagtattcctaaaaggtgaaaagagtagagataagaaagcccatgagaaggtgacagagaggcgccctctgcacactgtggtgttgtcattgcctgagcgcgtcgagccagacagactgctgagcgactatattgagaaggaggtaaagtatttaggtcagttaacgtccataccaggatacctgaatccctccagtaggactgaaatcctgcatttcatagacaatgcaaagagagcccaccagcttccgggacacttgactcaggagcacgatgctgtgctcagcctgtctgcgtacaacgtcaagctggcctggagggacggggaggatatcatcctcagggtgcccatccatgacatcgccgccgtctcctatgttcgggatgacgctgcacacctggtggtcctgaagacagcccaggacccagggatctcccccagccagagtctgtgtgcggaaagttccagaggcctcagtgcaggctccctgtcggagagtgcagttgggcccgtggaggcatgctgcctggtcatcctggctgcagagagcaaggtcgctgcggaggagctttgctgtctgctaggccaggtcttccaggttgtttacacggagtccaccatcgactttctggacagagcgatatttgatggggcctctaccccgacccaccacctgtccctgcacagcgg

SEQ ID NO: 3729 - protein, 268 aa, Homo sapiens
MHSSCRQRRNQNLSKEIPQTEFHTGYSMENEPGIVSPFKRVFLKGEKSRDKKAHEKVTERRPLHTVVLSLPERVEPDRLLSDYIEKEVKYLGQLTSIPGYLNPSSRTEILHFIDNAKRAHQLPGHLTQEHDAVLSLSAYNVKLAWRDGEDIILRVPIHDIAAVSYVRDDAAHLVVLKTAQDPGISPSQSLCAESSRGLSAGSLSESAVGPVEACCLVILAAESKVAAEELCCLLGQVFQVVYTESTIDFLDRAIFDGASTPTHHLSLH

SEQ ID NO: 3730 - DNA, 1595 bp, Homo sapiens
gaagaagtgagcttggccagaggcacgctgtttaatttcaaagtgctgctgactcaaactcatgagtcctggaggcaggtagaggcacttgtaggctgaggacccgtagagcccggtgtgccctgcccaagccccacctgggaatggagttatctctgtaaagatcttgctgcctttgagcaagcactgcaaatggggtaactggaacagccttgtcgcgtgtttccacccttcgtatgaggcaggtaccatgggtcttcaccaacagcacggcctgttgtctccaggaaatggtagcccctcacagtgctttctgtctgcttgtttagctttggcatttgaatgtgcagaatggtggactttgaaattaatgtccttctgttgactgcagaatttctgctggaaatgcagggaggctgcttgtggggttcgcgtgctgtgggaagtagggaaaatgagctggtttactttgtgtctttttgtgcatgcagactgtttggattttgccaacagtttctgggtgctgcctgctttttaaacttttaaaaaattgtaaacagcttcagtggctttgcagaaggaagctgtggtttctggtcttcctgttcagtcatgtttttttcagagggagggctaacatctggccatatttttcaacaaattcagaagtgagtagagaatgcatagtagctgtcggcagaggaggaaccagaatctctccaaagaaattcctcaaacagaatttcacacagggtattccatggagaatgagcctggaattgtctcgccatttaaacgagtattcctaaaaggtgaaaagagtagagataagaaagcccatgagaaggtgacagagaggcgccctctgcacactgtggtgttgtcattgcctgagcgcgtcgagccagacagactgctgagcgactatattgagaaggaggtaaagtatttaggtcagttaacgtccataccaggatacctgaatccctccagtaggactgaaatcctgcatttcatagacaatgcaaagagagcccaccagcttccgggacacttgactcaggagcacgatgctgtgctcagcctgtctgcgtacaacgtcaagctggcctggagggacggggaggatatcatcctcagggtgcccatccatgacatcgccgccgtctcctatgttcgggatgacgctgcacacctggtggtcctgaagacagcccaggacccagggatctcccccagccagagtctgtgtgcggaaagttccagaggcctcagtgcaggctccctgtcggagagtgcagttgggcccgtggaggcatgctgcctggtcatcctggctgcagagagcaaggtcgctgcggaggagctttgctgtctgctaggccaggtcttccaggttgtttacacggagtccaccatcgactttctggacagagcgatatttgatggggcctctaccccgacccaccacctgtccctgcacagcggaccatggccagacccatgggaagctgctcaggctgccctgggaggccagctggcagtggtggagcagtggcagatggggaagaatggaaggtaccccagagctgtct

SEQ ID NO: 3731 - protein, 304 aa, Homo sapiens
MHSSCRQRRNQNLSKEIPQTEFHTGYSMENEPGIVSPFKRVFLKGEKSRDKKAHEKVTERRPLHTVVLSLPERVEPDRLLSDYIEKEVKYLGQLTSIPGYLNPSSRTEILHFIDNAKRAHQLPGHLTQEHDAVLSLSAYNVKLAWRDGEDIILRVPIHDIAAVSYVRDDAAHLVVLKTAQDPGISPSQSLCAESSRGLSAGSLSESAVGPVEACCLVILAAESKVAAEELCCLLGQVFQVVYTESTIDFLDRAIFDGASTPTHHLSLHSGPWPDPWEAAQAALGGQLAVVEQWQMGKNGRYPRA

SEQ ID NO: 3732 - DNA, 850 bp, Homo sapiens
gtagctgtcggcagaggaggaaccagaatctctccaaagaaattcctcaaacagaatttcacacagggtattccatggagaatgagtatttaggtcagttaacgtccataccaggatacctgaatccctccagtaggactgaaatcctgcatttcatagacaatgcaaagagagcccaccagcttccgggacacttgactcaggagcacgatgctgtgctcagcctgtctgcgtacaacgtcaagctggcctggagggacggggaggatatcatcctcagggtgcccatccatgacatcgccgccgtctcctatgttcgggatgacgctgcacacctggtggtcctgaagacagcccaggacccagggatctcccccagccagagtctgtgtgcggaaagttccagaggcctcagtgcaggctccctgtcggagagtgcagttgggcccgtggaggcatgctgcctggtcatcctggctgcagagagcaaggtcgctgcggaggagctttgctgtctgctaggccaggtcttccaggttgtttacacggagtccaccatcgactttctggacagagcgatatttgatggggcctctaccccgacccaccacctgtccctgcacagcgatgactcttctacaaaagtggacattaaggagacctacgaggtggaagccagcactttagcccaactcagagccatgcccccggggagccccaggaccaggccaagctgaccaccctgcatgcccagtcagctctcctctcatcatcatcatcatcacttacattcctctgttcaaggacagggacccacacacacggcatggactaggtttcctgaaacgtg

SEQ ID NO: 3733 - protein, 220 aa, Homo sapiens
MENEYLGQLTSIPGYLNPSSRTEILHFIDNAKRAHQLPGHLTQEHDAVLSLSAYNVKLAWRDGEDIILRVPIHDIAAVSYVRDDAAHLVVLKTAQDPGISPSQSLCAESSRGLSAGSLSESAVGPVEACCLVILAAESKVAAEELCCLLGQVFQVVYTESTIDFLDRAIFDGASTPTHHLSLHSDDSSTKVDIKETYEVEASTLAQLRAMPPGSPRTRPS

SEQ ID NO: 3734 - DNA, 2459 bp, Homo sapiens
cttggttcactgcaatctccgccccccgagtagctgggattacaggcatgagccaccacgcccagctaatttttttgtatttttagtagagatggggtttcaccatgttggccaggctggtcttgaactcctgacctcaggtgatccacccgccttggcctcccaatgtgctgggattacagccatgagccactgcgcctggccaattattttcaataatatattttatttacccctccgtacccaaaacattattacatcagtatataatcaatataaaaatcgttgagctacatagcattctttctttgcctacctctgaaaccctgtgtatagtttgcactcacacatttcaatgtgggctcatcacattttgcatactcagtagtcctgtggccagtggctgccatagggacagagcagccccaggagtctcactgtggggtttgaggtacagtttcttatggagcccttgtctctgtgcatgcgctaactttgcatgtggcctgggacggccttcttctccctcctgaggctggcctgccctctgacaccctggcactagtggcacttctaggttttgttttcagtcttgaagtcctcccagggtggtccgaactgatggtgagagccctgcttcctggggattggcctcacttctgccatcaggaaaaccactgagttactccatgtatttcaggagaacctcatttgtctagggaggcaatgggtaggatgttagaaacaagggcactggggtctgaccgtctagattgccatgtggacagtgcaactcacacgccctcaggccaggcctttcactttcccatgcctcagtttacccatctgtaagaagggaactccccagaacacatggaaacctcctggaggtgactgttctcagggttgtatatgtggtctgttgtatatgaacttgaagcgtgtgaaactgcaggatgacatgcagctctggtgcccttggagctcaggggtcgcgtgttcccacccttatttagagaagcgaagtgtgtctggtgcaggcccttcacctgagtcgttctgtgggtgcctgagccaggtaaaggtcctctcagcctgtttccatggcggcctcagctgtttcctcaagtgcccccatgcctgcccttccactgtgctaaactgagatggtgttgacttctcagcccaggacccagggatctcccccagccagagtctgtgtgcggaaagttccagaggcctcagtgcaggctccctgtcggagagtgcagttgggcccgtggaggcatgctgcctggtcatcctggctgcagagagcaaggtcgctgcggaggagctttgctgtctgctaggccaggtcttccaggttgtttacacggagtccaccatcgactttctggacagagcgatatttgatggggcctctaccccgacccaccacctgtccctgcacagcgatgactcttctacaaaagtggacattaaggagacctacgaggtggaagccagcactttctgcttccctgaatctgtggatgtgggtggtgcatcaccccacagcaagaccatcagtgagagcgagctgagcgccagcgccactgagctgctgcaggactacatgctgacgctgcgcaccaagctgtcatcacaggagatccagcagtttgcagcactgctgcacgagtaccgcaatggggcctctatccacgagttctgcatcaacctgcggcagctctacggggacagccgcaagttcctgctgcttggtctgaggcccttcatccctgagaaggacagccagcacttcgagaacttcctggagaccattggcgtgaaggatggccgcggcatcatcactgacagctttggcaggcaccggcgggccctgagcaccacatccagttccaccaccaatgggaacagggccacgggcagctctgatgaccggtcggcaccctcagagggggatgagtgggaccgcatgatctcggacatcagcagcgacattgaggcgctgggctgcagcatggaccaggactcagcatgatggacagtggatgggggggcacccacaccttccgcgcagtcgtcataggccttcccagaaggagctgcccagacctgcgtgtcagcccttggtggtggccagggagaggcgcccggtgcagatggccccgggcggcccaggtcctctactgtgaaggagcagggagctgccgagggacacgagcctcagtgcggggtggaaggctctttgccttgtccaccagggctcagccaagccctgcagtgtgtccccgctcggggagggcccggccgagcgggcagggagagccagtcctgtcggctgggcccttggacggctgtcagttttgcacatgatgttcctattgtaactctcagagaccttaaaaagaagtttactgcaatgtgaataatttaatctctggttgccaagc

SEQ ID NO: 3735 - protein, 142 aa, Homo sapiens; identical to SEQ ID NO: 3701

SEQ ID NO: 3736 - DNA, 1089 bp, Homo sapiens
tttacacggagtccaccatcgactttctggacagagcgatatttgatggggcctctaccccgacccaccacctgtccctgcacagcgatgactcttctacaaaagtggacattaaggagacctacgaggtggaagccagcactttctgcttccctgaatctgtggatgtgggtggtgcatcaccccacagcaagaccatcagtgagagcgagctgagcgccagcgccactgagctgctgcaggactacatgctgacgctgcgcaccaagctgtcatcacaggagatccagcagtttgcagcactgctgcacgagtaccgcaatggggcctctatccacgagttctgcatcaacctgcggcagctctacggggacagccgcaagttcctgctgcttggtctgaggcccttcatccctgagaaggacagccagcacttcgagaacttcctggagaccattggcgtgaaggatggccgcggcatcatcactgacagctttggcaggcaccggcgggccctgagcaccacatccagttccaccaccaatgggaacagggccacgggcagctctgatgaccggtcggcaccctcagagggggatgagtgggaccgcatgatctcggacatcagcagcgacattgaggcgctgggctgcagcatggaccaggactcagcatgatggacagtggatgggggggcacccacaccttccgcgcagtcgtcataggccttcccagaaggagctgcccagacctgcgtgtcagcccttggtggtggccagggagaggcgcccggtgcagatggccccgggcggcccaggtcctctactgtgaaggagcagggagctgccgagggacacgagcctcagtgcggggtggaaggctctttgccttgtccaccagggctcagccaagccctgcagtgtgtccccgctcggggagggcccggccgagcgggcagggagagccagtcctgtcggctgggcccttggacggctgtcagttttgcacatgatgttcctattgtaactctcagagaccttaaaaagaagtttactgcaatgtgaataatttaatctctggttgccaagc

SEQ ID NO: 3737 - protein, 142 aa, Homo sapiens; identical to SEQ ID NO: 3701

SEQ ID NO: 3738 - DNA, 1173 bp, Homo sapiens
gtgagggctgctcctcagtgcctccttcttccctttcttgctgctggtgccagagccctttgtgggcactacacgccttgtgttggcccagcagctgcagagagacagctgctgagctctcaggcatcctctctatctcatttagtcctcggtggcccagcgagataggtgcaatcttcatccccattttagagatggggaagtggaggcttagaagtcaacagcttatccagaggaatgtaccatatgagtagcagatgatttatcgagctgtaattaaacattcagttttagtgcgactggtttggcccttgtgctttaaaattcccaaagggcctttttttctttaataattttttttttactgagaagtacacaagtcatacatgtacagttgaatgaattttcataaagtaaacacatcatgtaacaccactactgggggttgctgaagtgggcttcttcccctgccagcctttcccaagacctccccgtgggatccacacacagatgtgcacacgttacgcacatgcatgcattctctgcttatttctgccttggagttttgcttgctgtgttctctctactacagctatgccaaaacatagcagcataaacagcagaaatatattctcttataattctatacgttaagagtccattgtgggtcccactgggctaaagttgaggtgtccacagggctggttccttctggaggctccagagaagaagccatttccttgtctttccagctcctaaaggcggctgcatgccttggctcatggcccttcctctgtcttcacagccagccacgtgacctcttccacagtcacatcttcctttgactgtcagcttcctctgcatttcaggactcttgcaatcacattgagcccacccaaattctccagggtcatctccctatttcaaggtcagctgataagcatcctttactcccctttgaaattggtaacatattcaccaattccagggattaggatgtggacgtctttggggggtcattattctgccctccatacttaccttgttcctagtgccagaaatgtcccttttatctctcagcctctccctctgcttcatttaaaatcttaccctctctgcaacactcacctgcctcgctcacaaagctttcactcactgtctgtgctggggtga

SEQ ID NO: 3739 - protein, 58 aa, Homo sapiens [sequence omitted]

SEQ ID NO: 3740 - DNA, 465 bp, Homo sapiens
ggtctgaggcccttcatccctgagaaggacagccagcacttcgagaacttcctggagaccattggcgtgaaggatggccgcggcatcatcactgacagctttggcaggcaccggcggctgcccagacctgcgtgtcagcccttggtggtggccagggagaggcgcccggtgcagatggccccgggcggcccaggtcctctactgtgaaggagcagggagctgccgagggacacgagcctcagtgcggggtggaaggctctttgccttgtccaccagggctcagccaagccctgcagtgtgtccccgctcggggagggcccggccgagcgggcagggagagccagtcctgtcggctgggcccttggacggctgtcagttttgcacatgatgttcctattgtaactctcagagaccttaaaaagaagtttactgcaatgtgaataatttaatctctggttgccaagc

SEQ ID NO: 3741 - protein, 104 aa, Homo sapiens
MAAASSLTALAGTGGCPDLRVSPWWWPGRGARCRWPRAAQVLYCEGAGSCRGTRASVRGGRLFALSTRAQPSPAVCPRSGRARPSGQGEPVLSAGPLDGCQFCT

SEQ ID NO: 3742 - DNA, 796 bp, Homo sapiens
atactctccggtgtcccttcactgccctctggcgtcccctcaccctctggtgtcctgtcaccaccctctgatgtcccttcattactctctggtgtcccctcattaccctctggtgtcccttcatctgctccatgtcctctactctttctgctagcaaagaccagcgactgcagcacgggggccacacctgggatggaccctggaggggcaagcatgtggttcctttgacactccacacagaaggcccatgcaaggccatgttcaaccagagggatggaagggggacactgaaccttctggcacagggtgggctctggtagggggcaagagcccaggagactgtgtggtttgtcctcagcctctcctgatgcttccagggcatgtccattttcatgtaaacttaagagacagtgtcaacagtaaagagcctgctgcctgccctggcctggggtcccatgagtaagcagctctacaacagcccagtacagtggaaaaactcgcccataaaacactgaccgggccggccgcggtggctcacgcctgtaatcccaacactttgggaggcaggcggatcacaaagtcaggagtttgagaccagcctggccaatatggtgaaaccccgtctctgctaaaaatacaaaaattagctgggcgtggtggcaggcgcctgtagtcccagctactcgggaggctgagacaggagaatcgcttgaacccaggaggtgtaggttgcagtgagccaaaaccgcaccactgcactccaacctgggcaacagagtgagactctgtcttgaga

SEQ ID NO: 3743 - protein, 71 aa, Homo sapiens [sequence omitted]

SEQ ID NO: 3744 - DNA, 7237 bp, Homo sapiens
ggggaccggcgggagccctgtgctctgaccccagggcccagccacctggccctcacgttcctgcccagcaagccgggtgcccggccccagcccgagggagccagctgggatgcagggcctggtggggcaccctcggcctgggcggacccaggggagggcggcccaagccccatgctcctccctgagggcctgtcttcccaggctctgtccacggaggctcctctcccggccaccctggagccccggattgtgatgggagaggagacgtgccaggccctcctgtcacccagagctgcccggacagcgctcagggaccaggagggtgggcacgcaagcccagacccaccccccgagctgtgttctcagggtgatctttctgtgccttcccctcccccagaccctgattccttcttcacgcctccctccacccccaccaagaccacctatgccctgcttcctgcctgtgggccccacggggacgccagggactcagaggctgagctgcgggatgagctgctggactcgccccccgcctcaccctcgggctcctacattacggccgatggggacagctgggcctcttcaccctcctgttccctcagcctgctggctccggctgaagggctggacttcccctcaggctggggcctgtccccgcaggggtccatggtggatgaacgagagctgcacccagcagggaccccagagcccccgtcctctgagtccagcctctctgcagacagcagctcctcctggggccaggagggccacttcttcgacctggacttcctggccaatgacccaatgatccccgcagccctcctacccttccagggcagcctcatctttcaggtggaggcagtggaggtgacaccgctatccccagaggaagaagaagaggaggctgtggcggatcccgacccaggtggggacctggctggggagggtgaggaggacagcacgtctgcctccttcctgcagtcactgtctgacctgtccatcacggagggcatggacgaggcttttgccttccgggacgacacctctgcagcctcctctgattcagactcagcctcctacgcagaggcagatgatgagaggctgtacagcggggagccccatgcccaggccactttgctccaggacagtgtccagaagacagaggaggagagcggaggtggggccaaggggctgcaggctcaggatgggactgtgtcctgggccgtggaggctgctcctcagacctcagacagaggggcctatctgtcccagagacaggaattgatctcagaagtaacagaagagggccttgctttaggccaggagtccactgccactgtgacccctcacactctgcaggtagccccaggcctccaggtggaggtggctaccagagtgaccccacaggctggggaggaagaaacagactccaccgctggacaagaatctgctgccatggcaatgcctcagccctcccaggagggcatcagcgagatcttaggccaagagtctgtcactgcagaaaaacttccaactccacaggaagaaacaagcctcacattgtgtccagactctcctcagaacttgaaggaagaaggagggctggacctcccctctggcagaaagcctgtagctgcagccacgattgtccccaggcaggctaaagaggacctcaccttaccccaggactccgctatgacaccgcctctgcccctacaagacacagatctctcatcagccccaaagcctgtggctgcagccacgattgtgtcccagcaggctgaagagggcctcaccttaccccaggactccgttatgacaccgcctctgcccctacaagacacagaactctcgtcagccccaaagcctgtggctgcagccacgcttgtgtcccagcaggctgaagagggcctcaccttaccccaggactccgctatgacaccgcctctgcccctacaagacacagatctctcgtcagccccaaagcctgtggctgcagccacgcttgtgtcccagcaggctgaagagggcctcaccttaccccaggactccgctatgacaccgcctctgcccctacaagacacagatctctcgtcagccccaaagcctgtggctgcagccacgcttgtgtcccagcaggctgaagagggcctcaccttaccccaggactccgctatgacaccgcctctgcccctacaagacacagatctctcgtcagccccaaagcctgtggctgcagccacgattgtgtcccagcaggctgaagagggcctcaccttaccccaggactccgctatgacaccgcctctgcccctacaagacacagatctctcgtcagccccaaagcctgtggctgcagccacgattgtgtcccagcaggctgaagagggcctcaccttaccccaggactccgctatgacaccgcctctgcccctacaagacacagatctctcgtcagccccaaagcctgtggctgcagccacgcctgtgtcccagcaggctgaagagggcctcaccttaccccaggactccgctatgacaccgcctctgcccctacaagacacagataggccccacctcaggtccagagcctctggctgtggccacccctcaaaccttgcaggcagaagcaggctgtgccccagggacagagcctgtggccaccatggctcagcaggaagtaggtgaggccttaggccccaggccagcacctgaggagaagaatgcagccctccctacagtcccggagcctgcagccttggaccaggtccaacaggatgacccacagccagctgcagaagctgggacaccttgggccgcacaggaagatgcggattccactttgggcatggaggccctcagtctccctgagccggcctctggtgctggggaggaaatagcagaagccctttctaggcctggacgggaagcatgtctggaagcgcgagcgcacacaggtgatggggctaagcctgactcaccccaaaaggagaccctggaggttgagaaccagcaggaaggaggcctgaagccactggcacaggaacatggacccaggtcagcacttggaggtgcaagggaggtccccgatgcgcctcctgctgcctgccctgaggtcagccaggcccggctcctgagcccagccagggaggaaagaggcctgagtggcaagtccaccccggagcccacgcttccctcagctgtggccacagaggccagtctggactcctgcccagagtcttcagtaggggctgtgtccagtctggacagaggctgccctgacgcgcctgcccccacgtctgcaccaacctcccagcagccggagcctgtactgggtctgggcagtgttgagcaaccccacgaagtacccagtgtccttggcacccccttgctgcagcccccagaaaaccttgccaagggtcagcccagcacgcccgtggacaggcccctgggccctgacccttctgctcctggtacccttgctggggcagccctacccccactggagcccccagccccctgcctgtgccaggacccccaggaagactctgtggaagacgaggagcccccaggctctctgggcctcccaccgccccaggcaggagtccagcctgccgctgctgctgtctcaggaaccacacagcctctggggactgggccgcgagtcagcctctcgcctcactccccactcctcagccccaaggtggcctccatggatgccaaagacctggccttgcagatcttgccgccttgccaagtgcctcctccctctgggccccagagcccagctggccctcaagggctctcagcccccgagcagcaagaggatgaggacagcctggaggaagactcgcctcgggccctgggctcgggccagcattcggatagccacggggagtcatcagccgagctggacgagcaggacatcttggctcctcagaccgtgcagtgtccagcccaggccccagcaggcggcagtgaggagaccatcgccaaagccaagcagagtcgcagtgagaagaaggcccgaaaggcaatgtcaaagctgggcttgcggcagattcagggagtcaccaggatcaccatccagaagtccaagaacatcctctttgtcatcgccaagcctgatgtcttcaagagcccagcctcagacacttatgtggtctttggcgaggccaagattgaggacctgtcccagcaagtgcacaaagccgcagctgagaagtttaaggtgccctcagagccctcagccttggtccctgagtcagcacccaggccccgggtgaggctggagtgcaaggaagaggaagaggaggaggaggaagaggtggacgaggcggggctggaactgcgtgacattgagctggtgatggcgcaggccaatgtgtccagggccaaggccgtgcgggctctgagagacaaccacagtgacatcgtcaacgccatcatggaactgaccatgtagccactgaccggaagctggagccatcctacgccttccctcagctctgctactcaataaatcggtgtcccttcattgccctctggtgtctcctcctcgccctctggagtcccatcatcaccatctggcatcccttcacttccctctggtgtcccttcaccaccatctggtgtccccttactgccctgtggtgtccactcattactctgtggtgtcccctcactgccctctggtgccccctcatcaccctctggtgtcccttcatcaccctcttgtgtcccttccctctggtgtcccctcaccaccctctgatgtcccctcattactctctggtgtcacctcaatactcaccagtgtcccctcactgccctttggtgtcccctcattactctctggtgtcccctcaccgccctctggtgtcccctcaatactccccggtgtaccttcaccaccctctggtgtcccctgctctctggtgtcccaatactctctgatgtcccaatactctctggtgtcccctcattactctctggtgtcccctcactgccctctggtgtccccgcaatactctctggtgtcccctcaccaccctctggtgtctcaatactctctggtgtcccctcaccgccttctgatgtcccctcaccttctgatgtcacctcattatctctggtgtcccctcaccaccttctgatgtcccctcattactctctggtgtcccctcactgccttctgatgtctcctcaccgccttctgatgtcccctcattactctctgatgtcccctcattactctctggtgtcccctcaccgccttctgatgtcccctcaccgccttctgatgtcccctcaccaccttctgatgtcccctcattactctctggtgtcccctcaccgccttctgatgtcccctcaccaccttctgatgtcccctcaccaccttctgatgtcccattactctctgatgtcccctcaccgccttctgatgtcccattactctctgatgtcccctcaccgccttctgatgtcccctcactgccttctgatgtcccctcactctctggtgtcccctcaccgccttctgatgtcccctcattactctctggtgtcccctcaccgccttctgatatctcaccaccttctgatgtgccctcattactctctgatgtcccctcactgccttctgatgtcccctcattactctctggtgtcccctcaccgccttctgatgtcccctcattactctctgatgtcccctcaccgccttctgatgtcccctcaccgccttctgatatcccattactctctggtgtcccctcaccgccttctgatgtcccctcaccgccttctgatgtcccctcaccaccttctgatgtcccattactctctggtgtcccctcaccgctttctgatgtcccattactctctggtgtcccctcaccgccttctgacgtcccctcattactgatgtcccctcaccgccttctgatgtcccattactctctggtgtcccctcaccgccttgatgtcccctcattactctctgatgtcccctcattactctctggtgtcccctcatcgccctctggtgtcccctcactgccctctggtgtcccaatactctccggtgtcccttcactgccctctggcgtcccctcaccttctggtgtccccattactctctggtgtcccctcaccaccctctggtgtcccctcagtactctctggcgtcccttcactgccctctggtgtcccctcaatactctccggtgtcccctcatcgccctctggtgtcccatcaccctctgatgtcccctcaccaccctctcgtgcccctcattactctctggtgtcccttcaccgccctctggtgtcccctcaccttctagtgtcccctcattactctctggtgtcccctcactactctctggtgtcccctcaccaccctctggtgtcccctcatcaccttctgatgtcccatcactccctgatgtcccattactccctggtgtcccctcactgccctctggtgtcctgtcaccaccctctgatgtcccttcattactctctggtgtcccctcattaccctctggtgtcccttcatctgctccatgtcctctactctttctgctagcaaagaccagcgactgcagcacgggggccacacctgggatggaccctggaggggcaagcatgtggttcctttgacactccacacagaaggcccatgcaaggccatgttcaaccagagggatggaagggggacactgaaccttctggcacagggtgggctctggtagggggcaagagcccaggagactgtgtggtttgtcctcagcctctcctgatgcttccagggcatgtccattttcatgtaaacttaagagacagtgtcaacagtaaagagcctgctgcctgccctggcctggggtcccatgagtaagcagctctacaacagcccagtacagtggaaaaactcgcccataaaacactgaccgggccggccgcggtggctcacgcctgtaatcccaacactttgggaggcaggcggatcacaaagtcaggagtttgagaccagcctggccaatatggtgaaaccccgtctctgctaaaaatacaaaaattagctgggcgtggtggcaggcgcctgtagtcccagctactcgggaggctgagacaggagaatcgcttgaacccaggaggtgtaggttgcagtgagccaaaaccgcaccactgcactccaacctgggcaacagagtgagactctgtcttgaga

SEQ ID NO: 3745 - protein, 838 aa, Homo sapiens
MLLPEGLSSQALSTEAPLPATLEPRIVMGEETCQALLSPRAARTALRDQEGGHASPDPPPELCSQGDLSVPSPPPDPDSFFTPPSTPTKTTYALLPACGPHGDARDSEAELRDELLDSPPASPSGSYITADGDSWASSPSCSLSLLAPAEGLDFPSGWGLSPQGSMVDERELHPAGTPEPPSSESSLSADSSSSWGQEGHFFDLDFLANDPMIPAALLPFQGSLIFQVEAVEVTPLSPEEEEEEAVADPDPGGDLAGEGEEDSTSASFLQSLSDLSITEGMDEAFAFRDDTSAASSDSDSASYAEADDERLYSGEPHAQATLLQDSVQKTEEESGGGAKGLQAQDGTVSWAVEAAPQTSDRGAYLSQRQELISEVTEEGLALGQESTATVTPHTLQVAPGLQVEVATRVTPQAGEEETDSTAGQESAAMAMPQPSQEGISEILGQESVTAEKLPTPQEETSLTLCPDSPQNLKEEGGLDLPSGRKPVAAATIVPRQAKEDLTLPQDSAMTPPLPLQDTDLSSAPKPVAAATIVSQQAEEGLTLPQDSVMTPPLPLQDTELSSAPKPVAAATLVSQQAEEGLTLPQDSAMTPPLPLQDTDLSSAPKPVAAATLVSQQAEEGLTLPQDSAMTPPLPLQDTDLSSAPKPVAAATLVSQQAEEGLTLPQDSAMTPPLPLQDTDLSSAPKPVAAATIVSQQAEEGLTLPQDSAMTPPLPLQDTDLSSAPKPVAAATIVSQQAEEGLTLPQDSAMTPPLPLQDTDLSSAPKPVAAATPVSQQAEEGLTLPQDSAMTPPLPLQDTDRPHLRSRASGCGHPSNLAGRSRLCPRDRACGHHGSAGSR

SEQ ID NO: 3746 - DNA, 2208 bp, Homo sapiens
caggcagcaggctctttactgttgacactgtctcttaagtttacatgaaaatggacatgccctggaagcatcaggagaggctgaggacaaaccacacagtctcctgggctcttgccccctaccagagcccaccctgtgccagaaggttcagtgtcccccttccatccctctggttgaacatggccttgcatgggccttctgtgtggagtgtcaaaggaaccacatgcttgcccctccagggtccatcccaggtgtggcccccgtgctgcagtcgctggtctttgctagcagaaagagtagaggacatggagcagatgaagggacaccagagggtaatgaggggacaccagagagtaatgaagggacatcagagggtggtgacaggacaccagagggcagtgaggggacaccagggagtaatgggacatcagggagtgatgggacatcagaaggtgatgaggggacaccagagggtggtgaggggacaccagagagtagtgaggggacaccagagagtaatgaggggacactagaaggtgaggggacaccagagggcggtgaagggacaccagagagtaatgaggggcacgagagggtggtgaggggacatcagagggtgatgggacaccagagggcgatgaggggacaccggagagtattgaggggacaccagagggcagtgaagggacgccagagagtactgaggggacaccagagggtggtgaggggacaccagagagtaatggggacaccagaaggtgaggggacgccagagggcagtgaagggacaccggagagtattgggacaccagagggcagtgaggggacaccagagggcgatgaggggacaccagagagtaatgaggggacatcagagagtaatgaggggacatcaaggcggtgaggggacaccagagagtaatgggacatcagaaggcggtgaggggacatcagtaatgaggggacgtcagaaggcggtgaggggacaccagagagtaatgggacatcagaaagcggtgaggggacaccagagagtaatgggacatcagaaggtggtgaggggacatcagaaggcggtgaggggacatcagaaggcggtgaggggacaccagagagtaatgggatatcagaaggcggtgaggggacatcagaaggcggtgaggggacatcagagagtaatgaggggacatcagaaggcggtgaggggacaccagagagtaatgaggggacatcagaaggcagtgaggggacatcagagagtaatgagggcacatcagaaggtggtgagatatcagaaggcggtgaggggacaccagagagtaatgaggggacatcagaaggcggtgaggggacaccagagagtgaggggacatcagaaggcagtgaggggacatcagaaggcggtgaggggacatcagagagtaatgggacatcagaaggcggtgaggggacatcagagagtaatgggacatcagaaggtggtgaggggacatcagaaggtggtgaggggacatcagaaggcggtgaggggacaccagagagtaatgaggggacatcagaaggtggtgaggggacatcagaaggcggtgaggggacatcagaaggcggtgaggggacaccagagagtaatgaggggacatcagagagtaatgaggggacatcagaaggcggtgaggagacatcagaaggcagtgaggggacaccagagagtaatgaggggacatcagaaggtggtgaggggacaccagagagtaatggggacatcagaaggcggtgaggggacaccagagagtaatgaggagacatcagaaggcggtgaggggacatcggagagtaatgaggggacatcagaaggcggtgaggggacaccagagagtaatgaggggacatcagaaggcggtgaggggacatcagaaggtggtgaggggacaccagagagtaatgaggggacatcagaaggcggtgaggggacatcagtaatgaggtgacatcagaaggtgaggggacatcagaaggcggtgaggggacaccagagagtattgagacaccagagggtggtgaggggacaccagagagtattgcggggacaccagagggcagtgaggggacaccagagagtaatgaggggacaccagagagtattgggacatcagagagtattgggacaccagagagcaggggacaccagagggtggtgaaggtacaccg

SEQ ID NO: 3747 - protein, 382 aa, Homo sapiens
MRGHQRVMRGHQRVMRGHQGGEGTPESNGTSEGGEGTSVMRGRQKAVRGHQRVMGHQKAVRGHQRVMGHQKVVRGHQKAVRGHQKAVRGHQRVMGYQKAVRGHQKAVRGHQRVMRGHQKAVRGHQRVMRGHQKAVRGHQRVMRAHQKVVRYQKAVRGHQRVMRGHQKAVRGHQRVRGHQKAVRGHQKAVRGHQRVMGHQKAVRGHQRVMGHQKVVRGHQKVVRGHQKAVRGHQRVMRGHQKVVRGHQKAVRGHQKAVRGHQRVMRGHQRVMRGHQKAVRRHQKAVRGHQRVMRGHQKVVRGHQRVMGTSEGGEGTPESNEETSEGGEGTSESNEGTSEGGEGTPESNEGTSEGGEGTSEGGEGTPESNEGTSEGGEGTSVMR

SEQ ID NO: 3748 - DNA, 2022 bp, Homo sapiens
atgcttgcccctccagggtccatcccaggtgtggcccccgtgctgcagtcgctggtctttgctagcagaaagagtagaggacatggagcagatgaagggacaccagagggtaatgaggggacaccagagagtaatgaagggacatcagagggtggtgacaggacaccagagggcagtgaggggacaccagggagtaatgggacatcagggagtgatgggacatcagaaggtgatgaggggacaccagagggtggtgaggggacaccagagagtagtgaggggacaccagagagtaatgaggggacactagaaggtgaggggacaccagagggcggtgaagggacaccagagagtaatgaggggcacgagagggtggtgaggggacatcagagggtgatgggacaccagagggcgatgaggggacaccggagagtattgaggggacaccagagggcagtgaagggacgccagagagtactgaggggacaccagagggtggtgaggggacaccagagagtaatggggacaccagaaggtgaggggacgccagagggcagtgaagggacaccggagagtattgggacaccagagggcagtgaggggacaccagagggcgatgaggggacaccagagagtaatgaggggacatcagagagtaatgaggggacatcaaggcgtaatgaggggacgtcagaaggcggtgaggggacaccagagagtaatgggacatcagaaagcggtgaggggacaccagagagtaatgggacatcagaaggtggtgaggggacatcagaaggcggtgaggggacatcagaaggcggtgaggggacaccagagagtaatgggatatcagaaggcggtgaggggacatcagaaggcggtgaggggacatcagagagtaatgaggggacatcagaaggcggtgaggggacaccagagagtaatgaggggacatcagaaggcagtgaggggacatcagagagtaatgagggcacatcagaaggtggtgagatatcagaaggcggtgaggggacaccagagagtaatgaggggacatcagaaggcggtgaggggacaccagagagtgaggggacatcagaaggcagtgaggggacatcagaaggcggtgaggggacatcagagagtaatgggacatcagaaggcggtgaggggacatcagagagtaatgggacatcagaaggtggtgaggggacatcagaaggtggtgaggggacatcagaaggcggtgaggggacaccagagagtaatgaggggacatcagaaggtggtgaggggacatcagaaggcggtgaggggacatcagaaggcggtgaggggacaccagagagtaatgaggggacatcagagagtaatgaggggacatcagaaggcggtgaggagacatcagaaggcagtgaggggacaccagagagtaatgaggggacatcagaaggtggtgaggggacaccagagagtaatgaggggacatcagaaggcggtgaggggacatcagtaatgagagagtattgggacaccagagagcaggggacaccagagggtggtgaaggtacaccggggagtattgaggggacaccagagggcggtgaggggacaccagagagtaatgaggggacaccaaagggcagtgaggggacactggtgagtattgaggtgacaccagagagtaatgaggggacatcagagggtggtgaggggacaccagagggaagtgaggggacacagggtgatgaagggacacaagagggtgatgaggggacaccagagggaagtgaggggacacaagagggtgatgaagggacaccagagggtgatgagggggcaccagagggcagtgaggggacaccacagagtaatgagtggacaccacagggcagtaaggggacaccagatggtggtgaagggacaccagagggaagtgaagggatgccagatggtgatgatgggactccagagggcgaggaggagacaccagagggcaatgaagggacaccgatttattga

SEQ ID NO: 3749 - protein, 673 aa, Homo sapiens
MLAPPGSIPGVAPVLQSLVFASRKSRGHGADEGTPEGNEGTPESNEGTSEGGDRTPEGSEGTPGSNGTSGSDGTSEGDEGTPEGGEGTPESSEGTPESNEGTLEGEGTPEGGEGTPESNEGHERVVRGHQRVMGHQRAMRGHRRVLRGHQRAVKGRQRVLRGHQRVVRGHQRVMGTPEGEGTPEGSEGTPESIGTPEGSEGTPEGDEGTPESNEGTSESNEGTSRRNEGTSEGGEGTPESNGTSESGEGTPESNGTSEGGEGTSEGGEGTSEGGEGTPESNGISEGGEGTSEGGEGTSESNEGTSEGGEGTPESNEGTSEGSEGTSESNEGTSEGGEISEGGEGTPESNEGTSEGGEGTPESEGTSEGSEGTSEGGEGTSESNGTSEGGEGTSESNGTSEGGEGTSEGGEGTSEGGEGTPESNEGTSEGGEGTSEGGEGTSEGGEGTPESNEGTSESNEGTSEGGEETSEGSEGTPESNEGTSEGGEGTPESNEGTSEGGEGTSVMREYWDTREQGTPEGGEGTPGSIEGTPEGGEGTPESNEGTPKGSEGTLVSIEVTPESNEGTSEGGEGTPEGSEGTQGDEGTQEGDEGTPEGSEGTQEGDEGTPEGDEGAPEGSEGTPQSNEWTPQGSKGTPDGGEGTPEGSEGMPDGDDGTPEGEEETPEGNEGTPIY

SEQ ID NO: 3750 - DNA, 1530 bp, Homo sapiens
atgaggggacgtcagaaggcggtgaggggacaccagagagtaatgggacatcagaaagcggtgaggggacaccagagagtaatgggacatcagaaggtggtgaggggacatcagaaggcggtgaggggacatcagaaggcggtgaggggacaccagagagtaatgggatatcagaaggcggtgaggggacatcagaaggcggtgaggggacatcagagagtaatgaggggacatcagaaggcggtgaggggacaccagagagtaatgaggggacatcagaaggcagtgaggggacatcagagagtaatgagggcacatcagaaggtggtgagatatcagaaggcggtgaggggacaccagagagtaatgaggggacatcagaaggcggtgaggggacaccagagagtgaggggacatcagaaggcagtgaggggacatcagaaggcggtgaggggacatcagagagtaatgggacatcagaaggcggtgaggggacatcagagagtaatgggacatcagaaggtggtgaggggacatcagaaggtggtgaggggacatcagaaggcggtgaggggacaccagagagtaatgaggggacatcagaaggtggtgaggggacatcagaaggcggtgaggggacatcagaaggcggtgaggggacaccagagagtaatgaggggacatcagagagtaatgaggggacatcagaaggcggtgaggagacatcagaaggcagtgaggggacaccagagagtaatgaggggacatcagaaggtggtgaggggacaccagagagtaatggggacatcagaaggcggtgaggggacaccagagagtaatgaggagacatcagaaggcggtgaggggacatcggagagtaatgaggggacatcagaaggcggtgaggggacaccagagagtaatgaggggacatcagaaggcggtgaggggacatcagaaggtggtgaggggacaccagagagtaatgaggggacatcagaaggcggtgaggggacatcagtaatgagagagtattgggacaccagagagcaggggacaccagagggtggtgaaggtacaccggggagtattgaggggacaccagagggcggtgaggggacaccagagagtaatgaggggacaccaaagggcagtgaggggacactggtgagtattgaggtgacaccagagagtaatgaggggacatcagagggtggtgaggggacaccagagggaagtgaggggacacagggtgatgaagggacacaagagggtgatgaggggacaccagagggaagtgaggggacacaagagggtgatgaagggacaccagagggtgatgagggggcaccagagggcagtgaggggacaccacagagtaatgagtggacaccacagggcagtaaggggacaccagatggtggtgaagggacaccagagggaagtgaagggatgccagatggtgatgatgggactccagagggcgaggaggagacaccagagggcaatgaagggacaccgatttattga

SEQ ID NO: 3751 - protein, 509 aa, Homo sapiens
MRGRQKAVRGHQRVMGHQKAVRGHQRVMGHQKVVRGHQKAVRGHQKAVRGHQRVMGYQKAVRGHQKAVRGHQRVMRGHQKAVRGHQRVMRGHQKAVRGHQRVMRAHQKVVRYQKAVRGHQRVMRGHQKAVRGHQRVRGHQKAVRGHQKAVRGHQRVMGHQKAVRGHQRVMGHQKVVRGHQKVVRGHQKAVRGHQRVMRGHQKVVRGHQKAVRGHQKAVRGHQRVMRGHQRVMRGHQKAVRRHQKAVRGHQRVMRGHQKVVRGHQRVMGTSEGGEGTPESNEETSEGGEGTSESNEGTSEGGEGTPESNEGTSEGGEGTSEGGEGTPESNEGTSEGGEGTSVMREYWDTREQGTPEGGEGTPGSIEGTPEGGEGTPESNEGTPKGSEGTLVSIEVTPESNEGTSEGGEGTPEGSEGTQGDEGTQEGDEGTPEGSEGTQEGDEGTPEGDEGAPEGSEGTPQSNEWTPQGSKGTPDGGEGTPEGSEGMPDGDDGTPEGEEETPEGNEGTPIY

SEQ ID NO: 3752 - DNA, 263 bp, Homo sapiens
cctcaccaccttctgatgtcccctcaccgccttctgatgtcccctcattactctctggtgtcccctcaccgccttctgatgtcccctcattactctccgatgtcccctcaccgccttctgatgtctcctcattactctctggtgtcccctcaccgccttctgatgtccccattacgccttctgatatctcaccaccttctgatgtgccctcattactctctgatgtcccctcactgccttctgatgtcccctcattactctct

SEQ ID NO: 3753 - protein, 81 aa, Homo sapiens
MSPHRLLMSPHYSLVSPHRLLMSPHYSPMSPHRLLMSPHYSLVSPHRLLMSPLRLLISHHLLMCPHYSLMSPHCLLMSPHY

SEQ ID NO: 3754 - DNA, 648 bp, Homo sapiens
tggggaaggaccaaccaccagcccaaggtcttggggaagttggcggtggagactttgccttcctgggcactgtgctgctctcctcccccgacgtgggtcaacaccaggtctgagcccccctctgccctctactcccaggcaatgtcaaagctgggcttgcggcagattcagggagtcaccaggatcaccatccagaagtccaagaacatcctctttgtcatcgccaagcctgatgtcttcaagagcccagcctcagacacttatgtggtctttggcgaggccaagattgaggacctgtcccagcaagtgcacaaagccgcagctgagaagtttaaggtgccctcagagccctcagccttggtccctgagtcagcacccaggccccgggtgaggctggagtgcaaggaagaggaagaggaggaggaggaagaggtggacgaggcggggctggaactgcgtgacattgagctggtgatggcgcaggccaatgtgtccagggccaaggccgtgcgggctctgagagacaaccacagtgacatcgtcaacgccatcatggaactgaccatgtagccactgaccggaagctggagccatcctacgccttccctcagctctgctactcaataaatcggtgtcccttcattgccc

SEQ ID NO: 3755 - protein, 142 aa, Homo sapiens
MSKLGLRQIQGVTRITIQKSKNILFVIAKPDVFKSPASDTYVVFGEAKIEDLSQQVHKAAAEKFKVPSEPSALVPESAPRPRVRLECKEEEEEEEEEVDEAGLELRDIELVMAQANVSRAKAVRALRDNHSDIVNAIMELTM

SEQ ID NO: 3756 - DNA, 4498 bp, Homo sapiens
ggggaccggcgggagccctgtgctctgaccccagggcccagccacctggccctcacgttcctgcccagcaagccgggtgcccggccccagcccgagggagccagctgggatgcagggcctggtggggcaccctcggcctgggcggacccaggggagggcggcccaagccccatgctcctccctgagggcctgtcttcccaggctctgtccacggaggctcctctcccggccaccctggagccccggattgtgatgggagaggagacgtgccaggccctcctgtcacccagagctgcccggacagcgctcagggaccaggagggtgggcacgcaagcccagacccaccccccgagctgtgttctcagggtgatctttctgtgccttcccctcccccagaccctgattccttcttcacgcctccctccacccccaccaagaccacctatgccctgcttcctgcctgtgggccccacggggacgccagggactcagaggctgagctgcgggatgagctgctggactcgccccccgcctcaccctcgggctcctacattacggccgatggggacagctgggcctcttcaccctcctgttccctcagcctgctggctccggctgaagggctggacttcccctcaggctggggcctgtccccgcaggggtccatggtggatgaacgagagctgcacccagcagggaccccagagcccccgtcctctgagtccagcctctctgcagacagcagctcctcctggggccaggagggccacttcttcgacctggacttcctggccaatgacccaatgatccccgcagccctcctacccttccagggcagcctcatctttcaggtggaggcagtggaggtgacaccgctatccccagaggaagaagaagaggaggctgtggcggatcccgacccaggtggggacctggctggggagggtgaggaggacagcacgtctgcctccttcctgcagtcactgtctgacctgtccatcacggagggcatggacgaggcttttgccttccgggacgacacctctgcagcctcctctgattcagactcagcctcctacgcagaggcagatgatgagaggctgtacagcggggagccccatgcccaggccactttgctccaggacagtgtccagaagacagaggaggagagcggaggtggggccaaggggctgcaggctcaggatgggactgtgtcctgggccgtggaggctgctcctcagacctcagacagaggggcctatctgtcccagagacaggaattgatctcagaagtaacagaagagggccttgctttaggccaggagtccactgccactgtgacccctcacactctgcaggtagccccaggcctccaggtggaggtggctaccagagtgaccccacaggctggggaggaagaaacagactccaccgctggacaagaatctgctgccatggcaatgcctcagccctcccaggagggcatcagcgagatcttaggccaagagtctgtcactgcagaaaaacttccaactccacaggaagaaacaagcctcacattgtgtccagactctcctcagaacttgaaggaagaaggagggctggacctcccctctggcagaaagcctgtagctgcagccacgattgtccccaggcaggctaaagaggacctcaccttaccccaggactccgctatgacaccgcctctgcccctacaagacacagatctctcatcagccccaaagcctgtggctgcagccacgattgtgtcccagcaggctgaagagggcctcaccttaccccaggactccgttatgacaccgcctctgcccctacaagacacagaactctcgtcagccccaaagcctgtggctgcagccacgcttgtgtcccagcaggctgaagagggcctcaccttaccccaggactccgctatgacaccgcctctgcccctacaagacacagatctctcgtcagccccaaagcctgtggctgcagccacgcttgtgtcccagcaggctgaagagggcctcaccttaccccaggactccgctatgacaccgcctctgcccctacaagacacagatctctcgtcagccccaaagcctgtggctgcagccacgcttgtgtcccagcaggctgaagagggcctcaccttaccccaggactccgctatgacaccgcctctgcccctacaagacacagatctctcgtcagccccaaagcctgtggctgcagccacgattgtgtcccagcaggctgaagagggcctcaccttaccccaggactccgctatgacaccgcctctgcccctacaagacacagatctctcgtcagccccaaagcctgtggctgcagccacgattgtgtcccagcaggctgaagagggcctcaccttaccccaggactccgctatgacaccgcctctgcccctacaagacacagatctctcgtcagccccaaagcctgtggctgcagccacgcctgtgtcccagcaggctgaagagggcctcaccttaccccaggactccgctatgacaccgcctctgcccctacaagacacagataggccccacctcaggtccagagcctctggctgtggccacccctcaaaccttgcaggcagaagcaggctgtgccccagggacagagcctgtggccaccatggctcagcaggaagtaggtgaggccttaggccccaggccagcacctgaggagaagaatgcagccctccctacagtcccggagcctgcagccttggaccaggtccaacaggatgacccacagccagctgcagaagctgggacaccttgggccgcacaggaagatgcggattccactttgggcatggaggccctcagtctccctgagccggcctctggtgctggggaggaaatagcagaagccctttctaggcctggacgggaagcatgtctggaagcgcgagcgcacacaggtgatggggctaagcctgactcaccccaaaaggagaccctggaggttgagaaccagcaggaaggaggcctgaagccactggcacaggaacatggacccaggtcagcacttggaggtgcaagggaggtccccgatgcgcctcctgctgcctgccctgaggtcagccaggcccggctcctgagcccagccagggaggaaagaggcctgagtggcaagtccaccccggagcccacgcttccctcagctgtggccacagaggccagtctggactcctgcccagagtcttcagtaggggctgtgtccagtctggacagaggctgccctgacgcgcctgcccccacgtctgcaccaacctcccagcagccggagcctgtactgggtctgggcagtgttgagcaaccccacgaagtacccagtgtccttggcacccccttgctgcagcccccagaaaaccttgccaagggtcagcccagcacgcccgtggacaggcccctgggccctgacccttctgctcctggtacccttgctggggcagccctacccccactggagcccccagccccctgcctgtgccaggacccccaggaagactctgtggaagacgaggagcccccaggctctctgggcctcccaccgccccaggcaggagtccagcctgccgctgctgctgtctcaggaaccacacagcctctggggactgggccgcgagtcagcctctcgcctcactccccactcctcagccccaaggtggcctccatggatgccaaagacctggccttgcagatcttgccgccttgccaagtgcctcctccctctgggccccagagcccagctggccctcaagggctctcagcccccgagcagcaagaggatgaggacagcctggaggaagactcgcctcgggccctgggctcgggccagcattcggatagccacggggagtcatcagccgagctggacgagcaggacatcttggctcctcagaccgtgcagtgtccagcccaggccccagcaggcggcagtgaggagaccatcgccaaagccaagcagagtcgcagtgagaagaaggcccgaaaggcaatgtcaaagctgggcttgcggcagattcagggagtcaccaggatcaccatccagaagtccaagaacatcctctttgtcatcgccaagcctgatgtcttcaagagcccagcctcagacacttatgtggtctttggcgaggccaagattgaggacctgtcccagcaagtgcacaaagccgcagctgagaagtttaaggtgccctcagagccctcagccttggtccctgagtcagcacccaggccccgggtggacgaggcggggctggaactgcgtgacattgagctggtgatggcgcaggccaatgtgtccagggccaaggccgtgcgggctctgagagacaaccacagtgacatcgtcaacgccatcatggaactgaccatgtagccactgaccggaagctggagccatcctacgccttccctcagctctgctactcaataaatcggtgtcccttcattgccc

SEQ ID NO: 3757 - protein, 838 aa, Homo sapiens; identical to SEQ ID NO: 3745

SEQ ID NO: 3758 - DNA, 5313 bp, Homo sapiens
atgataggacagatcaccgagttgcctagagacctggagaccgacccatccgggtcgccttccctggtgcgctctcgtcggctccatccctggttgccatggagacaggaggcggttgccacggagaccgacgactgccaggaccagccaatcactccagagctgcagctccagctcaccttttgcatggagtgcctggcgagcccgcgcacgctcactcgctgggacaggcgggcggggcggcctgacgtcacccactgcccccaccgcccggccgaggggcggtggccgcgcaggctcggcggggcggcggcacggactgacggagggtcggaaggactgagggacgggcgggcgcacggccaggccatgcctggggaggctgcccgcgccgagctgctgctgcccgaggcggaccgacccgggccccgcacagaactgcggggaaggtggggcgcacgaagtgcccgccgcgagccagaaagaacgtgggggcttaagcccttggcttccgacccagggatcgtggggctcgcatcccgcccgctgcatcccgttgtttgcaccgagctgccagcctgctggggctgggccgctctggacagaggcagcgggttctggaggcggggtgtccggctgatacccccagtacgatcagatctgtcctgcgatgcggccgctgccaccaccatcctgggaggggaccggcgggagccctgtgctctgaccccagggcccagccacctggccctcacgttcctgcccagcaagccgggtgcccggccccagcccgagggagccagctgggatgcagggcctggtggggcaccctcggcctgggcggacccaggggagggcggcccaagccccatgctcctccctgagggcctgtcttcccaggctctgtccacggaggctcctctcccggccaccctggagccccggattgtgatgggagaggagacgtgccaggccctcctgtcacccagagctgcccggacagcgctcagggaccaggagggtgggcacgcaagcccagacccaccccccgagctgtgttctcagggtgatctttctgtgccttcccctcccccagaccctgattccttcttcacgcctccctccacccccaccaagaccacctatgccctgcttcctgcctgtgggccccacggggacgccagggactcagaggctgagctgcgggatgagctgctggactcgccccccgcctcaccctcgggctcctacattacggccgatggggacagctgggcctcttcaccctcctgttccctcagcctgctggctccggctgaagggctggacttcccctcaggctggggcctgtccccgcaggggtccatggtggatgaacgagagctgcacccagcagggaccccagagcccccgtcctctgagtccagcctctctgcagacagcagctcctcctggggccaggagggccacttcttcgacctggacttcctggccaatgacccaatgatccccgcagccctcctacccttccagggcagcctcatctttcaggtggaggcagtggaggtgacaccgctatccccagaggaagaagaagaggaggctgtggcggatcccgacccaggtggggacctggctggggagggtgaggaggacagcacgtctgcctccttcctgcagtcactgtctgacctgtccatcacggagggcatggacgaggcttttgccttccgggacgacacctctgcagcctcctctgattcagactcagcctcctacgcagaggcagatgatgagaggctgtacagcggggagccccatgcccaggccactttgctccaggacagtgtccagaagacagaggaggagagcggaggtggggccaaggggctgcaggctcaggatgggactgtgtcctgggccgtggaggctgctcctcagacctcagacagaggggcctatctgtcccagagacaggaattgatctcagaagtaacagaagagggccttgctttaggccaggagtccactgccactgtgacccctcacactctgcaggtagccccaggcctccaggtggaggtggctaccagagtgaccccacaggctggggaggaagaaacagactccaccgctggacaagaatctgctgccatggcaatgcctcagccctcccaggagggcatcagcgagatcttaggccaagagtctgtcactgcagaaaaacttccaactccacaggaagaaacaagcctcacattgtgtccagactctcctcagaacttgaaggaagaaggagggctggacctcccctctggcagaaagcctgtagctgcagccacgattgtccccaggcaggctaaagaggacctcaccttaccccaggactccgctatgacaccgcctctgcccctacaagacacagatctctcatcagccccaaagcctgtggctgcagccacgattgtgtcccagcaggctgaagagggcctcaccttaccccaggactccgttatgacaccgcctctgcccctacaagacacagaactctcgtcagccccaaagcctgtggctgcagccacgcttgtgtcccagcaggctgaagagggcctcaccttaccccaggactccgctatgacaccgcctctgcccctacaagacacagatctctcgtcagccccaaagcctgtggctgcagccacgcttgtgtcccagcaggctgaagagggcctcaccttaccccaggactccgctatgacaccgcctctgcccctacaagacacagatctctcgtcagccccaaagcctgtggctgcagccacgcttgtgtcccagcaggctgaagagggcctcaccttaccccaggactccgctatgacaccgcctctgcccctacaagacacagatctctcgtcagccccaaagcctgtggctgcagccacgattgtgtcccagcaggctgaagagggcctcaccttaccccaggactccgctatgacaccgcctctgcccctacaagacacagatctctcgtcagccccaaagcctgtggctgcagccacgattgtgtcccagcaggctgaagagggcctcaccttaccccaggactccgctatgacaccgcctctgcccctacaagacacagatctctcgtcagccccaaagcctgtggctgcagccacgcctgtgtcccagcaggctgaagagggcctcaccttaccccaggactccgctatgacaccgcctctgcccctacaagacacagatctctcgtcagccccaaagcctgtggctgcagccacgcctgtgtcccagcaggctgaagagggcctcaccttaccccaggactccgctatgacagcacctctgcctctgcaagacacaggccccacctcaggtccagagcctctggctgtggccacccctcaaaccttgcaggcagaagcaggctgtgccccagggacagagcctgtggccaccatggctcagcaggaagtaggtgaggccttaggccccaggccagcacctgaggagaagaatgcagccctccctacagtcccggagcctgcagccttggaccaggtccaacaggatgacccacagccagctgcagaagctgggacaccttgggccgcacaggaagatgcggattccactttgggcatggaggccctcagtctccctgagccggcctctggtgctggggaggaaatagcagaagccctttctaggcctggacgggaagcatgtctggaagcgcgagcgcacacaggtgatggggctaagcctgactcaccccaaaaggagaccctggaggttgagaaccagcaggaaggaggcctgaagccactggcacaggaacatggacccaggtcagcacttggaggtgcaagggaggtccccgatgcgcctcctgctgcctgccctgaggtcagccaggcccggctcctgagcccagccagggaggaaagaggcctgagtggcaagtccaccccggagcccacgcttccctcagctgtggccacagaggccagtctggactcctgcccagagtcttcagtaggggctgtgtccagtctggacagaggctgccctgacgcgcctgcccccacgtctgcaccaacctcccagcagccggagcctgtactgggtctgggcagtgttgagcaaccccacgaagtacccagtgtccttggcacccccttgctgcagcccccagaaaaccttgccaagggtcagcccagcacgcccgtggacaggcccctgggccctgacccttctgctcctggtacccttgctggggcagccctacccccactggagcccccagccccctgcctgtgccaggacccccaggaagactctgtggaagacgaggagcccccaggctctctgggcctcccaccgccccaggcaggagtccagcctgccgctgctgctgtctcaggaaccacacagcctctggggactgggccgcgagtcagcctctcgcctcactccccactcctcagccccaaggtggcctccatggatgccaaagacctggccttgcagatcttgccgccttgccaagtgcctcctccctctgggccccagagcccagctggccctcaagggctctcagcccccgagcagcaagaggatgaggacagcctggaggaagactcgcctcgggccctgggctcgggccagcattcggatagccacggggagtcatcagccgagctggacgagcaggacatcttggctcctcagaccgtgcagtgtccagcccaggccccagcaggcggcagtgaggagaccatcgccaaagccaagcagagtcgcagtgagaagaaggcccgaaaggcaatgtcaaagctgggcttgcggcagattcagggagtcaccaggatcaccatccagaagtccaagaacatcctctttgtcatcgccaagcctgatgtcttcaagagcccagcctcagacacttatgtggtctttggcgaggccaagattgaggacctgtcccagcaagtgcacaaagccgcagctgagaagtttaaggtgccctcagagccctcagccttggtccctgagtcagcacccaggccccgggtggacgaggcggggctggaactgcgtgacattgagctggtgatggcgcaggccaatgtgtccagggccaaggccgtgcgggctctgagagacaaccacagtgacatcgtcaacgccatcatggaactgaccatgtagccactgaccggaagctggagccatcctacgccttccctcagctctgctactcaataaatcggtgtcccttcattgccc

SEQ ID NO: 3759 - protein, 1744 aa, Homo sapiens
MIGQITELPRDLETDPSGSPSLVRSRRLHPWLPWRQEAVATETDDCQDQPITPELQLQLTFCMECLASPRTLTRWDRRAGRPDVTHCPHRPAEGRWPRRLGGAAARTDGGSEGLRDGRAHGQAMPGEAARAELLLPEADRPGPRTELRGRWGARSARREPERTWGLKPLASDPGIVGLASRPLHPVVCTELPACWGWAALDRGSGFWRRGVRLIPPVRSDLSCDAAAATTILGGDRREPCALTPGPSHLALTFLPSKPGARPQPEGASWDAGPGGAPSAWADPGEGGPSPMLLPEGLSSQALSTEAPLPATLEPRIVMGEETCQALLSPRAARTALRDQEGGHASPDPPPELCSQGDLSVPSPPPDPDSFFTPPSTPTKTTYALLPACGPHGDARDSEAELRDELLDSPPASPSGSYITADGDSWASSPSCSLSLLAPAEGLDFPSGWGLSPQGSMVDERELHPAGTPEPPSSESSLSADSSSSWGQEGHFFDLDFLANDPMIPAALLPFQGSLIFQVEAVEVTPLSPEEEEEEAVADPDPGGDLAGEGEEDSTSASFLQSLSDLSITEGMDEAFAFRDDTSAASSDSDSASYAEADDERLYSGEPHAQATLLQDSVQKTEEESGGGAKGLQAQDGTVSWAVEAAPQTSDRGAYLSQRQELISEVTEEGLALGQESTATVTPHTLQVAPGLQVEVATRVTPQAGEEETDSTAGQESAAMAMPQPSQEGISEILGQESVTAEKLPTPQEETSLTLCPDSPQNLKEEGGLDLPSGRKPVAAATIVPRQAKEDLTLPQDSAMTPPLPLQDTDLSSAPKPVAAATIVSQQAEEGLTLPQDSVMTPPLPLQDTELSSAPKPVAAATLVSQQAEEGLTLPQDSAMTPPLPLQDTDLSSAPKPVAAATLVSQQAEEGLTLPQDSAMTPPLPLQDTDLSSAPKPVAAATLVSQQAEEGLTLPQDSAMTPPLPLQDTDLSSAPKPVAAATIVSQQAEEGLTLPQDSAMTPPLPLQDTDLSSAPKPVAAATIVSQQAEEGLTLPQDSAMTPPLPLQDTDLSSAPKPVAAATPVSQQAEEGLTLPQDSAMTPPLPLQDTDLSSAPKPVAAATPVSQQAEEGLTLPQDSAMTAPLPLQDTGPTSGPEPLAVATPQTLQAEAGCAPGTEPVATMAQQEVGEALGPRPAPEEKNAALPTVPEPAALDQVQQDDPQPAAEAGTPWAAQEDADSTLGMEALSLPEPASGAGEEIAEALSRPGREACLEARAHTGDGAKPDSPQKETLEVENQQEGGLKPLAQEHGPRSALGGAREVPDAPPAACPEVSQARLLSPAREERGLSGKSTPEPTLPSAVATEASLDSCPESSVGAVSSLDRGCPDAPAPTSAPTSQQPEPVLGLGSVEQPHEVPSVLGTPLLQPPENLAKGQPSTPVDRPLGPDPSAPGTLAGAALPPLEPPAPCLCQDPQEDSVEDEEPPGSLGLPPPQAGVQPAAAAVSGTTQPLGTGPRVSLSPHSPLLSPKVASMDAKDLALQILPPCQVPPPSGPQSPAGPQGLSAPEQQEDEDSLEEDSPRALGSGQHSDSHGESSAELDEQDILAPQTVQCPAQAPAGGSEETIAKAKQSRSEKKARKAMSKLGLRQIQGVTRITIQKSKNILFVIAKPDVFKSPASDTYVVFGEAKIEDLSQQVHKAAAEKFKVPSEPSALVPESAPRPRVDEAGLELRDIELVMAQANVSRAKAVRALRDNHSDIVNAIMELTM

SEQ ID NO: 3760 - DNA, 493 bp, Homo sapiens
gatagccacggggagtcatcagccgagctggacgagcaggacatcttggctcctcagaccgtgcagtgtccagcccaggccccagcaggcggcagtgaggagaccatcgccaaagccaagcagacctgatgtcttcaagagcccagcctcagacacttatgtggtctttggcgaggccaagattgaggacctgtcccagcaagtgcacaaagccgcagctgagaagtttaaggtgccctcagagccctcagccttggtccctgagtcagcacccaggccccgggtggacgaggcggggctggaactgcgtgacattgagctggtgatggcgcaggccaatgtgtccagggccaaggccgtgcgggctctgagagacaaccacagtgacatcgtcaacgccatcatggaactgaccatgtagccactgaccggaagctggagccatcctacgccttccctcagctctgctactcaataaatcggtgtcccttca

SEQ ID NO: 3761 - protein, 65 aa, Homo sapiens
MSSRAQPQTLMWSLARPRLRTCPSKCTKPQLRSLRCPQSPQPWSLSQHPGPGWTRRGWNCVTLSW

SEQ ID NO: 3762 - DNA, 1255 bp, Homo sapiens
ggacagagcctgtggccaccatggctcagcaggaagtaggtgaggccttaggccccaggccagcacctgaggagaagaatgcagccctccctacagtcccggagcctgcagccttggaccaggtccaacaggatgacccacagccagctgcagaagctgggacaccttgggccgcacaggaagatgcggattccactttgggcatggaggccctcagtctccctgagccggcctctggtgctggggaggaaatagcagaagccctttctaggcctggacgggaagcatgtctggaagcgcgagcgcacacaggtgatggggctaagcctgactcaccccaaaaggagaccctggaggttgagaaccagcaggaaggaggcctgaagccactggcacaggaacatggacccaggtcagcacttggaggtgcaagggaggtccccgatgcgcctcctgctgcctgccctgaggtcagccaggcccggctcctgagcccagccagggaggaaagaggcctgagtggcaagtccaccccggagcccacgcttccctcagctgtggccacagaggccagtctggactcctgcccagagtcttcagtaggggctgtgtccagtctggacagaggctgccctgacgcgcctgcccccacgtctgcaccaacctcccagcagccggagcctgtactgggtctgggcagtgttgagcaaccccacgaagtacccagtgtccttggcacccccttgctgcagcccccagaaaaccttgccaagggtcagcccagcacgcccgtggacaggcccctgggccctgacccttctgctcctggtacccttgctggggcagccctacccccactggagcccccagccccctgcctgtgccaggacccccaggaagactctgtggaagacgaggagcccccaggctctctgggcctcccaccgccccaggcaggagtccagcctgccgctgctgctgtctcaggaaccacacagcctctggggactgggccgcgagtcagcctctcgcctcactccccagggtggacgaggcggggctggaactgcgtgacattgagctggtgatggcgcaggccaatgtgtccagggccaaggccgtgcgggctctgagagacaaccacagtgacatcgtcaacgccatcatggaactgaccatgtagccactgaccggaagctggagccatcctacgccttccctcagctctgctactcaataaatcggtgtcccttca

SEQ ID NO: 3763 - protein, 355 aa, Homo sapiens
MAQQEVGEALGPRPAPEEKNAALPTVPEPAALDQVQQDDPQPAAEAGTPWAAQEDADSTLGMEALSLPEPASGAGEEIAEALSRPGREACLEARAHTGDGAKPDSPQKETLEVENQQEGGLKPLAQEHGPRSALGGAREVPDAPPAACPEVSQARLLSPAREERGLSGKSTPEPTLPSAVATEASLDSCPESSVGAVSSLDRGCPDAPAPTSAPTSQQPEPVLGLGSVEQPHEVPSVLGTPLLQPPENLAKGQPSTPVDRPLGPDPSAPGTLAGAALPPLEPPAPCLCQDPQEDSVEDEEPPGSLGLPPPQAGVQPAAAAVSGTTQPLGTGPRVSLSPHSPGWTRRGWNCVTLSW

SEQ ID NO: 3764 - DNA, 4653 bp, Homo sapiens
ggggaccggcgggagccctgtgctctgaccccagggcccagccacctggccctcacgttcctgcccagcaagccgggtgcccggccccagcccgagggagccagctgggatgcagggcctggtggggcaccctcggcctgggcggacccaggggagggcggcccaagccccatgctcctccctgagggcctgtcttcccaggctctgtccacggaggctcctctcccggccaccctggagccccggattgtgatgggagaggagacgtgccaggccctcctgtcacccagagctgcccggacagcgctcagggaccaggagggtgggcacgcaagcccagacccaccccccgagctgtgttctcagggtgatctttctgtgccttcccctcccccagaccctgattccttcttcacgcctccctccacccccaccaagaccacctatgccctgcttcctgcctgtgggccccacggggacgccagggactcagaggctgagctgcgggatgagctgctggactcgccccccgcctcaccctcgggctcctacattacggccgatggggacagctgggcctcttcaccctcctgttccctcagcctgctggctccggctgaagggctggacttcccctcaggctggggcctgtccccgcaggggtccatggtggatgaacgagagctgcacccagcagggaccccagagcccccgtcctctgagtccagcctctctgcagacagcagctcctcctggggccaggagggccacttcttcgacctggacttcctggccaatgacccaatgatccccgcagccctcctacccttccagggcagcctcatctttcaggtggaggcagtggaggtgacaccgctatccccagaggaagaagaagaggaggctgtggcggatcccgacccaggtggggacctggctggggagggtgaggaggacagcacgtctgcctccttcctgcagtcactgtctgacctgtccatcacggagggcatggacgaggcttttgccttccgggacgacacctctgcagcctcctctgattcagactcagcctcctacgcagaggcagatgatgagaggctgtacagcggggagccccatgcccaggccactttgctccaggacagtgtccagaagacagaggaggagagcggaggtggggccaaggggctgcaggctcaggatgggactgtgtcctgggccgtggaggctgctcctcagacctcagacagaggggcctatctgtcccagagacaggaattgatctcagaagtaacagaagagggccttgctttaggccaggagtccactgccactgtgacccctcacactctgcaggtagccccaggcctccaggtggaggtggctaccagagtgaccccacaggctggggaggaagaaacagactccaccgctggacaagaatctgctgccatggcaatgcctcagccctcccaggagggcatcagcgagatcttaggccaagagtctgtcactgcagaaaaacttccaactccacaggaagaaacaagcctcacattgtgtccagactctcctcagaacttgaaggaagaaggagggctggacctcccctctggcagaaagcctgtagctgcagccacgattgtccccaggcaggctaaagaggacctcaccttaccccaggactccgctatgacaccgcctctgcccctacaagacacagatctctcatcagccccaaagcctgtggctgcagccacgattgtgtcccagcaggctgaagagggcctcaccttaccccaggactccgttatgacaccgcctctgcccctacaagacacagaactctcgtcagccccaaagcctgtggctgcagccacgcttgtgtcccagcaggctgaagagggcctcaccttaccccaggactccgctatgacaccgcctctgcccctacaagacacagatctctcgtcagccccaaagcctgtggctgcagccacgcttgtgtcccagcaggctgaagagggcctcaccttaccccaggactccgctatgacaccgcctctgcccctacaagacacagatctctcgtcagccccaaagcctgtggctgcagccacgcttgtgtcccagcaggctgaagagggcctcaccttaccccaggactccgctatgacaccgcctctgcccctacaagacacagatctctcgtcagccccaaagcctgtggctgcagccacgattgtgtcccagcaggctgaagagggcctcaccttaccccaggactccgctatgacaccgcctctgcccctacaagacacagatctctcgtcagccccaaagcctgtggctgcagccacgattgtgtcccagcaggctgaagagggcctcaccttaccccaggactccgctatgacaccgcctctgcccctacaagacacagatctctcgtcagccccaaagcctgtggctgcagccacgcctgtgtcccagcaggctgaagagggcctcaccttaccccaggactccgctatgacaccgcctctgcccctacaagacacagatctctcgtcagccccaaagcctgtggctgcagccacgcctgtgtcccagcaggctgaagagggcctcaccttaccccaggactccgctatgacagcacctctgcctctgcaagacacaggccccacctcaggtccagagcctctggctgtggccacccctcaaaccttgcaggcagaagcaggctgtgccccagggacagagcctgtggccaccatggctcagcaggaagtaggtgaggccttaggccccaggccagcacctgaggagaagaatgcagccctccctacagtcccggagcctgcagccttggaccaggtccaacaggatgacccacagccagctgcagaagctgggacaccttgggccgcacaggaagatgcggattccactttgggcatggaggccctcagtctccctgagccggcctctggtgctggggaggaaatagcagaagccctttctaggcctggacgggaagcatgtctggaagcgcgagcgcacacaggtgatggggctaagcctgactcaccccaaaaggagaccctggaggttgagaaccagcaggaaggaggcctgaagccactggcacaggaacatggacccaggtcagcacttggaggtgcaagggaggtccccgatgcgcctcctgctgcctgccctgaggtcagccaggcccggctcctgagcccagccagggaggaaagaggcctgagtggcaagtccaccccggagcccacgcttccctcagctgtggccacagaggccagtctggactcctgcccagagtcttcagtaggggctgtgtccagtctggacagaggctgccctgacgcgcctgcccccacgtctgcaccaacctcccagcagccggagcctgtactgggtctgggcagtgttgagcaaccccacgaagtacccagtgtccttggcacccccttgctgcagcccccagaaaaccttgccaagggtcagcccagcacgcccgtggacaggcccctgggccctgacccttctgctcctggtacccttgctggggcagccctacccccactggagcccccagccccctgcctgtgccaggacccccaggaagactctgtggaagacgaggagcccccaggctctctgggcctcccaccgccccaggcaggagtccagcctgccgctgctgctgtctcaggaaccacacagcctctggggactgggccgcgagtcagcctctcgcctcactccccactcctcagccccaaggtggcctccatggatgccaaagacctggccttgcagatcttgccgccttgccaagtgcctcctccctctgggccccagagcccagctggccctcaagggctctcagcccccgagcagcaagaggatgaggacagcctggaggaagactcgcctcgggccctgggctcgggccagcattcggatagccacggggagtcatcagccgagctggacgagcaggacatcttggctcctcagaccgtgcagtgtccagcccaggccccagcaggcggcagtgaggagaccatcgccaaagccaagcagagtcgcagtgagaagaaggcccgaaaggcaatgtcaaagctgggcttgcggcagattcagggagtcaccaggatcaccatccagaagtccaagaacatcctctttgtcatcgccaagcctgatgtcttcaagagcccagcctcagacacttatgtggtctttggcgaggccaagattgaggacctgtcccagcaagtgcacaaagccgcagctgagaagtttaaggtgccctcagagccctcagccttggtccctgagtcagcacccaggccccgggtgaggctggagtgcaaggaagaggaagaggaggaggaggaagaggtggacgaggcggggctggaactgcgtgacattgagctggtgatggcgcaggccaatgtgtccagggccaaggccgtgcgggctctgagagacaaccacagtgacatcgtcaacgccatcatggaactgaccatgtagccactgaccggaagctggagccatcctacgccttccctcagctctgctactcaataaatcggtgtcccttca

SEQ ID NO: 3765 - protein, 1469 aa, Homo sapiens
MLLPEGLSSQALSTEAPLPATLEPRIVMGEETCQALLSPRAARTALRDQEGGHASPDPPPELCSQGDLSVPSPPPDPDSFFTPPSTPTKTTYALLPACGPHGDARDSEAELRDELLDSPPASPSGSYITADGDSWASSPSCSLSLLAPAEGLDFPSGWGLSPQGSMVDERELHPAGTPEPPSSESSLSADSSSSWGQEGHFFDLDFLANDPMIPAALLPFQGSLIFQVEAVEVTPLSPEEEEEEAVADPDPGGDLAGEGEEDSTSASFLQSLSDLSITEGMDEAFAFRDDTSAASSDSDSASYAEADDERLYSGEPHAQATLLQDSVQKTEEESGGGAKGLQAQDGTVSWAVEAAPQTSDRGAYLSQRQELISEVTEEGLALGQESTATVTPHTLQVAPGLQVEVATRVTPQAGEEETDSTAGQESAAMAMPQPSQEGISEILGQESVTAEKLPTPQEETSLTLCPDSPQNLKEEGGLDLPSGRKPVAAATIVPRQAKEDLTLPQDSAMTPPLPLQDTDLSSAPKPVAAATIVSQQAEEGLTLPQDSVMTPPLPLQDTELSSAPKPVAAATLVSQQAEEGLTLPQDSAMTPPLPLQDTDLSSAPKPVAAATLVSQQAEEGLTLPQDSAMTPPLPLQDTDLSSAPKPVAAATLVSQQAEEGLTLPQDSAMTPPLPLQDTDLSSAPKPVAAATIVSQQAEEGLTLPQDSAMTPPLPLQDTDLSSAPKPVAAATIVSQQAEEGLTLPQDSAMTPPLPLQDTDLSSAPKPVAAATPVSQQAEEGLTLPQDSAMTPPLPLQDTDLSSAPKPVAAATPVSQQAEEGLTLPQDSAMTAPLPLQDTGPTSGPEPLAVATPQTLQAEAGCAPGTEPVATMAQQEVGEALGPRPAPEEKNAALPTVPEPAALDQVQQDDPQPAAEAGTPWAAQEDADSTLGMEALSLPEPASGAGEEIAEALSRPGREACLEARAHTGDGAKPDSPQKETLEVENQQEGGLKPLAQEHGPRSALGGAREVPDAPPAACPEVSQARLLSPAREERGLSGKSTPEPTLPSAVATEASLDSCPESSVGAVSSLDRGCPDAPAPTSAPTSQQPEPVLGLGSVEQPHEVPSVLGTPLLQPPENLAKGQPSTPVDRPLGPDPSAPGTLAGAALPPLEPPAPCLCQDPQEDSVEDEEPPGSLGLPPPQAGVQPAAAAVSGTTQPLGTGPRVSLSPHSPLLSPKVASMDAKDLALQILPPCQVPPPSGPQSPAGPQGLSAPEQQEDEDSLEEDSPRALGSGQHSDSHGESSAELDEQDILAPQTVQCPAQAPAGGSEETIAKAKQSRSEKKARKAMSKLGLRQIQGVTRITIQKSKNILFVIAKPDVFKSPASDTYVVFGEAKIEDLSQQVHKAAAEKFKVPSEPSALVPESAPRPRVRLECKEEEEEEEEEVDEAGLELRDIELVMAQANVSRAKAVRALRDNHSDIVNAIMELTM

SEQ ID NO: 3766 - DNA, 1435 bp, Homo sapiens
cctttctaggcctggacgggaagcatgtctggaagcgcgagcgcacacaggtgatggggctaagcctgactcaccccaaaaggagaccctggaggttgagaaccagcaggaaggaggcctgaagccactggcacaggaacatggacccaggtcagcacttggaggtgcaagggaggtccccgatgcgcctcctgctgcctgccctgaggtcagccaggcccggctcctgagcccagccagggaggaaagaggcctgagtggcaagtccaccccggagcccacgcttccctcagctgtggccacagaggccagtctggactcctgcccagagtcttcagtaggggctgtgtccagtctggacagaggctgccctgacgcgcctgcccccacgtctgcaccaacctcccagcagccggagcctgtactgggtctgggcagtgttgagcaaccccacgaagtacccagtgtccttggcacccccttgctgcagcccccagaaaaccttgccaagggtcagcccagcacgcccgtggacaggcccctgggccctgacccttctgctcctggtacccttgctggggcagccctacccccactggagcccccagccccctgcctgtgccaggacccccaggaagactctgtggaagacgaggagcccccaggctctctgggcctcccaccgccccaggcaggagtccagcctgccgctgctgctgtctcaggaaccacacagcctctggggactgggccgcgagtcagcctctcgcctcactccccactcctcagccccaaggtggcctccatggatgccaaagacctggccttgcagatcttgccgccttgccaagtgcctcctccctctgggccccagagcccagctggccctcaagggctctcagcccccgagcagcaagaggatgaggacagcctggaggaagactcgcctcgggccctgggctcgggccagcattcggatagccacggggagtcatcagccgagctggacgagcaggacatcttggctcctcagaccgtgcagtgtccagcccaggccccagcaggcggcagtgaggagaccatcgccaaagccaagcagagtcgcagtgagaagaaggcccgaaaggcaatgtcaaagctgggcttgcggcagattcagggagtcaccaggatcaccatccagaagtccaagaacatcctctttgtcatcgccaagcctgatgtcttcaagagcccagcctcagacacttatgtggtctttggcgaggccaagattgaggacctgtcccagcaagtgcacaaagccgcagctgagaaacaaccacagtgacatcgtcaacgccatcatggaactgaccatgtagccactgaccggaagctggagccatcctacgccttccctcagctctgctactcaataaatcggtgtcccttc

SEQ ID NO: 3767 - protein, 184 aa, Homo sapiens [sequence omitted]

SEQ ID NO: 3768 - DNA, 1891 bp, Homo sapiens
ggacagagcctgtggccaccatggctcagcaggaagtaggtgaggccttaggccccaggccagcacctgaggagaagaatgcagccctccctacagtcccggagcctgcagccttggaccaggtccaacaggatgacccacagccagctgcagaagctgggacaccttgggccgcacaggaagatgcggattccactttgggcatggaggccctcagtctccctgagccggcctctggtgctggggaggaaatagcagaagccctttctaggcctggacgggaagcatgtctggaagcgcgagcgcacacaggtgatggggctaagcctgactcaccccaaaaggagaccctggaggttgagaaccagcaggaaggaggcctgaagccactggcacaggaacatggacccaggtcagcacttggaggtgcaagggaggtccccgatgcgcctcctgctgcctgccctgaggtcagccaggcccggctcctgagcccagccagggaggaaagaggcctgagtggcaagtccaccccggagcccacgcttccctcagctgtggccacagaggccagtctggactcctgcccagagtcttcagtaggggctgtgtccagtctggacagaggctgccctgacgcgcctgcccccacgtctgcaccaacctcccagcagccggagcctgtactgggtctgggcagtgttgagcaaccccacgaagtacccagtgtccttggcacccccttgctgcagcccccagaaaaccttgccaagggtcagcccagcacgcccgtggacaggcccctgggccctgacccttctgctcctggtacccttgctggggcagccctacccccactggagcccccagccccctgcctgtgccaggacccccaggaagactctgtggaagacgaggagcccccaggctctctgggcctcccaccgccccaggcaggagtccagcctgccgctgctgctgtctcaggaaccacacagcctctggggactgggccgcgagtcagcctctcgcctcactccccactcctcagccccaaggtggcctccatggatgccaaagacctggccttgcagatcttgccgccttgccaagtgcctcctccctctgggccccagagcccagctggccctcaagggctctcagcccccgagcagcaagaggatgaggacagcctggaggaagactcgcctcgggccctgggctcgggccagcattcggatagccacggggagtcatcagccgagctggacgagcaggacatcttggctcctcagaccgtgcagtgtccagcccaggccccagcaggcggcagtgaggagaccatcgccaaagccaagcagagtcgcagtgagaagaaggcccgaaaggcaatgtcaaagctgggcttgcggcagattcagggagtcaccaggatcaccatccagaagtccaagaacatcctctttgtcatcgccaagcctgatgtcttcaagagcccagcctcagacacttatgtggtctttggcgaggccaagattgaggacctgtcccagcaagtgcacaaagccgcagctgagaagtttaaggtgccctcagagccctcagccttggtccctgagtcagcacccaggccccgggtgaggctggagtgcaaggaagaggaagaggaggaggaggaagaggtggacgaggcggggctggaactgcgtgacattgagctggtgatggcgcaggccaatgtgtccagggccaaggccgtgcgggctctgagagacaaccacagtgacatcgtcaacgccatcatggaactgaccatgtagccactgaccggaagctggagccatcctacgccttccctcagctctgctactcaataaatcggtgtcccttc

SEQ ID NO: 3769 - protein, 599 aa, Homo sapiens
MAQQEVGEALGPRPAPEEKNAALPTVPEPAALDQVQQDDPQPAAEAGTPWAAQEDADSTLGMEALSLPEPASGAGEEIAEALSRPGREACLEARAHTGDGAKPDSPQKETLEVENQQEGGLKPLAQEHGPRSALGGAREVPDAPPAACPEVSQARLLSPAREERGLSGKSTPEPTLPSAVATEASLDSCPESSVGAVSSLDRGCPDAPAPTSAPTSQQPEPVLGLGSVEQPHEVPSVLGTPLLQPPENLAKGQPSTPVDRPLGPDPSAPGTLAGAALPPLEPPAPCLCQDPQEDSVEDEEPPGSLGLPPPQAGVQPAAAAVSGTTQPLGTGPRVSLSPHSPLLSPKVASMDAKDLALQILPPCQVPPPSGPQSPAGPQGLSAPEQQEDEDSLEEDSPRALGSGQHSDSHGESSAELDEQDILAPQTVQCPAQAPAGGSEETIAKAKQSRSEKKARKAMSKLGLRQIQGVTRITIQKSKNILFVIAKPDVFKSPASDTYVVFGEAKIEDLSQQVHKAAAEKFKVPSEPSALVPESAPRPRVRLECKEEEEEEEEEVDEAGLELRDIELVMAQANVSRAKAVRALRDNHSDIVNAIMELTM

SEQ ID NO: 3770 - DNA, 328 bp, Homo sapiens
ggggaaggaccaaccaccagcccaaggtcttggggaagttggcggtggagactttgccttcctgggcactgtgctgctctcctcccccgacgtgggtcaacaccaggtctgagcccccctctgccctctactcccaggcaatgtcaaagctgggcttgcggcagattcagggagtcaccaggatcaccatccagaagtccaagaacatcctctttgtcatcgccaagcctgatgtcttcaagagcccagcctcagacacttatgtggtctttggcgaggccaagattgaggacctgtcccagcaagtgcacaaagccgcagctgagaa

SEQ ID NO: 3771 - protein, 61 aa, Homo sapiens
MSKLGLRQIQGVTRITIQKSKNILFVIAKPDVFKSPASDTYVVFGEAKIEDLSQQVHKAAA

SEQ ID NO: 3772 - DNA, 4461 bp, Homo sapiens
tcgtttccgccggcgctccgagtgacgtagggaagcgcgccgcgcacctcatggttccggggacagttagggcggcggatggaggtcagcggtggtgctcgctgcggtttggaatcacttgctaggagtcttgtctctctgccacccaggacatcatggcagctcacctggtaaagcgatgcacgtgcctcctgagagaagctgctcgtcaggcccctgccatggctccagttggccgactgagacttgcctgggtagcccataagactctgacttcctcagccacctcacccatttcccacctcccaggttccttgatggagccggtggagaaggaacgagcatctactccctacatagagaagcaggtggaccacctcatcaagaaggccacaaggccagaggagctcctggagctacttggtggcagtcacgacttggacagcaatcaagcagcaatggtacttatccggctctctcacttgctgtctgagaagccagaagataaaggcttgctcatacaggatgcccactttcatcaacttctctgtctgctcaacagtcagattgcctcggtctggcatggtaccctctcgaagctgctgggaagcctgtatgctctgggcatccccaaggcctccaaggagctgcagtcggtggagcaggaggtccgctggcgcatgcggaagctcaagtacaagcacctggccttcctggcagagtcctgtgccaccctctcacaggagcagcactcgcaggagctgctggctgagctgctcacacacctggaaaggcgttggacagaaattgaagattcccacacattagtgaccgtcatgatgaaggtgggacacctctcggagccactaatgaaccgcctggaagacaagcacgtcctgaacagagcgcaggacatcaccctgccccacctgtgcagcgtacttctggcttttgcgcgtctgaacttccatccagaccaagaggatcagttcttcagcctggtacatgagaagctggggtcagagctgccaggcctggagccagccctgcaggtggacctggtgtgggccctgtgtgtgctgcagcaggcacgggaagcagagctgcaagccgtcctccaccctgaatttcacatccaatttctagggggcaagtctcagaaggatcagaacaccttccagaagctgctccacatcaacgccactgccctgctggagtaccccgagtactcgggtccccttctgcctgcctcggctgtggcccctgggccctcagcccttgacaggaaggtgacccccctgcaaaaggagctgcaggagacgctgaaggggctgctggggagcgccgacaagggcagcctcgaggtggccacgcagtatggctgggtgctggatgctgaggtgctgctggacagtgacggcgagtttctgcccgtaagggactttgtggcacctcaccttgcccagccaactgggagccagtcaccacctccagggtctaagaggctagcgttcttgcggtgggagttccccaacttcaacagccgaagcaaggacttgctgggtcgctttgttctggcccggcgacacatagtggctgcaggcttcctgatagtggacgtcccattctatgagtggctggaactcaagtctgaatggcagaaaggcgcctacctcaaggacaagatgcgcaaagcggtggctgaggagctggccaagtgacttgtgccagcagcatggactgcgtgcctctccgccggaggtctagctgtgggcggccaagaagggtcacccttgaggacaaacctctgtgcaggaccttggccagagtggggagggtggccagccactctgagggacagaacgtcctcttgtgtataataaacctttaattttggtgttggacccctggggccttcccaggcttggtcaccctctgcactgtcagcacttgtctgtctgctttgttgagcagggcgtggttctccagtctgccctgtgcactcccccgccacgcccagcccaagagggctgctttagggacagacctgggttgttacctgcctgtctctcccagcttcttccctccatgagtgcttattcacatatgccggcctcttgcgtaggggtctgtatcagccccagcaggcaggtggagtcctagaattctgaacctccagagcagaggagcttcccagggaagctgattggagattcagtgcatggctgggggttctgatggagctgtggctactgaaccacagccatcctgggaggctttctcccatcagttgtctcacacttagctgagtgaaaggcaccctgacagcatgtggtgacaggtgatgtgagggctgggtgagcacttgggaggcgctggctctgggagaggagaagatcccacttggctgacaccacggcaccaagagccaaactccatcgttgtcttcaccaccctgaccagagccttgtgctgtcatctaggaactggctgcccaaacaggaccctggcagcctccctgctgctgcggggattaccaggtgctgggaggcaacaagctttctaccttccagcctctccttagagacacctattggcagaacctgactaaatagcagtcagggaactgggttgcctccagccatacagaacagagagtaggacagtggggtggagctgagatggagaggcccacagccctcagcactgtaggctcccaaccctaggctgtttccccaaaaagaaaaagtctagtcactgctctgatgcttggccactcacccaagcattggggtagtttgtgctggcttcactgggcaccatcaggcacacccagcctgtagtttttgttttatattacctaagtcggccaggtgtggtgggatcacgcctgtaatcccagcacttagggaggctggggcgggcgaatcgcctgaggccaggaattcaagaccaacctggccaacattgtgaaaccctgtctctactaaaaatataaaaattagtcgggcatgatgacaggcacctgtaatcccagctactcaggaggctgaggcaggtgaatcacttgaacccgggaggtggaggctgcagtgagttaagattgtgccactgcactccagcctgggtaacagagcaagactctgtctcaaaaaatatatatgtgtgtgtgtgtgtgtgtatatatatgtacatgtgtatataagtatatatgtgtgtatatatgtatatatacacgtatatacacacacacccctaagtcatgattttggagcaattgtaagtggtgtagtgcttaattttggcattcacacattgattgttagcatatagaaatgggattgatttttatgtgatcttgctaaactttatgcatttttaaaattcctttggatttcctatgtagatatttatgtcctgaaaacaggaatgtatttatcctttcaaatcaatatgctttttattttgttatttatgaccacttcattaaaatataattcacatgccatacacttcacccatttaaaatgtataattaggccaggtgtggtggctcacgtctgtaatcccagcagtttgggaggccaaggccctcagatcttgagcccaggagttcaagaccaccctgggcaacaggcaaaaccctgtctctattttttaaaatacaagaattagccgcagtggcacgcacctgtcgtcccagcaacccaggaggctgaggtaggaggatcacttaagcctgggaagtcaagcctgcagtgaaccatgatagcaccactgcagtccagcctgggcgacagagtgagaccccatctcgaaaacaaaaatgtataattcagtggtttttagtctctttgcagatacatgcaaccatcaccacaatttgcacattttctaagcctcatatactgatgtgatattttggtgttttgtgactggcttcatttacttagcatattgttttcatgtttcattcatgtcgcatgtatgagtattcattcctttatttggctgaataatattccattatagtttgtgccacattttgtttatccattcatccattgatggacatgtggattgtttccaccttctggataatatgaactgatacagtttggatattttgtcccctccaaatctcatgaaataggatcaccagtgttggagaatggggcctgttaggaagtgtttggatcataggaacatctgtcataaatggcttggtgccatccttgtaatgagtgagttcttgctctatattagttcacttgaaagctggttgttgggaactcctgccctatctgttctgccctctctcgtcatgtgacatgcctgctccttgttcaccttctgtcatgagtaaaagcttcctaaggccttcccaggagccaagcagatgtcagtaccatgcttgtacagcctgcagaactgtgagccaaataaacttctttataaatt

SEQ ID NO: 3773 - protein, 521 aa, Homo sapiens; identical to SEQ ID NO: 435

SEQ ID NO: 3774 - DNA, 3410 bp, Homo sapiens
ttaccatctgctctcttctgcaaggctggattcagggccaaagggctctagagccacccatgttgacactgtgggccctgtggacacagtacctgaatagcagttaccctcttcagaaacaaagcaggcaccagcagagaggacgggctgtggtgcaggttccggacccagaactatgtagaaataagttcaccttcgtttacctgtatagtgggactgatggttctcataggatgttggtgtctcatgggggtacgcacacagaaggatgcctggcatttagtaagagcctgttcagaggtgctgctggtagcagcagcagcttggtcatccctaggaggcctctgcatttgggagtgggcagggcttagtgataccgggggtctttttacccatatgtcaaaagcgttcctgcaaacctttgtgcctggggtgctcctccctttgcaggcagttgagggtctggcatgcttgggtgccgcgtccctggagggtaaaggtggtggttcactgcctaacgcactgcagggactcctgcttattgcagcagttgcattcctaagaaactttcacgttgccagaaactgcgagattggtttgttagagaacagtttaggggttggagcttctctgactcaaaaacaaattattttcctggagaaaagccagtgtgttttgttttgttgtttgagacagagtctcactctgtcacccaggctggagtgcagtggcacaatctcagctcactgcagcctccaccttccaggttcaagtgatcttcccacctcagcctcccaagtaggtgggactacaggcatgtgccaccacacctggctaatttttgtaattttaataggcacagggtttcaccacgttcaccaggctagtctcgaactcctgacctcaggtgatctgcctggcccaagtttttaatacctaaaacttttaatgtcgttgcaagtaaaagtcacgaatgataacaaaactgatcttagcaagcgtaagtgccaccttctctgccatcaggtgacatccatcaggctcaactttttctctgacctcttgtattgatttgacagctttacttgcagctgaagtctacgtgcccactacccagagctgtagccaggaccatgtaaaagagtgtggtctctctttaatcaactacattaggtcaaaacttcattggggaaacttggagaatttcccttgccactctagagttcttgcttgcaagcaattgcaaatgacctcagccaccttgagcagaaatgtgctatttattgtagcctagaggatcaggctcagaggtgtacccttggatctggcctgtgcctgaggggtgctctggctctgcaggtgcttggcagccatgtcaaattcagtgcctgccctgtctatggtaggcactggcccagaagactgccacagaaacagtgactcacaggccctgttactgtgtcccaggctcagggataaatttggttacagacaccaagcgtctaggcctcgaggctgagcaaggctgtgaggagcagccaggcactggggccctgttacaatggagtggggaactgatactgtcttctctgaagagttgtagtaaatgctcatgaaacaaggttcagagaggtagcctccagctcacacacaggactgacagtgccacatcatttctcctgtgtcctttctctgcctagattgcctcggtctggcatggtaccctctcgaagctgctgggaagcctgtatgctctgggcatccccaaggcctccaaggagctgcagtcggtggagcaggaggtccgctggcgcatgcggaagctcaagtacaagcacctggccttcctggcagagtcctgtgccaccctctcacaggagcagcactcgcaggagctgctggctgagctgctcacacacctggaaaggcgttggacagaaattgaagattcccacacattagtgaccgtcatgatgaaggtgggacacctctcggagccactaatgaaccgcctggaagacaagtgcctggagttggtggagcactttggccccaatgagctgcggaaggtgctggtgatgctggcagctcagagccggcggtccgtgcccttgctgcgggccatctcctaccacctggtgcagaagcccttctctctgacgaaagatgtgctcttggacgtggcctatgcctatggcaaactcagctttcaccagacccaggtgtcccagcgcctggccaccgacctgctatccctcatgcccagcctgacttctggtgaggtggcccactgtgccaagtccttcgccttactcaagtggctcagcctgcccctgtttgaggcctttgcccagcacgtcctgaacagagcgcaggacatcaccctgccccacctgtgcagcgtacttctggcttttgcgcgtctgaacttccatccagaccaagaggatcagttcttcagcctggtacatgagaagctggggtcagagctgccaggcctggagccagccctgcaggtggacctggtgtgggccctgtgtgtgctgcagcaggcacgggaagcagagctgcaagccgtcctccaccctgaatttcacatccaatttctagggggcaagtctcagaaggatcagaacaccttccagaagctgctccacatcaacgccactgccctgctggagtaccccgagtactcgggtccccttctgcctgcctcggctgtggcccctgggccctcagcccttgacaggaaggtgacccccctgcaaaaggagctgcaggagacgctgaaggggctgctggggagcgccgacaagggcagcctcgaggtggccacgcagtatggctgggtgctggatgctgaggtgctgctggacagtgacggcgagtttctgcccgtaagggactttgtggcacctcaccttgcccagccaactgggagccagtcaccacctccagggtctaagaggctagcgttcttgcggtgggagttccccaacttcaacagccgaagcaaggacttgctgggtcgctttgttctggcccggcgacacatagtggctgcaggcttcctgatagtggacgtcccattctatgagtggctggaactcaagtctgaatggcagaaaggcgcctacctcaaggacaagatgcgcaaagcggtggctgaggagctggccaagtgacttgtgccagcagcatggactgcgtgcctctccgccggaggtctagctgtgggcggccaagaagggtcacccttgaggacaaacctctgtgcaggaccttggccagagtggggagggtggccagccactctgagggacagaacgtcctcttgtgtataataaacctttaattttggtgttggacccctggggccttcccaggcttggtcaccctctgcactgtca

SEQ ID NO: 3775 - protein, 456 aa, Homo sapiens
MRKLKYKHLAFLAESCATLSQEQHSQELLAELLTHLERRWTEIEDSHTLVTVMMKVGHLSEPLMNRLEDKCLELVEHFGPNELRKVLVMLAAQSRRSVPLLRAISYHLVQKPFSLTKDVLLDVAYAYGKLSFHQTQVSQRLATDLLSLMPSLTSGEVAHCAKSFALLKWLSLPLFEAFAQHVLNRAQDITLPHLCSVLLAFARLNFHPDQEDQFFSLVHEKLGSELPGLEPALQVDLVWALCVLQQAREAELQAVLHPEFHIQFLGGKSQKDQNTFQKLLHINATALLEYPEYSGPLLPASAVAPGPSALDRKVTPLQKELQETLKGLLGSADKGSLEVATQYGWVLDAEVLLDSDGEFLPVRDFVAPHLAQPTGSQSPPPGSKRLAFLRWEFPNFNSRSKDLLGRFVLARRHIVAAGFLIVDVPFYEWLELKSEWQKGAYLKDKMRKAVAEELAK

SEQ ID NO: 3776 - DNA, 2276 bp, Homo sapiens
tcgtttccgccggcgctccgagtgacgtagggaagcgcgccgcgcacctcatggttccggggacagttagggcggcggatggaggtcagcggtggtgctcgctgcggtttggaatcacttgctaggagtcttgtctctctgccacccaggacatcatggcagctcacctggtaaagcgatgcacgtgcctcctgagagaagctgctcgtcaggcccctgccatggctccagttggccgactgagacttgcctgggtagcccataagactctgacttcctcagccacctcacccatttcccacctcccaggttccttgatggagccggtggagaaggaacgagcatctactccctacatagagaagcaggtggaccacctcatcaagaaggccacaaggccagaggagctcctggagctacttggtggcagtcacgacttggacagcaatcaagcagcaatggtacttatccggctctctcacttgctgtctgagaagccagaagataaaggcttgctcatacaggatgcccactttcatcaacttctctgtctgctcaacagtcagattgcctcggtctggcatggtaccctctcgaagctgctgggaagcctgtatgctctgggcatccccaaggcctccaaggagctgcagtcggtggagcaggaggtccgctggcgcatgcggaagctcaagtacaagcacctggccttcctggcagagtcctgtgccaccctctcacaggagcagcactcgcaggagctgctggctgagctgctcacacacctggaaaggcgttggacagaaattgaagattcccacacattagtgaccgtcatgatgaaggtgggacacctctcggagccactaatgaaccgcctggaagacaagtgcctggagttggtggagcactttggccccaatgagctgcggaaggtgctggtgatgctggcagctcagagccggcggtccgtgcccttgctgcgggccatctcctaccacctggtgcagaagcccttctctctgacgaaagatgtgctcttggacgtggcctatgcctatggcaaactcagctttcaccagacccaggtgtcccagcgcctggccaccgacctgctatccctcatgcccagcctgacttctggtgaggtggcccactgtgccaagtccttcgccttactcaagtggctcagcctgcccctgtttgaggcctttgcccagcacgtcctgaacagagcgcaggacatcaccctgccccacctgtgcagcgtacttctggcttttgcgcgtctgaacttccatccagaccaagaggatcagttcttcagcctggtacatgagaagctggggtcagagctgccaggcctggagccagccctgcaggtggacctggtgtgggccctgtgtgtgctgcagcaggcacgggaagcagagctgcaagccgtcctccaccctgaatttcacatccaatttctagggggcaagtctcagaaggatcagaacaccttccagaagctgctccacatcaacgccactgccctgctggagtaccccgagtactcgggtccccttctgcctgcctcggctgtggcccctgggccctcagcccttgacaggaaggtgacccccctgcaaaaggagctgcaggagacgctgaaggggctgctggggagcgccgacaagggcagcctcgaggtggccacgcagtatggctgggtgctggatgctgaggtgctgctggacagtgacggcgagtttctgcccgtaagggactttgtggcacctcaccttgcccagccaactgggagccagtcaccacctccagggtctaagaggctagcgttcttgcggtgggagttccccaacttcaacagccgaagcaaggacttgctgggtcgctttgttctggcccggcgacacatagtggctgcaggcttcctgatagtggacgtcccattctatgagtggctggaactcaagtctgaatggcagaaaggcgcctacctcaaggacaagatgcgcaaagcggtggctgaggagctggccaagtgacttgtgccagcagcatggactgcgtgcctctccgccggaggtctagctgtgggcggccaagaagggtcacccttgaggacaaacctctgtgcaggaccttggccagagtggggagggtggccagccactctgagggacagaacgtcctcttgtgtataataaacctttaattttggtgttggacccctggggccttcccaggcttggtcaccctctgcactgtca

SEQ ID NO: 3777 - protein, 631 aa, Homo sapiens; identical to SEQ ID NO: 433

SEQ ID NO: 3778 - DNA, 790 bp, Homo sapiens
tagggggcaagtctcagaaggatcagaacaccttccagaagctgctccacatcaacgccactgccctgctggagtaccccgagtactcgggtccccttctgcctgcctcggctgtggcccctgggccctcagcccttgacaggaaggtgacccccctgcaaaaggagctgcaggagacgctgaaggggctgctggggagcgccgacaagggcagcctcgaggtggccacgcagtatggctgggtgctgggtgagggctccccctggttggcacagggcctggcattgcctgagtctaacgggactcttctaacccaccccgtctgcagcaagtactgacctagggagctgcagggtgtcagcctgggctccccacagtcccatctttgttcatctttcctgtgggggggtttctgagggatgtcccccaacatgttctcatcccacaccccttccccagatgctgaggtgctgctggacagtgacggcgagtttctgcccgtaagggactttgtggcacctcaccttgcccagccaactgggagccagtcaccacctccagggtctaagaggctagcgttcttgcggtgggagttccccaacttcaacagccgaagcaaggacttgctgggtcgctttgttctggcccggcgacacatagtggctgcaggcttcctgatagtggacgtgaccactctgagggacagaacgtcctcttgtgtataataaacctttaattttggtgttggacccctggggccttcccaggcttggtcaccctctgcactgtc

SEQ ID NO: 3779 - protein, 101 aa, Homo sapiens
MSPNMFSSHTPSPDAEVLLDSDGEFLPVRDFVAPHLAQPTGSQSPPPGSKRLAFLRWEFPNFNSRSKDLLGRFVLARRHIVAAGFLIVDVTTLRDRTSSCV

SEQ ID NO: 3780 - DNA, 1945 bp, Homo sapiens
tcgtttccgccggcgctccgagtgacgtagggaagcgcgccgcgcacctcatggttccggggacagttagggcggcggatggaggtcagcggtggtgctcgctgcggtttggaatcacttgctaggagtcttgtctctctgccacccaggacatcatggcagctcacctggtaaagcgatgcacgtgcctcctgagagaagctgctcgtcaggcccctgccatggctccagttggccgactgagacttgcctgggtagcccataagactctgacttcctcagccacctcacccatttcccacctcccaggttccttgatggagccggtggagaaggaacgagcatctactccctacatagagaagcaggtggaccacctcatcaagaaggccacaaggccagaggagctcctggagctacttggtggcagtcacgacttggacagcaatcaagcagcaatggtacttatccggctctctcacttgctgtctgagaagccagaagataaaggcttgctcatacaggatgcccactttcatcaacttctctgtctgctcaacagtcagattgcctcggtctggcatggtaccctctcgaagctgctgggaagcctgtatgctctgggcatccccaaggcctccaaggagctgcagtcggtggagcaggaggtccgctggcgcatgcggaagctcaagtacaagcacctggccttcctggcagagtcctgtgccaccctctcacaggagcagcactcgcaggagctgctggctgagctgctcacacacctggaaaggcgttggacagaaattgaagattcccacacattagtgaccgtcatgatgaaggtgggacacctctcggagccactaatgaaccgcctggaagacaagcacgtcctgaacagagcgcaggacatcaccctgccccacctgtgcagcgtacttctggcttttgcgcgtctgaacttccatccagaccaagaggatcagttcttcagcctggtacatgagaagctggggtcagagctgccaggcctggagccagccctgcaggtggacctggtgtgggccctgtgtgtgctgcagcaggcacgggaagcagagctgcaagccgtcctccaccctgaatttcacatccaatttctagggggcaagtctcagaaggatcagaacaccttccagaagctgctccacatcaacgccactgccctgctggagtaccccgagtactcgggtccccttctgcctgcctcggctgtggcccctgggccctcagcccttgacaggaaggtgacccccctgcaaaaggagctgcaggagacgctgaaggggctgctggggagcgccgacaagggcagcctcgaggtggccacgcagtatggctgggtgctggatgctgaggtgctgctggacagtgacggcgagtttctgcccgtaagggactttgtggcacctcaccttgcccagccaactgggagccagtcaccacctccagggtctaagaggctagcgttcttgcggtgggagttccccaacttcaacagccgaagcaaggacttgctgggtcgctttgttctggcccggcgacacatagtggctgcaggcttcctgatagtggacgtcccattctatgagtggctggaactcaagtctgaatggcagaaaggcgcctacctcaaggacaagatgcgcaaagcggtggctgaggagctggccaagtgacttgtgccagcagcatggactgcgtgcctctccgccggaggtctagctgtgggcggccaagaagggtcacccttgaggacaaacctctgtgcaggaccttggccagagtggggagggtggccagccactctgagggacagaacgtcctcttgtgtataataaacctttaattttggtgttggacccctggggccttcccaggcttggtcaccctctgcactgtc

SEQ ID NO: 3781 - protein, 521 aa, Homo sapiens; identical to SEQ ID NO: 435

SEQ ID NO: 3782 - DNA, 1136 bp, Homo sapiens
ggggagccttctttatgaagaccttaggacagccacagaggccagcaggccaggtgtgatcccaggctccctgggattccatcaggggtttgtctggcacagtcctgagaacaattagccaggggctggggagtgctgcttcacctcttggatgctctcatctctcagaggaccagagattcctccttccttgtcccaggtgctcacttggagacattatgggagaagggatcttgttccctgccagtaggttggttgtagtaaacctaatcaaatgccagcattcagcagcactcttctgctgttcagagtggtcttggggcatgaggaagattcctggtaccttcaagcccaggattgctccaggcctcaccaagggccagggttctgcctcttgttacctagtagcctcctctggcctcatcccaaccaggccaagaccacatcatggattgtgtctcacccatggctatttgcagcccctaaggagagcctgctttctccaccacactctatccttgcccaggtacatgagaagctggggtcagagctgccaggcctggagccagccctgcaggtggacctggtgtgggccctgtgtgtgctgcagcaggcacgggaagcagagctgcaagccgtcctccaccctgaatttcacatccaatttctagggggcaagtctcagaaggatcagaacaccttccagaagctgctccacatcaacgccactgccctgctggagtaccccgagtactcgggtccccttctgcctgcctcggctgtggcccctgggccctcagcccttgacaggaaggtgacccccctgcaaaaggagctgcaggagacgctgaaggggctgctggggagcgccgacaagggcagcctcgaggtggccacgcagtatggctgggtgctgggtgagggctccccctggttggcacagggcctggcattgcctgagtctaacgggactcttctaacccaccccgtctgcagcaagtactgacctagggagctgcagggtgtcagcctgggctccccacagtcccatctttgttcatctttcctgtgggggggtttctgagggatgtcccccaacatgttctcatcccacaccccttccccagatgctgagg

SEQ ID NO: 3783 - protein, 243 aa, Homo sapiens
MPAFSSTLLLFRVVLGHEEDSWYLQAQDCSRPHQGPGFCLLLPSSLLWPHPNQAKTTSWIVSHPWLFAAPKESLLSPPHSILAQVHEKLGSELPGLEPALQVDLVWALCVLQQAREAELQAVLHPEFHIQFLGGKSQKDQNTFQKLLHINATALLEYPEYSGPLLPASAVAPGPSALDRKVTPLQKELQETLKGLLGSADKGSLEVATQYGWVLGEGSPWLAQGLALPESNGTLLTHPVCSKY

SEQ ID NO: 3784 - DNA, 666 bp, Homo sapiens
ggggagcgctggccctgcagatgcctgcagccgtgtcaaattcagtacctgtcctatgcatggtaggcactggcccagaaggctgccacagaaacactgtgactcatgggccctgttcctgtgtcccaggctcagggataaatttggttacagacatcaaatatctagacctcgaggctgaggtggggtggagctgctgggtgattgctgactctctccagctaaaccctgtgatctgctctgtcctgaaggcaaactcagctttcaccagacccaggtgtcccagcgcctggccaccgacctgctatccctcatgcccagcctgacttctggtgaggtggcccactgtgccaagtccttcgccttactcaagtggctcagcctgcccctgtttgaggcctttgcccagcacgtcctgaacagagcgcaggacatcaccctgccccacctgtgcagcgtacttctggcttttgcgcgtctgaacttccatccagaccaagaggatcagttcttcagcctggtacatgagaagctggggtcagagctgccaggcctggagccagccctgcaggtggacctggtgtgggccctgtgtgtgctgcagcaggcacgggaagcagagctgcaagccgtcctccaccctgaatttcacatccaatttctagg

SEQ ID NO: 3785 - protein, 116 aa, Homo sapiens
MPSLTSGEVAHCAKSFALLKWLSLPLFEAFAQHVLNRAQDITLPHLCSVLLAFARLNFHPDQEDQFFSLVHEKLGSELPGLEPALQVDLVWALCVLQQAREAELQAVLHPEFHIQF

SEQ ID NO: 3786 - DNA, 950 bp, Homo sapiens
tctgctgggaaccattgccttagtcgggaaagtaaagccagtctgaaaatgctcacttgtgggggcaaatacatatttcttgcattttggcttattttgaaagggctgctattcagttctcaaaaaagtgtttgagaactgtttcctctgttctttcactgaccattataagtgcttccatccattttggggtagctgtagcaggtagcagcatggctgatgagactgagaatccactgagaactgtctactgaatcactgatccccctcgcaaagtggaactgtacagaaagatgacacctgcagttacgtttatgtgtgaccagtctaaactaagtttactggttggagaatatttctaaatcccttatcagaaagaagccagcaggccaggtgtgatcccaggctccctgggattccatcaggggtttgtctggcacagtcctgagaacaattagccaggggctggggagtgctgcttcacctcttggatgctctcatctctcagaggaccagagattcctccttccttgtcccaggtgctcacttggagacattatgggagaagggatcttgttccctgccagtaggttggttgtagtaaacctaatcaaatgccagcattcagcagcactcttctgctgttcagagtggtcttggggcatgaggaagattcctggtaccttcaagcccaggattgctccaggcctcaccaagggccagggttctgcctcttgttacctagtagcctcctctggcctcatcccaaccaggccaagaccacatcatggattgtgtctcacccatggctatttgcagcccctaaggagagcctgctttctccaccacactctatccttgcccaggtacatgagaagctggggtcagagctgccaggcctggagccagccctgcaggtggacctggtgtgggccctgtgtgtgctgcag

SEQ ID NO: 3787 - protein, 129 aa, Homo sapiens
MGEGILFPASRLVVVNLIKCQHSAALFCCSEWSWGMRKIPGTFKPRIAPGLTKGQGSASCYLVASSGLIPTRPRPHHGLCLTHGYLQPLRRACFLHHTLSLPRYMRSWGQSCQAWSQPCRWTWCGPCVC

SEQ ID NO: 3788 - DNA, 624 bp, Homo sapiens
gaagcccttctctctgacgaaagatgtgctcttggacgtggcctatgcctatggcaaactcagctttcaccagacccaggtgtcccagcgcctggccaccgacctgctatccctcatgcccagcctgacttctggtgaggtggcccactgtgccaagtccttcgccttactcaagtggctcagcctgcccctgtttgaggcctttgcccagcacgtcctgaacagagcgcaggacatcaccctgccccacctgtgcagcgtacttctggcttttgcgcgtctgaacttccatccagaccaagaggatcagttcttcagcctggtagggcctctgggctcccactgctcgacctttatcctccccttcagctaatggctcatgaaccgtcctcccaagatcagctcgggctaggtggaggcgggaggggccactatgtgtggcatgggagggcagggggaactgattggagccaggcatcctagggattactgagaacacatgaaatcctgctgtctggttgactgccctgccaggcagcgctggggggtcctgcctctggtgctccttttaatgccctgttgatgctcagaagctccagtgggccttcgtgctatgtgcaccag

SEQ ID NO: 3789 - protein, 85 aa, Homo sapiens
MPSLTSGEVAHCAKSFALLKWLSLPLFEAFAQHVLNRAQDITLPHLCSVLLAFARLNFHPDQEDQFFSLVGPLGSHCSTFILPFS

SEQ ID NO: 3790 - DNA, 134 bp, Homo sapiens; identical to SEQ ID NO: 438

SEQ ID NO: 3791 - protein, 33 aa, Homo sapiens
MHGRHWPRRLPQKHCDSWALFLCPRLRDKFGYR

SEQ ID NO: 3792 - DNA, 940 bp, Homo sapiens
ggtttggaatcacttgctaggagtcttgtctctctgccacccaggacatcatggcagctcacctggtaaagcgatgcacgtgcctcctgagagaagctgctcgtcaggcccctgccatggctccagttggccgactgagacttgcctgggtagcccataagactctgacttcctcagccacctcacccatttcccacctcccaggttccttgatggagccggtggagaaggaacgagcatctactccctacatagagaagcaggtggaccacctcatcaagaaggccacaaggccagaggagctcctggagctacttggtggcagtcacgacttggacagcaatcaagcagcaatggtacttatccggctctctcacttgctgtctgagaagccagaagataaaggcttgctcatacaggatgcccactttcatcaacttctctgtctgctcaacagtcagattgcctcggtctggcatggtaccctctcgaagctgctgggaagcctgtatgctctgggcatccccaaggcctccaaggagctgcagtcggtggagcaggaggtccgctggcgcatgcggaagctcaagtacaagcacctggccttcctggcagagtcctgtgccaccctctcacaggagcagcactcgcaggagctgctggctgagctgctcacacacctggaaaggcgttggacagaaattgaagattcccacacattagtgaccgtcatgatgaaggtgggacacctctcggagccactaatgaaccgcctggaagacaaggtactgggcctgaaagcaggtggcacccagcctgcctcccctgggctttgggcttgttctttgggtgacagttgtctgcagaggggtgcgttgtgtgcactgggatcagagccctgggagcttctgtctggagcctcaggcatcacatggggcag

SEQ ID NO: 3793 - protein, 295 aa, Homo sapiens
MAAHLVKRCTCLLREAARQAPAMAPVGRLRLAWVAHKTLTSSATSPISHLPGSLMEPVEKERASTPYIEKQVDHLIKKATRPEELLELLGGSHDLDSNQAAMVLIRLSHLLSEKPEDKGLLIQDAHFHQLLCLLNSQIASVWHGTLSKLLGSLYALGIPKASKELQSVEQEVRWRMRKLKYKHLAFLAESCATLSQEQHSQELLAELLTHLERRWTEIEDSHTLVTVMMKVGHLSEPLMNRLEDKVLGLKAGGTQPASPGLWACSLGDSCLQRGALCALGSEPWELLSGASGITW

SEQ ID NO: 3794 - DNA, 779 bp, Homo sapiens
aagcgcgccgcgcacctcatggttccggggacagttagggcggcggatggaggtcagcggtggtgctcgctgcggtttggaatcacttgctaggagtcttgtctctctgccacccaggacatcatggcagctcacctggtaaagcgatgcacgtgcctcctgagagaagctgctcgtcaggcccctgccatggctccagttggccgactgagacttgcctgggtagcccataagactctgacttcctcagccacctcacccatttcccacctcccaggttccttgatggagccggtggagaaggaacgagcatctactccctacatagagaagcaggtggaccacctcatcaagaaggccacaaggccagaggagctcctggagctacttggtggcagtcacgacttggacagcaatcaagcagcaatggtacttatccggctctctcacttgctgtctgagaagccagaagataaaggcttgctcatacaggatgcccactgtatgctctgggcatccccaaggcctccaaggagctgcagtcggtggagcaggaggtccgctggcgcatgcggaagctcaagtacaagcacctggccttcctggcagagtcctgtgccaccctctcacaggagcagcactcgcaggagctgctggctgagctgctcacacacctggaaaggcgttggacagaaattgaagattcccacacattagtgaccgtcatgatgaaggtgggacacctctcggagccactaatgaaccgcctggaagacaag

SEQ ID NO: 3795 - protein, 197 aa, Homo sapiens
MAAHLVKRCTCLLREAARQAPAMAPVGRLRLAWVAHKTLTSSATSPISHLPGSLMEPVEKERASTPYIEKQVDHLIKKATRPEELLELLGGSHDLDSNQAAMVLIRLSHLLSEKPEDKGLLIQDAHCMLWASPRPPRSCSRWSRRSAGACGSSSTSTWPSWQSPVPPSHRSSTRRSCWLSCSHTWKGVGQKLKIPTH

SEQ ID NO: 3796 - DNA, 600 bp, Homo sapiens
tcgtttccgccggcgctccgagtgacgtagggaagcgcgccgcgcacctcatggttccggggacagttagggcggcggatggaggtcagcggtggtgctcgctgcggtttggaatcacttgctaggagtcttgtctctctgccacccaggacatcatggcagctcacctggtaaagcgatgcacgtgcctcctgagagaagctgctcgtcaggcccctgccatggctccagttggccgactgagacttgcctgggtagcccataagactctgacttcctcagccacctcacccatttcccacctcccaggttccttgatggagccggtggagaaggaacgagcatctactccctacatagagaagcaggtggaccacctcatcaagaaggccacaaggccagaggagctcctggagctacttggtggcagtcacgacttggacagcaatcaagcagcaatggtacttatccggctctctcacttgctgtctgagaagccagaagataaaggcttgctcatacaggatgcccactttcatcaacttctctgtctgctcaacagtcagattgcctcggtctggcatggtaccctctcgaagc

SEQ ID NO: 3797 - protein, 147 aa, Homo sapiens
MAAHLVKRCTCLLREAARQAPAMAPVGRLRLAWVAHKTLTSSATSPISHLPGSLMEPVEKERASTPYIEKQVDHLIKKATRPEELLELLGGSHDLDSNQAAMVLIRLSHLLSEKPEDKGLLIQDAHFHQLLCLLNSQIASVWHGTLS

SEQ ID NO: 3798 - DNA, 594 bp, Homo sapiens
tcgtttccgccggcgctccgagtgacgtagggaagcgcgccgcgcacctcatggttccggggacagttagggcggcggatggaggtcagcggtggtgctcgctgcggtttggaatcacttgctaggagtcttgtctctctgccacccaggacatcatggcagctcacctggtaaagcgatgcacgtgcctcctgagagaagctgctcgtcaggcccctgccatggctccagttggccgactgagacttgcctgggtagcccataagactctgacttcctcagccacctcacccatttcccacctcccaggttccttgatggagccggtggagaaggaacgagcatctactccctacatagagaagcaggtggaccacctcatcaagaaggccacaaggccagaggagctcctggagctacttggtggcagtcacgacttggacagcaatcaagcagcaatggtacttatccggctctctcacttgctgtctgagaagccagaagataaaggcttgctcatacaggatgcccactttcatcaacttctctgtctgctcaacagtcagaaagtcttatgatgcaagactgaacatt

SEQ ID NO: 3799 - protein, 140 aa, Homo sapiens
MAAHLVKRCTCLLREAARQAPAMAPVGRLRLAWVAHKTLTSSATSPISHLPGSLMEPVEKERASTPYIEKQVDHLIKKATRPEELLELLGGSHDLDSNQAAMVLIRLSHLLSEKPEDKGLLIQDAHFHQLLCLLNSQKVL

SEQ ID NO: 3800 - DNA, 769 bp, Homo sapiens
agttagggcggcggatggaggtcagcggtggtgctcgctgcgtaggtcttgtggcacggggagaaggggcggctgatcgtgggtttcgagtgcacaacacaggcgtggctgggaaggtcctgggatgcggtggaactggggagcaggctgggacgcggtgggatgccgtgggcctggccgtctgctcgttccgtgctggcttgccagtgcgcacgcttcctctctagcccgcgcggccaggcctggaagacgccgcccctgttgaccgtccatgaccccagcgagccagttttcgtgacttagtgcaaggtttggaatcacttgctaggagtcttgtctctctgccacccaggacatcatggcagctcacctggtaaagcgatgcacgtgcctcctgagagaagctgctcgtcaggcccctgccatggctccagttggccgactgagacttgcctgggtagcccataagactctgacttcctcagccacctcacccatttcccacctcccaggttccttgatggagccggtggagaaggaacgagcatctactccctacatagagaagcaggtggaccacctcatcaagaaggccacaaggccagaggagctcctggagctacttggtggcagtcacgacttggacagcaatcaagcagcaatggtacttatccggctctctcacttgctgtctgagaagccagaagataaaggcttgctcatacaggatgcccactttcatcaacttctctgtctgctcaacagtcag

SEQ ID NO: 3801 - protein, 136 aa, Homo sapiens
MAAHLVKRCTCLLREAARQAPAMAPVGRLRLAWVAHKTLTSSATSPISHLPGSLMEPVEKERASTPYIEKQVDHLIKKATRPEELLELLGGSHDLDSNQAAMVLIRLSHLLSEKPEDKGLLIQDAHFHQLLCLLNS

SEQ ID NO: 3802 - DNA, 649 bp, Homo sapiens
atggttccggggacagttagggcggcggatggaggtcagcggtggtgctcgctgctggagttagactaagctttttacagctgctttaatcccctcatataaaaagaaaatgtgctggccatataccaagttccaggaagtggagaaagatcaaacgtacattctgctttggcagaaatgaggcctagggtttggaatcacttgctaggagtcttgtctctctgccacccaggacatcatggcagctcacctggtaaagcgatgcacgtgcctcctgagagaagctgctcgtcaggcccctgccatggctccagttggccgactgagacttgcctgggtagcccataagactctgacttcctcagccacctcacccatttcccacctcccaggttccttgatggagccggtggagaaggaacgagcatctactccctacatagagaagcaggtggaccacctcatcaagaaggccacaaggccagaggagctcctggagctacttggtggcagtcacgacttggacagcaatcaagcagcaatggtacttatccggctctctcacttgctgtctgagaagccagaagataaaggcttgctcatacaggatgcccactttcatcaacttctctgtctgctcaacagtcag

SEQ ID NO: 3803 - protein, 56 aa, Homo sapiens
MRPRVWNHLLGVLSLCHPGHHGSSPGKAMHVPPERSCSSGPCHGSSWPTETCLGSP

SEQ ID NO: 3804 - DNA, 579 bp, Homo sapiens
ctgcttcctctcccgagggctgtcctggcagaggcccccctcgctctttctggcgggaacagggccagcagcgaaagaacagtcgcagagggaaagcgggaaagagatgggggaaagtgtgtgtgtgtgagtgtgtgcttgtgtgcatgtgtgtgcgtgtgtgtgtcaaggaaaaaagctcgcagtccagcagcccgggcctgggaggcttgtgagccgggcctttcgtaattgtcccctccccgcggccccctcccccaggcctcccccctctcccgccctcccgcccgccctctctccctccctctttccctcacagccgacgaggcaacaattaggctttggggataaaacgaggtgcggagagcgggctggggcatttctccccgagatggcgggtctgacggcggcggccccgcggcccggagtcctcctgctcctgctgtccatcctccacccctctcggcctggaggggtccctggggccattcctggtggagttcctggaggagtcttttatccaggtaacgtacatgaaacttccacacacccaggtcatgcggatgatgctgatgtcca

SEQ ID NO: 3805 - protein, 61 aa, Homo sapiens
MAGLTAAAPRPGVLLLLLSILHPSRPGGVPGAIPGGVPGGVFYPGNVHETSTHPGHADDAD

SEQ ID NO: 3806 - DNA, 932 bp, Homo sapiens
gaaagaacagtcgcagagggaaagcgggaaagagatgggggaaagtgtgtgtgtgtgagtgtgtgcttgtgtgcatgtgtgtgcgtgtgtgtgtcaaggaaaaaagctcgcagtccagcagcccgggcctgggaggcttgtgagccgggcctttcgtaattgtcccctccccgcggccccctcccccaggcctcccccctctcccgccctcccgcccgccctctctccctccctctttccctcacagccgacgaggcaacaattaggctttggggataaaacgaggtgcggagagcgggctggggcatttctccccgagatggcgggtctgacggcggcggccccgcggcccggagtcctcctgctcctgctgtccatcctccacccctctcggcctggaggggtccctggggccattcctggtggagttcctggaggagtcttttatccaggggctggtctcggagcccttggaggaggagcgctggggcctggaggcaaacctcttaagccaggtaagacccaaggcctcggagcattgagagacagcgagggagctggggagggaggagcctacccagctgggaatgggacaaggaaactaggaacaggacaaggaagccaacgggcaggaggaaggagggaggtgtggacaccgattagcctcccaaggatgagtaggccggggccaggtcccagggcttccaggaacaagaggctggaagcagctccatgtcctccctgtgtgagggcgtctagcatctaccctacatgtgcatgtgtgttcacccagctgtccagagactcctctctgcaaaggagaggctgttagaggcaacatcagggattgctccggttccagtggcctccaagccttacatgaccctcgggagctcagacacagatcctcagccccagacttcccctgagtg

SEQ ID NO: 3807 - protein, 170 aa, Homo sapiens [sequence omitted]

SEQ ID NO: 3808 - DNA, 887 bp, Homo sapiens
gaaagaacagtcgcagagggaaagcgggaaagagatgggggaaagtgtgtgtgtgtgagtgtgtgcttgtgtgcatgtgtgtgcgtgtgtgtgtcaaggaaaaaagctcgcagtccagcagcccgggcctgggaggcttgtgagccgggcctttcgtaattgtcccctccccgcggccccctcccccaggcctcccccctctcccgccctcccgcccgccctctctccctccctctttccctcacagccgacgaggcaacaattaggctttggggataaaacgaggtgcggagagcgggctggggcatttctccccgagatggcgggtctgacggcggcggccccgcggcccggagtcctcctgctcctgctgtccatcctccacccctctcggcctggaggggtccctggggccattcctggtggagttcctggaggagtcttttatccaggggctggtctcggagcccttggaggaggagcgctggggcctggaggcaaacctcttaagccagttcccggagggcttgcgggtgctggccttggggcagggctcggcgccttccccgcagttacctttccgggggctctggtgcctggtggagtggctgacgctgctgcagcctataaagctgctaaggctggcgctgggcttggtggtgtcccaggagttggtggcttaggagtgtctgcaggtacgatggctatccccgaactccctgggtcaaagttgcaggcctgggtggagccaactctgatgcagccccttctgtgccaggtgcggtggttcctcagcctggagccggagtgaagcctgggaaagtgccgggtcagtgcggaatccctggggctggaggacagagggcagggaggggcagagggcaggg

SEQ ID NO: 3809 - protein, 163 aa, Homo sapiens
MAGLTAAAPRPGVLLLLLSILHPSRPGGVPGAIPGGVPGGVFYPGAGLGALGGGALGPGGKPLKPVPGGLAGAGLGAGLGAFPAVTFPGALVPGGVADAAAAYKAAKAGAGLGGVPGVGGLGVSAGTMAIPELPGSKLQAWVEPTLMQPLLCQVRWFLSLEPE

SEQ ID NO: 3810 - DNA, 862 bp, Homo sapiens
gaaagaacagtcgcagagggaaagcgggaaagagatgggggaaagtgtgtgtgtgtgagtgtgtgcttgtgtgcatgtgtgtgcgtgtgtgtgtcaaggaaaaaagctcgcagtccagcagcccgggcctgggaggcttgtgagccgggcctttcgtaattgtcccctccccgcggccccctcccccaggcctcccccctctcccgccctcccgcccgccctctctccctccctctttccctcacagccgacgaggcaacaattaggctttggggataaaacgaggtgcggagagcgggctggggcatttctccccgagatggcgggtctgacggcggcggccccgcggcccggagtcctcctgctcctgctgtccatcctccacccctctcggcctggaggggtccctggggccattcctggtggagttcctggaggagtcttttatccaggggctggtctcggagcccttggaggaggagcgctggggcctggaggcaaacctcttaagccagttcccggagggcttgcgggtgctggccttggggcagggctcggcgccttccccgcagttacctttccgggggctctggtgcctggtggagtggctgacgctgctgcagcctataaagctgctaaggctggcgctgggcttggtggtgtcccaggagttggtggcttaggagtgtctgcaggtgcggtggttcctcagcctggagccggagtgaagcctgggaaagtgccgggtcagtgcggaatccctggggctggaggacagagggcagggaggggcagagggcagggaggaacagagccctctccatgccactgcacttggggaggaagggcagggcctggcttc

SEQ ID NO: 3811 - protein, 180 aa, Homo sapiens
MAGLTAAAPRPGVLLLLLSILHPSRPGGVPGAIPGGVPGGVFYPGAGLGALGGGALGPGGKPLKPVPGGLAGAGLGAGLGAFPAVTFPGALVPGGVADAAAAYKAAKAGAGLGGVPGVGGLGVSAGAVVPQPGAGVKPGKVPGQCGIPGAGGQRAGRGRGQGGTEPSPCHCTWGGRAGPG

SEQ ID NO: 3812 - DNA, 839 bp, Homo sapiens
gaaagaacagtcgcagagggaaagcgggaaagagatgggggaaagtgtgtgtgtgtgagtgtgtgcttgtgtgcatgtgtgtgcgtgtgtgtgtcaaggaaaaaagctcgcagtccagcagcccgggcctgggaggcttgtgagccgggcctttcgtaattgtcccctccccgcggccccctcccccaggcctcccccctctcccgccctcccgcccgccctctctccctccctctttccctcacagccgacgaggcaacaattaggctttggggataaaacgaggtgcggagagcgggctggggcatttctccccgagatggcgggtctgacggcggcggccccgcggcccggagtcctcctgctcctgctgtccatcctccacccctctcggcctggaggggtccctggggccattcctggtggagttcctggaggagtcttttatccaggggctggtctcggagcccttggaggaggagcgctggggcctggaggcaaacctcttaagccagttcccggagggcttgcgggtgctggccttggggcagggctcggcgccttccccgcagttacctttccgggggctctggtgcctggtggagtggctgacgctgctgcagcctataaagctgctaaggctggcgctgggcttggtggtgtcccaggagttggtggcttaggagtgtctgcaggtgcggtggttcctcagcctggagccggagtgaagcctgggaaagtgccgggtgtggggctgccaggtgtatacccaggtggcgtgctcccaggtgagagcaaggagggaaacagggactctataggaagaaagcagccaggac

SEQ ID NO: 3813 - protein, 172 aa, Homo sapiens
MAGLTAAAPRPGVLLLLLSILHPSRPGGVPGAIPGGVPGGVFYPGAGLGALGGGALGPGGKPLKPVPGGLAGAGLGAGLGAFPAVTFPGALVPGGVADAAAAYKAAKAGAGLGGVPGVGGLGVSAGAVVPQPGAGVKPGKVPGVGLPGVYPGGVLPGESKEGNRDSIGRKQP

SEQ ID NO: 3814 - DNA, 892 bp, Homo sapiens
gaaagaacagtcgcagagggaaagcgggaaagagatgggggaaagtgtgtgtgtgtgagtgtgtgcttgtgtgcatgtgtgtgcgtgtgtgtgtcaaggaaaaaagctcgcagtccagcagcccgggcctgggaggcttgtgagccgggcctttcgtaattgtcccctccccgcggccccctcccccaggcctcccccctctcccgccctcccgcccgccctctctccctccctctttccctcacagccgacgaggcaacaattaggctttggggataaaacgaggtgcggagagcgggctggggcatttctccccgagatggcgggtctgacggcggcggccccgcggcccggagtcctcctgctcctgctgtccatcctccacccctctcggcctggaggggtccctggggccattcctggtggagttcctggaggagtcttttatccaggggctggtctcggagcccttggaggaggagcgctggggcctggaggcaaacctcttaagccagttcccggagggcttgcgggtgctggccttggggcagggctcggcgccttccccgcagttacctttccgggggctctggtgcctggtggagtggctgacgctgctgcagcctataaagctgctaaggctggcgctgggcttggtggtgtcccaggagttggtggcttaggagtgtctgcaggtgcggtggttcctcagcctggagccggagtgaagcctgggaaagtgccgggtgtggggctgccaggtgtatacccaggtggcgtgctcccaggagctcggttccccggtgtgggggtgctccctggagttcccactggagcaggagttaagcccaaggctccaggtatgcagctgtctggacagagggctgatggc

SEQ ID NO: 3815 - protein, 190 aa, Homo sapiens
MAGLTAAAPRPGVLLLLLSILHPSRPGGVPGAIPGGVPGGVFYPGAGLGALGGGALGPGGKPLKPVPGGLAGAGLGAGLGAFPAVTFPGALVPGGVADAAAAYKAAKAGAGLGGVPGVGGLGVSAGAVVPQPGAGVKPGKVPGVGLPGVYPGGVLPGARFPGVGVLPGVPTGAGVKPKAPGMQLSGQRAD
